United States Patent Application Publication US 2008/0034453 A1 - sequence listing, part 10

SEQ ID NO: 81465 - DNA, 416 bp, Zea mays
aaataaggtcccgcccttttccgacattcacaggggggacaggaaatcagcggccatggcctcgattccggcgacgaccttcgccgtcatcttatccgtcctcttctgtgccgcggctggcaccgccgtcgacaacgacctccccgactacgtcatccagggccgcgtctattgcgacacctgccgcgccgggttcgtgaccaatgtcaccgagtacatcgcgggcgccaaggtgaggctggagtgcaagcacttcggcaccggcaagctcgagcgctccatcgacggggtgaccgacgggaacggcacgtacacgatcgagctcaaggacagccacgaggaggacatctgcgaggtggtcttggtggagagcccgcgcaaggactgcgaccaggtgcaggcggacagggaccgcg

SEQ ID NO: 81466 - DNA, 414 bp, Zea mays
aggacgcgtgggtttcgttatcctcctcttacattacaggtcatagctaagcaggtctgacaggatgtcgtggcagacatacgtcgatgagcacctcatgtgcgagatcgagggccaccacctgacctccgctgccatagtcggccacgacggcgccgtttgggcccagagcaccgcattcccacagttcaagacagaggagatgaccaacatcatgaaggacttcgacgagcccgggttcctggccccgaccggcctcttcctcggccccaccaagtacatggtcatccaaggcgagcccggcgctgtcatccgcgggaagaagggatctggaggcataactgtgaagaagacagggcaagcgatggtggtcggcatctacgacgagcccatgacccccggccagtgcaacat

SEQ ID NO: 81467 - DNA, 392 bp, Zea mays
  unsure (1)..(392): unsure at all n locations
accacgcgtccgcccacgcgtccgctcgtcgtcgtctcactcaccccgccttcacgcctccctcaccaaataaggtcccgcccttttccgacattcacaagggggacangaaatcagcggccatggcctcgattccggcgacgaccttcgccgtcatcttatccgtcctcttctgtgccgcngctggcaccgccgtcgacaacgacctccccgactacgtcatccaaggccgcgtctattgcgacacctgccgcgccgggttcgtgaccaatgtcaccgagtacatcgcgggcgccaaggtgaggctggagtgcaagcacttcggcaccggcaagctcgagcgctccatcgacggngtgaccgacgggaacggcacgtacacgatcgagctc

SEQ ID NO: 81468 - DNA, 396 bp, Zea mays
  unsure (1)..(396): unsure at all n locations
aaagtacatcgcgggcgccaaggtgaggctggagtgcaggcacttcggcaccggcaagctcgagcgcgccatcgacggggtcaccgacgcgaccggcacctacacgatcgagctcaaggacagccacgaggaggacatctgccangtggtgctggtggccagcccgcgcaaggactgcgacgaggtccaggcgctcagggaccgcgccggcgtcctgctcaccaggaacgtcggcatctccgacagcctgcgccccgccaacccgctcggctacttcaaggacgtgccgctccccgtctgcgccgcgctgctcaagcagctggactcggacgacgacgacgaccagtaaactgtaccacggcggcgtcgcggacaggctgcacaaaactataacga

SEQ ID NO: 81469 - DNA, 354 bp, Zea mays
acggggcactgctcacgtcgcgacgaggatctcctcgagggagacggagagctcgaggtggtggcgcacggaggccgggctacgcgtgggcgtgggcgtggtctcggcgcggcacatcgggcagctggtgctcccgcgcagccacgtgtcgatgcagtcggcgtggaagtagtgcatgcactcggggagcacccgcacgacctcgccgtcgtcgaagtcgggcaggcacaccgggcacgtcgactcgttccaggcctcctccttgcggtaccggcacaccaccgccgcgcccaccaggacgacgcatgcatggcgcggcgcgctagatgtggcccgcgacgatggtggcgggct

SEQ ID NO: 81470 - DNA, 389 bp, Zea mays
accacgcgtccggtcctctcctctgtccctctacggtgcttctgctcgccggcccaaaatcgcctcatcgaccacgcccccttccaggctcccgtctccatgggtctcctctcaaacaggattgggagggagagcctcaaggcgggggatcatatctactcctggagggcggcgtgggtctacgcgcatcacggaatatatgtgggcgatgataaggtgatccatttcacaagaggaagaggacaggaggtcggaacaggaactgtcgtcgatattattcttgtgagttccaccccaaaacgaagcaacacgccttgcccggtgtgcaccgacgaaaccagcgacagcagcacagagacgaacggcgtggtatcctcctgcctcagctg

SEQ ID NO: 81471 - DNA, 421 bp, Zea mays
aacacgcgtccgcccacgcgtccgcaaccactccctccccggggacgccttcgacgccgtggtgcgcgccaagctggccctggagctggagtgccccggggtggtgtcctgcgccgacatcctcgcactggcgtcgggcgtgctgattaccatgaccggcgggccccggtacccggttccgctggggcgcagggactcgctgtcgtcgtcgcccacggcgcccgacgtggagctgccgcacgccaacttcaccgtggaccgcctcatccagatgttcggcgccaaggggttcacggtgcaggagctggtggcgctgtccggcgcccacacgctgggcttctcccactgcaaggagttcgccgaccgcctctacaacttccgcaaccagggcgggaagccggagcagttcgaccccagcatg

SEQ ID NO: 81472 - DNA, 382 bp, Zea mays
acagcgcctcatcttcgccggcaagcagctggagggatggcgcaacctggcgggttacaacaaccaaaaagggaacaacccccaactggtggtccggctcaaggggttgcagccaaatttttgtaaaaacattgacgggcaaaactataaccttggaggtggagacctctgacaccattgacaatgtgaaggccaagatccaggacaaggagggcattcccccagaccagcagcgtctgatctttgcgggcaagcagctggaggatggccgcactctcgcggactacaacatccagaaggagagcacccttcaccttgttctccgcctcaagggtggtatgcagatctttgtgaagaccctgactggaaaaaccataaccct

SEQ ID NO: 81473 - DNA, 386 bp, Zea mays
cggaccggcagcgcctggcccgttgcgccagaggcttcgggcacgcgaccaccggcggccttggcggcaagatctacgtggtgaccgaccccaccgacctcgacgtggtgaacccgcgccccggcacgctgcgctggggcgtcatccagcccggcccgctgtggatcatcttcgcgcggtccatgatcatccagctctcgcaggagctgctcatgagcagcgacaagaccatcgacgggcgcggcgcgcaggtgcacatcgccaacggcgccgggatcacggtgcagctggcgcaaaacgtcatcatccacaacctgcacgtgcacgacgtcaagcacaccatgggcggcctcatgcgcgactcccccacgcacatcggctcccgc

SEQ ID NO: 81474 - DNA, 416 bp, Zea mays
gtcgatacacgaatctaaattgcctcgtatcacaggggggacaggaaatcagcggccatggcctcgattccggcgacgaccttcgccgtcatcttatccgtcctcttctgtgccgcggctggcaccgccgtcgacaacgacctccccgactacgtcatccagggccgcgtctattgcgacacctgccgcgccgggttcgtgaccaatgtcaccgagtacatcgcgggcgccaaggtgaggctggagtgcaagcacttcggcaccggcaagctcgagcgctccatcgacggggtgaccgacgggaacggcacgtacacgatcgagctcaaggacagccacgaggaggacatctgcgaggtggtcttggtggagagcccgcgcaaggactgcgaccaggtgcatgcggacagggaccg

SEQ ID NO: 81475 - DNA, 434 bp, Zea mays
ggtccacgcacgcgtccgactcgcagtacgagggcatcgacttctacaccaccatcacccgcgcccggttcgaggagctgaacatggacctcttccgcaagtgcatggagcccgtggagaaatgcctccgcgatgccaagatggacaagagcaccgtgcacgacgtggtgctcgtgggcggctccacgcgcatccccaaggtgcagcagctgctccaggacttcttcaacggcaaggagctctgcaagagcatcaaccctgacgaggccgtggcgtacggtgctgctgtccaggccgccatcctgagcggcgagggcaacgagaaggtgcaggacctgctccttctggacgtcaccccgctgtccctgggcctggagactgccggcggcgtgatgaccgtgctgattcctcgcaacaacaacattacaacgaag

SEQ ID NO: 81476 - DNA, 357 bp, Zea mays
cccacgcgtccgcgaggaaataacatgccgcggcacacgtcgccgttcctttttgccttgttggcgtcggcggcgaccctgctcagcgtcggcgacgcgttggtcgtcgacggcctgcaggtggggttctatggcaagacgtgcccggcggccgaaggcgtcatcagcgacatcgtcaacaacgaaatcgctatggaccggggcatctcccctggcctcattcgcctcttctttcacgactgcttcatcacgggttgcgacgcttccattctcctggacgagtcgcccgccggcgacgtcccagagaaggagtcgtccgccaacggcttcaccctggtcgggctcagaaccatcgac

SEQ ID NO: 81477 - DNA, 225 bp, Zea mays
  unsure (1)..(225): unsure at all n locations
acggacccgtccgcactcacaccgccttcacgcctccctcaccaaataaggtcccgcccttttccgacattcacaggggggacaggaaatcagcggccatggcctcgattccggcgacgaccttcgccgtcatcttatccgtcctcttctgtgccgcggctgggaccgccgtcgancaacgactccccgactacgtcatccaaggccgcgtctattgcgacacct

SEQ ID NO: 81478 - DNA, 333 bp, Zea mays
aaagaggacatgcccgtgggccgcgtcatgggcgacatgctgatcctccccaccggcgacctgctgctgctgagcggcgccgccaagggctgctccggctggggcttcgggcggcagccggtgctgaccccggtcctgtactcgccgcggaaggcgcaaggcccgcggttccgggcgctggcgtcgtcgaccatcgcgcgcatgtaccactccaccagcgccgtgctgcccgacgccacggtgctggtggccggcggcaacacgaacgcggcgtacaacttcagcggcgtggacttccccaccgaggtgcgcgtggagcggttctccccgccg

SEQ ID NO: 81479 - DNA, 404 bp, Zea mays
agcccatcaacctgacggaccgcctccaccaggtgctgcgctgggcgaccgggtcggtggagatattcttctcgcggaacaacgcgttcctggcgtcgcggaggctcatgttcttgcagcgggtggcctacctcaatgtcggcatctaccccttcacctccatcttcctgctggtctactgcttcatcccggcgctgtccctcttctcgggcttcttcatcgtgcagacgctcaatgtcgccttcctctgctacttgctgactatcaccgtcaccctcatcgcgctcggcgtgctcgaggtcaagtggtccggcatcgagctcgaggactggtggcgcaacgagcagttctggctcatctcgggaacaagcgcgcacctgtacgcggtggtgcaaggtctgctc

SEQ ID NO: 81480 - DNA, 237 bp, Zea mays
atcgacattcggcgcccgttcaggatccacatcttcccgagcgagttcttggttgacctcttcccccttcggaccacctccaaggctcttggtgtagcttggcactctcagcaatcaagttttcatgtctgatctcgacattcagatcccaactgccgtcgatcccttcgctgaggccaatgctggggactctggtgtcgcatcagggtcaaacgactacgttcaggtgagcatcca

SEQ ID NO: 81481 - DNA, 376 bp, Zea mays
gggtccagcacgcgtccgaaagatagcatgcacaaacaatgcgatgagagccttgttcctcctggtcctcttctgcatcgtgcatggtgagaaggaagagtcaaagggcatcgatgcgaaagcgtccgggcctggtgggtccttcgacatcaccaagttgggcgcctccggcaatggcaagacagacagcacgaaggctgtgcaggaggcatgggcatcggcgtgcggcggcactgggaagcagacaatcctcatacccaagggcgacttccttgtcggacaactcaacttcacaggcccttgcaagggcgacgtgaccatccaggtggatggcaatctgctggcgaccacggacctaagccagtacaaggaccat

SEQ ID NO: 81482 - DNA, 426 bp, Zea mays
aagcagcatcaagggttgcccttggcgttcgtgcatatagccatggtcttgttgttggtgccgctatactcgaacgccaatggcagcaccaagggttgcctcaaggagcttgcatgcttctagaccctccgtcgactgacccatctctctagttataatttttctctcgtccttgcattgcccattacatgctatccattggtaacgcacaacagtaaaacgacagacatccgacagctatactatgttcgacggtgtaacaccctgaatttgagggtataaaatttcttctctaaataccatccacattcacgtgttacctcttgtctctctctctctctcttttccttttgattaacagtaagtgaattatgcgacggtttaattatttattttgtcaaaacttatgtgactcatgatacgttg

SEQ ID NO: 81483 - DNA, 424 bp, Zea mays
actatggcatgacgctcatgctcatggtcctctgttccgtcgcgtcggggctctcgttcggccacaccccggcgtccgtcatggcgacgctgtgcttcttccgcttctggctcgggttcggcatcggcggcgactacccgctgtcggcgaccatcatgtccgagtacgccaacaagaagacgcgcggcgcgttcatcgccgcggtgttcgcgatgcagggcttcggcatcatggccggcggcctcgtggccatcgtcgtgtccgcgtcgttcaaggccaggttcccagccccggcctacgccgtcgaccccgccgggtcaacgccgccgcaggccgacttcgtgtggcggatcatcctgatgctgggcgcaatgcccgcggcgctcacctactactggcgcaccaagatgcccgagacggcgcg

SEQ ID NO: 81484 - DNA, 419 bp, Zea mays
acgctcttgcagaaacgaggaaagaaaacatgtcttctcgctgggttagggcggaggtgtacccgctgttcgcgacgacaggggtggcggtggggatctgcgtgatgcagctggtgcgcaacatcaccaccaacccggaggtgcgggtgaccaaggagaagcgggccgccggggttctggacaaccacgacgaagggccgcgctactcccaacaacgggttccccaggtccgggtcctcaaaccgcggcaactacttccaggcaatggccaaggtgccaacggcccctattatgtagacgacgacgatataccccaatgcatggcaagaatatatatatatcagcacaacgcaactgcatgcgatgctgcttgttgctgcaattaatccactatactatatactatgggagtattattg

SEQ ID NO: 81485 - DNA, 364 bp, Zea mays
tatacagagtcgtcttactgagggccacgacgcggcgggcgctggcgaggtacgatggaccgtgcatggcgaccaaccccatcgaccggtgctggcgctgccgcgccgactgggcgactgaccggaaccggctggcgcagtgcgcgcgcgggttcggtcacaggaccgtctgcggcgcggccggcaagctgtacgtcgtgagggacccgagcgacgacgagatgatcatcccgcggaagggcactctgcggcacgccgtgatccatgactggccgctgtggatcgtgtacgcgcgctatatggtgatcgagctgcggcatgagctgattctgaatcacaacacgacgatcgacgggccgggcgc

SEQ ID NO: 81486 - DNA, 389 bp, Zea mays
cattcgttctcctcatcttacattacaggtcatagctaagcaggtctgacaggatgtcgtggcagacatacgtcgatgagcacctcatgtgcgagatcgagggccaccacctgacctccgctgccatagtcggccacgacggcgccgtttgggcccagagcaccgcattcccacagttcaagacagaggagatgaccaacatcatgaaggacttcgacgagcccgggttcctggccccgaccggcctcttcctcggccccaccaagtacatggtcatccaaggcgagcccggcgctgtcatccgcgggaagaagggatctggaggcataactgtgaagaagacagggcaagcgatggtggtcggcatctacgacgagcccatgaccccc

SEQ ID NO: 81487 - DNA, 434 bp, Zea mays
ggtcgatgcacgcctctaaaataaatcgcctaattctttcgatcgaattaggcgccttcttcgtcccacgctccgtctttatttgtaatctgaagcttacaggaacatttgagtggatcatggacggattggtaggcctcttgaaagtccgggtggtgaggggcatcaaccttgcctaccgcgacgcaagatgcagcgatccgtatgtcgtcctacgacttggcaagaagaaacttaagacgagcgtgaagaagagatctgtgaaccccatctggcacgaggagctaactctgaccgtcacagatcccagcctagctctgaagctggaggtgttcgacaaggacacgttcagcaaggacgacccgatgggggacgcggagatcgacgtggcgccgctggtggaggcggcgaacgcgagcccggaggcgagcctg

SEQ ID NO: 81488 - DNA, 386 bp, Zea mays
agggcatcgagtacctgcacgaggtggccaacccgccggtgatctaccgcgacctcaaggcgtccaacatcctccttgacagggacttcaacgccaagctctccgacttcgggctcgccaagctgggccccatgggcgaccagagccacgtcagcaccagggtcatgggcacgtacggctactgcgcccccgagtacgccatgaccggcaagctcaccaagatgtcggacatctacagcttcagcgtcgtgctgctcgagctcatcaccggccgccgcgccatcgacgtcacgatgccgtccgaggagcaggtcctcgttcagtgggcaacgcctctgctgagagacacgcggatgttcatgaagctggccgaaccgttgctgggc

SEQ ID NO: 81489 - DNA, 383 bp, Zea mays
gcccgtcacggtgcacacgctggtgtccatcctggagaggtacctgcgggtgaaggccaagaagaacgtggtggagatgcccggcaatggcgacgtgccctacacgcacgcaaacatcagcctggcccgggagcagctcggctacaagcccacgacgagcctggagatggggttgaagaagttcgtcaggtggtacctctcctactacggatacaaccgtgggacgcataccttccggaactcatgatgtcgctcgtgccttccactctcgtctgggtccacacaagttgtgggggaaattgtgttgactggctgttgtagttgggttaggacagaagaggaggggacggcgacagaacgatcaaacggagggccggcttttt

SEQ ID NO: 81490 - DNA, 293 bp, Zea mays
ttcaaaaacgcttctcctgctggttactccgcgcgccttctctttctctcccggacttcaatcgtgttcttcagcacgggctagctagctccctccctcccagccatggcgacgccggacaacaaggggcacgggcatccgctgcccaagtttggggagtgggacgtgaagaatccggccacgtccgagggcttcaccgtcatattccataacgcccgcgacgacaagaagaccaccaccggccctggggctgggaacgcgcgcgcatgcattccgccggccttcaggaacgg

SEQ ID NO: 81491 - DNA, 441 bp, Zea mays
tcacgggtcgacacaagcgtccacacacgcttctggaatttggtgctgcttggtcaacaacattaaagttcaaggtcaatgaatcgtacagctgcagatatatgctaggtagtaacaaggctgatattcactcgaacaagctattcaattgtactgctgaggaaccttcgactggggagcttttcaaaaggatacttatactgttttcagagatgtatgtgtcagaagatttcagttcagggcgaatgcttgtatatgtggcagcaggtgttgtgctgggcatgctgagttcgatgttcattacggccttattcagaggtatgtatgggttgttgctcgctgccgccaggtgggctgtgaggaagcattgcatcagagtatttgccagccggttgaagcgtgcctgccttcttgtcgcctatgtatccgctgttggctgga

SEQ ID NO: 81492 - DNA, 420 bp, Zea mays
acccacacgtccgcccacgcgtccggcagagatgcttcccactgaatcactgatcgttgatcagtgttccaatattttggcaagtgcagctttgaataaattgaacagattggcctcgtggccattttcctgtatttatctgtagtcaggtccaattcttttctgttggtgagcgcaagttattcatagatgactcggtcatgggaatatttgtaatattatgtcatgtatcgttaaatttcagttgttttgtttcagctgccagaactgttagcaagagtattctggagctggaagctcgaacgcaactggttgtatctatatccttgaatgccgaataaaggacgggcaataaactgcagcgaaatatgtgctgtcagacattgttgaaaaaccaatgtatgggaaattgagtggatc

SEQ ID NO: 81493 - DNA, 373 bp, Zea mays
aggcgtccggcagagatgcttcccactgaatcactgatcgttgatcagtgttccaatattttggcaagtgcagctttgaataaattgaagagattggcctcgtggccattttcctgtatttagctgtagtcaggtccaattcttttctgttggtgagcgcaagttattcatagatgactcggtcatgggaatatttgtaatatgatgtcatgtatcgttaaatttcagttgttttgtttcagctgccagaactgttagcaagagtattctggagctggaagctctaacgcaactggttgtatctatatccttgaaggcctaataaaggacgggcaataaactgcatcgaaatatgtgctgtcagacattgttg

SEQ ID NO: 81494 - DNA, 390 bp, Zea mays
cgatcacgacaagatggcatgcacaaacaatgcgatgagagccttgttcctcctggtcctcttctgcatcgtgcatggtgagaaggaagagtcaaagggcatcgatgcgaaagcgtccgggcctggtgggtccttcgacatcaccaagttgggcgcctccggcaatggcaagacagacagcacgaaggctgtgcaggaggcatgggcatcggcgtgcggcggcactgggaagcagacaatcctcatacccaagggcgacttccttgtcggacaactcaacttcacaggcccttgcaagggcgacgtgaccatccaggtggatggcaatctgctggcgaccacggacctaagccagtacaaggaccatggtaattggatcgagattctacg

SEQ ID NO: 81495 - DNA, 407 bp, Zea mays
  unsure (1)..(407): unsure at all n locations
aggtgaaggctgtggatgccttcggcaacctcctggtacttgaaaacctgcaacaaccgcaccatgatgacaacaacatgatgctaaaatttcccaaggcaagaaagtttgatatccaaaaagcaaagcaaatgtggtctgatatgctgaagtggagaaaagagttcggtgcagataccattctcgaggaattcgaattcgaagaagctgataaggtggcagaatgctaccctcaaggttaccatggggttgataaggaaggcaagcctgtctactttgaacggcttggacagatcgatgtgaataagctaatgcangtcactacaatggatcgctttgtcaagaaccatgtcaangagttcgagaagaactttgctgttaagttcccagcttgctcaatcgccgcg

SEQ ID NO: 81496 - DNA, 418 bp, Zea mays
atgcctactacaaggcgctcaacgagcaccatgtcctcctggagggtaccctcctgaagcccaacatggtgactccaggctccgactccaagaaggtgacccctgacgtgattgctgagtacaccgtccgtaccctccagaggaccgtacctgctgctgtgcctgctgttgttttcctctctggtggacagagcgaggaggaggccacccgcaacctcaatgccatgaacaagctcagcaccaagaagccgtggtccctgtctttctccttcggccgtgccctccaggcgagcaccctcaaggcctgtgctggcaacgtggagaacttggagaaggctagagctgccttcctcgccaggtgcaaggccaactctgaggctaccctcggcacctacaatggtgatgctgccgccgacac

SEQ ID NO: 81497 - DNA, 418 bp, Zea mays
aaacaacaagactgacagcgacgatgatgccacagctgcgtagcctcgtcgcgctggtcctcgtggccacggccatagccgccgctcccggcgttgggtttgtcgtcaccggccgcatctactgcgacaactgccgcgccgggttcgagacaaacgtgtcccacgccatccaaggcgcgacggtggagatggagtgccgccacttcaagtcgcagcaggtccacgacaaggcggaggcgacgacgggccccggcggctggtacaggatggagatcagcggcgaccactaggacgagatctgcgacgtgcgcctgctcaagagccccgaggcggactgcgccgagatcgaccactcccgcgaccgctgccgcgtcccgctcacgcgcaacgacggcatcaagcacagcggcgtccgcta

SEQ ID NO: 81498 - DNA, 403 bp, Zea mays
agcggcgtcctccatcgctccgcctccctatgtctccgcccggccgccggctcctccgccgactccggccggggccacggcgcggttatgatcggtgattcgaggacgcgcgttgctgctctgcggctgggaggatctagccggagagagttattatctgtcacaatggcctccagagatcacactggcttgacccgacaacttcttgattttcaacatgatacaatagatgaggtaggcgcaggacatgacccattcattgatttgaaagcgagattcatggactttaaacagagaaactatgtggaaaaattttcaaattaccaaacccttgctgagcagcaaacaccaaagttcatggtggttgcttgtgctgactccagggtctgccctaccgctgttt

SEQ ID NO: 81499 - DNA, 448 bp, Zea mays
ctcgcgggtcgatacaagactctaaagtgacgtcatatgacatcaatagtccctaccattcggcgaacgtacaaatcaaagtgcggcgtgcccgctcgcaaactttgagtacgtactgctactccggctcgtcctcctctcttctccatcgccgttggttctctcacgccacacggtcatccgatccctgtccaccgcgttgggagcggcgcagcccatggacgacaacgagagagagaaagagaatgagaatgagaaggagaagcactacgggactgacgtcgaggatgaagaagaggacgaggaaggtaacaagcgagtcgtggtgcttggcccccaggtccccctcaaggagcagctcgagctcgacaaggatgatgagagcctgaggaggtggaaggagcaactccttgggcaggtcgacacagagcagctgggagaaactgcg

SEQ ID NO: 81500 - DNA, 435 bp, Zea mays
  unsure (1)..(435): unsure at all n locations
gggtcgacgaacccttcgggcccgcggaaacctaacccggcccggcttcgccaacggcaatggccccggcataatcggtgcttccccttggaacggctggccttcgggaaccgcaaaccccgctgcggcggtggccttctccttaccggggctcgcttctcccttctccgccttcccgcgtcctcccgcggccccgcccccagcgggatcggggcccctcatgtcgaaggcaaaggtctacaccgacgtcaacgttctgcgtcncaaggagtactgggactacgaggcgctcaccgtccaatggggtgagcaggatgactatgaagttgtcagaaaagttggaagaggtaaatatagtgaggtctttgaaggcatcaatgttaacaattatgagaaatgcatcattaagatccttaagcctgtcaagaaaaagaa

SEQ ID NO: 81501 - DNA, 410 bp, Zea mays
agaacgtcgtacgagaacctttctccctcctccaccgttctccttttcttgccacggcaaatcagcttcgccggcgagagcatggcgatggcttaccgtgtcctggaggtcaccctgctgtccgcaaatgacatcaacaaagtgtcgctcttctcccggactcgcatctacgccgtggcttccatcgccggattcgacctccgcatctcttcgcacagcacccaagcagaccacagcagcggctgcaacccctgctggaacgccgtggtacacatccccatctcggctgccgctgacatccgcggcctcgcactccacgtgaggctccgcgcccagcgtctatacatgggcgatcgcgacatcggcgaggtgtttgtgcccatcgacgacctcctggccggcgccgacaa

SEQ ID NO: 81502 - DNA, 427 bp, Zea mays
agcgacatttctaataacacagttgagcgcgacgatgggatccctcgctaataacatcatggtcgtgggtgtcgtccttgcagcgctcgtcgccggcgggtcatgcgggcccccgaaggtgccgcccggtcccaacatcaccaccaactacaacggcaagtggctcaccgccagggccacctggtacggtcagcccaacggtgccggcgctcctgacaacggcggtgcgtgcgggatcaagaacgtgaacctgccaccctacagcggcatgacggcgtgcggcaacgtccccatcttcaaggacggcaagggctgcggctcatgctacgaggtgagatgcaaggaaaaacctgagtgctcgggcaatccagtcacggtgtacatcactgacattaactacgagcctatcgctccctaccacttcgac

SEQ ID NO: 81503 - DNA, 427 bp, Zea mays
ggaagtcgcagggcgacgtcatgatgaacggcgccttcttcaacgagtccggcggccagaacgagcgcaagtacgacaggttcgacttcatcccggccaagcacggccgctacgtcggtcagctcacgcgcttcgccggaccactcaagtgcatcgtcggccagccgtgctagtagacagcggcccggtcgggcacatactcctcttcctatatacatcggatttggatgggcggcatatatgtacgtgtgtgtaatatattattactacatcttgtactatatgcgacgattgcttgactgatgaatcacgctttttaggttagaccaatttagaagggaattagagtggattaaattcgctcccggtaaaaaatgactcgaagaaaatttagggactgtttggtttgtggttaaatgtgctacac

SEQ ID NO: 81504 - DNA, 449 bp, Zea mays
tcataggacgatacacgcctctacactcacgtcctaacagccccaacaagttgtgtactgccaacggcgcctccaaggtcaccgtcaaggatgtcaccttcaagaacatcaccggcacctcctccaccccggaggccgttagcctgctctgcactgccaaggtcccatgcaccggcgtcaccatggatgacgtcaacgtcgagtatagcggcaccaacaacaagaccatggctatatgcacgaacgccaagggcagcaccaagggttgcctcaaggagcttgcatgcttctagaccctccgtcgactgacccatctctctagttataatttttctctcgtccttgcattgcccattagatgctatccattggtaacgcacaacagtaaaacgacagacatccgacagctatattatgttcgacggtgtaacaccctgaatttgagggta

SEQ ID NO: 81505 - DNA, 399 bp, Zea mays
accagaatatgccatgactggacagcttagcacgaagagtgatgtctacagctttggagttgtgctgctggagcttttaaccggtcgcaagccagttgaccacacactgcgccgtggccagcagagccttgtgacatgggctacaccgaggcttagtgaagacaaggtgaggcaatgcgtcgatccaaggctcggagacgaataccctccaaaggctgtagccaagatggctgctgtggccgccctctgcgtgcaatacgagggtgaattccgtcccaacatgagcatcgtcgtcaaggctctgaaccccttgctgcacagccggtctggcaaccgccctactgcctcgtcggcctcccacgctgccgagcgatccggactgtgaattctcatcgctgc

SEQ ID NO: 81506 - DNA, 418 bp, Zea mays
cgcgtgtccatgttacctctctcaccatagcgcccgctctgtcgcccttcgttcacctctccttcctctcctccctgcctgccagggagaggggaagtcagaggcacggagtggcgcagagcagacgcacgtgaaccattgtagctgtccctgtcgtcgtcgtcgtcgtcaacgaatccacacaaggaaaggatggagaagaagccgaccatcctcatgaacaggtacgagctcgggcgcacgctcgggcagggcaccttcgccaaggtgtaccacggccggaacctcgcgtccggcgagagcgtggccatcaaggtcatcgacaaggagaaggtgatgcgcgtcggcatgatcgaccagattaagcgcgagatctccgtcatgcgcctcgtccgccaccccaatgtcgtgcagctgc

SEQ ID NO: 81507 - DNA, 392 bp, Zea mays
tacaacaccctgaggtgagtcgtattaaattccacgataacatcaaccacgtccagatctgagtccagcacatggtcctcttccgcaagtgcatggagcccgtggagaaatgcctcggcgatgccaagatggtcaagagcaccgtggacgacgtggtgctcgtgggcggctccacgcgcatccccaaggtgcagcagctgctccaggacgtcttcaacggcaatgagctctgcaagagcatcaaccctgacgaggacgtggactacggtgctgctgtccaggccgccatcctgagcggcgacggcaacgataaggtgcacgacctgctccttctggacgtcacccggtgtccctgggcctggagaacgccggcggggtgatgaacgtgctga

SEQ ID NO: 81508 - DNA, 417 bp, Zea mays
  unsure (1)..(417): unsure at all n locations
atcgagattctacgcgtggataacctggtcatcaccggcaagggaaaccttgacgggcagggcccagccgtgtggagcacgaactcctgcaccaagacgtacgactgcaacatccttcccacccgcctggtcaccatggtcataatccccagcaaggctgccgctgacacccgccgactctcactccacgtgaggctccgcgcccagcctctatgactcacccattgcgacaaccaccaggtgttcatccgcaactgctacatcaaggaccacgacgtgctagcccgccatatcgacgccggcaacggcgtgggccgccccgcgggcgtgctcatcaacggcaanggcggcaaggacctggaggccgcgcctgccttcaccttcgangccggcaagacgtaccgcctccgcgtctgc

SEQ ID NO: 81509 - DNA, 423 bp, Zea mays
gctaggataagcacaaacgcgtgcacgcgctgacgccgacgtcaaggtgtacggtaactcggagcgtcatcggagagagagacccgccaccgccacgcttgaccgtaatccgtggagagtgagtgcccggccgggctaccagctaagacacgacggtccatccagccatcggtggcccagcagattccacaatggcggcaacggcggacatggagcggatcttcaagcggttcgacaccaacggggacggcaagatctcgctgtcggagctgacggaggctctgcggactctggggtccacctccgccgacgaggtgcagcgcatgatggccgagatcgacaccgacggcgacggctgcatcgacttcaacgagttcatcaccttcagtaacgccaacccggggctcatgaaggacgtcgcaa

SEQ ID NO: 81510 - DNA, 424 bp, Zea mays
agtgatttgaaataattgggaataaatagttcgtgaatccctgaagcgtgcatatatatattcctgccaagataaaggtaatggagtcgtcacgcaggttccagccggccgtcatcctgcttctcctgctcattgtgtccaccgatatggcacaggcaagggaatgcgacaagtacagtgagcgatttgttggggcatgcatgatcgcagacaactgcgccaatgtgtgccgcggtgagggcttcttggccggcatgtgcagcaccttccgccgccgctgcatctgcactaggcagtgctaaacaagatcgctcgatcgttcgccatgcatcgacaacctattcttaataacgttcattatctcgttcttatttatgacgaatgtcatgtatgttctggtgactgtcatgtatattctgatgac

SEQ ID NO: 81511 - DNA, 416 bp, Zea mays
  unsure (1)..(416): unsure at all n locations
aagatcactacaagatggcatgcacaaacaatgcgatgagagccttgttcctcctggtcctcttctgcatcgtgcatggtgagaaggaagagtcaaagggcatcgatgcgaaagcgtccgggcctggtgggtccttcgacatcaccaagttgggcgcctccggcaatggcaagacagacagcacgaaggctgtgcangaggcatgggcatcggcgtgcggcggcactgggaagcagacaatcctcatacccaagggcgacttccttgtcggacaactcaacttcacaggcccttgcaagggcgacgtgaccatccaggtggatggcaatctgctggcgaccacggacctaagccagtacaaggaccatggtaattggatcgagattctacgcgtggataacctggtcatcaccggc

SEQ ID NO: 81512 - DNA, 365 bp, Zea mays
accctatcatgaacttgtcgcccttctcccggattcgcatcaacgccgtggcttcaatctccggattcgacctccgcatcccttcccacagcacccaagcagaccacagcaacggctgcaacccctgctggaacgccgtggttgaacaacggggaggtgtccggggtcacgctgctcaactccaagttcttccacatgaacatgtaccggtgcaaggacatgctgatcaaagacgtgaccgtgacggcgcccggggacagccccaacacggatggcatccacatgggcgactcatccgggatcaccatcaccaataccgtcattggcgtctgcgacgactgcatctccatcggacctgggacctc

SEQ ID NO: 81513 - DNA, 395 bp, Zea mays
gtcgatacacgaatctaaattgcctcgtatcacaggggggacaggaaatcagcggccatggcctcgattccggcgacgaccttcgccgtcatcttatccgtcctcttctgtgccgcggctggcaccgccgtcgacaacgacctccccgactacgtcatccagggccgcgtctattgcgacacctgccgcgccgggttcgtgaccaatgtcaccgagtacatcgcgggcgccaaggtgaggctggagtgcaagcacttcggcaccggcaagctcgagcgctccatcgacggggtgaccgacgggaacggcacgtacacgatcgagctcaaggacagccacgaggaggacatctgcgaggtggtcctggtggagagcccgcgcaaagactgcgacca

SEQ ID NO: 81514 - DNA, 415 bp, Zea mays
cacgagtctaaactggacgtcctggaacgtcgtacgagaacctttctccctcctccacctttctccttttcttgccacggcaaaacaccttcgccggcgagagcatggcgatggcgtaccgtgtcctggaggtcaccctggtgtcggcaaatgacctcaagaaagtgtcgctcttctcccggactcgcatctacgccgtggcttccatctccggattcgacctccgcatcccttcccacagcacccaagcagaccacagcaacggctgcaacccctgctggaacgccgtggtacacttccccatcccggctgccgctgacacccgcggcctcgcactccacgtgaggctccgcgcccagcgtctatacctgggcgatcgcgacatcggcgaggtgtttgtgcccatcgacgacct

SEQ ID NO: 81515 - DNA, 398 bp, Zea mays
ctccctccacgagccgaccaaatcgaatcgattcgcgcgcagcgcgcccgcgcagcgattgccggcgatggcgagcctcaccctgccgccggcgatggcgaacccacggcaggacgccatcgacctccaaaaggccttcaaagggtttggctgtgacagtacaacagtgataaacatacttactcatcgcgattcagtgcagcgtggactcattcaacaggaatacagggctatgtatcatgaggaactctcccatcgcatttcatctgaactcaatggaaaccacaagaaagctatgttgctgtggattcttgatcctgctggacgtgatgcaactgttttgagagaagctctaagtggtgacactatggatctgagagcacccaactgatatatat

SEQ ID NO: 81516 - DNA, 427 bp, Zea mays
  unsure (1)..(427): unsure at all n locations
acaatcgcacaaggcacacacgtacagccatggcgaactcgtcgtccggcctggcggtgagcgacgagtgcaaggtgaagttccgggatctgaaggcgcggcggagcttccggttcatcgtgttcaggatcgacgacaaggacatggagatcaaggtggaccgcctcggcgagccgaaccagggctacggcgacttcaccgacagcctccccgccgacgagtgccgctacgccatctacgacctcgacttcaccaccgtcgagaactgccagaagagcaagatcttcttcttctcctggtcccctgatactgcacgcacccggagcaagatgctgtacgccagctccaaggacaagttcaaganggagctggacggcatccagtgcgagattcaggccancggacccagcgagatgagcctcgacat

SEQ ID NO: 81517 - DNA, 414 bp, Zea mays
  unsure (1)..(414): unsure at all n locations
gcacaaccaagctcaacaacagccagctcgcgaaaataatgaagagccgcagcatggcatcatcggccgcgctcttggtgctagccctcgcgctagtggcggccaccgccccacaggtagcggaggcaaagaagaagagagcggcggagagcggcgaggcggcggaggcgaagaagatccaggacgacttctgctcgacgctgtgcgagggcaagaaggggacggacctggtcgtgtgcaaggagtcctgcgcgctctcccagcagtccaacctggtgctgtacggcaggatccagtgcaagggcaagtgcaccgagcagaagggcatcacggcgccggccatgaaggtctgccangaggagtgcgacaaggcgtacgtggtgaaggcggccgaggttcacaaggcctgcagcg

SEQ ID NO: 81518 - DNA, 416 bp, Zea mays
aagacggacagtggcgcttacatggagcaccgtctggccggcgtggacagggtgcagatcacgggcctgaacgcgggcacgctggacctgacgaataacggctggggccacatcgtcggcctcgtcggcgagaggaagcagatctacaccgacaagggcatgggcagcgtcacctggaagccggccatgaacgacatgccgctcacctggtacaagaggcacttccacatgccgtcgggagaggacccggtcgtgctggacatgagcacgatgggcaagggcatgatgttcgtcaacggccaatgcatcggccgctactggatctcctacaagcacgccctcggccggccatcgcagcagctttaccacgtgccccggtccttcctgcggcagaaggacaacatgctggtgctgtt

SEQ ID NO: 81519 - DNA, 424 bp, Zea mays
ggcgcaaaacgtcatcatccacaacctgcacgtgcacgacgtcaagcacaccatgggcggcctcatgcgcgactcccccacgcacatcggctcccgcaccagggccgacggcgacggcatctccctcttctccgccaccaacgtctggatcgaccacatctccatgtccaactgcgacgacggcctcatcgacgtcgtgcacagctccacggggatcaccatctccaactgccacttcaccaaccacaacgacgtcatgctcttcagcgccagcgactcctggccgcaggaccagatcatgcagatcaccgtcgccttcatccacttcggcaggggcctggtgcagcggatgccaaggtgccgctggggcttcttccacgttgtcaacaacgactacacgcactggctcatgtacgccattggc

SEQ ID NO: 81520 - DNA, 392 bp, Zea mays
accaaggttttgagaaacgatttagtgtcctgcacatatccaatatgatacttgctattgggagtatgattttccatgccaccttgcaacttctcctacaacagagtgatgagactcctatggtttgggagatccttctctacatgtatgtcctctattcaccggactggcactacaggagcacaatgccaactttcctgttcctgtatggtgctgcctttgccgtagtacatttctttgcccggttccaagtcgtattcaagctgcattacgttggcctctgcttgctctgcatcccccggatgtacaagtactacatacagacgaaagacgtgggtgcgaagcggctcgcaaaactgtgggtccttacactgacccttgggaacctctgc

SEQ ID NO: 81521 - DNA, 244 bp, Zea mays
ccggcaaccaccggcttccctctccgtccccaaccgaccgaccaacgcgccgagcgaagatgtcgtggcagacgtacgtggacgagcacctgatgtgcgatatcgagggccaccacctcacgtcggcggccatcgtcggccacgacggcgccacctgggctcagagcaccgcattccccgatttcaagcccgaggagatggctgccatcatgaaggatttcgacaacccggggaacttcgcccc

SEQ ID NO: 81522 - DNA, 359 bp, Zea mays
ctcgtgggccgatacacgcctctacatcgcttcctcctacgccgcccgtccgatccggtcactggccggggagggctcagaaacctttcatccaatacatacatctatctgagccctttcccgcggtgaggcccgaccggagtccacacacacacggtgtcgatggcggccgtaataaggagccgccgccgcgtgtccgttttcttctacgtcgtcctcgccgcagctgcagctgcagccgcggcgcaggcatccaataacgtcacctccgacgaggagtactgggcggagcgcgccgaggtggctcggtcgcgcaacctcgccgcctacgtcagcgaccccgtggccgccacgaaccg

SEQ ID NO: 81523 - DNA, 373 bp, Zea mays
acaagcctctaatgtgagtcgtagtacgcatcaacaatcgccgagagcgatcgagagataaataaagatgaagaaagtggcatcatcgtcagccgttctcttcgtgctagcgctgacgctagtttgtgccccgctgatagcagaggcaaagaagaagagagtcgccgccgccgccgccgaggagaagaaggtgcaggacaacttctgctcgacgctgtgcgagggcaggaaggggatggacctggtggtgtgcaaggagtcctgcgacctctcacagcgctccaacctggtgctgtacggccggatccagtgcaagggcaagtgcaccgagcagaagggcatcaccgcgccgcagatgaacgtgtgccaagag

SEQ ID NO: 81524 - DNA, 426 bp, Zea mays
  unsure (1)..(426): unsure at all n locations
cctctaaactgacgtcctagtacttcttcatggtggggttcgccccgctgacgtcccgcggctcgcagcagtaccgcgcgctgacngtgccggagctgacgcagcagatgtgggatgccaagaacatgatgtgcgcggcggacccgcgccacgggcggtacctgacagcgtccgccatgttccggggcaagatgagcaccaaggaggtggacgagcagatgatcaacgtgcagaacaagaactcctcctacttcgtggagtggatccccaacaacgtcaagtccagcgtgtgcgacatcccgcccgtcgggttgcccatggcctccaccttcgtgggcaactccacctccatccaggagatgttccgccgcgtgagcgagcagttcacggccatgttccggcgcaaggctttcttgcactggtaca

SEQ ID NO: 81525 - DNA, 421 bp, Zea mays
tcgtcggtccaagactctaaagaaagtcctggcaatccagtcacggtgtacatcactgacatgaactacgagcctatcgctccctaccacttcgacttgagcggcaaggccttcggctccctggcaaagcccgggctcaacgacaagattcgccactgcggcatcatggacgtcgagttcagaagggtgcgatgcaagtaccccgccgggcagaagatcgtgttccacatcgagaagggctgcaaccccaactacctggccgtgctggtgaagtatgtggcggacgacggcgacatcgtgctgatggaaatccaggacaagttgtcggctgagtggaagcccatgaagctctcttggggcgccatctggaggatggacactgccaaggcgctcaagggccccttctccatccgcctcacca

SEQ ID NO: 81526 - DNA, 433 bp, Zea mays
tacaacaccctgacgtgagtcgtattaagccgacttctctctgcgctccccaacttgcctcacaggatggtatcacttgctcggacagggtggcttgctgctgcattggtgcccatgccaatggccttcttcctgatgtggaaacaacaggacgtacgcgctctggtagcaggaacagcgatggttggcctgagctcaggattcatcttcgccgcagcagtgtcagtgacctccgagctctttggaccaaacagcatcggtgtgaaccacaacatcctgatcaccaacatcccgctggggtcactcctctatgggcatatcgccgccatggtgtacgacgcgaatggacaaaggatgacactgatggataatcgcactggcatcattgacaccatgattgtgtgcatgggggttaagtgctactccaccacct

SEQ ID NO: 81527 - DNA, 380 bp, Zea mays
agctgcccttgttcttggtgaaatggattgtactgggccacatttacacactgtttatccacaccggtccactgatactcatccttttgccaccatgggctctggttctcttgctgcaatgtcagtgtttgaatctaagtacacagaaggccttactacggaagatggaatacagattgtgtgccaagcaatctgtgctggtattttcaatgacttgggtattgggagcaacgtggtcgtctgcgtgataaccaatgggaagacagaatacttgataaaccaccatttgcctaatcccaagacttatgctagttcaaatggatacattttcacaaatgggcagactgaagtactgtcttcaaaggtcacacttctaaagc

SEQ ID NO: 81528 - DNA, 426 bp, Zea mays
acactcctctagcttgactcgtagtacgacgagctgtgcatgctcacggtgccgcacggccacctcaagtcgtccaacatcctgctcgacggccactacgagccgctgctgacggactacgcgctggtgcctgtgatgaaccagtcgcacgccgcgcagctcatggtggccttcaagtccccggagcggaagcagttcggccgctcgtccaagaagagcgatgtctggtgcctcggcctgctcatcctcgagatgctcaccgggaagccgccgacctacgacctgcccaaggcggcgggggcggtgccgtcggccgaatcgttgtcgtcaccgcagaaaccgggtccggcggcgggcaacagcactgacctggttaccgtcgtggggtcgacccgggagggcagtggctgggcaccgtggtggacc

SEQ ID NO: 81529 - DNA, 382 bp, Zea mays
  unsure (1)..(382): unsure at all n locations
acaatccactacacacactcctaataatctcaagagaccagaaaactgggcactagtttgagaaagggaanaatacaatccacaattccgggatttttcccttacggtgtcacctgattccatcaatttagttcctgagcatgctgcaacaaataaaaaagtgttcctcatgaacctctctgctcccttcatctgtgagtttttctgtgatgcncaagagaaggtcctcccgtatgctgacttcatcttcggcaatgaaaccgatgcaaaaatcttcgccaaagttcgatgatgggagacagagaatgtcgaggagattgctttgaagatctctcagcttcctttggcttcaggcaaacaaaagaagactgcctgtattact

SEQ ID NO: 81530 - DNA, 415 bp, Zea mays
gagtcgtattacgtcttccatggcctcctcgtagtagaatagctctatctcaccgcaacaactcctcattacatcctttatgagaggctgatcgattggtagatacgtactcgggtggagcagaacaacgagagacatggcgacgacgacgcgtgttgccgccaccgccgccggcgtgctgctggtcctgtcggcgttggcgaccctggcgcgggccgaggacccgtacctgttcttcgagtggaaggtgacgtacgggaccaagtccctgctgggcgtgccccagaaggtcatcctcatcaacggcgagttccccggccccaggatcaactgctcctccaacaacaacatcgtcgtcaatgtcttcaaccagctcgaccatccgctccttttcacctggaacgggatgcagcac

SEQ ID NO: 81531 - DNA, 373 bp, Zea mays
gtattactcgaaaccgagcgccgcgcggcactggaggccgccccctcagccgccgccgcccgagacggaggaggcggggcgtcgcgggctaataataagcgcggagtccgcgcgccgccgccgccgctgctggacgagccgtcgtggaccatgttctgcaacggcaagaagaccgggtacgcggtgcgaaggcaggccacggacgacgacctcgctgtgatggagacgctgcgggcggtctccatgggcgccggcgtgctccccgggagggccgccccttcgtcggcgcccgacgctgttgctgcggcggcagcggacgacgaggtgccctacatgcgcggctgcttcgaccacttcgtcgggttccgggact

SEQ ID NO: 81532 - DNA, 416 bp, Zea mays
acgcgtccacagacgcgtgggggcctggtgaacgacccggagatccgttccgtggcggcgatggtggccggcgacaaggtggccttctaccactgcgcgttctacagcccccaccacaccctgttcgacagcgccggccgccactactacgagagctgctacatccagggcaacatcgacttcatcttcggcagcggccagtccatcttccagtgccccgagatcttcgtgaggcctgaccggcggacggagatccgcggctccatcaccgctcaggtgcggcaggaggaggacagcagcggcttcgtcttcctcaatggcaaggtgtacggcgtccgtgaggtgtacctgggccgcgtcaccgcgccggactcgcgcgtcatcttcgccgacacctaactctccaagaacatcca

SEQ ID NO: 81533 - DNA, 415 bp, Zea mays
tcgcgggccgacacacgcgtccaaacggcgccatcatcaggtccgagcggccgagcgccaggaactgcctcgccgacgagagccacgtgtgctggaggaacggcaagttcgcgcaggacatgatcctccggctcaggaacgtcgagagcggggagatacagctgcagctgcagtgggtgaacttccctcctggtcctgctcctgctgctgcaacaaccaggtgacctgatcgatggtagctgctgttcctgtcgccattgcctcctgctggcaggaacaggaactctctgaagcacggggtcagggtagttcatgttgcttcgattcgatcgtaggggagataatgccggatggctttgtaaagtttgggaggacatgcatcataattgaagtcaagtgataggatcctgttttt

SEQ ID NO: 81534 - DNA, 404 bp, Zea mays
tccggcaatatcgggcgccagagatcattctaggtgcaggatactcgttttctgttgacatgtggtccttcgcatgtattgcttttgagctcgcaacaggagaaatactatttacacccaaggaaggccatggatacagtgaagatgaggatcacttggctttaatgatggaactacttggcaagatgccgaagaagattgcaaccatgggaacacgatcaaaggaatattttgaccgccatggagatctgaagcggatacgaaggctgaaattgtcatccattgaacgtgttctcgttgacaaatacaaaatttctgaatctgatgcccgggaattcgccaattttctttgccctttactcgactttgcaccagagaagaggccaacagctttagattgccta

SEQ ID NO: 81535 - DNA, 395 bp, Zea mays
tggatagctgcgccacgacctctcctgctgtcgctgctggtcgccgtgctagcggtggccgccgatgtcgccaacgccggccacgccaagcccctgacgcctggcgggcgtgtggtacacgacaaccacggcaagttcacggccgggccgtggaaacccgcccacgcgaccttctacggcgggcgggacgggtccggcaccacggcgggcgcgtgcgggtacaaggacacgcgcacgcaggggtacggcgtgcagacggtggccgtgagcacggtgctgttcggtgacggcacggcctgcggcgggtgctacgaggtgcggtgcgtggacagccctagcgggtgcaagcccgacgcggcggcactggtggtgacggtgaacgacctgtgccccgc

SEQ ID NO: 81536 - DNA, 374 bp, Zea mays
accacgcgtccggctggttcgtggatggcggtgccacaacctctcctgctgtcgctgctggtcgccgtgctagcggtggccgccgatgtcgccaacgccggccacgccaagcccctaacgcctggcgggcgcgtggtacacgacaaccacggcaagttcacggccgggccgtggaaacccgcccacgcaaccttctacggcgggcgtgacgggtccggcaccacggcgggcgcgtgcgggtacaaggacacgcgcacgcaggggtacggcgtgcagacggtggccgtgagcactgtgctgttcggtgacggcgcggcctgcggagggtgctacgaggtgcggtgcgtggacagccctagcgggtgcaagcccga

SEQ ID NO: 81537 - DNA, 416 bp, Zea mays
acccacgcgtccatcgaccgtcggaaaatcgacgaacatcctgtggcatgagtgcgccatcgggcagaaggagcgacagggtctgctgaaccacaagggctgcgtcgtgtggatcactggcctaagcggttcagggaaaagcacgctcgcgtgcgcgctgagccgcgagctgcacggcagatgccacctcacgtacgtcctcgacggcgacaacctcaggcacgggctgaacagggacctcagcttcggagcagaggaccgcaccgagaacatccgcagagtaggggaagtagcgaagctgttcgccgacgctggcctcgtctgcatcgccagcctcatatcgccctacagaagcgaccgaagcgcgtgtcgcgatctgctgcgcaagcactcgtttatcgacgtgttcctggacg

SEQ ID NO: 81538 - DNA, 416 bp, Zea mays
cacgcgtctacatcacgcctctctcaccaaataaggtcccgcccttttccgacattcacaggggggacaggaaatcagcggccatggcctcgattccggcgacgaccttcgccgtcatcttatccgtcctcttctgtgccgcggctggcaccgccgtcgacaacgacctccccgactacgtcatccagggccgcgtctattgcgacacctgccgcgccgggttcgtgaccaatgtcaccgagtacatcgcgggcgccaaggtgaggctggagtgcaagcacttcggcaccggcaagctcgagcgctccatcgacggggtgaccgacgggaacggcacgtacacgatcgagctcaaggacagccacgaggaggacatctgcgaagtggtcttggtggagagcccgcgcaaggactgc

SEQ ID NO: 81539 - DNA, 422 bp, Zea mays
aacacagtccatgttacctctctcaccatagcgcccgctctgtcgcccttcgttcacctctccttcctctcctccctgcctgccagggagaggggaagtcagaggcacggagtggcgcagagcagacgcacgtgaaccattgtagctgtccctgtcgtcgtcgtcgtcgtcaacgaatccacacaaggaaaggatggagaagaagccgaccatcctcatgaacaggtacgagctcgggcgcacgctcgggcagggcaccttcgccaaggtgtaccacggccggaacctcgcgtccggcgagagcgtggccatcaaggtcatcgacaaggagaaggtgatgcgcgtcggcatgatcgaccagatcaagcgcgagatctccgtcatgcgcctcgtccgccaccccaacgtcgtgcagctgcacg

SEQ ID NO: 81540 - DNA, 419 bp, Zea mays
taaagaaactcgggcggacgcgtgggcggacgcgtgggcggacgcgtgggttcgccgagagggaaagcacattcttcatggaaacatccgcactggagtccatgaatgtcgagagcgctttcaccgaggtcctaactcagatctatcgtgtggtcagcaagaaggcccttgacattggcgatgaccccgctgctccaccaagagggcaaaccatcaacgttggtggcaaggatgatgtctctgctgtgaagaagtcagggtgctgttcatcctaaatcacttatgaccatgaaaaggaaccatatactctccgatcatatgattggtaactgaaaataggactctcttgtgcttcctaacctgttggttatgagattatgttggtgctccagagaaatgattagatgttaagaatttga

SEQ ID NO: 81541 - DNA, 429 bp, Zea mays
cacgcgtcaagagcctcatcggcacgttcgatgagatccaagacgggcgcagcggggtgccgcccagcgacttccccaagtggctgccggccacccagcggaggctcctgcagcagacccagaagcctaacacggtggtcgcccaggacgggagcggcgacttcaagaccatcaccgaggccatcaccgccgtgcccaacaccttcgaggggcgcttcgtcatctacgtgaaggccggcacgtataaggagtacgtcaccgttcccaagaacatggccaacatcttcatgtacggcgacgggccgacacagacggtggtcaccggcgacaagagcaacgcatgccgcttcgccaccttcgcctcagccaccttctctgctgaaggcatcgggttcatctgcaagtcgattgggttcctcaacacggcgg

SEQ ID NO: 81542 - DNA, 352 bp, Zea mays
atccatcgatctccccccagcggcgaggagagccggcggccacaggaaggagaaatggcttccgcacacaacgctctccgggtgtttttcatcctagccgtggtatgtgccgtatgcacagcgaaaaggacaggagccaacaaggaagaatcggcggcagcccccggtggcgctgctggaggcagcggcgggacgttcgacatctccaagctcggcgcgaccagcgacggcaagacggactgcacaaaggcagtccaggacgcgtggacgtcagcgtgcgaagcgaccggaagcgccacggtggtgatccccaagggcgaactactggtcgggcctctcaacttcactgggc

SEQ ID NO: 81543 - DNA, 376 bp, Zea mays
acaagcctctacaatgagtctcatcatctcactcaccccgccttcacgcctccctcaccaaataaggtcccgcccttttccgacattcacaggggggacaggaaatcagcggccatggcctcgattccggcgacgaccttcgccgtcatcttatccgtcctcttctgtgccgcggctggcaccgccgtcgacaacgacctccccgactacgtcatccagggccgcgtctattgcgacacctgccgcgccgggttcgtgaccaatgtcaccgagtacatcgcgggcgccaaggtgaggctggagtgcaagcacttcggcaccggcaagctcgagcgctccatcgacggggtgaccgacgggaacggcacgtacacga

SEQ ID NO: 81544 - DNA, 440 bp, Zea mays
gtgggtcggtccaagcctctaaactgacgttctgctaacgcgtgggaggggagcacccatcagccaagagctatccatacgcacagcgatgcaccagcacgagatactagccatcatgcgcctgtcgtccctcctcctcgtcgtggccgccctctcggcgcgcgccgcggcgcagcaggtgccgccggtgggcggcagcgctctgaagccggactactacagccagtcgtgcccgcgcgcggagaggatcatcgcggaggtgatgcagacgaagcagatggcgaacccgacgacggccgcgggcatgctgcgcgtcttcttccacgactgcttcgtcaccgggtgcgacgcgtcggtgctgatcgcgtccacccagttccagaagtcggagcacgacgcggagatcaaccactcgctccccggggacgccttcgacgccg

SEQ ID NO: 81545 - DNA, 424 bp, Zea mays
ctctggagaaagtcgtcataatccgcggcatcacgctgctcaacagcaagttcttccacctcaacatcttcgagtgcaagaacgtgctgatcgacaaagtgacggtcaaggcccccggcgacagccccaacacggacggcatccacatcggcgactccagcaacgtgaccatcagcagcaccaccatcggcgtcggcgacgactgcatctccatcggccccgggagcaagatgatccgcatccatggcgtcaagtgcggcccaggccacggcatcagcgtcggcagcctggggcgctacaaggacgagaaggacgtggaagacgtgcaggtgacggggtgcacgatcgccggcaccacgaacggcctgcgcatcaagtcgtacgaagactccaagtcgtcgctcaaggccaacaagttcctgta

SEQ ID NO: 81546 - DNA, 437 bp, Zea mays
cgcgggctgacacacgcgtcaagacttcatcgagaaaagccgcgtgccggacccgcagaggatgatccgcgcctacgcacagtcggtggcgacactcaacctgctccgcgcgttcgccaccggagggtacgctgccatgcagcgcgtcactcagtggaacctcgatttcatggatcacaacgagcaaggtgataggtaccgtgaattggcccataaggtggatgatgctcttgggttcatgactgcatcggggcttacagtcgaccacccgataatgacgactactgacttctggacctcgcacgagtgccttctcttaccctacgagcaggctcttacccgtgaggattccaccagtggccttttctatgattgttcggcccacatgttgtgggttggtgaagcgaatcgacaactcgatggacctcatgttgaat

SEQ ID NO: 81547 - DNA, 361 bp, Zea mays
aagacgtaagaagtcgtctaattcttggatcgaattagacgacttcttcgtccctctcttcattagcacgctaacttgtaatctgcaggatctaagcaaagacttgatttagttatggacggattggtaggcctcttgaaagttcgcgtggtccggggtatcaaccttgcctaccgcgacgcaagaggcagcgatccgtatgtcgtcctacggcttggcaagaagaaactgaagacaagcgtgaagaagagatccgtgaaccccatatggcaagaggagctaactctgaccgtcacagatcccagccaaccactgaagctggaggtgttcgacaaggacaccttcagcagagacgacccca

SEQ ID NO: 81548 - DNA, 431 bp, Zea mays
caagcctctgacatgagtcgtcctaagcctccgtttgcggtgcgacagctcctccaggaccggcccccgcgcgcgtgccgtacgtgccagggacgacgccgggcggccgatggagttcacgtcgtcctacttccacgccttcggcaaccccgacctcgcggcggtggtctccggcgacggcggcagcgcgcaggcccaccggccgcgccgctccaccgacggcgcgaaggcggaggacggcaggagccccaccaccacaacggcgaggcgcgcgccgtccatgttctgcgtccccgacacggaggcggaggagcccaacggcttcctggacgagtgcaccctctgccgcaaggcgctctgcggcgacatcttcatgtacagaggggacacgccattctgcagcgacgattgcaggagggagcagatcgaca

SEQ ID NO: 81549 - DNA, 404 bp, Zea mays
acaaacgtcctacgaaaacctttctccctcctccacctttctccttttcttgccacggcaaaacaccttcgccggcgagagcatggcgatggcgtaccgtgtcctggaggtcaccctggtgtcggcaaatgacctcaagaaagtgtcgctcttctcccggactcgcatctacgccgtggcttccatctccggattcgacctccgcatcccttcccacagcacccaagcagaccacagcaacggctgcaacccctgctggaacgccgtggtacacttccccatcccggctgccgctgacacccgcggcctcgcactccacgtgaggctccgcgcccagcgtctatacctgggcgatcgcgacatcggcgaggtgtgtgtgcccatcgacgacctcctggccggcg

SEQ ID NO: 81550 - DNA, 432 bp, Zea mays
cgcgggctgacacacgcgtcaagccgcactccctctacgcctcaaggctctcctctcggaggtctgataggcaacccaataatggcagaagtcctatcaggatctcatgaacaccgtctaagctctgccttagatggacactacgacgagaagaggaaatccaatgtggaatacacagaggacgagaagaaagccgtgatcgcggctctgaaaaagaaggctttgagcgcctcacagaagtttaggcattccatgaagagggggaggaagagcagcaaggtgatgtccatctcgattctggatgagcgtgaacctgaggaggtgcaggctgtggatgccttccgccagcttcttgtacttgaagagctgctaccatcgcagcatgatgacgtacacatgatgcaaagatttctcaaggcaagaaagtttgat

SEQ ID NO: 81551 - DNA, 416 bp, Zea mays
tgagtcgtatacctaagcagctaccagccagtccgatccggctagagaccgtagacggcgcacacacctttcatccaatacatacatctatctgagccctttcccgcagtgaggcccgaccggagtccacacacacatcgtgtcaatcgcgggcgtaataaggagccgccgccgcgtgtccgttttcttctacgtcgtcctcgccgcagctgcagctgcagccgcggcgcaggcatccaataacgtcacctccgacgaggagtactgggcggagcgcgccgaggtggctcggtcgcgcaacctcgccgcctacgtcagcgaccccgtggccgccacgaaccgcttcaacgcggacgtgctgagggccacgacgcggcgggcgctggcgaagtacgatggcccgtgcatggcgacca

SEQ ID NO: 81552 - DNA, 398 bp, Zea mays
gccggccgatgcacgaatctacagtgacgtcgtactatcgcgtccgcggacgcgtgggttccagaccaacctggtgccctaccctaggatccacttcatgctttcgtcctacgctccagtcatttctgctgagaaggcctaccacgagcagctgtccgtggccgaaatcaccaacagcgccttcgagccatcctccatgatggccaagtgcgacccccgccatggcaagtacatggcatgctgcctcatgtaccgtggtgatgtggttcccaaggacgtgaacgctgctgtggccacaatcaagaccaagcgcaccatccagttcgtggactggtgcccgactggcttcaagtgccgaatcaactaccagcctcccaacgtcgtccccgggcggtgac

SEQ ID NO: 81553 - DNA, 394 bp, Zea mays
acaagcctctagactgagtcctcctactcgcggcggtgctccctccctcttcgtcccccagcgacgcaggcaggcgcgcgcgcggccatgaaggggggcggtgccatgaggccgtcgcctatgttctacgtccacgaggcggacgtcgtccagatccaccacttcctcgaggagtgctccctctgcgccaaatcgctctccggcgacatcttcatgtacaggggtgacacgccgttctgcagcgaggagtgcagggagcagcagatcgaggtggacagggcgaagcaccggcggaagaagcgcgcggcggcgcacgcgctgtccgcacgcagcagggagcaccggcaccagcagcagctgcagcagcaccaccaccagcagcagcaaccgcagc

SEQ ID NO: 81554 - DNA, 431 bp, Zea mays
tacaacactctagagtgagtcatgctaatcacatggttgggaagctggcattagtctcccggagttagcttagctgtggggtagtgccgagaattgtcttggaagcacttcctgctgtttttactattcgaaaagaagcaaaaggcaaaagctatcgatataatagtgagtgaatgcagttaatagggataagggctatgacggtattgtgctcgagtcctggtcaagatgggctatttatggtgtgctggatgaccaagagctacgttacatggcacttgaatttgttaagcagctgggagaggttttgcattcagtcaattccaaaatcaagtagccaccatttggaattaatttatgttattccagctccaagaatgcaaaagctcaataataaggactttggacccaaagatctcatgcatctggct

SEQ ID NO: 81555 - DNA, 385 bp, Zea mays
tgggatccctcgctaataacatcatggtcgtgggcgccgtccttgcggcgctcgtcgccggcgggtcgtgcgggcccccgaaggtgccacccggccccaacatcaccaccaactacaacggcaagtggctcaccgctagggccacctggtacggtcagcccaacggtgccggcgctcctgacaacggcggtgcgtgcgggatcaagaacgtgaacctgccaccctacagcggcatgacggcgtgcggcaacgtccccatcttcaaggacggcaagggctgcggctcatgctacgaagtgagatgcaaggaaaaacctgagtgctcgggcaatccagtcacggtgtacatcactgacatgaactacgagcctatcgctccctaaca

SEQ ID NO: 81556 - DNA, 415 bp, Zea mays
  unsure (1)..(415): unsure at all n locations
acaacactctatagtgatgtcgtattataagtgcatgaatccaaattataccgagtttaaattcccgcaaatcaaagctcacccatggcataagatattccataaaaggatgcctgctgaagcggtagatctcgtgtccaggcttctgcagtactcaccaaaacttcggtcgactgctttggaagcattggtccatccgttctttgatgaacttcgggatccaaacacccgcttaccgaatggtcgttttcttccgcctctcttcaattttaagccccatgagctgaagaacgtgccggcggatttcatggtgaaattggtcnctgagcatgcacggaagcaatgtgccttcgtagggtggtgatctctggataagaggatgacgactcgatgattagctgaggaccaagttaat

SEQ ID NO: 81557 - DNA, 439 bp, Zea mays
atacaacccactagaatgagtcgaacaacggccgcgctcttggtgctagccctcgcgctagtggcggccaccgccccacaggtagcggaggcaaagaagaagagagcggcggagagcggcgaggcggcggaggcgaagaagatccaggacgacttctgctcgacgctgtgcgagggcaagaaggggacggacctggtcgtgtgcaaggagtcctgcgcgctctcccagcagtccaacctggtgctgtacggcaggatccagtgcaagggcaagtgcaccgagcagaagggcatcacggcgccggccatgaaggtctgccaggaggagtgcgacaaggcgtacgtggtgaaggcggccgaggtcaccaaggcctgcagcgtcacctgcgccaaggagaagaacccgcgcctcagcgagaactgcaagaggtcctgcaccc

SEQ ID NO: 81558 - DNA, 397 bp, Zea mays
ctctagccagcctcgcattaacgaagatggcgttcatcagcaatgtcgcagtgaaggcggcggccgtggccgcgctgctgctggtcgcagcggtgtcgcctgccgcgcgcgcggcggcggtggcggtggcgggaggggcgccgtcggtgccggcgggtccgctggacatcgcgcagctgggcgccaagggcgacggcaagtcggacagcaccccgatgatcctcaaggcgtggaagaacgcgtgcgaggcgacgggggtacagaagatcgtcatcccgccgggcaactacctgacgggcgggctggagctgaagggcccctgcaagtcctccatcatcatccgtctcgacggcaacctgctcggcaccggcgacctcagcgcgtaccaaaggaactg

SEQ ID NO: 81559 - DNA, 381 bp, Zea mays
tacaagcctctagactgagtcttcgtagacaataatggcgcctctcctggcgtcgatgctgctcgtcgggctcgccgtgggctccgaggaggaggaggacggcggcggcaaaaagaagccccacgtcaaccacggcaagtttaaggcggagccgtggacggacgggcacgcgacgtactacggcgggcgcgacgggttaactgacaccacggacggcggcgcgtgcggctacaagggcgagctggggaaagactacggcaccctgacggcggccgtgggcccgtcgctgtacaccaacggcaccgggtgcggcgcgtgctatgagctcaagggccccaagggcaccgtggtggtgacggccaccaacgaggccccgccgcc

SEQ ID NO: 81560 - DNA, 422 bp, Zea mays
caagcctctatatagagtcttattattttttttggagcaagcaagcagataaaataatgaaatactcgtcacatatgccatggctggcatatcaagcggtgcaggtgaaacaaagtctttgtggtagcatacagcatgctacgcacgaaggtactactacataccgcataacttgagcgaatacaacaagcaaaccataggcaagccccggaatgaaaggaaacaagggtacaaatgtggcggcccaaaccacccttactcgtcttggatggcctcctcgtcctcatattccgcctcctcatcagcagtggcatcctggtactgctggtactcggacaccagatcgttcatgttgctctcagcttcggtgaactccatctcatccatgccctcagcagtgtatcaatgcaagaaaacctttc

SEQ ID NO: 81561 - DNA, 411 bp, Zea mays
agctacctcgaaatggaggcgacgagcaaggcgatggcttcaggcctcctcgttctgctgcttctcatcaacacaggctttgtcctgcccgtccattccgaggactgctgggccgacacccgcgtcatctgcaccaagacgcacaactgccgggacgacacttgcgcggggcgcggcatgccggacggccgctgccactgggagttccccaacctggtgcccttctgccagtgcctgcgccccaactgccactagtccgggcgcctcggattggctcacttcgccggcgatgatggatggtgcccaactgcgactgcccagtctgctccattcgttgttgtttaaggcataatatataaactgccaaattcacatgtattttgggatatttgttatcatactatgaaatga

SEQ ID NO: 81562 - DNA, 409 bp, Zea mays
acaagcctctattctgagtcgtgtcacggagcccagggagcggaggcgggcgggccggcgggcggccatggacgtggactgcgtctcgctgcccgacgccccggcgggcgacgtggatggcggcgccgcccggccgtggcccaaggccgtgaccaacggcggcgtccacgagctgctggagtgccccgtgtgcaccaactccatgttcccgccgatccaccagtgccccaatggacacacgctgtgttccacatgcaaggccagagtacacaaccgttgccctacctgcaggcaagagctgggcgacatcaggtgcctggcgctggagaaagtcgccgagtcgctggagctcccctgcaggtactactcgctggggtgccccgagatcatgccttactacagcaagata

SEQ ID NO: 81563 - DNA, 400 bp, Zea mays
acaagcctcaagtatgagtctttataaataaacagggttccatggtctctctcactcaaagaacagtgatttgaaataattgggaataaatagttcgtgaatccctgaagcgtgcatatatatattcctgccaagataaaggtaatggagtcgtcacgcaggttccagccggccgtcatcctgcttctcctgctcattgtgtccaccgatatggcacaggcaagggaatgcgagaagtacagtgagcgatttgttggggcatgcatgatcgcagacaactgcgccaatgtgtgccgcggtgagggcttcttggccggcaggtgcagcaccttccgccgccgctgcatctgcactaggcagtgctaaacaagatcgctcgatcgcttgccatgcatcgaca

SEQ ID NO: 81564 - DNA, 412 bp, Zea mays
gattcgccacagctcgttatcctcctcttgcattgcattgcaggtcgtagttgagcagcagcaaccactgcacaggatgtcgtggcagacgtacgtcgatgagcacctcatgtgcgagatcgagggccaccacctgagctctgccgccatagtcggccacgacggcgccgtttgggcccagagcaccgcattcccacagttcaagccagaggagatgaccaacatcattaaggacttcgacgagcctgggtttctggccccgatcggcctcttccttggccccaccaagtacatggtcatccaaggcgagcccggcgctgtcatccgcgggaagaagggatctggaggcataactgtgaagaagaccggacaggcgctggtgatcggcatctacgacgagcccatgacccct

SEQ ID NO: 81565 - DNA, 408 bp, Zea mays
tctggtcgaaaatttcgaggctaaggtcgcggatttcggacttgccaagctgaccacagacaccaacacgcacgtctccacgcgtgtcatgggaactttcgggtatttggccccggagtacgcgtcgagcggcaagctcaccgacaagtcggacgtgttctccttcggcgtcatgctcctggagctcatcaccggcaggagaccggttgatcccacgaactacatggaggacagcctggtcgactgggccagacccctcttggcgcgcgcgctgtccgaagacaacttcgacgagctgctcgacccgcggctggagaacagggtcgaccggctggagctggagcggatgtgctcctctgccgcggcggccgtccgccactcagccaagcggcggcccaagatgaaaca

SEQ ID NO: 81566 - DNA, 404 bp, Zea mays
aagactctacacagagtcgcactatttctccttcccccttcaggctccccgatccgacgaccccagcggcggcgatgggcggcaaggacctgacagaggagcagatcgcctcgatgcgggaggccttcacgctgttcgacacggacggggacggccgcatcgctcccacggagctgggcgtcctcatgcgctccctcggcgggaacccaacccaggcgcagctccgggacatcgccgcgcaggagaagctcacggcgcccttcgacttcgcacgcttcctcggcctcatgcgcgcccacctcaggcccgatcccttcgaccgcccgctccgcgacgccttccgcgtcctcgacaaggacggctccggcaccgtcgccgtcgccgacctccgccacgtcctcacg

SEQ ID NO: 81567 - DNA, 402 bp, Zea mays
ctaagacttgatttagttatggacggattggtaggcctcttgaaagttcgcgtggtccggggtatcaaccttgcctaccgcgacgcaagaggcagcgatccgtatgtcgtcctacggcttggcaagaagaaactgaagacaagcgtgaagaagagatccgtgaaccccatatggcaagaggagctaactctgaccgtcacagatcccagccaaccactgaagctggaggtgttcgacaaggacaccttcagcagagacgaccccatgggagacgcggaggtggacgtggcgccactgatggaggcggtgagcatgaacccgcgggaggagagtctgaggaacggcgccatcatcaggtccgagcggccgagcgccaggaactgcctcgccgacgagagccac

SEQ ID NO: 81568 - DNA, 394 bp, Zea mays
cgggccgacccacgcgtctacccagactcctgctcgacggggcagctgcacgtggccgtgttcaagccggcggacgacgagcccatggccgccaacaacccgcgcggcctccccgtgtcgtccaccggcgaaggcctgaagaaagggacgcgcgtcggggagggggcgctgagggaggtcgcggcctacatcctcgaccacccacccaggagcgggaccgcggatgatgggttcgccggtgtgccgccgaccgcgctcgtccggtgcacgcacggagccttcaggcacggcggagccggatccggagccggagcgagggcgccggtgcccaagctggggtccatgcaggccttcgttagtaactgcggcagctgcgaggacatgggacccagcg

SEQ ID NO: 81569 - DNA, 412 bp, Zea mays
ctcgcgggccgacccacgcgtcaactggatctcaagccaggcgctcagttccgcgagaagctgttcctgaacatcagcaagccgttcatcacgttccggtcggaccccaagaagcccgccgtcgtggtctggaacgacactgcggccacgaacggcaaggacggcaagccggtgggcacggtggggagcgccacgctggcggtggagtcggactacttcacggcgtacggcgtggtgttccggaacgacgcgccgctggccaagcccggcgccaagggcggccaggcggtggcggtgcggctgttcgggaccaagacgcagatctacaactgcaccatcgacggcggacaggacacgctgtacgaccacaagggcctgcactacttcaagggctgcctcatccggggcagcg

SEQ ID NO: 81570 - DNA, 433 bp, Zea mays
acaagccactagactcactcgtcttagccctgcggaccgtagagctcctggagcaagccgggttcggccccgtgaagcaggaccacagccgcgggctcgaccacggcgcctgggtgccgctgatgctcatgtacccggacgccagcatccccgtgtgccagctctcggtgcagaccgaccgcgacggcacgtaccactacaacctcggcaaggcgctggcgcccctgcgggaggaaggcatcctcatcctcggctccggtagcgccacgcacaacctgcgcaagattagcccgtccgacgcgcccgtgccgcagtgggccgccgagttcgacacctggctcaaggactcgctcctcaacggaaggtacgaggacgtgaagcggtacgaggagaaggcgccgcacgcgagggtggcgcacccgtggccggacca

SEQ ID NO: 81571 - DNA, 389 bp, Zea mays
taccgatgctacagcacacgtggcagcagcttgccatggcgctgccggccccctccgccccgccgcaggtcaccgcaagacggcgctgcggagtgcctggggtgcgcacgggttgttttggcgaccccgagatgaagcggccagcgcgggtggcgggctacaatgcgtacgcggtggggggcaatgtgaaggcgtccctccgccggggcctcaggtggttcaagcgcaaatgctcacgcatcttgaatatctgaccaccgtgcgagtgcgcgcggcggcgttctcccactcgtcatggatcgcaaggccgctcttttaccgcaacaattatggcatgcactctgcggtgcattgccaatttatgcattgatcaagaactcgcgtgattg

SEQ ID NO: 81572 - DNA, 385 bp, Zea mays
caagggacgtaagaagtcgtctaattcttggatcgaattagacgacttcttcgtccctctcttcattagcacgctaacttgtaatctgcaggatctaagcaaagacttgatttagttatggacggattggtaggcctcttgaaagttcgcgtggtccggggtatcaaccttgcctaccgcgacgcaagaggcagcgatccgtatgtcgtcctacggcttggcaagaagaaactgaagacaagcgtgaagaagagatccgtgaaccccatatggcaagaggagctaactctgaccgtcacagatcccagccaaccactgaagctggaggtgttcgacaaggacaccttcagcagagacgaccccatgggagacgcggaagtggacg

SEQ ID NO: 81573 - DNA, 392 bp, Zea mays
acaagcctctacagtgcgtctcatgatggttactccgcgcgccttctctttctctcccggacgtcgatcgtgttcttcagcacgggctagctagctccctccctcccagccatggcgacgccggacaacaaggggcacgggcatccgctgcccaagtttggggagtgggacgtgaagaatccggccacgtccgagggcttcaccgtcatattccagaaggcccgcgacgacaagaagaccaccaccggccctggggctgggaacgcgcgcgcaggcattccgccggccttcaggaacggcggcggcgacggcgggtacaggcccgacttcggcgacggcaaccagtacacgccgcccaaacggaagaagtgggccttctgtggctgctgaat

SEQ ID NO: 81574 - DNA, 236 bp, Zea mays
aagataaaggtaatggagtcgtcacgcaggttccagccggccgtcatcctgcttctcctgctcattgtgtccaccgatatggcacaggcaagggaatgcgagaagtacagtgagcgatttgttggggcatgcatgatcgcagacaactgcgccaatgtgtgccgcggtgagggcttcttggccggcaggtgcagcaccttccgccgccgctgcatctgcactaggcagtgctaaac

SEQ ID NO: 81575 - DNA, 444 bp, Zea mays
tcgccggtcgacacacgcctccaaaccaactccatccatgcgcctctcgctctcgctggtggtgctcctcctcctccacctgctcccggggcgggcggcctccttttccacctcctgctggtgccagggccgggagggcgtcgcggaggtggcgcgcatggggctcgccggggacgggtcggcggacaccgcccacctcagtaataatgaaaatgggcggttcatttatggagttgcgagttctcctggtaaaagagcatcgatggaggacttctatgaggcaagaatagacgacgttgatggagagaaaattggaatgttcggtgtatatgatggtcatggaggagtccgagcagctgagtatgttaagcagcaccttttcagcaatttaatcaaacacccaaagttcatcactgataccaaggctgctatcgccgaaactta

SEQ ID NO: 81576 - DNA, 368 bp, Zea mays
ctctatagaaagtcgtagtagatcccacgaactacatggaggacagcctggtcgactgggccaggcccctcttggcgcgcgcgctgtccgaagacaacttcgacgagctgctcgacccgcggctggagaacagggtcgaccggctggagctggagcggatgtgctcctctgccgcggcggccgtccgccactcagccaagcggcggcccaagatgaaacagatcgtccgtgctctggaaggggacgcgtcgctggacgacctgaacgacggggtgaagccagggcagagcatgatgttcagctccggatcggagtacgactccggggccaactacgcggccaacatcagcaagttcaggaaggtggcc

SEQ ID NO: 81577 - DNA, 414 bp, Zea mays
gaaccccacccacagcaaacgactggagatctactaaacctggaagcagaggtgaatccttcggctctggaactcgaacaaagcaatgcattggcactcgctattgtagcaccaggtgactacaagccgccagcatctcaaagtatgtttgatgtcaattcgtctgggtgggagctggcactggtcaatgctccaagcacccatacaagccaagcagttgagaccaacttggctggaggctttgacaagctgctacttgacagcctctacgaagacgaggccaggaggcagcagatcgccggcgcgacctacaccggtagcctaggagcagccaaccctttctgcaccaatgccagcgattcggttcacatgtccagcagatttgcacaaccggctaatgtgcagttggcactg

SEQ ID NO: 81578 - DNA, 382 bp, Zea mays
acaagactcaagactgactcggactagccgtgtggagcaagaactcctgcaccaagaagtacgactgcaagatccttcccaactcgctggtgatggacttcgtgaacaacggggaggtgtccggggtcacgctgctcaactccaagttcttccacatgaacatgtaccggtgcaaggacatgctgatcaaggacgtgaccgtgacggcgcccggggacagccccaacacggatggcatccacatgggcgactcatccgggatcaccatcaccaacaccgtcattggcgtcggcgacgactgcatctccatcggccccgggacctccaaggtgaacatcaccggcgtgacctgcggccctggccacggcatcagcatcggaag

SEQ ID NO: 81579 - DNA, 363 bp, Zea mays
ctacgccaccgcaaccgtgtgaccgcccgtgccgccggcgatcccgatccgccgacccgtcccagccccgctcgcagccatgtcgccgtcggagccgacgcgggaggagagcgtgtacatggccaagcttgcggagcaggcggagcggtacgaggagatggtcgagttcatggagcgcgtcgcgcgctacgccgggggcgccggcggcggggaggagctctcggtggaggagcgcaacctgctgtccgtcgcctacaagaacgtcatcggcgcccgcagggcctcgtggcggatcatctcctccatcgagcagaaggaggaaggccgcgggaacgaggcgcacgccgcatccatccgcgccta

SEQ ID NO: 81580 - DNA, 399 bp, Zea mays
cgggtcggtccacgcgtccgacaacgccgagcgcgacggcccgggccggtacaacttcgcgggctacgcggagctcatggagatggcgcgcaaggccgggctcaaggtccaggccgtcatgtccttccaccagtgcggcggcaacgtcggcgactccgtcagcatcccgctgccgcggtgggccgcggaggagatggagaaggaccaggacctctgctacaccgaccagtggggccgacgcaactacgagtacgtctcgctcggctgcgacgccctgcccgtcctcaagggacgcacgcccgtcgagtgctacaccgacttcatgcgcgcgttccgcgaccacttcgccgactacctcggcaacaccatcgtggaaatccaagtcggcatgggcccccc

SEQ ID NO: 81581 - DNA, 373 bp, Zea mays
aaccctctatactaagtcctaataagaacctttctccctcctccacctttctccttttcttgccacggcaaaacaccttcgccggcgagagcatggcgatggcgtaccgtgtcctggaggtcaccctggtgtcggcaaatgacctcaagaaagtgtcgctcttctcccggactcgcatctacgccgtggcttccatctccggattcgacctccgcatcccttcccacagcacccaagcagaccacagcaacggctgcaacccctgctggaacgccgtggtacacttccccatcccggctgccgctgacacccgcggcctcgcactccacgtgaggctccgcgcccagcgtctatacctgggcgatcgcgacat

SEQ ID NO: 81582 - DNA, 373 bp, Zea mays
gacccacgcatccacggacgcgtgggcggacgcgtggggtcgacgtccagcagatcgagagcggcctggtgcccatgccggtctacggcgccggggccggggccggctcgttcaccctgcagtgggacggctgctacggccccgcggactcgaggcacaacggctaccgcttcggaagcggaggctgcgggatgcggcaccacggtcgcaccccggagcaggaccggaagaagggcgtgccgtggacggaggaggagcacaggctgttcctcttaggcctgaagaaatacggcaagggggactggaggaacatatcgcgcaactacgtccatacgcggacgcccacgcaggtggccagccacgcgcagaagta

SEQ ID NO: 81583 - DNA, 426 bp, Zea mays
tcgcgggccgacccacgcgatccacggacgctcgggcgaaaatccgacatgtacgtgttctgctgctcctacgcccacaacgtcgcgcccaaaggcaagttcatcgccttcgtctccaccgaggccgagaccgacaagcctgagatcgagctcaagcccgggatcgacctgcttggccctgtagaggagaccttcttcgacatctacgacagatatgaacccgtcaacaacccggaggaggactgctgtttcctcacaaatagctatgactccaccacccattttgagacgacggtcaaggatgtgctcgccttgtacaacaagatcactggaaaggagcttgatctctcagtcgatttgaacgctgctagtgctactgagcaagaagctgcttgaacacccggcggcctcttttttttgcagctc

SEQ ID NO: 81584 - DNA, 399 bp, Zea mays
atactctacactgtgtcgtattaccacgcccgcaggccgggaccggcggggtcgcgcgccgggtaggaggacgagaagaggaatggcggtatggcggcgccgccggcgagggcccgggccgactacgactaccttatcaagctgctcctcattggagacagcggtgttggcaagagttgcctcctgttgcggttctctgatggttccttcactacaagctttattaccacaattggtattgactttaagatacgaccaatagaattggatggcaaacgtataaagctacagatttgggatacagcgggctaagaacgcttccggactattaccaccgcgtactaccgacgagctatgggcatcttgctggtttatgatgtcacccatgaatcctccttt

SEQ ID NO: 81585 - DNA, 391 bp, Zea mays
atccaagctctctcctcatcacccacccagcgcgacgaaaccggggggctatcgctccagctccgccgcaccaacgacctcaccccccgaggacccgccggcggtacaccgcctccctatcacgcctcatcgattcctcaggtctacgttttttttggttttgtgatttatccaaatttggaccgcaagcatgactacggcgaatcattatcagcacatcatttcacccaagcctgttgtgggcaaagcatgaaaattgaaggatctcatgataaaatgtgataataggatatgtgctgactgtggtgcacctgatcccatatgggcatctactaatattggagtgtttctttgcttaaaatgtggacatgttcatagggcacttggacct

SEQ ID NO: 81586 - DNA, 443 bp, Zea mays
  unsure (1)..(443): unsure at all n locations
ctcgcgggtcgatgcacgcctctagccgcagtgccagcagagcctcgtcgtcgagctggcgctgcagacgcacgcgctgctgcgcgagctcggcaaccccgcgggcgcgcgcatcgtcctcgaaaccgagcgccgcgcggcactggaggccgccccctcagccgccgccgcccgagacggaggacgcggggcgtcgcgggctaataataagcgcggagtccgcgcgccgccgccgccgctgctggacgagccgtcgtggaccatgttctgcaacggcaagaagaccgggtacgcggtgcgaaggcaggccacggacgacgacctcgctgtgatggagacgctgcgggcggtctccatgggcgccggcgtgctccccgggagggccgccccttcgtcggcgcccgacgcggctgcngcggcggcagcggacgacgaggtgccct

SEQ ID NO: 81587 - DNA, 436 bp, Zea mays
gggtcgagacacgcgtctagaataactatatttaaaacagttaagaattcatatataagagtgcatatatatatataatcctgccaagacaaaggtaatggagtcgtcacgcatgttccagccggccatcatcctgcttctcctgctcattgtgaccaccgatgtggcgcaagcggcgagggaatgcgagaaggacagcgagcgattccttggggcatgcatggcgtcggacaactgcgccaacgtgtgccgcggtgagggcttctccggcggcaggtgcagcaccttccgccgccgctgcatctgcactaagccgtgctaaattaacctactcccggcagttcgatggtggacgtttattctatttattggcttacttgattttttcccccctaacaataagaaaacgcacgtgctggcatgtacgttgtgttgt

SEQ ID NO: 81588 - DNA, 393 bp, Zea mays
gggcgaatacggaacagtgatcttccgaggggataagcactatgtgcctagccgttctgtctccattcttgctgggtgcaagaacgtagtttacaataccaagagagtgtttgtacaacacagtgaaaggtcattccatacctcagatgtaacaagcaagaataaccagtgggagatgttctcagaaacgatcccaaagtatcgtgatactaaagtcaggacaaaggaacccctagagcaatataaccaaaccaaggacgatactgactacttatggtacaccacaagctttcgcttggagtcggacgatttgccctttagaaatgacatccggcctgtgcttcaggtcaaaagtagtgcacacgcaatgatgggatttgctaatgatgcttt

SEQ ID NO: 81589 - DNA, 364 bp, Zea mays
acggacgcgtgggcgaattcccaggcaggcaggtcggcgaggagggcaggaagaccgaagaccgagccgtgcgggggctcgggacgggaacgggacaggaccccaaaatctcagatccttcctgcccgcccgcccgtgcccgtcgacgcgtcgttcttgccggccgcgcctcacctccgccctctcctcctccagggggatcggatacgccacaggctgcgcgatggtgctgtgggtcttcggctacggctccctcatctggaaccccggcttcgacttcgacgacaaaatcctcggcttcatcaagggctacaagcgcacctttaatctcgcttgcattgaccacagaggcacaccggagcat

SEQ ID NO: 81590 - DNA, 341 bp, Zea mays
gttcgtggatggctgcgccacgacctctcctgctgtcgctgctggtcgccgtgctagcggtggccgccgatgtcgccaacgccggccacgccaagcccctgacgcctggcgggcgtgtggtacacgacaaccacggcaagttcacggccgggccgtggaaacccgcccacgcgaccttctacggcgggcgggacgggtccggcaccacggcgggcgcgtgcgggtacaaggacacgcgcacgcacgggtacggcgtgcagacggtggccgtgagcacggtgctgttcggtgacggcacggcctgcggcgggtgctacgaggtgccgtgcgtggacagccct

SEQ ID NO: 81591 - DNA, 356 bp, Zea mays
aatccacccacgcgtccgcttcaccttgttcttcgccttcgcggtggcatcattgaaccttccctccaggcgctcgcccgcaagtacaaccaggacaagatgatctgccgcaagtgctatgcacgcctgcaccccagggctgttaactgccgcaagaagaagtgtggccacagcaaccagctgagggcaaagaagaagatcaagaactgaagcttgccaaatcggttccttgcatggtttgcgtcaacaagacgtacaagtttcaaagcttttgtatgccataggctgctgcaacgtttttaagtcggaactcatgtgttcctgttcagggtcttcagcatgacataaatcgtttc

SEQ ID NO: 81592 - DNA, 368 bp, Zea mays
cacgcctctacacagacgtcctgggatcaccggtgggtggcccggccaggcgcggtggccgggcgggtgcggcctcctgccccgacctcggctcggcgcgcgcaggcgcctggcagcccccagcctcggcctcggccaggcgcgcgcgacccccagccccggctcgccggctcgccggtcatggtggctccgatccgggctcctccggcatgggcaggcgcgggttcccccggctagcagcctctcctggtgggcacggcctgccccggcggctcaggaaggcgcggcggccccggcgtgcacagccgtggtccagccatggcggcgcgggcacgcagcctcggctccccggcgggcatccatggcgc

SEQ ID NO: 81593 - DNA, 377 bp, Zea mays
acaagcctctagaatgagtcgtaatagcgtgcgttcgtgcagccacagacaggcgtccgggcaccatgtctttcaccggcacgcaggacaagtgcacggcgtgcgacaagaccgtccacttcatcgacctcctcacggccgacggcgccatctaccataagacatgcttcaagtgcagccactgcaaaggggtcctctcgatgtgcagctactcctccatggacggtgtgctgtactgcaagacccacttcgagcagctcttcaaggagaccgggagcttctccaagaacttcacgccaggtggcaagtcatcagacaagggtgaactgacaagggccccaagcaagctgtcgtctgcattttctggtacccaggat

SEQ ID NO: 81594 - DNA, 362 bp, Zea mays
cgggtcgagcacgcgtccggggacgtaagaagtcgtctaattcttggatcgaattagacgacttcttcgtccctctcttcattagcacgctaacttgtaatctgcaggatctaagcaaagacttgatttagttatggacggattggtacgcctcttgaaagttcgcgtggtccggggtatcaaccttgcctaccgcgacgcaagaggcagcgatccgtatgtcgtcctacggcttggcaagaataaactgaagacaagcgtaaagaagagatccgtgaaacccatatggcaagaggagctatctctgaacgtcatagatcccagccaaccactgaagctggaagtgttcgacaatggcacct

SEQ ID NO: 81595 - DNA, 386 bp, Zea mays
acgacgttgagaacacggacggcgtccacgtcggaggctcctccaagatcagcatcctcaactcgaccatcggcaccggcgacgactgcgtctcgattgggcccgggtgcaacggcgtcttggtggacagcatcacctgcggccccgggcagggcatcagcgtcggctgcctaggccgctacaaggacgagaaggacgtgagcgacatcacggtgcggaactgcgtgctcaagaacaccaccaacggcgtgcgcatcaagtcgtacgtggacgccgagtccgtgctgacggcctcccatctcaccttcgagaacatcacgatggaggaggtggccaaccccatcgtcatcgatcagtacttctgcccgcagaaggtatgccctggc

SEQ ID NO: 81596 - DNA, 417 bp, Zea mays
  unsure (1)..(417): unsure at all n locations
agaggacaagaactacagctacagcctcgaggtcggcgccaacgggaggaagatggtgtgggagggcaccccaaggagcgtccgcgacagccaccgcaaggtgagggacagccacgacggcctcatcatccagaggaacatggcgctcttcttctccggcggggaccggaaggagctcaagctcaggatcaccggacggatctggaaagagcagcagacaccagacggcgcatgtactccaaatctgtgcagctaattaagcaatcttcaaacacacaccttgcctgtccttctttctctttctaattaatcgtggtggtggtgctcaaagggattatttattactaattattaggaggacgtangatgctcgtgtaaatgaaactgtgtatattatatggatggcatggcatccct

SEQ ID NO: 81597 - DNA, 421 bp, Zea mays
acccacgcgtccggcaaggacatgctgatcaaggacgtgaccgtgacggcgcccggggacagccccaacacggatggcatccacatgggcgactcatccgggatcaccatcaccaacaccgtcattggcgtcggcgacgactgcatctccatcggccccgggacctccaaggtgaacatcaccggcgtgacctgcggccctggccacggcatcagcatcggaagcctagggcggtacaaggacgagaaggacgtcacggacatcaacgtcaaggattgcactcttaagaagacgatgttcggcgtccgcatcaaggcgtacgaggacgccgcctccgtgctcaccgtctccaagatccactacgagaatatcaagatggaggactcagccaacccaaccttcatcgacatgaagtactgcc

SEQ ID NO: 81598 - DNA, 366 bp, Zea mays
cccacgcgtccggaagaagaagaaaaagaagggcgccaggaagggcaggaaacgcgcctccatcctgggcgacgccggcaccttcgacccggacttctcgcggcggtaccggctcggcgcggagctcgggcgcggcgagttcggcgtcacgaggcggtgcgaggacgccgccacgggggaggccctggcgtgcaagacgatccggcggaagcggctgctcctgcgcctcgccgggcccgacgcgaccgacgtgcagcgcgaggtggagatcacgcggcgcatgtcggaggtgagcgggggcagggtcgcgtgcctgcgcgaggcgtgcgaggacgacgacggtgtgcacctcgtcatggagctctg

SEQ ID NO: 81599 - DNA, 367 bp, Zea mays
agcaagatctaagcaaagacttgatttagttatggacggattggtaggcctcttgaaagttcgcgtggtccggggtatcaaccttgcctaccgcgacgcaagaggcagcgatccgtatgtcgtcctacggcttggcaagaagaaactgaagacaagcgtgaagaagagatccgtgaaccccatatggcaagaggagctaactctgaccgtcacagatcccagccaaccactgaagctggaggtgttcgacaaggacaccttcagcagagacgaccccatgggagacgcggaggtggacgtggcgccactgatggaggcggtgagcatgaacccgcgggaggagagtctgaggaacggcgccatcatc

SEQ ID NO: 81600 - DNA, 386 bp, Zea mays
ttcgcggtccgacccacgcatccatgcgctgcaagcaacaaagttctactctgtccacccgtccatctagctctcaagaaccaacccgtaccagcgctatccggccggccatggcggcggcgcgccggctctccctgcccctcgtcctgctggtcgtcctggccgtcgccgggcgcgcggtggcgcaggactacgacttcttctacctcgtgctgcagtggccgggggcctactgcgacaccaagcatagctgctgctaccccaagtccggcaagccggcagtggacttcgggatccacagtctctggcctaaccgcgaccaccgcacgttcccgcagaactgcattcccgaccacgcattcaatccgtctattgtgagcgatcta

SEQ ID NO: 81601 - DNA, 303 bp, Zea mays
cccacgcgtccgcccacgcgtccgcaacaagatggcatgtatagacaatgcaatgagagccttgttccttctagcgctcttctgcaccgtgcatggtgagaaggcaaagtcaaaggacaacgattcaaaagcgtccgggcccggtgggtccttcgacatcaccaagttgggcgcctctggcaatggcaagacggatagcacgaaggctgtgcaagaagcgtgggcatccgcgtgcggcggcaccgggaagcaaacgattctcatccccaagggcgaattcctcgtcggaccaatcaacttcaa

SEQ ID NO: 81602 - DNA, 410 bp, Zea mays
cgacaagatggcgtgcacaaacaatgcgatgagagccttgttcctcctggtcctcttctgcatcgtgcatggtgagaaggaagagtcaaagggcatcgatgcgaaagcgtccgggcctggtgggtccttcgacatcaccaagttgggcgcctccggcaatggcaagacagacagcacgaaggctgtgcaggaggcatgggcatcggcgtgcggcggcactgggaagcagacaatcctcatacccaagggtgacttccttgtcggacaactcaacttcacaggcccttgcaagggcgacgtgaccatccaggtggatggcaatctgctggcgaccacggacctaagccagtacaaggaccatggtaattggatcgagattctacgtgtggataacctggtcatcaccggca

SEQ ID NO: 81603 - DNA, 401 bp, Zea mays
aggacacgtgggcggacgcgtggggtgaccctcttaggtgacggctccaaaaattccatcgtcaccggcaaaaaaagcttcgccgacgggatcacaactttcaagacagcaaccttcactgcgcaaggcgacgggttcatggcgatcgggatggggttccagaacacggccggcgcggagaagcaccaggcggttgcgctgctggtgcagtcggacaagtccatcttcctcaactgcaagatggacgggttccaggacactctgtacgcgcactccaaggcgcagttctaccgcaactgcatcatctccggcacggtggacttcatcttcggcgacgcggcggcggtgttccagaactgcatcctggtgctgcggcggcccatggacaaccagcagaacat

SEQ ID NO: 81604 - DNA, 369 bp, Zea mays
  unsure (1)..(369): unsure at all n locations
agccgccatcatagaaccgccgccccgtccgaggccggactgtgccctggctggggccggtagccgcgaccaggcaaggggcgaccgcgccctcgccgggatccaggcgctcgccatgcgccgtggtccgcgaccgccttggagagccgccacggcctccgtcgggccgcccgcagtctgctccatccggcgccaggagcagcagcgcctgngcgtcctcgtcatgcgtgccggtgtcagccaaccccgcaccaggaggcggccacgccgaactccgcgagaagccgaccgcgcccgacgttgccggatccgcaccggcggtcggtgtggcagggacgtgccgcttgcgcagagatgcagagcacccgt

SEQ ID NO: 81605 - DNA, 392 bp, Zea mays
acaaggacctggaggccgccgcgcccatgctcaccttcgaggcgggcaagacgtaccgcctccgcgtgtgcaacaccgggatcaaggcgtcgctcaacttccgcatccagggccacgacatgaagctcgtggagctggagggctcacataccctgcaggacgtgtacgactcgctggacgtgcacgtcggccactgcctctccgtgctggtcgacgccgaccaggcgcccggcgactactacatggtggcctccacgcggttcatccacgacgccaagtccgcctccgccgtcatccgctacgccggctccagcggcgccccgccggcgcccaacatgaccgagccaccggccggctgggcctggtccatcaaccaggccaggtcgttccgc

SEQ ID NO: 81606 - DNA, 393 bp, Zea mays
aatcgatcacgacaaaatggcgtgcacaaacaatgcgatgagagccttgttcctcctggtcctcttctgcatcgtgcatggtgagaaggaagagtcaaagggcatcgatgcgaaagcgtccgggcctggtgggtccttcgacatcaccaagttgggcgcctccggcaatggcaagacagacagcacgaaggctgtgcaggaggcatgggcatcggcgtgcggcggcactgggaagcagacaatcctcatacccaagggtgacttccttgtcggacaactcaacttcacaggcccttgcaagggcgacgtgaccatccaggtggatggcaatctgctggcgaccacggacctaagccagtacaaggaccatggtaattggatcgagattctacg

SEQ ID NO: 81607 - DNA, 392 bp, Zea mays
ccggacgagccttccgcgcgacgctgcacggctccgccagccacccgtaaaaccctagacggctagccggcgcacggaagcgggcagcggagcggaggtgagcctctcctgcgtcggattgtccccgcccccgcccccgctaggcgccatgaagctgacggtgaagaccctcaagggaacgcacttcgagatccgggtgcagcccaacgacacgattatggctgtgaagaagaatattgaagagatacaagggaaagacagctatccatggggccaacaactgctgattttcaatggaaaggtcttgaaagatgaaagtacattggaagagaataaagtcaatgaggatgggtttctagttgtcatgcttagtaagggtaaaacatccgggt

SEQ ID NO: 81608 - DNA, 421 bp, Zea mays
accacacgtccggccagagcctacaacggacaggtttgttgtcatcacttctggaccagacgaaagatgcattcctggaaacaccatcgccgtccaagctgacatgccatacagtggcctgtcatcgttcggaacagcatttttgtccaagttcgaatgttctcagatgccacatccactgttagagcacgtgaccttcgtggacactccaggagttttatcaggggagaagcagcggacgcagcgcagctacgatttcaccggagtcacgtcgtggtttgcggccaagtgcgacctcatccttctcctgtttgatccgcataagcttgacatcagcgatgagttcaagcgtgtgatcgggtctctccgcgggcatgatgacaagatacgcatagttctcaacaacgccgaacaagttgat

SEQ ID NO: 81609 - DNA, 369 bp, Zea mays
atgacatccttgtcggaggcgcacaacttggaggttcgatgacatcagttcctgatgaggtcattcgatgtaatcatgtatgcacaatcgcggtccgagctgacatgccagagagtggcctgtcagcgttcggaacagcatttttgtcgacgttcaaatgttctcagatgccacatccactgttagagcacgtgaccttcgtggacactccaggagttttatcaggggagaagcatcggactcagcgcagctacgatttcaccggagtcacatcgtggtttgcggccaagtgcgagctcagccttctcctgtttgatccgcataagcttgacatcagcgatgagttcaaacttgtgatcgggtctctcc

SEQ ID NO: 81610 - DNA, 378 bp, Zea mays
acgagcctctaaagcactcctggggcgccatctggaggaaggacagcgacaagccgatcaagggacccatcaccgtccaactcaccaccgagggaggcactaagaccgtctacgacgatgtcatccccgccggctggaagcccaacactgcctacaccgccaaataaactaaccaaataataataagtatcaaatggcacacttgatagacctttattttttattttttatttaataaaaggatataaggagtgtgacaaacaacaacacgaatattgtattgtctatgtatctcctatatatgcaatcccaattttatcatggccacattttaaaatggaatatatgatatatatatgtacatatggattctacatg

SEQ ID NO: 81611 - DNA, 381 bp, Zea mays
cccacgcgtccgaagagctacgcaaacgcacagcgatgcacaagcacgagataccagccaccatgcgcctgtccctcctcctcgtcgtcgtggccgccctctcggcgcgcaccgcggcgcagctgccgctggcgggcggcggcggcggcgccctgaagccggacttctatagccagtcgtgcccgcgcgcggagcggatcattgcggaggtgatgcagacgaagcagatggcgaacccgacgacggccgcgggcctgctccgcgtcttcttccacgactgcttcgtcagcgggtgcgacgcgtcggtgctgatcgcgtccacccagttccagaagtcggagcacgacgcggagatcaaccactccctccccggggacgcct

SEQ ID NO: 81612 - DNA, 392 bp, Zea mays
attcgtcatgatgccgctggacaccgtcaaggagtgcggcaccgcgctgcaccgccgcaaggcggtgcaggccagcctctccgcgctcaagagcgcgggcgtcgagggcgtcatggtggacgtgtggtggggcatcgccgagcgcgacggcccgggccggtacaacttcgcgggctacgcggagctcatggagatggcgcgcaaggccgggctcaaggtccaggccgtcatgtccttccaccagtgcggcggcaacgtcggcgactccgtcagcatcccgctgccgcggtgggccgcggaggagatggagagggaccaggacctctgctacaccgaccagtggggccgccgcaactacgagtacgtctcgctcggctgcgacgccatgcccg

SEQ ID NO: 81613 - DNA, 403 bp, Zea mays
agggatggggagggacgagaggttcccagtgtgggaggccgcgctcggcgctggggtcgccgccgccttcgccgctgggctcgtcggggtttacctttccatgccggactccgactacagcttcctcaagctgccacgtaatctccaggaactccaaatcctcactggccatcttgagaactatactagcgactacaccctacaggtgttggtaggctactgcgccgtgtacatcttcatgcagaccttcatgatcccaggaacgatattcatgtcactgcttgctggtgctctgtttgggcagctccggggcgtggccctggtagtcttcgccgccactgctggcgcttcttcgtgctatttcctgtcgaagatgattgggaagccactggtgttcacgctg

SEQ ID NO: 81614 - DNA, 413 bp, Zea mays
aacacacgtccggcaagccctcgcgctagtggcggccaccgccccacaggtagcggaggcaaagaagaagagagcggcggagagcggcgaagcggcggaggcgaagaagatccaggacgacttctgctcgacgctgtgcgagggcaagaaggggacggacctggtcgtgtgcaaggagtcctgcgcgctctcccagcagtccaacctggtgctgtacggcaggatccagtgcaagggcaagtgcaccgagcagaagggcatcacggcgccggccatgaacgtctgccaagaggagtgcgacaacgcgtacgtggtgaaggcggccgaggtcaccaatgcctgcagcgtcacctgcgccaatgagaagaacccgcgcctcagcgagaactgcaagaggtcctgcacccctcctc

SEQ ID NO: 81615 - DNA, 382 bp, Zea mays
accagcgaaaggcaagggacgtaagaagtcgtctaattcttggatcgaattagacgacttcttcgtcactctcttcattaccacgctaacttgtaatctgcaggatctaagcagagacttgatttagttatggacggattggtaggcctcttgaaagttcgcgtggtccggggtatcaaccttgcctaccgcgacgcaagaggcagcgatccgtatgtcgtcctacggcttggcaagaagaaactgaagacaagcgtgaagaagagatccgtgaagcccatatggcaagaggagctaactctgaccgtcacagattccagccatccactgatgctggatgtgttcgacaaggacaccttcaccagagacgacgccatgggag

SEQ ID NO: 81616 - DNA, 416 bp, Zea mays
aaaccgcttcatgatgcagatctttgtgaaaaccctgactggcaagactatcaccctcgaggtggagtcgtctgacaccattgacaacgttaaggccaagatccaggacaaggagggcatccccccagaccagcagcggctcatcttcgctggcaaacagcttgaggacgggcgcacgcttgctgactacaacatccagaaggagagcaccctccaccttgtgctccgcctcaggggaggcatgcagatcttcgtgaagaccctgaccggcaagactatcaccctcgaggtggagtcctccgacaccattgacaacgtcaaggccaagatccaggacaaggagggcatccctccagaccagcagcggctcatctttgctgggaagcagcttgaggacgggcgcacgcttgccgact

SEQ ID NO: 81617 - DNA, 408 bp, Zea mays
tgtgaaggaagggggacgcggaggaagatggggctcgcgttcgggaagctcttcagccggctcttcgccaagaaggagatgcggatcctcatggtcggcctcgacgccgccggtaaaaccaccatcctctacaagctcaagctcggcgagatcgtcaccaccatccccaccatcggtttcaatgttgaaactgttgagtacaagaacattagcttcactgtctgggatgtcgggggtcaggacaagatcagacctctttggaggcattacttccagaacacccagggtcttatctttgttgtggacagcaatgaccgtgaccgtgttgttgaagccagagatgagctccacaggatgctgaacgaggatgagctacgtgatgctgtgctgcttgtttttgccaacaag

SEQ ID NO: 81618 - DNA, 411 bp, Zea mays
  unsure (1)..(411): unsure at all n locations
aaaaattcgcatgatgtgggcacgggaccaagatgaacaaggcgttcacgctcgagaagcccatggacctgaagaagggcgtgaaccacgtcgccgtcttggcatcgtcgatgggaatgacggacagtggcgcttacatggagcaccgtctggccggcgtggacagggtgcagatcacgggcctgaacgcgggcacgctggacctgacgaataacggctggggccacatcgtcggcctcgtcggcgagaagaagcagatctacaccgacaagggcatgggcagcgtcacctggaagccggccgtgaacgacaggccgctcacctggtacaagaggcacttcgacatgccgtcgggagagngaccggtcgtgctggacatgagcacgatgggcaagggcatgatgttcgtca

SEQ ID NO: 81619 - DNA, 384 bp, Zea mays
acgcgtccggccggttcccagcccaaacccctgtcatctccactggcagagctcagccaattgcagtaccgggcattcatctggaagagctgaaggaaattacaggcgaacttcagcagtgatgccctcattggcgatggctcgtatgccagagtctattttggtgtgctgaaagatgggacgaaatctgcagtgaagaagcttgactccagcaaacagcctgatcaagaattccttgtgcatgtttcagctgtctcaagattgaagcatgagaatgttgtccaactcgtcggatactgcgccgaaaggagcacccgcgtccttgcttatgagtatgcagctaggggatcattgcatgatatcctccatggtaaagacggtgtc

SEQ ID NO: 81620 - DNA, 399 bp, Zea mays
tagactgagacatcctcaggcacgggctgaacagggacctcagcttcggagcagaggaccgcgccgagaacatccgcagagtaggggaagtagcgaagctgttcgccgacgctggcctcgtctgcatcgccagcctcatatcgccctacagaagcgaccgaagcgcgtgtcgcgatctgctgcccaagcactcgtttatcgaggtgttcctggacgtgccgcttcaagtgtgcgaagccagggaccccaaaggcctctacaagctcgcacgcgccggcaaaatcaaagggttcaccggcatcgacgatccttacgaaccgccgtcggactgtgagatagtgatccagtgtaaagtcggcgactgcccttcgcctgaatcgatggctggtcacgttgtgt

SEQ ID NO: 81621 - DNA, 428 bp, Zea mays
gcgcgggccgatacaagcctctacattgactcctactaacattacaggtcatagctaagcaggtctgacaggatgtcgtggcagacatacgtcgatgagcacctcatgtgcgagatcgagggccaccacctgacctccgctgccatagtcggccacgacggcgccgtttgggcccagagcaccgcattcccacagttcaagacagaggagatgaccaacatcatgaaggacttcgacgagcccgggttcctggccccgaccggcctcttcctcggccccaccaagtacatggtcatccaaggcgagcccggcgctgtcatccgcgggaagaagggatctggaggcataactgtgaagaagacagggcaagcgatggtggtcggcatctacgacgagcccatgacccccggccagtgcaacatggtggt

SEQ ID NO: 81622 - DNA, 435 bp, Zea mays
tacacgactctaaacacactcctggtacgacaaggacacgttcagcagggacgacccgatgggggacgcggagatcgacgtggcgccgctggtggaggcggcgaacgcgagcccggaggcgagcctgaggaacggcgccatcatcctgtcggtgcggccgagcgccacgaactgcctcgccgacgagagccacgtgtgctggaggaacggcaagttcgcgcaggacatgatcctccgcctcaggaacgtggagagcggggagattcagctgcagctgcagtgggtcagcatccctcctgctgcagccagcaggtgaaggaaggaagaacaggcgacacgaagcaatcgcattttcacctcttgtgaatgtcggattgtaaacttaatggggtctgggtcagtcagggtagttcatgtgttgcctattaatgtaca

SEQ ID NO: 81623 - DNA, 426 bp, Zea mays
acaaccctctatattgagtcgttcacttggtggccacactaggcatgtctctcacaattccaatagcaatggttgctgatatgatcatccacggccgtcactattcagcagtatatattcttggttctgtccaggtattttcaggctttgttatcgcgaaccttgcagatcgcttttctcgttctctagggctatcatagtctcataaaacagaacaggcccttattagtgcgtgcatcaggaatctcgaaggtcgggttggttaggccaatacttcagataacctggatcgggagatgccagaaattattttccctttgcttctttaaacatagtggaggtgaattttgccgtggtgaatagtgaaaggcagcagatgaagaagatcacatatgttatagcaaccctttgcaactgtaaattctc

SEQ ID NO: 81624 - DNA, 424 bp, Zea mays
  unsure (1)..(424): unsure at all n locations
gcgggccgatccaagactctaaattaagtcgtagtaaccgcctgagaggaaatacagtgtctggataggaggatccatccttgcctccctgagcaccttccaacagatgtggatctcaaaggctgagtatgacgagtcaggacctgggattgttcatcggaagtgcttctaagctctgggtcccccttcggctccattttatttattccttgagtgtttttcatataagctactatgtttgggattgcatgcctttgagcaggcaatgttgttgaatttatattttgggatttatattttgtggctcactacaatgcatacattgctccagctcctttccatgccaaatttgttgctagtggtgaaaacatcaaccacanaaaagagaggatggaaattaataaagtacctaggatcatattat

SEQ ID NO: 81625 - DNA, 361 bp, Zea mays
actcaggcaacatcgacttcaacttcggcaactcggcggaggtgttccagatgtggctcatcatcagcctgcagaccatggacaagcacaacatatcagcaagggatcatcggcataacgataccaacatgagctgtggtgtcgtcatctataactgacgactaattccgtagataacctatgttcggactgtgtcaaaattaacacgtaaatgcacagtctcagaaacgagttctgcacgcttaatctcatggtgaactacaacccaaaatgcggttggcaaaatcggtgtcagtcctgtcacttgtcactggaggtccccggttcaattcagatgttgctttggcacgtgctattcttt

SEQ ID NO: 81626 - DNA, 429 bp, Zea mays
tcgcgggtcgatacaaccctctacagtgcctcgtgatagccccaacacggatggcatccacatgggcgactcatccgggatcaccatcaccaacaccgtcattggcgtcggcgacgactgcatctccatcggccccgggacctccaaggtgaacatcaccggcgtgacctgcggccctggccacggcatcagcatcggaagcctagggcggtacaaggacgagaaggacgtcacggacatcaacgtcaaggattgcactcttaagaagacgatgttcggcgtccgcatcaaggcgtacgaggacgccgcctccgtgctcaccgtctccaagatccactacgagaatatcaagatggaggactcagccaaccccatcttcatcgacatgaagtactgccccaacaagttgtgtactgccaacggcgcctc

SEQ ID NO: 81627 - DNA, 399 bp, Zea mays
gcccgggccgacacacgactctagatcgactcgaagtacatgtaccggtgcaaggacatgctgatcaacgacgtgaccgtgacggcgcccggggacagccccaacacggatggcatccacatgggcgactcatccgggatcacgatcaccaacaccgtcattggcgtcggcgacgactgcatctccatcggccccgggacctccaaggtgaacatcaccggcgtgacctgcggccctggccacggcatcagcatcggcagcctagggcggtacaaggacgagaaggacgtcacggacatcaacgtcaaggattgcactcttaagaagacgatgttcggcgtccgcatcaaagcgtacgaggacaccgcctccgtgctcaccgtctccaagatccactac

SEQ ID NO: 81628 - DNA, 447 bp, Zea mays
  unsure (1)..(447): unsure at all n locations
ctcgcgggtcgatacaagcctctaaacagacgtcctggtagacgcctgatgacgtgatatacaagtacgagatagtggaagtcgctgatgatttcactgaggagcgagggctgactgtcatcccgttgctgaaggttgccggattcaaagccgtcttccacagacacgtggatcccgaggaggtgaggaggataccaaaggaagagctgttccggttctcgcaccgggttccttctcgtctcctgacgggcgaagagggcagcaatgccccgaaaggctgccatgagctggactctgctgccactccagtggaccttctcaaggttatcacggagcacaaggaagacgcggtggcgcagagtcctaaataggagtgagcgactccgataacagcgaagataacgtanctggatgtctgagtgaccagatccccacttggttaatgac

SEQ ID NO: 81629 - DNA, 433 bp, Zea mays
  unsure (1)..(433): unsure at all n locations
tacaagactctaaactgacgtcgtgattaacgcgtccgggaggaaccagatacccggcggcggcgatcgatggctccgcgcagctcatcggcggcgacgtgcctgtgcctcgctctcgccgcggccacgctggcgctggcccacggggcgcaaggaggaggaccatcggcatcggcggcggacctggacaaggtcacggccgagaccttcttggacatcgagatcgacggcaagcctgcaggccggatcgtgctgggactgtttggggacaccgttcctaaaacagcagagaacttccgagcactttgcacaggggagaaaggaattgccaagtccggcaagcctctgtggtacaaggggtcgacgttccacaggatcatcccggggttcatgatccanggaggcgacttcaccaacggcaacggcacggggg

SEQ ID NO: 81630 - DNA, 389 bp, Zea mays
aaagaactttcaaggtggagcatcttcaaacaagaacgaccaggcaaaggctccaagcaagctatcatctgcattctctggaactcaagataaatgcgcggcctgccagaaaacagtgtatccattggagaagatgactctggaaggcgaatcctaccacaagagctgcttcaaatgctcgcacgggggctgcatcctcaccacgtcctcctacgccgcgctcaacggggtcctctactgcaagatccatttctcgcagctgttcaaggagaagggcagctacaaccacctcatcgagacggcgcagaccaagaagaacgaggccgcggaggccggaccggagccaccggcggacgcaggcgctgctgagccggaagcacccgcgcaat

SEQ ID NO: 81631 - DNA, 414 bp, Zea mays
acttttcatcacatgatattagaagtgtaatctatggagaacaaccaagaaataggttggatttgtacatacccaaagataatagcaaatcaagtccagttgtggcattcgtaactggtggagcttggatcattggttacaaggcttggggtgctctccttggaaggcggttagcagagagaggaattatagtagcttgtattgattacagaaatttccctcaaggaacaataagcgacatggtcagtgatgcttctgaggcgatatcattcatttgtaacaatgttgttagctttggaggggatcctaataaaatctacttgatgggccaatcagcaggagcacatatcgcggcctgcgctctcttagagcaagcaattaaggaatctaagggagagaatacctattggaatg

SEQ ID NO: 81632 - DNA, 212 bp, Zea mays
aggaccccgccgacccgaacaccatcctccgggtgctgtgccaccgcgacgacgaggccgccaaccagttcttgaagcgcacgttccagctggccaggaggcggtgaggccacggccatagcttgacttgaaggagcacgaaagatccttacgcgtcccgcgccccgcggcccgattgatgaaatgatgtgcgtggtgtttcgcatttttct

SEQ ID NO: 81633 - DNA, 421 bp, Zea mays
gggtcgacacacgactctacatcgctgcctgccagggagaggggaagtcagaggcacggagtggcgcagagcagacgcccgtgaaccattgtagctgtccctgtcgtcgtcgtcgtcaacgaacccacacaaggaaaggatggagaagaagccgaccatcctcatgaacaggtacgagctcgggcgcacgctcgggcagggcaccttcgccaaggtgtaccacggccggaacctcgcgtccggcgagagcgtggccatcaaggtcatcgacaaggagaaggtgatgcgcgtcggcatgatcgaccagatcaagcgcgagatctccgtcatgcgcctcgtccgccaccccaacgtcgtgcagctgcacgaggtgatggccagcaagagcaagatatacttcgccatggagtacgtccggggc

SEQ ID NO: 81634 - DNA, 396 bp, Zea mays
tagggaaacaccttgaagacgggcgcacgcttgccgactacaacatccagaaggagagcaccctccacttggtgctgcgcctcaggggaggcatgcagatcttcgtgaagaccctgaccggcaagactatcacccttgaggtggagtcttcagacaccatcgacaacgtcaaggccaagatccaggacaaggagggcatcccaccggaccagcagcgtttgatcttcgctggcaagcagctggaggatggccgcacccttgcggattacaacatccagaaggagagcaccctccacctggtgctccgtctcaggggtggcatgcagatctttgtgaagacactcactggcaagacaatcacccttgaggtggagtcttcggataccattgacaatg

SEQ ID NO: 81635 - DNA, 425 bp, Zea mays
ggtcgacccaagcctctaaattgagtcatatgagaataaatagttcgtgaatccctgaagcgtgcatatatatattcctgccaagataaaggtaatggagtcgtcacgcaggttccagccggccgtcatcctgcttctcctgctcattgtgtccaccgatatggcacaggcaagggaatgcgagaagtacagtgagcgatttgttggggcatgcatgatcgcagacaactgcgccaatgtgtgccgcggtgagggcttcttggccggcaggtgcagcaccttccgccgccgctgcatctgcactaagcagtgctaaacaagatcgctcgatcgttcgccatgcatcgacaacctattcttaataacgttcattatctcgttcttatttatgacgaatgtcatgtatgttctggtgactgtcatgt

SEQ ID NO: 81636 - DNA, 405 bp, Zea mays
  unsure (1)..(405): unsure at all n locations
aggccacaagagcttcatgatgaacatcaccaccaaggacacggccacgatggaggcgatcgggaacgggttcctgatgcgcgggatcggcgtgaagaacacggcgggagccaagaaccaccaggcggtggcgctgcgggtgcagagcgacatgtcggcgttctacgagtgccggttcgacgggtaccaggacacgctgtacacgcacacgagccgccagtactaccgcgactgcgtcatcacgggcaccatcgacttcatcttcggcaacgcgcaggtggtgttccagaactgcctcatccaggtgcgcaagtgcatggacaaccagcagaacatcgtcacggcgcagggccgcaaggagaggcngtcggtgggcggcaccgtcatccacaactgcaccgtcgc

SEQ ID NO: 81637 - DNA, 415 bp, Zea mays
  unsure (1)..(415): unsure at all n locations
acaatactctaaattgaatcgtatcagctggtatccacgagaccacctacaactccatcatgaagtgcgacgtggatattaggaaggatctgtatggcaacatcgtcctctccggtggtaccactatgttccctggcattgctgacaggatgagcaaggaaatcaccgccctggctcctagcagcatgaagatcaaggtggttgctcctccagaaaggaagtcaccgccctggctcctagcagcatgaagatcaaggtggttgctcctccagaaaggaagtacagtgtctggattggaggatccatcctggcatcgctcagcaccttccagcagatgtggattgccaaggctgagtacgacgagtctggcccgtccatcgtgcacangaaatgcttctaattctttgggcccaag

SEQ ID NO: 81638 - DNA, 352 bp, Zea mays
acacagataataaggaaaggtcccgcccttttcctccgacatccacaggggggaggggaaaacacgtgcattcacccggcggcaataatggcctcggttccggctccggcgacgacgaccgccgccgtaatcctatgcctatgcgtcgtcctctcctgtgccgcggctgacgaccccaacctccccgactacgtcatccagggccgcatgtactgcgacacctgccgcgccgggttcgtgaccaacgtcaccgagtacatctccggcgcaacagtcaggctggagtgcacgcacttcggcaccggcaacctcgagcgcgccatcgacagggtcaccgaatcgatcagcacct

SEQ ID NO: 81639 - DNA, 402 bp, Zea mays
tacaattacttataccagttcctaccatgcactttattctgctttccggttctcaacgtcttggacatcgccggcgagcacagtctcctcggcaacttcttctactgctaactcgggtgcaaggcaaggaaactcggtatcgtcagagatatcttgatctaatggtaaaccatgaagtgaggcatatcttcaagacacgatctaaagttgtctcgtttatccggaagtttcttgatgaccgtgaatttttggaggtggagactccgatgatgaacatgattgctggtggagcagctgcaaggccttttattacacatcacaatgaattaaatatgaggctttttatgcacattgctcctgaattatatctgaaggaattggttgttggtggattggaccgtg

SEQ ID NO: 81640 - DNA, 417 bp, Zea mays
gacacacgcctctacagtgactcgtgctagtcgtcgtctcactcaccccgccttcacgcctccctcaccaaataaggtcccgcccttttccgacattcacaggggggacaggaaatcagcggccatggcctcgattccggcgacgaccttcgccgtcatcttatccgtcctcttctgtgccgcggctggcaccgccgtcgacaacgacctccccgactacgtcatccagggccgcgtctattgcgacacctgccgcgccgggttcgtgaccaatgtcaccgagtacatcgcgggcgccaaggtgaggctggagtgcaagcacttcggcaccggcaagctcgagcgctccatcgacggggtgaccgacgggaacggcacgtacacgatcgagctcaatgacagccacgaggaggacat

SEQ ID NO: 81641 - DNA, 419 bp, Zea mays
aatctccgccgctgaactgcaggaggtgctcaagaagctcggcctccccgaggccagcagcatggccaacgtccgggagatgatctgcaacgtcgaccgcgacagcgacggccgcgtcgacttcaacgagttcaagtgcatgatgcaggggatcaccgtctggggcgcctgactgacctcatcgtcgtaccgcgtacgttctgacttctgagtgtgtggcaactggcatgatggtccccgcatttcgtcgagacagtcctgcgtctgcgtctctaattgaattctttagtatcgtccttcacatcactggtctagtggtgatgagaatgccctgtcctgtgtgtgtgtgtcacataaccatggtatgtaatgtcatactgggaattaggtatatgatgatgacagctgataagaaaatg

SEQ ID NO: 81642 - DNA, 409 bp, Zea mays
acggcacgcaggacaagtgcgcggagtgcgacaagaccgtccacttcatcgacctcctcacggccgacggcgtcacctaccataagacatgcttcaagtgcagccactgcaaagggatcctctcgatgtgcagctactcttccatggacggtgtgctgtactgcaagacccacttcgagcagctcttcaaggagaccgggagcttctccaagaacttcacgccaggtggcaagtcttcagacaagggtgaactgacaagggcccccagcaagctatcatctgcgttttctggtactcaggataagtgtgcagcttgccagaaaacagtgtacccgctggagaagttaactctggaaggcgagtcctaccacaagagctgcttcaagtgctcgcacgggggctgcatcct

SEQ ID NO: 81643 - DNA, 380 bp, Zea mays
acgcccatggggctgtcgcaccacgtcggacgcgccctggagcgcggcgagctgcaggacatgctggaccccgccgtgcccgactggcccctggaggacgcgcagtgcctcgccgagatggcgctccggtgctgcgagctgcgccgcaaggaccggccggacctcggcgccgtcgtgctcccggagctcaaccggctgcacgcgctcggcgaggacaacatgcagtactgcggcgccatcagcaggggtggcggcagcggcggcggcatgcacagctcgtcgccgttccacagcaacatctcacggtcacacgccgagatgatgatccattctcagtacccaagatcagtgttcagctcaagagcggggaattcgcccag

SEQ ID NO: 81644 - DNA, 412 bp, Zea mays
ctcgcgggtcgatacaagcctctagagtgaatcgtcacaaatcttgctggggataggcgtaggaccgttatgaggccaccacaagttcttagggagggaacaaagaagacagtttttgttaactttatggatttgtgtaaaacgatgcataggcaacctgagcatgtgatgatgtttttacttgctgaaatgggaacaagcgggtcacttgatgggcagcaaaggttggtgatcaaaggaagatttgcccccaaaaactttgaagcaatcctgaggagatacatcaatgagtacgtcatctgcaatggatgcaagagccctgataccattctgtccaaggaaaatcgtctgttcttccttcgctgcgaacagtgtggatcttcaaggtccgttgctccaatcaaagctggat

SEQ ID NO: 81645 - DNA, 414 bp, Zea mays
gccgacccaagcctctacacagacgtcgtagtagagagtgcgtgcgtgcagccacaggcaggcgtcggcaccatgtcttctttcaccggcacgcaggacaagtgcgcggagtgcgacaagaccgtccacttcatcgacctcctcacggccgacggcgtcacctaccataagacatgcttcaagtgcagccactgcaaagggatcctctcgatgtgcagctactcttccatggacggtgtgctgtactgcaagacccacttcgagcagctcttcaaggagaccgggagcttctccaagaacttcacgccaggtggcaagtcttcagacaagggtgaactgacaagggcccccagcaagctatcatctgcgttttctggtactcaggataagtgtgcagcttgccagaaaacagtg

SEQ ID NO: 81646 - DNA, 402 bp, Zea mays
  unsure (1)..(402): unsure at all n locations
caggatggggcagaaggacgcctacgtcggtgacgaggcgcagtccaagaggggtatcctgaccctcaagtaccccatcgagcacgggatcgtcagcaactgggacgacatggagaagatctggcatcacaccttctacaacgagctccgcgtggctcccgaggagcaccccgtcctcctcaccgaggcgcccctgaaccccaaggctaacagggagaagatgacccagatcatgttcgagaccttcaacacccccgctatgtacgtcgccatccaggccgtgctctctctgtatgccagtggccgtaccacaggtatcgtgctcgactcgggagatggtgtgagccacaccgtcnccatctacgaaggatacgccctcncccacgccatccttcgccttga

SEQ ID NO: 81647 - DNA, 385 bp, Zea mays
  unsure (1)..(385): unsure at all n locations
agaatggggcagaaggacgccnacgtcggtgacgaggcgcagtccaagaggggtagcctgaccctcaagtaccccatcgagcacgggatcgtcagcaactgggacgacatggagaagatctggcatcacaccttctacaacgagctccgcgtggctcccgaggagcaccccgtcctcctcaccgaggcgcccctgaaccccaaggctaacagggagaagatgacccagatcatgttcgagaccttcaacacccccgctatgtacgtcgccatccaggccgtgctctctctgtatgccagtggccgtaccacaggtatcgtgctcgactcgggagatggtgtgagccacaccgtccccatctacgagggatacgccctcccccagg

SEQ ID NO: 81648 - DNA, 446 bp, Zea mays
gcgcgggtcgatacaacaacctaaactgacgtcgtgagtagagcgatctcctctccctctccctctccgatccattctccagcgcagcgaagtaaacatgtctgaccgggcaaagatgtcgtggcaggcgtacgtggacgagcacctgatgtgcgagatcgagggccaccacctcgcggcggcggccatcgtcggccactacggtgccgcctgagcgcagagcacggcgttccccgagttcaagaccgacgacatggccaacatcatgaaggacttcaacgagccagggcacctcgcgccgacatgcctgttcctcgggcctaccaagtacatggtcatccatggcgagcctggtgccgtcatccgtggcaagaagggatcaggaggcatcaccgtgaagaagacagggcaggcactcgtggttggcatctaccacgacccgatga

SEQ ID NO: 81649 - DNA, 390 bp, Zea mays
tacaacaccctaaactgacgtcgtattaagcgtccggccaccctcgtctcaccctccctccctcacacaaataataaggaaaggtcccgcccttttcctccgacatccacaggggggaggggaaaacacgtgcattcacccggcggtaataatggcctcggttccggctccggcgacgacgaccgccgccgtaatcctatgcctatgcgtcatcctctcctgtgccgcggctgacgaccccaacctccccgactacgtcatccacggccgcgtgtactgcgacacctgccgcgccgggttcgtgaccaacgtcaccgagtacatcgcgggcgccaaggtgatgctggagtgcatgcacttcggcaccggcaagctccaacgccccatcga

SEQ ID NO: 81650 - DNA, 418 bp, Zea mays
gcgcgggtcgatacaagactctaaaatgagtcgtattaaacctttctccctcctccacctttctccttttcttgccacggcaaaacaccttcgccggcgagagcatggcgatggcgtaccgtgtcctggaggtcaccctggtgtcggcaaatgacctcaagaaagtgtcgctcttctcccggactcgcatctacgccgtggcttccatctccggattcgacctccgcatcccttcccacagcacccaagcagaccacagcaacggctgcaacccctgctggaacgccgtggtacacttccccatcccggctgccgctgacacccgcggcctcgcactccacgtgaggctccgcgcccagcgtctatacctgggcgatcgcgacatcggcgaggtgtttgtgcccatcgacgacctcct

SEQ ID NO: 81651 - DNA, 402 bp, Zea mays
agaatatacagttcgtgaatccctgaagcgtgcatatatatattcctgccaagataaaggtaatggaatcgtcacgcaggttccagccggccgtcatcctgcttctcctgctcattgtgtccaccgatatggcatatgcaagggaatgcgagaagtacagtgagcgatttgttggggcatgcatgatcgcagacaactgcgccaatgtgtgccgcggtgagggcttcttggccggcaggtgcagcaccttccgccgccgctgcatctgcactaggcactgctaaacaagatcgctcgatcgcttgccatgcatcgacaacctattcttaataacgttcattatctcgttcttatttatgacgaatgtcatgtatgttctggtgactgtcatgtatattctga

SEQ ID NO: 81652 - DNA, 406 bp, Zea mays
acggacgcgtgggcggacgcgtgggttcggatctcgcattcagcgcagcgcaggtgtgaaggaagggggacgcggaggaagatggggctcgcgttcgggaagctcttcagccggctcttcgccaagaaggagatgcggatcctcatggtcggcctcgacgccgccggtaaaaccaccatcctctacaagctcaagctcggcgagatcgtcaccaccatccccaccatcggtttcaatgttgaaactgttgagtacaagaacattagcttcactgtctgggatgtcgggggtcaggacaagatcagacctctttggaggcattacttccagaacacccagtgtcttatctttgttgtggacagcaatgaccgtgaccgtgttgttgaagccagagatgagctccaca

SEQ ID NO: 81653 - DNA, 412 bp, Zea mays
agccagctggtttaactccaagtcaggaaagaagattcctttgaaatcagtcacttcaatcgtcgatgggctaaagaaatcgtacattgagaagttgaggcccttggaaaaaacctatcagttccatgacttcgtgtctcccttgctgactagcagcgatttcgatgcgaagccaatggtcatgctgttgggtcaatactccacggggaaaacaacattcataaagcatttactaaaaacaagttatccaggcgctcatattgggccagagcctacaacggacaggtttgttgtcatcacttctggaccagacgaaagatgcattcctggaaacaccatcgccgtccaagctgacatgccatacagtggcctgtcatcgttcggaacagcatttttgtccaagttcgaatgt

SEQ ID NO: 81654 - DNA, 401 bp, Zea mays
acatgtacgggctgttcggcgtcatgggctacgtcgcgttcggcgacgccacgcgggacatcatcaccaccaacctcggagccgggtggctgtcggccgccgtgcagctggggctctgcatcaacctcttcttcaccatgccggtgatgatgaaccccgtgtacgaggtcgccgagcgcctgctccacggcaagcggtactgctggtggcttaggtggctgctggtcgtcgtcgtcggactcgccgccatgtacgtgcccaacttcacggacttcctggcgctcgtcgggagcagtgtctgcgtcctcctcgggttcgtgctgccggcctcgttccacctcaaggtattcggcgccgagatggaatggcccggagtgctgtccgatgtcctgctggtcgtg

SEQ ID NO: 81655 - DNA, 399 bp, Zea mays
actcaccccgccttcacgcctccctcaccaaataaggtcccgcccttttccgacattcacaggggggacaggaaatcagcggccatggcctcgattccggcgacgaccttcgccgtcatcttatccgtcctcttctgtgccgcggctggcaccgccgtcgacaacgacctccccgactacgtcatccagggccgcgtctattgcgacacctgccgcgccgggttcgtgaccaatgtcaccgagtacatcgcgggcgccaaggtgaggctggagtgcaagcacttcggcaccggcaagctcgagcgctccatcgacggggtgaccgacgggaacggcacgtacacgatcgagctcaaggacagccacgatgaggacatctgcgacgtggtcttggtggag

SEQ ID NO: 81656 - DNA, 436 bp, Zea mays
gcgggtcgttacaatactctacagtgagtcgtactaccatcaccaccaccaagctcaacaacagccagctcgcgaaaataatgaagagccgcagcatggcatcatcggccgcgctcttggtgctagccctcgcgctagtggcggccaccgccccacaggtagcggaggcaaagaagaagagagcggcggagagcggcgaggcggcggaggcgaagaagatccaggacgacttctgctcgacgctgtgcgagggcaagaaggggacggacctggtcgtgtgcaaggagtcctgcgcgctctcccagcagtccaacctggtgctgtacggcaggattcagtgcaagggcaagtgcaccgagcagaagggcatcacggcgccggccatgaaggtctgccaagaagagttccacaaaggcttccttgttaaaggcggcca

SEQ ID NO: 81657 - DNA, 398 bp, Zea mays
gtcggcccacgcgtccacaatgacacgcgcacgcaggggtacggcgtgcagacggtggccgtgagcacggtgctgttcggtgacggcacggcctgcggcgggtgctacgacgtgcggtgcgtggacagccctagcgggtgcaagcccgacgcggcggcactggtggtgacggtgaccgacctgtgcccgcccaaggaccagtggtgcaagccaccgcgggagcacttcgacctcagcatgcccgcgttcctccagatcgcgcaagagaaggccggcatcgtgccgatctcctaccgcagggtggcgtgcgtgaagcagggcggcatccggtacaccatcaccgggaacaagtacttcaacatggtgacgatcaccaatgtgggcggcgctggcgacat

SEQ ID NO: 81658 - DNA, 381 bp, Zea mays
gtatggttactccgcgcgccttctctttctctcccggacgtcgatcgtgttcttcagcacgggctagctagctccctcgctctcagccatggcgacgccggacaacaatgggcacgggcatccgctgcacaagtttggggagtgggacgtgaagaatccggccacgtccgagggcttcaccgtcatattccagaaggcccgcgacgacaagaagaccaccaccggccctggggctgggaacgcgcgcgcaggcattccgccggccttcaagaacggcggcggcgactgcgggtacaggcccgacttcggcgacggcaaccagtacacgccgcccaaacggaagaagtgggccttctgtggctgctgaatcgaagctcgctg

SEQ ID NO: 81659 - DNA, 434 bp, Zea mays
cgggccaagcctctagttcaaggcgcatgaggtctacaagatctgcgtgctggacatacggctcgccaacgccgatcgccacgccggaaacatactcgtccgcaagcacgacggcggcggaggcggaggcatgtcgctggttcccatcgaccatggatactgtctgccggagagcttcgaggactgcactttcgagtggctctactggcctcagtgcctggagcgcttcagcgacaagactgttgtatacgtgctgaccacactgtctgaggaggacgtgactatgctgaggctccacgggtgggacgtgtcgcgcgagtgcgcgcgcacgctgcgcgtcgccaccatgctgctgaaaaagggtgtggagaagggcctcacgccttccacatcgggagcatcatgtgcagagagaccctggacaaggggtcccc

SEQ ID NO: 81660 - DNA, 412 bp, Zea mays
gacacacgcatctacgatatcttctgccagacgtcgtacctgcagcagcacctgcaccggatcgcggtgccgctgctggtgctgcacggcgccgacgacctggtgaccgaccccaggggctcgcgggcgctgtacgagcgggcctcgtccgcggacaagtccctcaagctttacgacgggctgctgcacgacctcctgatcgagcccgagaaggacagggtgatggacgacatcgtcgcgtggctgagccccagggtctgacgccgccggcgcgttgcggtgctggccgtaggacgcgagcggcttttcgaccatctgcaggccaaggacgcctcgcctccggatggtgggtgatgacgcggtctggtctggtaggctgcgggccgacggagagcgggtgtggcttctcgcc

SEQ ID NO: 81661 - DNA, 416 bp, Zea mays
aggaggcatcaccgtgaagaagacagggcaggcactcgtggttggcatctacgacgagccgatgacgcctgggcagtgcaacatggtggtggaaaggctgggcgactacctgcttgaacagggcatgtaactactacgtaccagctggaatgcatgtcgacgacgatggtttcgagtttcgacttccaataatagtaacaacaaagcaaaggccttcctcccggcgtatttgctttggctcttctcctccacgccataagatatctagcaattggtgactcgccttaattagttcgctttgcttttgaggttgactcgaccattttgctgtagcgtgaattgcatggacatgcaacgctccaatggcctttggaatgtggaatttttttcccgtttctgtaattttcctataaaat

SEQ ID NO: 81662 - DNA, 505 bp, Zea mays
  unsure (1)..(505): unsure at all n locations
gtcgacccacacatccgcctacactgcggtcgtccacatccttttctctcctcctcgccggcccaacctgattgttcttcaaccaagaggaagaaaggaaggaagggaccggaagcatcagccatgtcgaactcggcgtcgggaatggccgtctgtgatgaatgcaagctcaagttccaggagctcaaggcaaagaggagcttccgcttcatcgtgttcaagatcaacgagaacgtgcagcaggtggtggtggacaggctgggggggccaggagagagctacgacgccttcacggcctgcttccccgccaacgagtgccgctacgccgtgttcgattttgacttcgtcactgacgagaactgccagaagagcaagatcttctttatctcttgggccccggatacatcgagggtgagaagcaagatgctgtacgcgagctccaanggacggttcaaganggagctggatggcattcaggtggagctacaagcaaccgacccgagcg

SEQ ID NO: 81663 - DNA, 247 bp, Zea mays
gtccacatcaaggcatacgaggacgccgcctccgtgctcaccgtctccaagatccactacgagaatatcaagatggaagactcagccaaccccatcttcatcgacatgaagtactgccccaacaagttgtgtaccgccaacggcgcctccaaggtcaccgtcaaggacgtcaccttcaagaacatcaccggcacctcctccaccccggaggccgttagcctgctctgcactgccaaggtcccatgca

SEQ ID NO: 81664 - DNA, 454 bp, Zea mays
atcagggatcacgatcaccaacaccgtcattggcgtcggtgacgactgcatctccatcggccccgggacctccaaggtgaacatcaccggcgtgacctgcggccctggccacggcatcagcatcggcagcctagggcggtacaaggacgagaaggacgtcacggacatcaacgtcaaggattgcactcttaagaagacgatgttcggcgtccgcatcaaggcgtacgaggacgccgcctccgtgctcaccgtctccaagatccactacgagaatatcaagatggaggactcagccaaccccatcttcatcgacatgaagtactgccccaacaagttgtgtactgccaacggcgcctccaaggtcaccgtcaaggatgtcaccttcaagaacatcaccggcacctcctccaccccggaagccgttagcctgctctgcactgccaaagtcccatgc

SEQ ID NO: 81665 - DNA, 324 bp, Zea mays
ggcaagtgtggcagaccggggaggacctcacatgcgagtcgctgacgttccgggtgatgaccagcgaccaccgcaaggccacctcatggcacgttctccctgctgactggaagttcggcgtcacgtaccaggcgtccaagaacttctaagtagccactttccctcctcttcttcaacctgcatgcccgcaagcagccatgcagatgataacatgcatcatgcatgcatattcattctttcgctcatgcactccgatacggtgccggagttaaaaaaatataaatcaatgtgcaaattcaaatgacatcttaaccagttgtgatc

SEQ ID NO: 81666 - DNA, 487 bp, Zea mays
cccacgcgtccgcccacgcgtccgatctgcctgtcgtggagaatggcgaggtcattgcaattctggacatagccaagtgcctatatgatgctattgcacggatggaaagggcggcggagaaaggaaaagcaattgccgctgccgtcgagggcgttgaaaagcattggggagcagctgtgcctggtcctaacaattttattgagacgcttcgagaacggatgtttaggccatcgctgtctactattatctctgagaatccaaaagttgtcactgttgcaccatcagacatggtgttgacagcatcaaagaagatgctggaattaaaagtgagttcagcagttgtagcaattgaaaacaaacctggaggaattctgacatctagagatatattgatgcgtgttatcgcccaaaatcttcctcctgagtccaccacggtcgagaaggtcatgactcagagtcctgaatgtgccacagtggacaccccaat

SEQ ID NO: 81667 - DNA, 475 bp, Zea mays
gttaacctcctcttgcattgcattgcaggtcgtagttgagcagcagcaaccactgcacaggatgtcgtggcagacgtacgtcgatgagcacctcatgtgcgagatcgagggccaccacctgagctctgccgccatagtcggccacgacggcgccgtttgggcccagagcaccgcattcccacagttcaagccagaggagatgaccaacatcattaaggacttcgacgagcctgggtttctggccccgatcggcctcttccttggccccaccaagtacatggtcatccaaggcgagcccggcgctgtcatccgcgggaagaagggatctggaggcataactgtgaagaagaccggacaggcgctggtgatcggcatctacgacgagcccatgacccctggacagtgcaacatggtggttgagaggctcggtgactacctcgtaaagcaaggcctgtgaatgcatccaaacaacgac

SEQ ID NO: 81668 - DNA, 430 bp, Zea mays
gggtggaccacacgtccggttaacctcctcttgcattgcattgcaggtcgtagttgagcagcagcaaccactgcacaggatgtcgtggcagacgtacgtcgatgagcacctcatgtgcgagatcgagggccaccacctgagctctgccgccatagtcggccacgacggcgccgtttgggcccagagcaccgcattcccacagttcaggccacaggagatgaccaacatcattaaggacttcgacgagcctgggtttctggccccgatcggcctcttccttggccccaccaagtacatggtcatccaaggcgaccccggcgctgtcatccgcgggaagaagggatctggatgcatgactgtcaagaagaccggacaggcgctggtgatcggcatctacgacgagcccatgagcccgggacagtgcaccatg

SEQ ID NO: 81669 - DNA, 341 bp, Zea mays
tccggttaacctcctcttgcagtgcattgcaggtcgtagttgagcagcagcaaccactgcacaggatgtcgtggcagacgtacgtcgatgagcacctcatgtgcgagatcgagggccaccacctgagctctgccgccatagtcagccacgacggcgccgtttgggcccagagcaccgcattcccacagttcaggccagaggagatgaccagcatcattaaggacttcgacgagcctgggtttctggccccgatcggcctcttccttggccccaccaagtacatggtcatccagcgcgagcccggcgctgtcatccgcgggaagaagggatctggaggcata

SEQ ID NO: 81670 - DNA, 482 bp, Zea mays
gaacgtcgtacgagaacctttctccctcctccacctttctccttttcttgccacggcaaaacaccttcgccggcgagagcatggcgatggcgtaccgtgtcctggaggtcaccctggtgtcggcaaatgacctcaagaaagtgtcgctcttctcccggactcgcatctacgccgtggcttccatctccggattcgacctccgcatcccttcccacagcacccaagcagaccacagcaacggctgcaacccctgctggaacgccgtggtacacttccccatcccggctgccgctgacacccgcggcctcgcactccacgtgaggctccgcgcccagcgtctatacctgggcgatcgcgacatcggcgaggtgtttgtgcccatcgacgacctcctggccggcgccgacaagggtggcgatccgaggcccgtgagctaccaggtgcgcaggccgcactctggccgcgcccacggcgtcctctac

SEQ ID NO: 81671 - DNA, 478 bp, Zea mays
cccacgcgtccgagtggccgtaccacaggtatcgtgctcgactcgggagatggtgtgagccacaccgtccccatctacgagggatacgccctcccccacgccatccttcgccttgatctggccggtcgcgacctcaccgactacctgatgaagatcctgactgagcgcggctactccttcaccaccaccgctgagcgggaaatcgtgagggacatgaaggagaagctcgcctacatcgccctggactacgaccaggagatggagaccgccaagaccagctcttccgtggagaagagctacgagctccccgacggacaggtcatcaccatcggcgccgagcgcttccgctgccccgaggtcctcttccagccatccttcatcgggatggaagctgccggcatccacgagaccacctacaactccatcatgaagtgcgacgtggatattaggaaggacctgtacggcaacatcgtcctct

SEQ ID NO: 81672 - DNA, 120 bp, Zea mays
cggacgcgtgggcgacggcgtctccgtgatggggtccagcgatatctggatcgaccacctgtccatgagcagctgcgcggacgggctggtggacgcggtggagtgctccaccgcttgtct

SEQ ID NO: 81673 - DNA, 396 bp, Zea mays
  unsure (1)..(396): unsure at all n locations
gcccagtcatggactggagcacccgcatgaagatcgcgctcggctccgccaagggcctcgcctacctccacgaggactgccatcctcggatcatccaccgcgacatcaaggccgccaacatcctgctggacaacaacttcgaggccatggtggcggacttcgggctggccaagctcacgacggacaccaacacgcacgtctccacgcgcgtcatgggcaccttcggctacctggcgccggagtacgcgtccagcggcaagctcacggacaggtcggacgtcntctccttcggcgtcatgctgctggagctgctcacggggcgccgccccatcgattacaccaactacatggaggacagcctcgtggactgggcgcgcccgctgctgagcgccgcgc

SEQ ID NO: 81674 - DNA, 414 bp, Zea mays
cggacgcgtgggtggaggccgccatcacccgctccgattccatcatcaccgcctaccgcgaccactgtacctacctcgcccgcggaggggacctcgtctccgccttctccgagctgatgggccgcgagggcggctgctcccgcgggaagggcggatccatgcatttctataagaaggatgccaatttctacggcgggcacggcatcgtcggcgcgcaggtgcccctcggatgcggcctcgccttcgctcagaagtacaagaaggaggagacggccacgtttgccctctatggtgacggtgcggctaaccagggacagccctttaggctcctcacatttcggcctcctggaagctgcccgcaaaattggtttgcaagaacaaccattatggtatgggaacaccggaatggagggc

SEQ ID NO: 81675 - DNA, 455 bp, Zea mays
ctcgaggagaagtcgcccgagtacgtggccgtcaagaaggcgtcgtcgacaccgcagaagagctcctcgtggctcgggaggagggcagggtcgtcgcttggtgggcttggacacagacgggccgcttctgccgcgaaggtggacgatctaagcagcagatccgcgggggatctggtcatggtgaacgaaagcaagggcgtctttgggctcacggacctcatgaaggcggcggccgaggtgatcgggagcggtgggctcgggtcggcatacaaggcggtgatggccaacggcgtggccgtcgtggtcaagcgctcccgcgacatgaaccgggcgaccaaggacgcgttcgaatccgagatgaagcggctcggcgccaatgcggatgccaaactgctgccgccgctggcctaacactaccgcaaagacgagaagctcctggtctacgagtacatccc

SEQ ID NO: 81676 - DNA, 335 bp, Zea mays
gggtggcggccgccatcaccggctccgattccatcatcaccgcctaccgcgagcactgtacctacctcgcccacggaggggacctcgtctccgcgttctccgagctgatgggccgctagggcggttgctcccgcaggaatggcgggtccatgcatttcgataggaaggatgccaatttctacggcaggcacggcatcgtctgcgcgcatgtgcccgtcggatgcggcctcgccttcacccagaagtacaggaaggatgagacggccacgtttgccctcgatcgtgacgggtgcggtgtaagcagggacagctcttttatgctctcaagatttcgg

SEQ ID NO: 81677 - DNA, 372 bp, Zea mays
gtcgatacgagaacctttctccctcctccacctttctccttttcttgccacggcaaaacaccttcgccggcgagagcatggcgatggcgtaccgtgtcctggaggtcaccctggtgtcggcaaatgacctcaagaaagtgtcgctcttctcccggactcgcatctacgccgtggcttccatctccggattcgacctccgcatcccttcccacagcacccaagcagaccacagcaacggctgcaacccctgctggaacgccgtggtacacttccccatcccggctgccgctgacacccgcggcctcgcactccacgtgaggctccgcgcccagcgtctatacctgggcgattgcgacatcggcgaagtgtttg

SEQ ID NO: 81678 - DNA, 423 bp, Zea mays
gaaagttttgagcatggctcctggccttgagaggctcaacatccttcctttcaaggtggctgcgtatgacacaaagcaaaagaaaatggatttctttgatccatcaaggaaagatgatttcctgttcatctctggcacaaagatgcgcactcttgccaagaaccgagagagtcctccagatggttttatgtgcccgggtggctggaaggtactcgttgaatactatgacagcttggtgccatctgagggcagcagcaagctgcgtgaaccaattgcagcctaaaatctggaaaatccttcatataaggaatgctactatatcttagcaagcggttctttgcgacatagaaccgatgctatatgattgtatactggctgtaagactttaaaacactaggcttgattcggatgttaatggtgtgc

SEQ ID NO: 81679 - DNA, 454 bp, Zea mays
  unsure (1)..(454): unsure at all n locations
cccaagcgtccgggacaatcttgttaacagagttttaaggtttcccagcagagaagagcgcgtgcaaccaccacattcatataattaataagcaaggtttagagaagaggcaacatgggcacaaagatgaagaaggggatcctgaagccgttccgctatatctcaaccatcatggatggtaaggaggctgaaatgcaaattgggttcccgacggatgtaaaacacgtggcacatattggttgggatggtcctggctccacgaacaacaacaacaataacaacagcaacaacaatagtggcggagcacctagctggatgaaggattaccactcggcaccgcttgactcgtcctcttttaggagtgagagtgggggcacggctgctgcaaatcnctgggcttctcaagagatagtcatggatggagcaagcgtcggagaaacctccttcaaggaca

SEQ ID NO: 81680 - DNA, 483 bp, Zea mays
gtcgatggctacgccttcttcggcgtcgggatgggccccgggaagtggtcgccggaggtgaggaagacgtacaacctgctggacacggtgagccggcacacgatccaggtgtacccgcggtcatggacggcaatcatgctgacgttcgacaacgcgggcatgtggagcgtgcattccaacatctgggagcggtactacctcggggagcagttctacatcagcgtcgtctcgccggcgcgatcactgcgcgacgagtacaacatgcccgacaacgccctccgctgcggcaaggtcgtggggctgccgctgccgccgtcctacgcccccgcgcgctaagacgacgaaggcctcgttttctcctcgtggtctgaccatccaatccaaactcaaaagaacaaatacgaaagaagcgtagtgaaggggaacaaatgaatggatatatgtaatcttgagatgcatgccctctcaaatcactgtactggg

SEQ ID NO: 81681 - DNA, 469 bp, Zea mays
ttacgtgaaaccagatagatttgtgtgatcatattctttcatatgtttgtaaacattacattgccatccatattctaggatggtattttttgtagcttcagtgtcattcttttgttaatatgatcgattgtttttgtgtatgttacccccttcctcgactatatgctcccccgtgctgaattgcaacacacacacgcacccacacccacactggccgcaacgattaaaaaagcatcctgcgaagcctagtcagcagttaccgcctcttgggaagctgaaatgtgcgcttcaggaagtggctggcgacctcgtcgtcgcgatggcacagcacgcgcaggatggtgtttggctcactgcggctccaccgcctggtcgtcggcggcaacggtaggcgctgcctctcggagaccgcctcggtgcactcgtacgccgcgatgccaaactcctccacgagctgctccgccgttag

SEQ ID NO: 81682 - DNA, 468 bp, Zea mays
gtgaagtccacagcattggagttgtgctgctggagcttttaaccggtcgcaagccagttgaccacacactgccccgtggccagcagagccttgtgacatgggctacaccgaggcttagtgaagacaaggtgaggcaatgcgtcgatccaaggctcggagacgaataccctccaaaggctgtagccaagatggctgctgtggccgccctctgcgtgcaatacgagggtgaattccgtcccaacatgagcatcgtcgtcaaggctctgaaccccttgctgcacagccggtctggcaaccgccctactgcctcgtcggcctcccacgctgccgagcgatccggactgtgatttctcatcgctgcgacaactttgggttcacgaaaaaggaccgtcttgtggagcgttggtgttgctgtgtcgtgactgccaaagccttggcgcagagaagagctttgccatgcagctgtgt

SEQ ID NO: 81683 - DNA, 428 bp, Zea mays
gcaagacgtaccgcctccgcgtgtgcaacaccgggatcaaggcgtcgctcaacttccgcatccagggccacgacatgaagctcgtggagctggagggctcacataccctgcaggacgtgtacgactcgctggacgtgcacgtcggccactgcctctccgtgctggtcgacgccgaccaggcgcccggcgactactacatggtggcctccacgcggttcatccacgacgccaagtccgcctccgccgtcatccgctacgccggctccagcggcgccccgccggcgcccaacatgaccgagccaccggccggctgggcctggtccatcaaccaggccaggtcgttccgctggaacctgacggccagcgccgcgcgccccaacccgcagggctcctaccactacggccagattaacatcacccgcaccatc

SEQ ID NO: 81684 - DNA, 480 bp, Zea mays
  unsure (1)..(480): unsure at all n locations
cgccatatctagcaccacacaccgcaggtatggagaaggcgacgaggctggccttggcagcggcgttggttctgtgcctgcttctggcgaccgggccgcaggaggccgccggcgccgaggggatgctgtcgtatgataagttgctcagctgcaaggtgctgggcaactgcgacaagaacaggggccccggggccacccgcccggggaagcccgtaaacaagtacacccgcggctgcagcccgctgacccggtgccgcggcggctgatcatgggcctgtttggttcagcttttttctgaccagcttttctgaaaatctggttgtgggaagaatctagctgtggggagaatctgagtatcattacgattacgtgtgaggaagataaagttgttcatagggctcaggatctagaaagtaacggattcctactattacaatgattcaacagattataaaanaaaaaaaaaagggcggccgctct

SEQ ID NO: 81685 - DNA, 453 bp, Zea mays
  unsure (1)..(453): unsure at all n locations
gcgtgaccggccgcaagagcttcgccgacggcatcaccaccatgaagaccgccaccttctccgtcgaggcgtccgggttcatctgcaagaacatggggttccacaacacggccggcgcggagcggcaccaggcggtggcgctccgggtgcagggggacctcgcggcgttctacaactgccggttcgacgcgttccaggacacgctgtacgtgcacgcgcggcggcagttcttccgcaactgcgtggtctccggcaccatcgacttcatcttcggcaactcggcggcggtgttccagaactgcctcatcatcacgcggcggcccatggacaaccagcagaactcggtgacggcgcacgggcgcaccgaccccaacatgaagtccgggctcgtcatccagaactgccgccntggtgcccgacagaagctgttcccggaccgcttcaagatccctc

SEQ ID NO: 81686 - DNA, 384 bp, Zea mays
gatggacctcggcatgttcagcaaggactcgcgccgccgactgctgtcgtcggagcaggatgagaagggctggcccgtgtggatgcggtcgccggagaggaagctgctggcgtcgggcaaccagcccaagccgaacgcgatcgtggccaaggacggcagcgggcagttcaagagcatccagcaggccgtggacgccgtgcccaagggccatcaggggaggtacgtcatctacgtgaaggccggcctctacgacgagatcgtcatggtccccaaggacaaggtcaacatcttcatgtacggcgacgggcctaagcaaagccgcgtgaccggccgcaagagcttcgccgacggcatcaccaccatgaagaccgccaccttctccgt

SEQ ID NO: 81687 - DNA, 476 bp, Zea mays
gtgcaagccctcgcgctagtggcggccaccgccccacaggtagcggaggcaaagaagaagagagcggcggagagcggcgaggcggcggaggcgaagaagatccaggacgacttctgctcgacgctgtgcgagggcaagaaggggacggacctggtcgtgtgcaaggagtcctgcgcgctctcccagcagtccaacctggtgctgtacggcaggatccagtgcaagggcaagtgcaccgagcagaagggcatcacggcgccggccatgaaggtctgccaggaggagtgcgacaaggcgtacgtggtgaaggcggccgaggtcaccaaggcctgcagcgtcacctgcgccaaggagaagaacccgcgcctcagcgagaactgcaagaggtcctgcacccctcctccttcttgaagcgaagccccttgaaatgaatgaaccatgcatgcatgcatgcatgtatgcatgcgccggggtga

SEQ ID NO: 81688 - DNA, 479 bp, Zea mays
cccaagcgtccgcggtcgcgtggggaatcatgagaatgttgtccaactcgtcggatactgcgccgaagggagcacccacgtccttgcttatgagtatgcaactaggggatcattgcatgatatcctccatggtaataagggtgtcaaacgagcccatccagggccagtcctgtcatggatgcatcgagctaggattgccgtatgtgctgctcggggtctcgagttcctccactagaacgccgatcctcatgtggtccaccgcgacatcaattcaagcagcatactgctctttgaccatgatgttgcgaacatcggggacttcgacatctcaaaccagtcccctgacatggctgcgcgcctccactctactcgcgttcttggcacctttggctatcatgcaccagaatatgccatgactggacagcttagcacgaccagtgatgtctacagctttggagttgtgctgctggagcttttaa

SEQ ID NO: 81689 - DNA, 462 bp, Zea mays
cacaacttgagacctgcgttgtcacccacccatcaaggttggggccgccagcaggttcagccgttcctgttcttgctaaaacgagagaaggatggcagtgtctcagggagctgtcctattcttgtttctcctcgtcgcagcagaggtgggaaccatcgatgccaaaatgggagtagccatgcccatgcatgccttgataatggagaaagcgaaacagcaggagacggagaagaaggaggagaaaagcacggagaaggaagagagtcaatgcttatcgccgagtctccagttcgagggcttctgcttcaacagcgacagatgcgccgatgtgtgcatgaaggagagctttcccggtggcgagtgcaagcaggtcgtggccacgcgcaagtgcttctgcaagaagccttgctagttcatcggtcttgctaattgttgatgggtgcttcattaatttgatttgat

SEQ ID NO: 81690 - DNA, 485 bp, Zea mays
cccaagcgtccgcccatttcctccttcgtccgcatcagggacacactgcctccgcatgcggcaagatcctccctcattccccaaacatgagaggagcagaggaggagagatctggcgccgccactgatgcgggaggagaggaggagaaacgggagaggagcgtcggcctgatggccggcctcatggacaaggccaagggcttcgtggtggagaaggtgacgcaaatccccaagcccgaggctgcgctggatcacgtctccttccagagcatcagccgcgagggcgtcgagctgcatagccacgtcgacatcagcaacccctactcgcaccgcatccccatctgcgagatcacctacacgttcaagagcgccggcaaggtgatagcgtcgggcacgatgcccgaccccgggtggatcgcggcgagcggcagcaccaagctagacctgccggtgaaggtgccgtacgacttcatcgtgtcgctgatg

SEQ ID NO: 81691 - DNA, 452 bp, Zea mays
gataatccagagaaggaactaaagccagggatcgatcttcttgggaaggtggacgagttatttatcgacatatatgacagatatgaacctaccaatgactcatcagcagacaattgtttcatctcaacaagttatgatgccacaacacactttgagtccactgttatggatgtactttccctttacacaaagatcaccggaaagactgttgatctcagcgtggatctaagcgctgctagtgctgctgaagatgatatgtgatacttatcgtagtgctatgtggcgtagtgtggaaaatatttaattaagctttgctttggcaacgattattaggttcacctttatttttccaattgttgttattagctgtgttgtgaccatgattaaagattgcatgctgtaaatttgaaggcatttttttatcaaaagttgttacgcggtgattcgtgttt

SEQ ID NO: 81692 - DNA, 458 bp, Zea mays
tcgtggctggctgcgccacgacctctcctgctgtcgctgctggtcgccgtgctagcggtggccgccgatgtcgccaacgccggccacgccaagcccctgacgcctggcgggcgtgtggtacacgacaaccacggcaagttcacggccgggccgtggaaacccgcccacgcgaccttctacggcgggcgggacgggtccggcaccacggcgggcgcgtgcgggtacaaggacacgcgcacgcaggggtacggcgtgcagacggtggccgtgagcacggtgctgttcggtgacggcacggcctgcggcgggtgctacgaggtgcggtgcgtggacagccctagcgggtgcaagcccgacgcggcggcactggtggtgacggtgaccgacctgtgcccgcccaaggaccagtggtgcaagccaacgcgggagcacttcgacctcagcatgcccgcgttcct

SEQ ID NO: 81693 - DNA, 475 bp, Zea mays
ccgcaggcgggcggcgccctgaagccggacttcgatagccagtcgtgcccgcgcgcggagcggatcattgcggaggtgatgcacacgaagcagatggcgaacccgacgacggccgcgggcctgctccgcgtcatcatccacgactgcttcgtcagcgggtgcgacgcgtcggtgctgatcgcgtccacccagttccagaagtcggagcacgacgcggagatcaaccacgccctccccggggacgccttcgacgccgtggtgcgcgccaagctggccctggagctggagtgccccggggtggtgtcctgcgccgacatcgtcgcactggcgtcgggcgtgctgatcaccatgaccggcgggccccggtacccggtcccgctggggcgcacggactcgctgtcgtcgtcgcccacggcgcccgacgtggagctgccgcacgccaacttcaccgtggaccgcctcatccagatgttcg

SEQ ID NO: 81694 - DNA, 276 bp, Zea mays
cttcaaccagtgcggcggcaacgtcggcgactccgtcagcatcccgctgccgcggtgggccgcggaggagatggagagggaccaggacctctgctacaccgaccagtggggccgccgcaactacgagtacgtctcgctcggctgcgacgccatgcccgtcctcaagggacgcaagcccgtcgagtgctacaacgacttcatgcccccgttccgcgaacactttgccgactacctccgcaacaccatcctggaaatccaagtccgcatgggccccgc

SEQ ID NO: 81695 - DNA, 245 bp, Zea mays
ctgcaaataggtccatgcaccccctcctccttcttgacacaaatcccctttgtaatgaattaaccatgcatgcatgcatgcatgtatgcatgccccggtggttacgtgtcattcagctcacgcgctgaccgagtctatacatacgtcgtcaccggctggccacgcatgcgataaccatctgatattgaccggactatataatgtattcctaataatcctgcattttccaagctaattgttttttt

SEQ ID NO: 81696 - DNA, 320 bp, Zea mays
ctggaaacccgatgccgtctacacttccaacgtccaattctactagactttgaattcccttcgattcatccggcacagcgggctatggaccttcagcagcaagctaattaagttggcagcatgcaccgctaaccttatatactactgagacttccaaattctagtatatgtaatccttttgttcgggttcatgatcgaattccaaagagtggaaaacaagcaaaaggttaaatatacatgccatttttggaggcatttttttcatgagggcatgtttcgatatatggaccactaaatatacatatcatttactttcctac

SEQ ID NO: 81697 - DNA, 378 bp, Zea mays
ggggccacgcacgcgtccggagacactgtgggccgtctccatgggcggcggcgtgctccccggcaggtcggacatggacggccccgacggcgagatggcgtacatgcgcgggagcttcgagcacaccgtcgggtcccgggactcggagtcgctctacatggtcggaccgcccggcggcgactgcccggagctcgccatcttcttcgttaggctatgaattgaaccgagcgaaccatacgaatcgaacaatacagtgtacacgtcgcagtcgtggggtctaatctctcgcctggtctcgttcgttgttcagcagcctcagctatcgtcagagatattactcatttgccccaaaaggaaagggaaaagggcgggcgctct

SEQ ID NO: 81698 - DNA, 393 bp, Zea mays
aaaaaacagccgagcgatctcctctccctctccctctccgatccattctccagcgcagcgaagtaaacatgtctgaccgggcaaagatgtcgtggcaggcgtacgtggacgagcacctgatgtgcgagatcgagggccaccacctcgcggcggcggccatcgtcggccacgacggtgccgcctgggcgcagagcacggcgttccccgagttcaagaccgaggacatggccaacatcatgaaggacttcgacgagccagggcacctcgcgccgacaggcctgttcctcggacctaccaagtacatgggcatccaaggccagcctggtgccgtcatccgtggcaagaacggatcaggaggcatcaccgtgaagaaagacaggcaggcactcgtgg

SEQ ID NO: 81699 - DNA, 391 bp, Zea mays
gagagccaaccccatcatcatcgaccagtacttctgcccccagaaggtctgccccggcaagcgaagcaactcctcgcatgtctccatcaagaacgtcaccttccgcaacagcggccggcacgtcgtccacgcccgaagccgtcagcctgctctgctccgagacgcagccgtgcagcggcgtctcgctcatcgatgtcaacgtcgagtacgccggcaagaacaacaagaccatggctgtgtgcagcaacgccaagggaaccgccaagggaagcctccaggccctggattgcctcgtctgatcgatgaccttgcatttgcatgcattcttcttccgtttcacttttccatattctattgcgttccagccaagcatcttgtttcttttagatat

SEQ ID NO: 81700 - DNA, 386 bp, Zea mays
atgatagtgatgcaccgcgacgtgaaggcggagaacatgctgctggaccggaagcggacgctgaagatcgccgacttcggcgtggcgcgcgtggaggcgcagagctgcgaggtgacggggcagacgggcacgctgggctacatggcgccggaggtgctgcaggggaagccgtacgaccacaagtgcgacgtgtacagcttcggcatcctgctctgggagacctactgctgcgccatggcctaccccaactacagcctcgccgacatctcctaccacgtcgtcaagctgggcatccggccggacatcccgaggtgctgcccgcgggcgctggtggagatcatgacgcggtgttgggaccggaacccggacaaccgggcggagatgtc

SEQ ID NO: 81701 - DNA, 318 bp, Zea mays
ggggccacacacgcgtccgaccacacgtccgcctccctccctcacacagataataaggaaaggtcccgcccttttcctccgacatccacaacgggggaggggaaaacacgtacattcacccggcggcaataatggcctcggttccggctccggcgacgacgaccgccgccgtcatcctatgcctatgcgtcgtcctctcctgtgccgcggctgacgacccgaacctccccgactacgtcatccacggccgcgtgtactgcgacacctgccgccccgggttcgttaccaacgtcacccagttaatcccgggcgccaagg

SEQ ID NO: 81702 - DNA, 373 bp, Zea mays
acggttcccagccccaacccctgtcatctccactggcagagctcagccaattgcagtaccggccattcatctggaagagctgaaggaaattacaaaaaacttcagcagtgatgccctcattggcgagggctcgtatgccagagtctattttggtgtgctgaaagatgggacgaaatctgcagtgaagaagcttgactccagcaaacagcctgatcaagaattccttgtgcaggtttcagctgtctcaagattgaagcatgagaatgttgtccaactcgtcggatactgcgccgaagggagcacccgcgtccttgcttatgagtatgcaactacgggatcattgcatgatatcctccatggtaaaaaaggtgtc

SEQ ID NO: 81703 - DNA, 341 bp, Zea mays
catataagctcaacaacagccagctcgcgaaaataatgaatagccgcagcatggcatcatcggccgcgctcttggtgctagccctcgcgctagtggcggccaccgccccacaggtagcggaggcaaagaagaagagagcggcggagagcggcgaggcggcggaggcgaagaagatccaggacgacttctgctcgacgctgtgcgagggcaataaggggacggacctggtcgtgtgcaaagagtcctgcgcgctctcccagcagtccaacctggtgctgtacggcaggatccagtgcaagggcaaatgcaccgagcagaagggcatcacggcgccggccatg

SEQ ID NO: 81704 - DNA, 414 bp, Zea mays
agaagacagagactgaaggcgaggcggaggcagaggtcgaggccgaggtggaggtcgaggtggaggcggaggccggtgcatcgtctgcgaagaagaaccgtatccaggtgtggaccaacaagaagccgctctatttctacgtcaatctcgccaagaggtacatgcagaactacgacgaggttgagctctccgctctggggatggccattggtaccgtggtgaccgtcgctgagatcctcaagaacaatggcctcgccactgaaaagaagatcctcacatcaaccatcggcaccaaggatgaggcgaatggccggcttgtccgtaaagccaagatcgagatcctgctgtgcaaatcagaaaacttcaacagcatcatgtcgagcaagaagtccgagcgcccgaagccgcccgccg

SEQ ID NO: 81705 - DNA, 284 bp, Zea mays
tacaacactctaacctgagtcgtatgacatcgccctcggctccgccaagggcttggcttacctgcacgaagattgccaccccaggatcatccaccgcgacatcaaggcagccaacatccttcgggacgagaatttcgaggctaaggtcgcggatttcggacttgccaagctgaccacagacaccaacacgcacgtctccacgcgtgtcatgggaactttcgggtatttggccccggagtacgcgtcgagcggcaagctcaccgacaagtccgacgtgttccccc

SEQ ID NO: 81706 - DNA, 421 bp, Zea mays
gcgtccgaagagatgcgctgcgtggacagccctagcgggtgcaagcccagcgcggcgacactggtggtgacggcgaccgacctgtgcccgcccaacgaccagcagtccgcggacagcggcgggtggtgcaacccgccgcgggagcacttcgacctcagcatgcccgcgttcctccagatcgcacaggagaaggccggcatcgtgcccatctcctaccgcagggtggcgtgcacgaagcagggtggcatccggtacaccatcaccgggaacaagtacttcaacatggtgacgatcaccaacgtaggcggcgccggcgacatcgcggcggtgtcggtgaaggggagcaagcgcgttaagtggacggagatgaagcgcaactgggggcaagtgtggcagaccggggacgaactcaactgcgagt

SEQ ID NO: 81707 - DNA, 399 bp, Zea mays
agaatctgccatcctctccaacacgaagatggcgttcatcagcaatatcgcagtgaaggcggcggccgtggccgcgctgctgctggtcgcagcggtgtcgcctgccgcgcgcgcggcggcggtggcggtggcgggaggggcgccgtcggtgccggcgggtccgctggacatcgcgcagctgggcgccaagggcgacggcaagtcggacagcaccccgatgatcctcaaggcgtggaagaacgcgtgcgaggcgacgggggtacagaagatcgtcatcccgccgggcaactacctgacgggcgggctggagctgaagggcccctgcaagtcctccatcatcatccgtctcgacggcaacctgctcggcaccggcgacctcagcgcgtaccaaaggaactg

SEQ ID NO: 81708 - DNA, 426 bp, Zea mays
  unsure (1)..(426): unsure at all n locations
tccgggtgcancacgcgtccggagctggatttcggaatggtggcgaaccagaacggtggagtgctcgactgggtgaagaaactccaccaagaaaagcagctaggcacgatggtggacaaggacctgtgcagcagctacgacagggtggagctggaggagatggtccaagtgtccttgctgtgcacgcagtaccacccgtcccaccggcccaggatgtccgaagtgatcaggatgctggacggggacgggctcgcggatagatgggacgcgtctcagaacgtggacacgccggagtccgtctcgtcggagctcctgctccagaagtacatggacttcgcagcggacgagtgctcgctcggcctgcaagccatggagctctccggcccgacgtgaccaaccggcttgttgaccggacccggcgggcat

SEQ ID NO: 81709 - DNA, 425 bp, Zea mays
ggggccagccacgcgtccgagcgagtggcatctacgacagtgaagcagcgaagcaggctcagcagcgccacaactccacgtcgctggcgatgagtggcagagtggctggcatggtctctggagccgctccgtcgttgaagtgcgagggcgccgtctgcttcttcctctcatcgctgatcatgtccgggttctgcatcatcgcttttggcttgagcttgatcctggtctaccgcacaaagatcgtgtacacaagtctatacgggaaaccgcgtacttgaaggatcaaccctaaatggacacagggttatcaaagcatacgtcaatttttaagttattagtctggtaccccatgcctgtagaggtacagtgtcggtcttcccgttgttgtgcacaggttctcaagcagcatttcaagttttcaagtt

SEQ ID NO: 81710 - DNA, 424 bp, Zea mays
atcgtcgttatcgtcgtcgtcgtgggccttcatttctcctagaaggtagaaggtcgagaggagaagaaggcgagacgtgcagtccgtcgggcaccgatcgagaacagggaagcaagaggctgctagagatcgagctcatcaaccaaccaagtcgtacgtcgtcagcatcacgaccggatggcgcgtgccgcgtccagctatgtatccaggagggggctctccgcagcgatgacggtggcggaggagtccgtgaagaaggtggaggacaaggcggtgaagctgggaactgtggccaaggacatcgccagcgccatggccaccacgacggaggagaagacggcgttctgggaacctgaccccgagaccggatactaccgtccggtcaccggcacgaaggaggtggacgccgccgacctgcgcgccg

SEQ ID NO: 81711 - DNA, 378 bp, Zea mays
aaagctcaacaacagccagctcgcgaaaataatgaagagccgcagcatggcatcatcggccgcgctcttggtgctagccctcgcgctagtggcggccaccgccccacaggtagcggaggcaaagaagaagagagcggcggagagcggcgaggcggcggaggcgaagaagatccaggacgacttctgctcgacgctgtgcgagggcaagaaggggacggacctggtcgtgtgcaaggagtcctgcgcgctctcccagcagtccaacctggtgctgtacggcaggatccagtgcaagggcaagtgcaccgagcagaagggcatcacggcgccggccatgaaggtctgccaggaggagtgcgacaaggcgtacgtggtgaa

SEQ ID NO: 81712 - DNA, 434 bp, Zea mays
aagcaaatgcaccgagcagaagggcatcacggcgccggccatgaaggtctgccaggaggagtgcgacaaggcgtacttggtgaaggcggccgaggtcacaaaggcctgaaggttcacttgcgcaaaggagaagaacccgcgcttcagcaaaaattgcaaaaggtcttgcacccctcctcctcctgaagccaaaccccttgaaatgaatgaaccccatgcatgcatgcatgcatgtatgcatgcgccggggtgacgtggcgttcagctcaggcgctgagcgagtctatacgtacgtcgtcaccggctggccacgcatgcgataaccatctgatatggacggaactatatattgtattcctattaatctggcattttctaagctaattgttttttttccaaataatacgtctcatgaactcaaaatttaatgtcac

SEQ ID NO: 81713 - DNA, 422 bp, Zea mays
gtacggtgatgtccgggtgactcacgcgtccgagacaagacgcgcatcaatgcctgctgataaggaggaggttctgcaggctgctgtctcccgcgttagtgcactggaagaggagcttgcagctacaaagaagaccttgcaggagactcttgagcgtcagttggagatcgttgcatacattgagaagaagaagaaaagcaagcgtttctttcgttggtagaagcaaacagcagtgaattgttcacgcccacgagaaaaaaggttttgcgtgtgatggaagcgagctggtgcttgcgtatgccagcaagctgcgattctgagtgtaacacataaggatgttctttcattcttcttttttgttcccttgttgcatcaaattgtgccttaaccacgtcgatgtgctgccaaattgtcaatccctg

SEQ ID NO: 81714 - DNA, 318 bp, Zea mays
  unsure (1)..(318): unsure at all n locations
gggcccgcccgcgtccggactcactcaccccgccttcacgcctccctcaccaaataaggtcncgcccttttccgacattcacaggggggacaggaaatcagcggccatggcctcgattccggcgacgaccttcgccgtcatcttatccgtcctcttctgtgccgcggctggcaccgccgtcgacaacgacctccccgactacgtcatccagggccgcgtctattgcgacacctgccgcgccgggttcgtgaccaatgtcaccgagtacatcgcgggcgccaaagtgaggctggagtgcaagcactttcggaacgggaa

SEQ ID NO: 81715 - DNA, 331 bp, Zea mays
aagacgcgtgggcggacgcgtgggggacgacgcaccgcacactacccgacggtggaactcctcgcccgcgtcgctgctccggtctccgcgctgctagccgccgactgtaggggctgtgtgcttctgaagagagatttcgttgaacaggatgaatgcattggcagcaaccagcaggaacttcaagcaggcagctaagctgctgggcctcgactccaagctggagaagagcttgctcattccattcagggagattaaggtttaatgcacaatcccaaaagatgatggaactttgggatcctatgttggatttatggttcaacatgataaatgc

SEQ ID NO: 81716 - DNA, 434 bp, Zea mays
ttcgcggggccacccacgcgatccgatccaggacaaggagggcattcccccagaccagcagcggctcatctttgctggaaagcagcttgaggacgggcgcacgcttgccgactacaacatccagaaggagagcaccctccacttggtgctgcgcctcaggggaggcatgcagatcttcgtgaagaccctgaccggcaagactatcaccctcgaggtggagtcttcagacaccatcgacaatgtcaaggccaagatccaggacaaggagggcatcccaccggaccagcagcgtttgatcttcgctggcaagcagctggaggatggccgcacccttgcggattacaacatccagaaggagagcaccctccacctggtgctccgtctcaagggtggtatgcagatctttgtgaagacactcactggcaagacaatca

SEQ ID NO: 81717 - DNA, 370 bp, Zea mays
aagtcatctcctccatcaccaccaccaagctcaacaacagccagctcgcgaaaataatgaagagccgcagcatggcatcatcggccgcgctcttggtgctagccctcgcgctagtggcggccaccgccccacaggtagcggaggcaaagaagaagagagcggcggagagcggcgaggcggcggaggcgaagaagatccaggacgacttctgctcgacgctgtgcgagggcaagaaggggacggacctggtcgtgtgcaaggagtcctgcgcgctctcccagcagtccaacctggtgctgtacggcaggatccagtgcaagggcaaatgcaccgagcagaagggcatcacggcgccggccatgaaggtctg

SEQ ID NO: 81718 - DNA, 276 bp, Zea mays
tggggttcaaaaacacggccggcgcggaaaagcaccaggcggttgcgctgctggtgcagtcggacaagtcaatcttcctcaactgcaagatggaggggttccaggacacgctgtacgcgcactccaaggcgcagttctaccgcaactgcatcatctccggcacggtggacttcatcttcggcgacgcggcggcggtgttccagaactgcatcctggtgctgcggcggcccatggacaaccagcagaacatcgtgacggcgcatggccgcgcggacg

SEQ ID NO: 81719 - DNA, 387 bp, Zea mays
acaacttcaacgggtacatggagctcatggagatggccaaggaagaccgggctcaaggtccaggccgtcatgtccttcaaccagttgcggcggcaacttcggcgattcagtcaccataccacttccgggatgggtcttggaggagatggacaaggaccaggacctggcctacaccgaccggagtggccgccggaactacgagtacgtctccctgggctgcaacgcgatgcccgtgctcaagggccgcacccccatccattgctacgccgacttcatgcgcgccttcggcgacaacttcgccaccttcatgggcaacaccatcgtggagatccaggtcggcatgggccctgccggcgagctgcgctacccgtcctacccggagagcga

SEQ ID NO: 81720 - DNA, 316 bp, Zea mays
aatttgcgaccctcgtctcagcctcgctcactcatacaaataataatgaaaggtctcgcccttttcctccgacatccacatgggggaggggaaaacacgtgcattcagccggcggcaataatggtctcggttccagctccggcgacgacgaccgccgccgtaatcctatgcctatgcgtcgtcctctcctgtgccgcggctgacgaccccaacctccccgactacgtcatccagggccgcgtgtactgcgacacctgccgcgccaggttcgtgaccaacgtcaccgagtacatcgcgggcgccaaagtgaagctgg

SEQ ID NO: 81721 - DNA, 387 bp, Zea mays
atccctatcacgcctcatcgaatcctcaggtctaagttttttttggttttgtgagttatccaaagttggaccgcaaagatgagtactgctaatcactatcagcacatcaagtcaaccaagcctgttgtagatctactaatattggagtgtttctttgcttaaaatgtggagatgttcatagggcacttggacctgacatttcaaaggttttatctgtaactttggatgattggtctgacagtgatatcgactccatggttgaggttggtggaaactcatatgcaaattcaatttatgaggcttttcttccaaaagatcacccaaaacccaaaccagattcaacgatggaatataggacgaaatttataagagctaagtatgagacac

SEQ ID NO: 81722 - DNA, 364 bp, Zea mays
  unsure (1)..(364): unsure at all n locations
ggaacccttcaacccacccatgtacaacgttggtcgcccgcacgacgtaccggttccgcatgtgcaacgtgggcatcaaggcgtccttcaacgtccgcatccaggaccacatcatgaagctggtggagatggaggggtcncacaccatgcagaacgactacgactcgctggacctccacatcgggcagtgcctgtcgttcctggtgaccgcggaccagaagcccggcgactacctgctggtggcgtccacccggttcatcaaggagaagagcagcaccacggccgtgatccgctacaagggctccagcgccccgccgccggccaagctgccggagggccccagcgggtgggcgtggtccatcaa

SEQ ID NO: 81723 - DNA, 380 bp, Zea mays
agaaaacagtgggatcgagttgtttcactgcacgagcacatcctccggcgaccaccggcctccctctccgtcctctagcgaccgaccaacgcgccgagcgaagatgtcgtggcagacgtacgtggacgagcacctgatgtgcgagatcgagggccaccacctcacgtcggcggccatcgtcggccacgacggcgccacctgggctcagagcaccgcattccccgagttcaagcccgaggagatggctgccatcatgaaggatttcgacgagccggggcacctcgccccgaccggcctgatactgggaggcaccaagtacatggtcatccaaggcgaacctggagctgtcatccgtggcaagaagggatcgggggcatcac

SEQ ID NO: 81724 - DNA, 391 bp, Zea mays
aggaaaaaaggaacgggaagagagggtctgtttggttgagaggtagatgtgaaaaaagttgtttgtgaattgtaaactgtggaaaaagttgttgtgggctgtgagctgttaaaaaactacaaaatgtttggtggaaactactaaaagtcgttaaaagttcttcgatatatgttttcacagttccatctaaaagcaggtacataggtgctttgaggtcaaagtgggttgagtcgggggcgacgccgttctctcaattttttgggatcacgcctccaccaaaaactactccgggttttacctcgtccctacgtgaatctcatccaaacactattggaattgtggccgccctattccatccctccatatacatccaaccaaacattattgtgtc

SEQ ID NO: 81725 - DNA, 377 bp, Zea mays
agctctttctctcccggacgtcgatcgtgttcttcagcacgggctagctagctccctccctcccagccatggcgacgccggacaacaaggggcacgggcatccgctgcccaagtttggggagtgggacgtgaagaatccggccacgtccgagggcttcaccgtcatattccagaaggcccgcgacgacaagaagaccaccaccggccctggggctgggaacgcgcgcgcaggcattccgccggccttcaggaacggcggcggcgacggcgggtacaggcccgacttcggcgacggcaaccagtacacgccgcccaaacggaagaagtgggccttctgtggctgctgaatcgaagctcgctgtgctgctgtgctgact

SEQ ID NO: 81726 - DNA, 328 bp, Zea mays
tctcctccccctccggttcgggttcgggttcgtgaggttctccggggttcggtttcgtgggtgggcggatcgagatggcggcgtcggatgttgagtaccgctgcttcgtcggcggcctcgcctgggccacggacgaccactccctccacaacgccttcagcacctacggcgaggtcctcgagtccaagatcatcctcgatcgggagacgcagaggtcccgcggcttcggcttcgtcaccttctccacggaggaggcgatgcggaacgccatcgagggcatgaacggcaaggagctggacggccgcaacatcaccgtcaacgaggccca

SEQ ID NO: 81727 - DNA, 398 bp, Zea mays
agcaatcatgtctggtcgttcgtggacaataatggcgcctctccaagcgtcaaggcggtcctccggctcgccgcgggctccgaggaggaggaggacggcggcggcaaaaagaagccccacgtcaaccacggcaagtttaaggcggagccgtggacggacgggcacgcgacgtactacggcgggcgcgacgggttaactgacaccacggacagcggcgcgtgcggctacaagggcgagctggggaaagactacggcaccctgacggcggccgtgggcccgtcgctgtacaccaacggcaccgggtgcggcgcgtgctacgagctcaagggccccaagggcaccgtggtggtgacggccaccaacgaggccccgccggccggttaaccggcagaaagggc

SEQ ID NO: 81728 - DNA, 430 bp, Zea mays
accacgcgtccgcccacgcgtccgagcatcgatcacgacaagatggcgtgcacagacaatgcgatgagagccttgttcctcctggtcctcttctgcatcgtgcatggtgagaaggaagagtcaaagggcatcgatgcgaaagcgtccgggcctggtgggtccttcgacatcaccaagttgggcgcctccggcaatggcaagacagacagcacgaaggctgtgcaggaggcatgggcatcggcgtgcggcggcactgggaagcagacaatcctcatacccaagggcgacttccttgtcggacaactcaacttcacaggcccttgcaagggcgacgtgaccatccaggtggatggcaatctgctggcgaccacggacctaagccagtacaaggaacatggtaattggatcgagattctacgcgtggataacc

SEQ ID NO: 81729 - DNA, 373 bp, Zea mays
cccacgcgtccgctcccctagccgccgccgccgccgctcgtctccctgagaggtgccgggaccgaggaactggccgagtactaggtagagaatcggtttttcttgtctcagcccggggtctgctgcgtctggtggtggtgaaggggagaaattcgtgagatctgttccggatcaggcgtgcgagctcgggaatcaggggtttcacacatagcttcgtcgatttgaatttgatgtactaatggagtctaagggtggcaaaaagtctagcagtagtcgttctatgatgtatgaagctccccttggctacagcattgaggacgttcgacctgccggaggcgtgaagaagttcagtctgctgcttactccaactgcg

SEQ ID NO: 81730 - DNA, 405 bp, Zea mays
agccgagttccgcaccttcatcgagatcgtcttcgagaaccccgagaagagcatagactccctccacgtcgatggctacgccttcttcggcgtcgggatgggccccgggaagtggtcgccggaggtgaggaagacgtacaacctgctggacacggtgagccggcacacgatccaggtgtacccgcggtcatggacggcaatcatgctgacgttcgacaacgcgggcatgtggagcgtgcattccaacatctgggagcggtactacctcggggagcagttctacatcagcgtcgtctcgccggcgcgatcactgcgcgacgagtacaacatgcccgacaacgccctccgctgcggcaatgtcgtggggctgccgctgccgccgtcctacgccccgcgcgctaagac

SEQ ID NO: 81731 - DNA, 355 bp, Zea mays
cagggcccagggccgagcaacctggtgctccgcccctcgccgttacagcggcgcctcggcctccggttccacagcgtctgcctgcctgcgcggccctgtgaccgtgaggcgacacgacgccgagagatcacccgccccccgcatcgtgtccgccccgcttgggattgtgaggtaaagcgtgatggcagcgccgccggcgagggctcgagccgactacgactacctaatcaaactgctcctcatcggagacagcggcgttggaaaaagttgcctcctgttacggttttcagatggatcattcaccactagcttcattaccactattggcattgacttcaagataagaactgttgag

SEQ ID NO: 81732 - DNA, 364 bp, Zea mays
acagacacttgggttagccaccctcgtctcaccctccctccctcacacaaataataaggaaaggtcccgcccttttcctccgacatccacaaggggggaggggaaaacacgtacattcacccggcggcaataatggcctcggttccggctccggcgacgacgaccgccgccgtcatcctatgcctatgcgtcgtcctctcctgtgccgcggctgacgacccgaacctccccgactacgtcatccagggccgcgtgtactgcgacacctgccgcgccgggttcgtgaccaacgtcaccgagtacatcgcgggcgccaaggtgaggctggagtgcaagcacttcggcaccggcaagctcgagcgcg

SEQ ID NO: 81733 - DNA, 320 bp, Zea mays
cccacgcgtccgggtgtcggccaagaacggcatgcacaagcgcgtcggcagcctgccccgcctgcgcgacttcctgcgcggctcgctcaacccgtccaactacgtggaggtgcgcaagaaccggtcggcgctgtggatccggcacagcgacgccgtgtcgtgcctgagcccgacggacccggcgcaggggctgctctactccgggtcgtgggaccgcaccttcaaggtgtggcgcatcagcgactccaagtgcctcgagtcggtggtggcgcacgacgacaacgtcaactccgtcgtggcggcgttcgacgggctggtgt

SEQ ID NO: 81734 - DNA, 400 bp, Zea mays
acagccagctgtacccgttcgagggcctccagaactacacctccggcatcatccaccacgtccgcctccagggcctggagcctgggaccaggtacttgtaccggtgcggcgacccggccatcccggacgccatgagcggcgtgcacgcgttccgcacgatgccggccgtcgggccggggagctacccggggcggatcgccgtggtcggggacctcgggctcacctacaacaccacctcgacggtggaccacttggtgcgcaaccgccccgacctggtgctcctcctcggcgacgtctgctacgccaacctgtacctgaccaacggcaccggggcggactgctactcctgcgccttcgccaagtccacgcccatccacgagacgtaccagccgcgctggga

SEQ ID NO: 81735 - DNA, 289 bp, Zea mays
cgtcctattagctcttctgcaccgtacatggtgataaggcaaactcaaaggacaaccattcaaaagcgtccgggccctgtgggtccttcgacatcaccaagttgggcgcctctgtcaatggcaacaccgttagcacgaaggctgtgcacgaggcgtgtgcatcggcgtgcggcggcaccgggaaccacacgatcctcatccccaaaggcgacttcctcgtcggactactcaacttcacacgcccatgcaaaggcgacgtgaccatccaggtgaatggcaatctgctggc

SEQ ID NO: 81736 - DNA, 389 bp, Zea mays
cggacgcgtgggcaacgaggccatcgccaccaccgaccacgacgggtgggtgctggaggagctcatgtggaccatgttctgcaacggcaagagggtgggctacgcggtgcggcgggaccccaccgaggaggacatcgccgtgctggagacgctgtgggccgtctccatgggcggcggcgtgctccccggcaggtcggacatggacggccccgacggcgagatggcgtacatgcgcgggagcttcgagcacaccgtcgggtcccgggactcggagtcgctctacatggtcggaccgcccggcggcgactgcccggagctcgccatcttcttcgttaggctatgaattgaaccgagcgaaccatacgaatcgaacaatacagtgtacacgt

SEQ ID NO: 81737 - DNA, 426 bp, Zea mays
atcagccggtcgggaacgatgaagaaagatgatgacctcgagtcggcgctgctggccgccaaagagccggcgccggcgcccgccaagggctacgcgtacgcgctcacctgcgcgctcctggcttccctcacctccatcatctacggctacaaccgcggggtgatgagcggggcgcagaagttcgtgcaggccgacctcggcgtcacggacgcgcagctggaggtgctcatcggcgccaccagcgtctactccctcgtcggctcgctggcggcgggctgggcgtgcgaccgcgcgggccggcgccgcaccatcgcgctgtcggcggccttgttcctcgccggctcagccgtcaccgccgccgccgacggctacgccgcgctcatggcgggccagttcgtcgccggcgtggcctgcggattcggcctc

SEQ ID NO: 81738 - DNA, 424 bp, Zea mays
aaaagggccatccgctgcggtcagtgtaggtttctgaatcatagcttggcgatgcctgaggctagacaaatactgagctagccttcagaaaaaaaaagaaaagaaagagattgagaagcagggagaaaaaatggcactggcccattgaggaagcttgagaaccagttaacaagaattgccaacatattcttggacaatcttgttaacagagttttaaggtttcccagcagagaagagcgcgtgcaaccaccacattcatataattaataagcaaggtttagagaagaggcaacatgggcacaaagatgaagaaggggatcctgaagccgttccgctatatctcaaccatcatggatggtaaggaggctgaaatgcaaattgggttcccgacggatgtaaaacacgtggcacacatcggttggga

SEQ ID NO: 81739 - DNA, 367 bp, Zea mays
accacgcgtccacccacgcgtccgcccacgcgtccggctaccctcgtcgtcgtctcactcaccccgccttcacgcctccctcaccaaataaggtcccgcccttttccgacattcacaggggggacaggaaatcagcggccatggcctcgattccggcgacgaccttcgccgtcatcttatccgtcctcttctgtgccgcggctggcaccgccgtcgacaacgacctccccgactacgtcatccagggccgcgtctattgcgacacctgccgcgccgggttcgtgaccaatgtcaccgagtacatcgcgggcgccaaggtgaggctggagtgcaagcactttcgcaacggcaagctcgagcgctccat

SEQ ID NO: 81740 - DNA, 359 bp, Zea mays
acacacacacaaccagatctcccccaaatccacccgtcggcacctccgcttcaagatgcagatctttgtgaaaaccctgactggcaagactatcaccctcgaggtggagtcgtctgacaccattgacaacgttaaggccaagatccaggacaaggagggcatccccccagaccagcagcggctcatctttgctggcaaacagcttgaggacgggcgcacgcttgctgactacaacatccagaaggagagcaccctccaccttgtgctccgtctcaggggaggcatgcagatctttgtgaaaaccctgaccggcaagactatcaccctcgaggtggagtcctctgacaccattgacaacg

SEQ ID NO: 81741 - DNA, 391 bp, Zea mays
attcgtggatagcggtgccacaacctctcctgctgtcgctgctggtcgccgtgctagcggtggccgccgatgtcgccaacgccggccacgccaagcccctaacgcctggcgggcgcgtggtacacgacaaccacggcaagttcacggccgggccgtggaaacccgcccacgcaaccttctacggcgggcgtgacgggtccggcaccacggcgggcgcgtgcgggtacaaggacacgcgcacgcaggggtacggcgtgcagacggtggccgtgagcactgtgctgttcggtgacggcgcggcctgcggagggtgctacgaggtgcggtgcgtggacagccctagcgggtgcaagcccgacgcggcagcgctggtggtgacggtgaacgacct

SEQ ID NO: 81742 - DNA, 372 bp, Zea mays
ggtttgtgcaacacccgctcaccttccaggtcggtaagggatccaagcctggccacctgatcctcaccccgaacgttgccaccatatccgacgtggagatcaaagagcatggtggcgatgacttctcctttacgctgaaggagggcccgaccggcacctggacactcgacaccaaggccccgctcaagtaccccctttgcatccgctttgctgtcaagtctggtggctaccgcatcgccgacgacgtcatccccgccgatttcaaggctggcaccacttataagacgacactcagcatctaatcagcatctgaagatgaactatatttcaaaagagctcatctggcgcacgtgttagcaagacaattttttt

SEQ ID NO: 81743 - DNA, 382 bp, Zea mays
agcgatatctggatcgaccacctgtccatgagcagctgcgcggacgggctggtggacgcggtggacggctccaccgccatcaccgtctccaacggccacttcacgaggcacgaccacgttatgctgttcggggccagcgacgccgcgtccaaggacagggagatgcaggtcaccgtcgccttcaaccacttcggcaaggggctggtgcagcggatgccgcgctgccgtcacggcttcttccacgtggtgaacaacgactacacgcactggctcatgtacgccatcggcggcagccggaaccccaccatcatcagccagggcaaccgcttccgcgccgtcgacgacagcaggttcaaggaggtgaccaagcgggagtacacgc

SEQ ID NO: 81744 - DNA, 429 bp, Zea mays
  unsure (1)..(429): unsure at all n locations
atcgtgagcagcgacaagaccatcgacgggcgcggagcgcaggtgcacatcgtgggcgcgcagatcacgctgcagaacgtgcgcaacgtgatcctccacaacctgcacgtccacgacgccgcggcgcacggcggcggcgcgatccgggactcgcagcaccactggggcgtgcgcggggagagcgacggcgacggcgtctccgtgatggggtccagcgatatctggatcgaccacctgtccatgagcagctgcgcggacgggctggtggacgcggtggacggctccaccgccatcaccgtctccaacggccacttcacgaggcacgaccacgttatgctgttcggggccagcgacgccgcgtccaaggacagggagatgcanggtcacgtcgccttcaancacttcggcaaagggctggtgcagcggatg

SEQ ID NO: 81745 - DNA, 429 bp, Zea mays
gtttgatttccagaagtacatcaagcggtctctggaggatgacttcaaggtgatcgtggggatcagtcctcctctgtgggcttctgctctcatcttcctcttcctcaacgtcaatggatggcacaccatgctctggatctccatcatgccggtggtgatcatcctgtcggtggggacgaagctgcagggcatcatctgccgcatggcgatcgacatcacggagcgccacgccgtcatccagggcatcccgatggtgcaagtcagcgactcctacttctggttcgcacgccccaccttcgtgctcttcctcatccacttcaccctcttccagaatggcttccagatcatctacttcctctggattctgtatgagtacggcatggactcgtgcttcaacgactcggaagagttcgtccttgcacgactctg

SEQ ID NO: 81746 - DNA, 390 bp, Zea mays
  unsure (1)..(390): unsure at all n locations
cccgatgatcctcaaggcgtggaagaacgcgtgcgaggcgacgggggtacagaagatcgtcatcccgccgggcaactacctgacgggcgggctggagctgaagggcccctgcaagtcctccatcatcatccgtctcgacggcaacctgctcggcaccggcgacctcagcgcgtaccaaaggaactggatcgagatcgagaacgtcgagaacctgtccatcaacggccacggcaccatcgacgggcaaggagccctggtgtggagcaagaaccagtgccagcattcttacaattgcaagatcctcccgaatagcttggtgctggattttgtgacgaacgtccagattcgcggcatcacgctgctcaacagcaagttcttccanctcaacat

SEQ ID NO: 81747 - DNA, 356 bp, Zea mays
  unsure (1)..(356): unsure at all n locations
atggtgatggacttcgtgaacaacggggaggtgtccggggtcacgctgctcaactccaagttcttccacatgaacatgtaccggtgcaaggacatgctgatcaaggacgtgaccgtgacggcgcccggggacagccccaacacggatggcatccacatgggcgactcatccgggatcacgatcaccaacaccgtcattggcgtcggtgacgactgcatctccatcggccccgggacctccaaggtgaacatcaccggcgtgacctgcggccctggccacggcatcagcatcggcagcctanggcggtacaaggacgagaaggacgtcacggacatcaacgtcaaggattgcactct

SEQ ID NO: 81748 - DNA, 353 bp, Zea mays
gtacgtcgaacaaacacccaaggcctgacgagacgagatccggacctccgtcctcccaactagggcgcgcgcgcgacctcggcaccggcggcctcgatccatcgttctctcggatccccgccagtgcatgccctggaacggacggacggaatggcagcgtcgccggaccacctcttcggcctgcgcaacagcttctacgtcggcgcataccacgccgtcatcaccagcagccagtccctccccgcgcacgcgctctcccccgacgacctcgtcgagcgcgacgccctcatgtaccgctcctacatcgccatcggctcctaccagctggtgatcggcgagatcgggcccagcgc

SEQ ID NO: 81749 - DNA, 408 bp, Zea mays
  unsure (1)..(408): unsure at all n locations
atcgatcacaacaagatggcatgtatagacaatgcaatgagagccttgttccttctagcgctcttctgcaccgtgcatggtgagaaggcaaagtcaaaggacaacgattcaaaagcgtccgggcccggtgggtccttcgacatcaccaagttgggcgcctctggcaatggcaagacggatagcacgaaggctgtgcangaggcgtgggcatcggcgtgcggcggcaccgggaagcagacgatcctcatccccaagggcgacttcctcgtcggaccactcaacttcacaggcccatgcaagggcgacgtgaccatccaggtgaatggcaatctgctggcgaccacggacctaagccagtacaaggatcatggtaattggatcgagattctacgcgtggacaaccttgtc

SEQ ID NO: 81750 - DNA, 422 bp, Zea mays
  unsure (1)..(422): unsure at all n locations
gtggatggcggcgccacgacctctcctattgccgctgctggtcgccatgctagcggtggtcgccgatgtcgccaacgccggccacgccaagcccctgacgcctggcgggcgcgtggtacacgacaaccacggcaagttcacggccgggccgtggaaacctgcccacgcgaccttctacggcgggcgggacgggtccggcaccacggcgggcgcgtgcgggtacaaggacacgcgcgagcaggggtacggcgtgcagacggtggctgtgagcacggtgttgtttggcgatggcgcggcctgcggcgggtgctacgaggtgcggtgcgtggacagccccagcgggtgcaagcccgacgcggcggcgctggtggtgacggcgaccgacctgtgcccgnccaaggacaagtggtgcaagccgccgc

SEQ ID NO: 81751 - DNA, 383 bp, Zea mays
cgacacatgatcaaaccagtggcatttgagcttggcattcctcctgaaaacatcactgcaaaccaattgttatttggcacattgggggagtacgccggatttgatcccacagagcccacttcacgcagtgggggtaaagcaaaagcagtgcagcaaataaaacaggaccatggctacaagacagttgttatgattggtgatggcgcaactgatctggaggctcggcaacctggcggagcagacttgttcatctgttacgccggggttcagatgagagagccagtcgcagcacaagctgactgggtggtttttgattttcaagagctgatcactaagttgccatgaattcattacctaccgcaatttatgaacctttgcattgt

SEQ ID NO: 81752 - DNA, 427 bp, Zea mays
cccacgcgtcagacgccgtctcccccgcgtccgccgactaccgccgcctcctcgcgcagctatcctccgcgggcctcttcgaacgcgtcagccccacccccaaggtccagctcgtcctgatggccgtcctcttctacgccgcgctgtacctcgtcctcgcatgcgccagcgcctgggcgcacctcctcgcggggggtctcattggcttcgtctggatccagtccggctggatgggccacgactcgggccaccaccgcatcaccggccatccggtcctcgaccgcgtcgtgcaggtgctctccgggaactgcctcaccggcctcagcatcgcctggtggaagtgtaaccacaacacgcaccacatcgcctgcaacagcctggaccatgacccggacctccagcacatgccgctctttgccgtctcccc

SEQ ID NO: 81753 - DNA, 326 bp, Zea mays
agtctgatgctcagaactcatcactcttcgtaaagattttggtgattgagatcttcggcagcgctctgggactgttcggtgtcattgtgggcatcattatgtcatctcaagcgacatggccagcaaaagcttgattttcaccatttgtagctctgtaaattattcagatggagtgtatccaaatgtgcatgtggtccaactgcattttcatgttccttttatgtggcgtcctttttggcaaaacacgaaatgcggcgcgcgtaacgccaacgattgtaaaattgccaatcctaatgccggagtactccaagtgtgttggagaacct

SEQ ID NO: 81754 - DNA, 393 bp, Zea mays
  unsure (1)..(393): unsure at all n locations
accacgcgtccgcactcaccccgccttcacgcctccctcaccaaataaggtcccgcccttttccgacattcacaggggggacaggaaatcagcggccatggcctcgattccggcgacgaccttcgccgtcatcttatccgtcctcttctgtgccgcggctggcaccgccgtcgacaacgacctccccgactacgtcatccagggccgcgtctattgcgacacctgccgcgccgggttcgtgaccaatgtcaccgagtacatcgcgggcgccaaggtgaggctggagtgcaagcacttcggcaccggcaagctcgagcgctccatcgacggggttgacgacgggaacggcacgtacacgatcgagctcanggacagccacgaggaggacatctg

SEQ ID NO: 81755 - DNA, 430 bp, Zea mays
  unsure (1)..(430): unsure at all n locations
atcgtcgtcgtctcactcaccccgccttcacgcctccctcaccaaataaggtcccgcccttttccgacattcacaggggggacaggaaatcagcggccatggcctcgattccggcgacgaccttcgccgtcatcttatccgtcctcttctgtgccgcggctggcaccgccgtcgacaacgacctccccgactacgtcatccagggccgcgtctattgcgacacctgccgcgccgggttcgtgaccaatgtcaccgagtacatcgcgggcgccaaggtgaggctggagtgcaagcacttcggcaccggcaagctcgagcgctccatcgacggggtgaccgacgggaacggcacgtacacgatcgagctcanggacagccacgaggaggacatctgcgaggtggtcttggtggaaagcccgcgcaaagactg

SEQ ID NO: 81756 - DNA, 423 bp, Zea mays
  unsure (1)..(423): unsure at all n locations
aaaccatccctgcaaattaccgcgatggctcccaaggtcctagtcatccttgtgttcctcgccgtggcctcaccggctgctctggccgccttcgatgtgatagagatgctggccgacaagcccacgtactccacgttcctgaagctcctgcaggacaccaaggtcgcgggcgaggcgaatcagctccggtcggcgacgctactggtcgtccccgacaaacttgccaagcctctggcgtcgctgcccgccgataaggtgcggccggcggtggagaaccacgtccttctcagttacttcgaccccatcaagctggacgagatgaagacacgcaccgccatcctccccacgctgctctccgtcancgacaaganactcggcgtcctcaactacaccagggccgacgacgggcaaatgtacttcggc

SEQ ID NO: 81757 - DNA, 350 bp, Zea mays
accacgcgtccgcccacgcgtccgccggcaccgtcgagctcggctgtggaaacagaacaaacccatcaaccatggcgaactcggcgtcggggatggccgtgagcgacgagtgcaagctcaagttccaggagctcaagtcgaagcgaagcttccggttcatcacgttcaagatcaacgagcagacgcagcaggtggtggtggacaggctggggcagccgggcgacacctacgacgacttcaccggctccatgcccgagagcgagtgccgctacgccgtcttcgatttcgacttcaccaccgacgagaactgccagaagagcaagatcttgttcatctcctggtccccggac

SEQ ID NO: 81758 - DNA, 389 bp, Zea mays
cttcgcatgctcagggttggatttgacgccccaaaaatcattggaatatgagaccatagtgagtgaacaagaagagaattactggtgtcttttactcgttgttggtaccgatctagacaccaatctagccaggtgtaccgtcatcggtgctttctgctcaggcgtggatagtccgcgacctgtgacaggagcgggatcttgtctacgccgaagccggacggtccacgggtgcgcagaggcggtggcgttcgccaacagcacctggatctaacctcccgaaagggaccccatcacgaagaagagatcatagggtttatcttgggattaacataccacccaagacacctttagacgacgtgaagccgaagagaggtgaaaataaagatgag

SEQ ID NO: 81759 - DNA, 393 bp, Zea mays
  unsure (1)..(393): unsure at all n locations
aataaaccatagcatcaatcatgtctggtcgttcgtggacaataatggcgcctctcctagcgtcgatgctgctcgtcgggctcgccgcgggctccgaggangangangacggcggcggcaaaaagaagccccacgtcaaccacggcaagtttaaggcggagccgtggacggacgggcacgcgacgtactacggcgggcgcgacgggttaactgacaccacggacagcggcgcgtgcggctacaagggcgagctggggaaagactacggcaccctgacggcggccgtgggcccgtcgctgtacaccaacggcaccgggtgcggcgcgtgctacgagctcaagggccccaagggcaccgtggtggtgacggccaccaacgaggccccgccgccgg

SEQ ID NO: 81760 - DNA, 410 bp, Zea mays
  unsure (1)..(410): unsure at all n locations
ctccaacatcctcctggacgcggacttcaacgccaagctctccgacttcggcctcgccaagctgggccccatgggcgaccagagccacgtcagcaccagagtcatgggcacctacggctactgcgcccccgagtacgccatgaccggcaagctcaccaagatgtcggacatctacagcttcggcgtcgtgctgctcgagctcatcaccggccgccgcgccatcgacatggccaggccgtccgaggagcaggtcctacttaactgggcttcgcctctgctgagagacaagaggaggttcgtgaagctggccgacccgttgctgggcaacanggtaccagtgaaggcgctgtaccaggcgctcgccgtcgcgtccatgtgcctgcagganggacgctgcagccggccgggga

SEQ ID NO: 81761 - DNA, 323 bp, Zea mays
acaccctcgtgtgcgcggacgtcaacaccaagctctccgacatcgggctcgccaagctgggccccatgggcgaccagagccacgtcaccaccaaagtcatgggcaactaccgctactgcgcccccgaatacgccatgaccggcaagctcaccaagatgtccgacatctacaacttcggcgtcctgctgctccaactcaacaacggccgccgcgccatcgacattggcaggccgtccgaggagcaggtcctacttaactgggcttcgcctctgctgagagacaagaggatgttcgtgaaactggccgacccgtttctgggcaac

SEQ ID NO: 81762 - DNA, 336 bp, Zea mays
cggacgcgtgggcccgaaggcaaatatgtggtggatatagataagagcattgatatcactaagatcacaccttcaacaagagttgctcttcggaatgacagctatatgctccatctgatcctaccaagcaaagttgatccattggtcaatctcatgaaagttgagaaggttccggattctacctatgatatgattggaggccttgaccagcaaattaaagagatcaaagaggtcattgagcttccaatcaaacatccggaactgtttgagagccttggaattgcgcaaccaaagggtgtccttctttatggacctccgggcacaggaaagacattg

SEQ ID NO: 81763 - DNA, 408 bp, Zea mays
acccacgcgtccggcgcacacacacgcaaccagatctcccccaaatccagccgtcggcacctccgcttcaagatgcagatctttgtgaaaaccctgactggcaagactatcaccctcgaggtggagtcgtctgacaccattgacaacgttaaggccaagatccaggacaaggagggcatccccccagaccagcagcggctcatcttcgctggcaaacagcttgaggacgggcgcacgcttgctgactacaacatccagaaggagagcaccctccaccttgtgctccgcctcaggggaggcatgcagatcttcgtgaagaccctgaccggcaagactatcaccctcgaggtggagtcctccgaacacattggaaacgtccaaggcaaagatcaaggacaaggagggcat

SEQ ID NO: 81764 - DNA, 417 bp, Zea mays
  unsure (1)..(417): unsure at all n locations
accaccaccaccaccaagctcaacaacagccagctcgcgaaaataatgaagagccgcagcatggcatcatcggccgcgctcttggtgctagccctcgcgctagtggcggccaccgccccacaggtagcggaggcaaagaagaagagagcggcggagagcggcgaggcggcggaggcgaagaagatccaggacgacttctgctcgacgctgtgcgagggcaagaaggggacggacctggtcgtgtgcaaggagtcctgcgcgctctcccagcagtccaacctggtgctgtacggcaggatccagtgcaagggcaagtgcaccgagcagaagggcatcacggcgccggccatgaaggtctgccaggaggagtgcgacaaggcgtacgtggtgaaggcggccganggtcacaaggcctgc

SEQ ID NO: 81765 - DNA, 365 bp, Zea mays
acgagcgatctcctctccctctccctctccgatccattctccagcgcagcgaagtaaacatgtctgaccgggcaaagatgtcgtggcaggcgtacgtggacgagcacctgatgtgcgagatcgagggccaccacctcgcggcggcggccatcgtcggccacgacggtgccgcctgggcgcagagcacggcgttccccgagttcaagaccgaggacatggccaacatcatgaaggacttcgacgagccagggcacctcgcgccgacaggcctgttcctcggacctaccaagtacatggtcatccaaggcgagcctggtgccgtcatccgtggcaagaagggatcaggaggcatcaccgtgaagaag

SEQ ID NO: 81766 - DNA, 400 bp, Zea mays
accgacactaaaggcgcctccccaggagtcaacgctgcacgtcaggctcgccgtgggctccgaggaggaggaggacggcggcggcaaaaagaagccccacgtcaaccacggcaagtttaaggcggagccgtggacggacgggcacgcgacgtactacggcgggcgcgacgggttaactgacaccacggacggcggcgcgtgcggctacaagggcgagctggggaaagactacggcaccctgacggcggccgtgggcccgtcgctgtacaccaacggcaccgggtgcggcgcgtgctatgagctcaagggccccaagggcaccgtggtggtgacggccaccaacgaggccccgccgccggtgagcgggcagaagggcgagcacttcgacctcaccataccg

SEQ ID NO: 81767 - DNA, 427 bp, Zea mays
cgacggggccaaggccgacatctggtcctgcggcgtcatcctcttcgtgctcctcgccggctacctcccgttccacgacgccaacctggtggagatgtaccgcaagatcagcagagccgacgtcaagtacccgcagtggttctcccctgagctccggcggttgatgcccaagctcctcgaaccgaacccaaacaacaggatcacgatcgagaagctggtcgagcacccctggttcaagaaggggtacaggccggccgtcatgctggcacagccgcacggctccagcagcctcaaggatgtccaggtcgccttcagcaacgccgaccacaaggacagcagcaccaaggtggaacagccggcggacagctccttgaagccggcgagcctgaacgcgttcgacatcatctcccactccagaggggttcga

SEQ ID NO: 81768 - DNA, 414 bp, Zea mays
cccacgcgtccggtcctctcctctgtccctctacggtgcttctgctcgccggcccaaaatcgcctcatcgaccacgcccccttccaggctcccgtctccatgggtctcctctcaaacaggattgggagggagagcctcaaggcgggggatcatatctactcctggagggcggcgtgggtctacgcgcatcacggaatatatgtgggcgatgataaggtgatccatttcacaagaggaagaggacaggaggtcggaacaggaactgtcgtcgatattattcttgtgagttccaccccaaaacgaagcaacacgccttgcccggtgtgcaccgacgaaaccagcgacagcagcacagagacgaacggcgtggtatcctcctgtctcagctgcttcctagctgggggtgctctctac

SEQ ID NO: 81769 - DNA, 364 bp, Zea mays
cccacgcgtccgcctgaaaccagcgtgctgtgccgcccgggacgatggcgccgcgccagccgctgctccccagtttcctctacgcggcgtcgtccggcgtcaacggcagcagggaggcgcctccggtggtggcgggcgccccgagcgagccgctcggcaagatcgagatgttctcgcccgcatactacgcagcgggcgccttgggaggcgccgcggcctgcgggttcacgcacgccgccgtcacgccgctcgacgtcatcaagtgcaatatccagatcgaccccgccaagtacaagaacacctcgtcggcgttcagcgtggtgatgagggaagcaggcctccggggcgtctacagggggtgggc

SEQ ID NO: 81770 - DNA, 424 bp, Zea mays
atggtgctgccgctggaggcagaggcggcgaacaagagcaagttcggcgtcacgctcgggctgtccatggcgttcatcgccgtcatgtacgggctgttcggcgtcatgggctacgtcgcgttcggcgacgccacgcgggacatcatcaccaccaacctcggagccgggtggctgtcggccgccgtgcagctggggctctgcatcaacctcttcttcaccatgccggtgatgatgaaccccgtgtacgaggtcgccgagcgcctgctccacggcaagcggtactgctggtggcttaggtggctgctggtcgtcgtcgtcggactcgccgccatgtacgtgcccaacttcacggacttcctggcgctcgtcgggagcagtgtctgcgtcctcctcgggttcgtgctgccggcctcgttccacctca

SEQ ID NO: 81771 - DNA, 429 bp, Zea mays
  unsure (1)..(429): unsure at all n locations
ctcctccaccaccaccaccaagctcaacaacagccagctcgcgaaaataatgaagagccgcagcatggcatcatcggccgcgctcttggtgctagccctcgcgctagtggcggccaccgccccacaggtagcggaggcaaagaagaagagagcggcggagagcggcgaggcggcggaggcgaagaagatccaggacgacttctgctcgacgctgtgcgagggcaagaaggggacggacctggtcgtgtgcaaggagtcctgcgcgctctcccagcagtccaacctggtgctgtacggcaggatccagtgcaaaggcaagtgcaccgagcagaagggcatcacngcgccggccatgaaggtctgccangangagtgcgacaaggcgtacgtggtgaaggcggccgaggtcacaaagcctgcaacgtcacc

SEQ ID NO: 81772 - DNA, 414 bp, Zea mays
cccacacgtccgatcaagccagacaacttccttataggcttaggtcggaaagctaatcaggtctatatcattgattatgggcttgctaagaaatacaaggaccttcagactcataaacacatcccatacagggagaacaaaaatctgactggaacagcacgttatgctagtgtgaatactcatcttggaatagaacaaagcaggagagatgatctggagtctgttggctatcttctgctatattttttaagaggaagcctcccatggcagggccttaaagctggcactaagaaacaaaagtatgataaaattagtgaaaagaaaatgcttacctcggcagagattctgtgcaaatcttacccgccggagttcgtctcatatttccactattgtcgctccctgcgatttgaagac

SEQ ID NO: 81773 - DNA, 424 bp, Zea mays
ctaccctcgtcgtcgtcgcactcaacccgccttcacgcctccctcaccaaataatgtcccgcccttttccgacattcacaggggggacaggaaatcagcggccatggcctcgattccggcgacgaccttcgccgtcatcttatccgtcctcttctgtgccgcggctggcaccgccgtcgacaacgacctccccgactacgtcatccagggccgcgtctattgcgacacctgccgcgccgggttcgtgaccaatgtcaccgagtacatcgcgggcgccaaggtgaggctggagtgcaagcacttcggcaccggcaagctcgagcgctccatcgacggggtgaccgacgggaacggcacgtacacgatcgagctcaaggacagccacgacgaggacatctgccacgtggtcttggtggacagcccg

SEQ ID NO: 81774 - DNA, 322 bp, Zea mays
  unsure (1)..(322): unsure at all n locations
ggcgagggccacggcttcgccgtcgactggtgggccgtcggcgtgctcgcctacgagatggcgttcgggcggacgccgttcaagggccagaaccgcaaggagacgttccggaacgtgctgcagcaggagctcgagttcccgggggacacccggtggcggacgccggagctcgcggatctcatctcgggcctgctggagcgggacccgaggaggangctcgggtacgccggccgcgccgacgaggtccgggcccacccgttcttcgccggcgtcgcgtgggacatgcccacggaggtgtccaggcccccctacaacccgccgc

SEQ ID NO: 81775 - DNA, 425 bp, Zea mays
ctttcgagtgcgtgcgtgtctgttcaagctctgatcgtctctccggcccattcgccggaggaaactgaccgccgccttctcgctctcgctctctaccctattcccggggctgagaggggaggagagaaggccacgtccacaccataaagcaggacgtacagacacgtgtacgagggggatcacggtcgggtgaggtgactaagctggcggacggaacgacgacgatggcgaggagcggcggcgggatggaaggcagcggcgggctgaagaaggggccgtggacgcaggcggaggacaagctgctgagggaccacgtgcggcggcacggcgagggcaactggaacgccgtgcgccgggagacgaggctgcagcgctgcggcaagagctgccgtctccggtgggccaaccacctccgccccaacctc

SEQ ID NO: 81776 - DNA, 388 bp, Zea mays
aaagaagtcgcctaattctttcgatcgaattaggcgccttcttcgtcccacgctccgtctttatttgtaatgtgaagcttacaggaacatttgagtggatcatggacggattggtaggcctcttgaaagtccgggtggtgaggggcatcaaccttgcctaccgcgacgcaagaggcagcgatccgtatgtcgtcctacgacttggcaagaagaaacttaagacgagcgtgaagaagagatctgtgaaccccatctggcacgaggagctaactctgaccgtcacagatcccagcctagctctgaagctggaggtgttcgacaaggacacgttcagcagggacgacccgatgggggacgcggagatcgacgtggcgccgctggtggaggc

SEQ ID NO: 81777 - DNA, 421 bp, Zea mays
atcgtgagcagcgacaagaccatcgacgggcgcggagcgcaggtgcacatcgtgggcgcgcagatcacgctgcagaacgtgcgcaacgtgatcctccacaacctgcacgtccacgacgccgcggcgcacggcggcggcgcgatccgggactcgcagcaccactggggcgtgcgcggggagagcgacggcgacggcgtctccgtgatggggtccagcgatatctggatcgaccacctgtccatgagcagctgcgcggacgggctggtggacgcggtggacggctccaccgccatcaccgtctccaacggccacttcacgaggcacgaccacgttatgctgttcggggccagcgacgccgcgtccaaagacagggagatgcaggtcaccgtcgccttcaaccacttcggcaaggggctggtgc

SEQ ID NO: 81778 - DNA, 412 bp, Zea mays
  unsure (1)..(412): unsure at all n locations
acccacgcgtccggcagccgtggccgctctgctggtgttcgccgcggtgtcgcctgccgcgcgcgcggtggcggcggaggcggaggcgaaggcgaaggctgtgggaggcgcgccgtcggtgcccgctggctcgctggacatcgcgcagctgggcgccaagggcgacggcaagtcggacagcaccccgatggtgctcaaggcgtggaagcacgcgtgcgaggcgacggggcagcagaagatcgtcatccccaagggcaactacctgacgggcgcgctggacctggtgggcccctgcaagtcctccatcatcatccgcctcgacggcaacctgctcggcancggcgacctcaacgcgtacaagaggaactggatcgagattcagaacgtcgacaacctgtccatcaacggccac

SEQ ID NO: 81779 - DNA, 424 bp, Zea mays
  unsure (1)..(424): unsure at all n locations
ggcccaacccgcaggggtcgtaccactacggccagatcaacatcacccgcaccatcaagctcgccatgggccgcggcaaggtggacggcaaggagcggttcggcttcaacggcgtgtcgcacgtcgaccccgagacccccgtcaagctcgccgagtacttcaacaccaccgacggggtgttccagtacgacatcatcggcgacgtgccgccctccaagtccgcgcccaccaagatggcccccaacgtcatccgcgccgagttccgcaccttcatcgaggtggtcttcgagaaacccgagaagagcatcgacnacatccacatcgacggctacgccttcttcgccgtcggcatgggcccgggcaaatggacgccagcgtcncggagcacgtacaacctcctggacacggtgagccggcacacgat

SEQ ID NO: 81780 - DNA, 421 bp, Zea mays
tgcagctgctggccgccggcgtggccgtgctactgctagtggcaccgccggccttggctgacgacgacattgtagaagtcggcgtcaactggggttcgcagctctcgcacccgcttctccccggctccgtggtgaagatgctcaaggcgaaccgcatcgccagggtcaagatgttcgacgccgactcctggcccgtcggcgcgctcgtcgactccggcattgaggtcatgctcggcatccccaacgacatgctggagaccatgagcagcagctacggcaacgcccaggattgggtcaaggagaacgtcaccgcctacggtgacaagcttaagctcaagtatgtggcagtggggaacgagccatttctcaaagcatacaacgggtcattcatgaaagacaaccttcccggcgctcaagaaca

SEQ ID NO: 81781 - DNA, 383 bp, Zea mays
acccacgcgtccggcggcggatcgaggaggtggtcgtggcgcagtccgcggtgcaccggtgcgcggcgtccgtggacttcggcgccggtgggagcccgctgctgcccccgaccgtgaacgccgcctcgctgcacgcgcacttcgaggccgtcgccgccgacacggtcggcgcgggcgccgtccgtggcgccatggagccctgcatgggcagcgaggacttcgcgtccttctcggcggccgtccccgcctcgcacttctacttcgtcggcatagggaacgaggcgatcggggccgtgcacgccgcgcactcgccgcactttcttgtcgacgatggtgcgctcccgtacggcgccgcgatgcacgccaacctcgccatcgagtac

SEQ ID NO: 81782 - DNA, 424 bp, Zea mays
gccaagccggagcacaaagcttgtgtgtctggctgtctccggccggccgggcttgtcgtacgtcctccaatctgttgacggtcaggccctctagcttttgctcggcgttctggagacagagcgagagcgagagagagagagagagagagaggtagacggagatggagtgcctgctggggctgctcaaggtgcgggtggtgcgaggagtgcacctggccatctgcgacccgctcacccacagcagcgacccctacgtcgtcctccgccacggaaagcagaaagtgaaatcaagtataaaataccgcacgattcaaccagaatggaacgaggagctcaacctgtccatcacgaacatgatgaacccggtcaagattggactcctcgaccacgacacgttcaccaaggacgacagcatgggcaacgc

SEQ ID NO: 81783 - DNA, 420 bp, Zea mays
cccacgcgtccgggcaagggacgtaagaagtcgtctaattcttggatcgaattagacgacttcttcgtccctctcttcattagcacgctaacttgtaatctgcaggatctaagcaaagacttgatttagttatggacggattggtaggcctcgtgaaagttcgcgtggtccggggtatcaaccttgcctaccgcgacgcaagaggcagcgatccgtatgtcgtcctacggcttggcaagaagaaactgaagacaagcgtgaagaagagatccgtgaaccccatatggcaagaggagctaactctgaccgtcacagatcccagccaaccactgaagctggtgagtgagcagcaggcagaacgatcctgtttgtgattcattattctagactgtttgctacaggaggtgttcgacaaggaca

SEQ ID NO: 81784 - DNA, 400 bp, Zea mays
ccacgcgtccgttctctaggaactatccaaaatccttccaggagctccttcgtaagcagaatggtgatagagcattgtgggaatatccctttgctgtagctggtgtaaatattacattcatgctgattcagatgcttgaccttcaagcagctaagccaacgtcgttggttggagcggttttcctaaatctactcttagaaaatgatcgagcgttcgacattctttactgcataaccttcaaactgatggatcagaaatggcttgaaatgcacgccagttacatggatttcaatacggttattaaatcaacacggcgccagctcgagagggagctgttgctagaagatatccagagaatcgaggacatgccatcgtacaggtttctcgcctgctagcaatt

SEQ ID NO: 81785 - DNA, 416 bp, Zea mays
  unsure (1)..(416): unsure at all n locations
cgaccatccctgcaaattaccgcgatggctcccaagatcctagtcatccttgtgttcctcgccgtggcctcaccggcggctctggccgccttcgatgtgatagagatgctggccgacaagcccacgtactccacgttcctgaagctcctgcaggacaccaaggtcgcgggcgaggcgaatcagctccggtcggcgacgctactggtcgtccccgacaaacttgccaagcctctggcgtcgctgcccgccgataaggtgcggccggcggtggagaaccacgtccttctcagttacttcgaccccatcaagctggacgagatgaagacacgcaccgccatcctccccacgctgctctccgtcancgacaagaaactcggcgtcctcaactacaccagggccgacgacgggcagatgta

SEQ ID NO: 81786 - DNA, 428 bp, Zea mays
  unsure (1)..(428): unsure at all n locations
atcaaagcgtacgaggacgccgcctccgtgctcaccgtctccaagatccactacgagaatatcaagatggaggactcagccaaccccatcttcatcgacatgaagtactgccccaacaagttgtgtaccgccaacggcgcctccaaggtcaccgtcaaggacgtcaccttcaagaacatcactggcacctcctccaccccggaggccattagcctgctctgcactgccaaggtcncatgcaccggcgtcaccatggatgacgtcaacgtcgagtatagcggcaccaacaacaagaccatggctatatgcacgaacgccaagggcagcaccaagggttgcctcaaggagcttgcatgcttctagaccctccgtcgactgacncatctctctagttataatttttctctcgtccttgcattgcatattag

SEQ ID NO: 81787 - DNA, 431 bp, Zea mays
  unsure (1)..(431): unsure at all n locations
aaacaacaagactgacagcgacgatgatgccacagctgcgtagcctcgtcgcgctggtcctcgtggccacggccatagccgccgctcccggcgttgggtttgtcgtcaccggccgcatctactgcgacaactgccgcgccgggttcgagacaaacgtgtcccacgccatccaaggcgcgacggtggagatggagtgccgccacttcgagtcgcagcaggtccacgacaaggcggaggcgacgacgggccccggcggctggtacaggatggagatcagcggcgaccaccaggacgagatctgcgacgtgcgcctgctcaagagccccgaggcggactgcgccgagatcgaccactcccgcgaccgctgccgcgtcncgctcaaccgcaacgacggcatcaagcagagcggcgtccgctacgccaaccccatc

SEQ ID NO: 81788 - DNA, 414 bp, Zea mays
  unsure (1)..(414): unsure at all n locations
agcaacgatcacaacaagatggcgtgcacaaacaatgcgatgagagccttgttcctcctggtcctcttctgcatcgtgcatggtgagaaggaagagtcaaagggcatcgatgcgaaagcgtccgggcctggtgggtccttcgacatcaccaagttgggcgcctccggcaatggcaagacagacagcacgaaggctgtgcangaggcatgggcatcggcgtgcggcggcactgggaagcagacaatcctcatacccaagggtgacttccttgtcggacaactcaacttcacaggcccttgcaagggcgacgtgaccatccaagtggatggcaatctgctggcgaacacggacctaagccagtacanaggacatggtaattggatcgagattctacgtgtggataacctggtcatc

SEQ ID NO: 81789 - DNA, 399 bp, Zea mays
acccacgcgtccgatcacggggctggtcaacatgttcgccaccgtggtgtccatcgtgtgcgtggaccgcctgggccggcgcgcgctgttcctgcagggcggcacgcagatgttcgtctcccagatcgtggtgggcacgctgatcgcgctccagttcggcaccgccggcgtgggcgagatgtcccgctccaacgcctggctgctggtgctcttcatctgcctctacgtcgccgggttcgcctggtcgtgggggccgctgggctggctcgtccctcggaggtgttcgcgctggaggtccggtcggcggggcagagcatcgccgtgtgcgtcaacatgctgctcaccttcatcatcggccaggccttcctcagcatgctgtgctcgctcaagttcgggctc

SEQ ID NO: 81790 - DNA, 383 bp, Zea mays
gcgatgtacggcattgcagttgccgctcttggtatgctgagcacaatcgcaactggtcttgctattgatgcttatggtcccatcagtgacaatgctggtggtattgctgagatggctggaatgagccacagaatccgtgagagaactgatgctcttgatgctgctggcaacacaactgctgctattggaaaggggtttgccattggttcagctgctcttgtgtccctggcgctttttggtgcctttgtcagcagagctggagtgaaggtcgtcgacgtcctctcccccaaggttttcattggtttgattgttggagccatgcttccgtactggttctctgccatgaccatgaagagtgttggaagcgctgccctgaagatggt

SEQ ID NO: 81791 - DNA, 429 bp, Zea mays
acccacgcgtccgcggacgcgtgggcgatcaccaatgtgggcggcgccggcgacatcgcggcggtgtcggtgaaggggagcaagcgtgtcaagtggacggagatgaagcgcaactgggggcaagtgtggcagaccggggaggacctcacctgcgagtcgctgacgttccgggtgatgaccagcgaccaccgcaaggccacctcatggcacgttctccccgctgactggaagttcggtgtcacgtaccaggcatccaagaacttctaagtagccacttttcctcctcttcttcaacctgcatatgcccacaagcaaccatgcagatgataacatgcatcatgcatgcatattcattctttcgctcatgcattccgatatggtgccggagttaaaaaaatgtaaatcaatgtgcaaactcaaatgacatct

SEQ ID NO: 81792 - DNA, 290 bp, Zea mays
  unsure (1)..(290): unsure at all n locations
cccacgcgtccgcccacgcgtccgaacccggagtcgctcgccaagttcgccgagaccgccgagaagtgcctcgccgagttcggcagcgaccgcatctccatgggcgacgtgctgtggaacctcgagtacgcgctgcagctgcaggacgccaacccgcccgagggcgcgcggcagggcggcgacggggacgaccaggacggcgccgcggcggccggcggcggcggcgcngtcgtanncgcgggcggtgccgtgcccgacgcgtccgacgccggcgccggggagctcttccc

SEQ ID NO: 81793 - DNA, 420 bp, Zea mays
cgagattctacgcgtggataacctggtcatcaccggcaagggaaaccttgacgggcagggcccagccgtgtggagcaagaactcctgcaccaagaagtacgactgcaagatccttcccaactcgctggtgatggacttcgtgaacaacggggaggtgtccgggatcacgctgctcaactccaagttcttccacatgaacatgtaccagtgcaagaacatgctgatcaaggacgtgaccgtgacggcgcccggggacagccccaacacggatggcatccacatgggcgactcatccgggatcaccatcaccaacaccgtcattggcgtcggcgacgactgcatctccatcggccctgggacctccaaagtgaacatcactggcgtgacctgcggccccggccacggcatcagcatcggcag

SEQ ID NO: 81794 - DNA, 425 bp, Zea mays
cccacgcgtccggcgagcgcggcgcggcccaacccgcaggggtcgtaccactacggccagatcaacatcacccgcaccatcaagctcgccatgggccgcggcaaggtggacggcaaggagcggttcggcttcaacggcgtgtcgcacgtcgaccccgagacccccgtcaagctcgccgagtacttcaacaccaccgacggggtgttccagtacgacatcatcggcgacgtgccgccctccaagtccgcgcccaccaagatggcccccaacgtcatccgcgccgagtttcgcaccttcatcgaggtggtcttcgagaaccccgagaagagcatcgacaccatccacatcgacggctacgccttcttcgccgtcggcatgggcccgggcaaatggacgccagcgtcccggagcacgtacaacctcct

SEQ ID NO: 81795 - DNA, 414 bp, Zea mays
cccacgcgtccggtggatgccggcgccacagcctctcctgctgtcgctgctggtcgccgtgctagcggtggccgccgatgtcgccaacgccggccacgccaagcccctgacgcctggcgggcgcgtggtacaccacaaccacggcaagttcacggccgggccgtggaaacccgcccacgcgaccttctacggcgggcgggacgggtccggcaccacggcgggcgcgtgcgggtacaaggacacgcgcgcgcaggggtatggcgtgcagacggtggccgtgagcacggtgctgttcggtgacggcgcggcctgcggcgggtgctacgaggtgcgctgcgtggacagccctagcgggtgcaagcccagcgcggcgacactggtggtgacggcgaacggactgtgcccgcccaacga

SEQ ID NO: 81796 - DNA, 337 bp, Zea mays
acgcccgcctgctggctcgccggcgatcgaatttgaccgccggtcggcgagcggagcatacgtgcatacatggtttgcctgacgccggcggcggcggcgctgctgctcgtcgtcgtcctagcggcggccgtgtccgcgctcccggcgatcaacgtgacgacgatggcgttcgaggacgggtacgcgccgctgttcgggcacggcaacatcctccgctccgccgaccaccgcaccgtcagcctcctcctcgaccgttccaccgggtccggtttcatctcgtcgtccatgtaccagcacggcttcttcagcgcgtccatcaagctcccctccgactaca

SEQ ID NO: 81797 - DNA, 392 bp, Zea mays
ctcctcttacattacaggtcatagctaagcaggtctgacaggatgtcgtggcagacatacgtcgatgagcacctcatgtgcgagatcgagggccaccacctgacctccgctgccatagtcggccacgacggcgccgtttgggcccagagcaccgcattcccacagttcaagacagaggagatgaccaacatcatgaaggacttcgacgagcccgggttcctggccccgaccggcctcttcctcggccccaccaagtacatggtcatccaaggcgagcccggcgctgtcatccgcgggaagaagggatctggaggcataactgtgaagaagacagggcaagcgatggtggtcggcatctacgacgagcccatgacccccggccagtgcaacat

SEQ ID NO: 81798 - DNA, 412 bp, Zea mays
  unsure (1)..(412): unsure at all n locations
gctggttcccatcgaccatggatactgtctgccggagagcttcgaggactgcactttcgagtggctctactggcctcagtgccgggagcccttcagcgacgagacggtggagtacgtgcggtccctggacgcggaggaggacgtgactatgctgaggctccacgggtgggaggtgtcgcgcgagtgcgcgcgcacgctgcgcgtcgccaccatgctgctgaagaagggtgtggagaggggcctcaccgccttccacatcgggagcatcatgtgcagagagaccctgaccaaggagtccgccatcgaagagatcgtccgtgaggcggcggaacggggaggaggatgcgagactgtcttcttgcaggctgtctcngagatcatggaccgccgtctcgacgacatcaaagaacat

SEQ ID NO: 81799 - DNA, 426 bp, Zea mays
agcgacgccgcgtccaaggacagggagatgcaggtcaccgtcgccttcaaccacttcggcaaggggctggtgcagcggatgccgcgctgccgtcacggcttcttccacgtggtgaacaacgactacacgcactggctcatgtacgccatcggcggcagccggaaccccaccatcatcagccagggcaaccgcttccgcgccgtcgacgacagcaggttcaaggaggtgaccaagcgggagtacacgcagtacagcgagtacaagaactgggtgtggaagtcgcaggacgacctgttcctcaacggcgccttcttcaaccagtccggcggccagaacgagcgcaagtacgacaggctcgacctcatccaggccaagggcggccagtacgccgagtcgctcaccaggtacgccggcgcgctcaactgc

SEQ ID NO: 81800 - DNA, 424 bp, Zea mays
gccccttcgcgttgcgcgtgcgtatggcgctgagcctcaagggcctgagctacgagtacatcgagcaggacctgttccacaagggcgagctcctcctcagctcaaaccccgtgcacaagaaggtgcccgtgctcatccaccacggcaagcccatctgcgagtccctcgccgtcgtggagtacgtcgatgaggtctggcccggcgccgccaccaccatcctccccgccgacccccacggtcgcgccaccgctcgcttctgggccgcctacatcgacggcaagctgtttccggcgtggacagggatcatgaaggcggcgacggaggaagcgaaggcggataagctgagggagacgcacgccgcggtcctcaacctggagaaggcctcgcccagatcagctctagctccagcaacgacggcgcggcc

SEQ ID NO: 81801 - DNA, 427 bp, Zea mays
  unsure (1)..(427): unsure at all n locations
caccaatctgccatcctctccatcacgaagatggcgttcatcagcaatgtcgcagtgaaggcggcgggcgtggccgcgctgcttgtggtcgcagtggtgtcgcctgccgcgcgcgcggcggcggtggcggtggcgggaggggcgccgtcggttccggcgggtccgctggacatcgcgcagctgggcgccaagggcgacggcaagtcggacagcaccccgatgatcctcaaggcgtggaagaacgcgtgcgaggcgacgggggtacagaagatcgtcatcccgccgggcaactacctgacgggcgggctggagctgaagggcccctgcaagtcctccatcatcatccgtctcgacggcaacctgctcggcaccggcgacctcagcgcgtaccanaggaactggatccagatcgagaacgtcgagaacc

SEQ ID NO: 81802 - DNA, 175 bp, Zea mays
gcccaggcccggtccaggtccaagcgacggcgcgtccaaggtcacggagattcaggtcaccgtcgccttcagccacttcggcaacgggctggtgcagcgggtgccgcgctggcgtcacgggttcttccaggtggtgagtaacgactacacacacgggctcaggtacgcgatcggg

SEQ ID NO: 81803 - DNA, 376 bp, Zea mays
acgacggcgtgctgtcgctggggaacggcgacatgtccttcgccgtccacgccgccaagcgcttcgggcagcgcttctccttctgcctgctcagcgccaacagctcccgcgacgcctccagctacctcaccttcgggcccaacccggcggtgatgggtccgggcaccatggagacggacatcctgtacaacgtggacgtgaagcctgcatacggggccaaggtgacgggcgtcttggtgggcggggagcggctggacatcccggacgacgtgtgggacgccgagaggtttgtgggcggcggtgtcatcctagacacgagcacgtctgtgacgtcgctggtgccggaagcgtacgcgccggtgactggcgcgctgga

SEQ ID NO: 81804 - DNA, 394 bp, Zea mays
atataacttgtcaatccatttcttaactcttctcttttaaacaacagcgaagtctcactctagctatatatggagatgaagaagatggagaaggaggatgacaccatcattgttggcgccagcatcactgtcgtaatagggtagtggtagcaaatagatatcacggtccaatgcatgcatgtgtaatgcattgcttgggatccaacccaatctagtatagctagcataggtcggcttaaagtattgtcagcactaaagttaattatttggcggtgtaggcggtgttggccttccagttggcagggatgacatcgtcgtagacggacttggtgcctccctcggtagtgaggcggacggtgaggggtcccttaagcggtttgtcgctgtccttcct

SEQ ID NO: 81805 - DNA, 412 bp, Zea mays
ccgcccgcccgcccctcccctctctctgtctcgccgcccggggagaaggagggctccgccgctcccggggaagagcgcgccattgccgccgccgcgctgactggggaagatggttgtccaggagttcacagttgatctcaacaagccccttgttttccaggttggccatcttgaggaacggtaccaggaatgggttcaccaaccgatcgtcagcaaggagggtccacgctttttcggaaatgatgtcctggagttcttgactcgcacgaagtggtgggctgtgccaactatatggctgcctgttgtctgctgcctgctcgtgaaatctattctgatgggtcataccgttcaggacgtagctatgatggctcggtttgggatatttatttgggcgctgatcgaatacactttg

SEQ ID NO: 81806 - DNA, 402 bp, Zea mays
ccgacgcgtccgagcggttcggcttcaacggcgtgtcgcacgtcgaccgcgagacccccgtcaagctcgccgagtacttcaacagcaccgacggggtgttccagtacgacatcatcggcgacgtgccgccctccatgtccgcgcccaccaagatggcccccaacgtcatccgcgccgagttccgcaccttcatcgaggtggtcttcgagaaccccgagaagagcatcgacaccatccacatcgacggctacgccttcttcgccgtcggcatgggcccgggcaaatggacgccagcgtcgcggagcacgtacaacctcctggacacggtgagccggcacacgatccaggtgtaccctatgtcgtggacggcggtgatgatgacgttcgacaacgcgggcatgt

SEQ ID NO: 81807 - DNA, 428 bp, Zea mays
  unsure (1)..(428): unsure at all n locations
aagaagcccattgctgcgcgctttcatccttccgctccaaacaggatgatagtatccaacgaagatatcaacatccttgtgcgtgccaaggcgcacatgctcgtcgcgctgaagctcgaccgctgctccggcttctccactccctccatcgcactcgtcgcccgttcctgcaggaaactggaaacacttttcctggaagaaagcacaattgatgagaaagaaaatgatgagtggatccgtgagcttgctacgagcaattctgttcttgagacactgaatttctttctaacagatctcagggcatccccagagtatcttaccctccttgtgcgcaactgtcaacgattgaaaactctgaagattagtgaatgtttcatgcncgatctggtcagtttgttccgaactgcacaaacactacaagagttcgc

SEQ ID NO: 81808 - DNA, 425 bp, Zea mays
gttcgtggatggcggtgccacaacctctcctgctgtcgctgctggtcgccgtgctagcggtggccgccgatgtcgccaacgccggccacgccaagcccctaacgcctggcgggcgcgtggtacacgacaaccacggcaagttcacggccgggccgtggaaacccgcccacgcaaccttctacggcgggcgtgacgggtccggcaccacggcgggcgcgtgcgggtacaaggacacgcgcacgcaggggtacggcgtgcagacggtggccgtgagcactgtgctgttcggtgacggcgcggcctgcggagggtgctacgaggtgcggtgcgtggacagccctagcgggtgcaagcccgacgcggcagcgctggtggtgacggtgaccgacctgtgcccgcccaagggacaatggtgcaagccacgc

SEQ ID NO: 81809 - DNA, 428 bp, Zea mays
  unsure (1)..(428): unsure at all n locations
ctgccatcctctccaacacgaagatggcgttcatcagcaatgtcgcagtgaaggcggcggccgtggccgcgctgctgctggtcgcagcggtgtcgcctgccgcgcgcgcggcggcggtggcggtggcgggaggggcgccgtcggtgccggcgggtccgctggacatcgcgcagctgggcgccaagggcgacggcaagtcggacagcaccccgatgatcctcaaggcgtggaagaacgcgtgcgaggcgacgggggtacagaagatcgtcatcncgccgggcaactacctgacgggcgggctggagctgaagggcccctgcaagtcctccatcatcatccgtctcgacggcaacctgctcggcaccggcgacctcagcgcgtaccagaggaactggatccagatcgagaacgtcgagaacctgtccatc

SEQ ID NO: 81810 - DNA, 402 bp, Zea mays
cttctttcttcctcctcctcgtcctctcgaattccgtctcttgtctctgtcctcctcgctcggcttccccggttcttgagaggggaaagaggaggcggaggagagggatggggagggacgagaggttcccagtgtgggaggccgcgctcggcgctggggtcgccgccgccttcgccgctgggctcgtcggggtttacctttccatgccggactccgactacagcttcctcaagctgccacgtaatctccaggaactcgaaatcctcactggccatcttgagaactatactaccgactacaccctacaggtgttggtacgctactgcgccgtgtacatcttcatgcagaccttcatgatcccaggaacgatattcatgtcactgcttgctggtgccctgtttg

SEQ ID NO: 81811 - DNA, 417 bp, Zea mays
acggacgcgtgggctccgtgaggcctgagcccctcgccgcggtgagccaagccggcgcacgtcgccccggggctcacgctcaccaccgagccccaaccaattaataatatatatatatagctaggatcgatcgtcagtaaaatggcaggctccgccgtcctgaggagccccctgtccgtcctcctctacatcctcgccgccgtgcccgccaccgccgcggcgacgccgaccgacgccgccatcgacgaggcgtacgcgcatctcgtcaacctcaccgctaaccaggagtactgggcggagcgcgcggaggcggcgcacgcgtacaaccgcgcggcgtaccagaccgaccccgtggccgtcgtgcagcgcttcaacgacggcgtgcacagggcgacggcgacccggtcgcggtccctg

SEQ ID NO: 81812 - DNA, 281 bp, Zea mays
ggaggaccgatcactgcatacacgagtggaaaatgctactgctgttcagtttaagttcgcgttgtacttgtatgtatagtggctgctacttatgtgagttttgtacctgtactgtacatgaagtctcttttcttttatataccatggctaagggggtgttgactaagggcctgtttgtttacctcccagattatataatctggattaaataatcctaagaggcaaacaaacagtctagcttatttgcccagattatataatctaaccccttggattatgat

SEQ ID NO: 81813 - DNA, 376 bp, Zea mays
tcttgggtctcccaatagtccgtaatcctgcagtcatctcctccaccaccaccaccaagctcaacaacagccagctcgcgaaaataatgaagagccgcagcatggcatcatcggccgcgctcttggtgctagccctcgcgctagtggcggccaccgccccacaggtagcggaggcaaagaagaagagagcggcggagagcggcgaggcggcggaggcgaagaagatccaggacgacttctgctcgacgctgtgcgagggcaagaaggggacggacctggtcgtgtgcaaggagtcctgcgcgctctcccagcagtccaacctggtgctgtacggcaggatccagtgcaagggcaagtgcaccgagcagaagggcat

SEQ ID NO: 81814 - DNA, 364 bp, Zea mays
acgccccgtcgccatgggcaactgctgcccgggctccggggatgcgagcccgccccgctgcctccgccgatgctcctccacctcaaccccggcaccttgttcctcaaggccggcgcctcggcaggctcggcgccaattcccaaaaagcggcccgcgccaaccggcccggtcctggaacggcctatgaaggacttgcgcagcatctacactgtcggcaaggagctcgggcgtggccatttcggcgtcaccagcctgtgcacacacagggctaccggagagcgcttcgcgtgcaacactattgccaaccggaagctctccaccaaggaggacgtggaggacgtgcggcgcgaggttcagatcatgt

SEQ ID NO: 81815 - DNA, 386 bp, Zea mays
agtgactcgtattaacgcgtgggcgcaggaccgccggcgacgatcgaggagggaggaaccagatacccggcggcggcgatcgatggctccgcgcagctcatcggcggcgacgtgcctgtgcctcgctctcgccgcggccacgctggcgctggcccacggggcgcaaggaggaggaccatcggcatcggcggcggacctggacaaggtcacggccgagaccttcttggacatcgagatcgacggcaagcctgcaggccggatcgtgctgggactgtttggggacaccgttcctaaaacagcagagaacttccgagcactttgcacaggggataaatgaattgccaagtccggcaagcctctgtggtacaacgggtcgacgttccaca

SEQ ID NO: 81816 - DNA, 424 bp, Zea mays
accggataaacgatcatcctgttccagaggaagagataaagatgttgttacaagcgggcgatatacatggaactgacacattagattgtgaggaatttgtgacagtcttgcttcacattaaaaagatgagtaatgacgagtatctacctaaagctttcgagttcttcgacaaagacgggaatggttttattgaaatgtccgagttaatggagactctaagtgatggtgaactaaagcctgatgagcaattggttaacgacattattcaagaggttgacaaggataaggatggtcgcatcagttacccagagtttgaattgatgatgaaaagtggatcggactggaggaacgcctctagacgttactcaacagagaatttcagcagcctcagtcaaaaactgtgcaaagatactttatgaaacaa

SEQ ID NO: 81817 - DNA, 448 bp, Zea mays
actcgcgggccgatacaagcctctacacagacgtcgtagcagcgcaagctcatggccgacgccgcggctgaggccacgtacaagcatgacccggtcgaggtcgccaaccaacttaaccgtgcagtccacagatccgtcgagaaggaggacattggcacgaggcgggagatgatggggacgacgacgaggaagtctaagttcagcgggccgtgcagggcgacgaacccgatcgaccggtgctggcggtgccggcaggactgggcgacggaccggaagcgcctggcgcggtgcgccaaggggttcgggcgcaacaccaccggcgggctggccggcaagttctacgtggtgacggacggcaccgacgacgacgtggtgaacccgcgccccggcacgctccggtggggcgtcatccagatcgagccgctgtggatcaccttcgccaagaaca

SEQ ID NO: 81818 - DNA, 426 bp, Zea mays
aagccggcgccacagcctctcctgctgtcgctgctggtcgccgtgctagcggtggccgccgatgtcgccaacgccggccacgccaagcccctgacgcctggcgggcgcgtggtacaccacaaccacggcaagttcacggccgggccgtggaaacccgcccacgcgaccttctacggcgggcgggacgggtccggcaccacggcgggcgcgtgcgggtacaaggacacgcgcgcgcaggggtatggcgtgcagacggtggccgtgagcacggtgctgttcggtgacggcgcggcctgcggcgggtgctacgaggtgcgctgcgtggacagccctagcgggtgcaagcccagcgcggcgacactggtggtgacggcgaccgacctgtgcccgcccaacgaccagcagtccgcggacagcggcgggtgg

SEQ ID NO: 81819 - DNA, 409 bp, Zea mays
  unsure (1)..(409): unsure at all n locations
ggccttcatttctcctagaaggtanaaggtcgagaggagaagaaggcgagacgtgcagtccgtcgggcaccgatcgagaacagggaagcaagaggctgctagagatcgagctcatcaaccaaccaagtcgtacgtcgtcagcatcacgaccggatggcgcgtgccgcgtccagctatgtatccaggagggggctctccgcagcgatgacggtggccgaggagtccgtgaagaaggtggaggacaaagcngtgaagctgggaactgtggccaaggacatcgccagcgccatggccaccacgacggaggagaagacggcgttctgggaacctgaccccgagaccggatactaccgttccggtcacggcacgaaggaggtggacgccgccgaactgcgcgccgagatgctca

SEQ ID NO: 81820 - DNA, 399 bp, Zea mays
ggaaagctctcttcctcctcctcctccctctcgaaattccgtctccttgtcccctgtcctcctcccccggtttccccggtttttagagggaaagaggaggcggagagagggatgggaaggacgagaggttcccggtgtgggaggccgcgctcggcgccggagtcgccgccgccttcgccgctggactcgtcggtgtctacctttccatgccggactccgactacagcttcctcaagttgccacgtaatctcgaggaactccaaatcctcactggccaccttgagaactatactagtgactacaccctacaggtgttggtaggttattgcgctgtgtacatcttcatgcagaccttcatgatcccagggacaatattcatgtcactgcttgctggtgctc

SEQ ID NO: 81821 - DNA, 352 bp, Zea mays
cccacgcgtccggtcaactggagcataacctttatgtgcctggctcaaatacaattgagccactgtctatctttgttaaaaattacattgaccttatctcggccaagtacccatattggaataggacaaaaggagctgatcatttctttgttgcttgccatgactgggggccttacacaacaaaattgcatgatgaattgcggaagaacactattaaagctctctgcaatgcagatctctctgaaggattttttatccgtggaaaagatgtttcccttccagaaacattccttaggtcaccaagaagacctctaagagatattggaggaagaccagctgcgcagaggactat

SEQ ID NO: 81822 - DNA, 367 bp, Zea mays
gggtcgaccaacgtccaacacacttctggtcaactggagcataacctttatgtgcctacctcaaatccaatttaaggcattgtcaacctttttaacaaataaattgaccttatccccggcaagtacccatattggaataggacaaaaggagctgatcatttctttgttgcttgccattactgggggccttacacaacaaaattgcatgatgaattgcggaagaacactattaaagctctctgcaatgcagatctctctgaaggattttttatccgtggaaaagatgtttcccttccagaaacattccttaggtcaccaatacgacctctaacagatattggaggaatagcacctgcgcagaagacta

SEQ ID NO: 81823 - DNA, 367 bp, Zea mays
cccacgcgtccgcccacgcgtccgcccacgcgtccgcaacaacagccagctcgcgaaaataatgaagagccgcagcatggcatcatcggccgcgctcttggtgctagccctcgcgctagtggcggccaccgccccacaggtagcggaggcaaagaagaagagagcggcggagagcggcgaggcggcggaggcgaagaagatccaggacgacttctgctcgacgctgtgcgagggcaagaaggggacggacctggtcgtgtgcaaggagtcctgcgcgctctcccagcagtccaacctggtgctgtacggcaggatccagtgcaagggcaagtgcaccgagcagaagggcatcacggcgccggccatg

SEQ ID NO: 81824 - DNA, 438 bp, Zea mays
ctaggtttcctctctcaccatagcgcccgctctgtcgcccttcgttcacctctccttcctctcgtccctgcctgccagggagaggggaagtcagaggcacggagtggcgcagagcagacgcccgtgaaccattgtagctgtccctgtcgtcgtcgtcgtcaacgaacccacacaaggaaaggatggagaagaagccgaccatcctcatgaacaggtacgagctcgggcgcacgctcgggcagggcaccttcgccaaggtgtaccacgggcggaacctcgcgtccggcgagagcgtggccatcaaggtcatcgacaaggagaaggtgatgcgcgtcggcatgatcgaccagatcaagcgcgagatctccgtcatgcgcctcgtccgccaacccaacgtcgtgcagctgcacgaggtgatggcaacaagagcaggatata

SEQ ID NO: 81825 - DNA, 420 bp, Zea mays
cccacgcgtccgcccacgcgtccggtggggccatctgagggacctgcacctggcgctgaagctgtgcaagaaggccctgctctgggggaagacatcgacggagaagctgggcaagcagttcgaggcgagggtgttcgagatcccggagcagaaggtgtgcgtggcgttcctctccaaccacaacaccaaggacgacgtgacgctgacgttccggggccagtcctacttcgtgccgcgccactccatcagcatcctcgccgactgcaagaccgtcgtcttcggcacccagcacgtgaacgcgcagcacaaccagaggacgttccacttcgcggaccagacgacgcagaacaacgtgtggcagatgttcgacgaggagaaagtgcccaagtacaagcagtccaagatcaggctgcgcaaggc

SEQ ID NO: 81826 - DNA, 408 bp, Zea mays
catggccaacatcatgaaggacttcgacgagccagggcacctcgcgccgacaggcctgttcctcggacctaccaagtacatggtcatccaaggcgagcctggtgccgtcatccgtggcaagaagggatcaggaggcatcaccgtgaagaagacagggcaggcactcgtggttggcatctacgacgagccgatgacgcctgggcagtgcaacatggtggtggaaaggctgggcgactacctgcttgaacagggcatgtaactactacgtaccagctggaatgcatgtcgacgacgatggtttcgagtttcgacttccaataatagtaacaacaaagcaaaggccttcctcccggcgtatttgctttggctcttctcctccacgccataagatatctagcaattggtgac

SEQ ID NO: 81827 - DNA, 371 bp, Zea mays
cgacgagctgctgtgggccgcgacctggctgtacctggcgacgaggcggcaggtgtacgcggacttcatcgcccacgaggccatctcgtcgagcgtggccgagttcagctgggacctcaagttcccgggcgcgcaggtgctgctggccgagttcaacatgacctcggcgggcggcgcgcagaacttcaagtcgcaggcggacaactttcgtgtgcgcggtgctgccggacacggcgttccaccaggtgttcatcaccccgggcggcgtgatccacctccgcgacggcgccaactcgcagtacgtgaccagcacggcgttcctgctggtggtgtacgcggacctgctgctgcggacggggcagacggtgctg

SEQ ID NO: 81828 - DNA, 374 bp, Zea mays
gtcgccgccgcagctgaccacaacatcatcgaactgacagggacagacaggccaggactgctctctgaggtcagcgctgtgctcatcagcctcaagtgcaacgtggtcagcgccgagatctggacccacagcactcgagccgcggccgtgatgcgggtcactgacgaggacactgggctggcggtcacagacgctgagaggctcgagatgatcagggatatgctgtcatacctgtaccgtggacgcaatctctcacgaggtggcagacagtcctcgacgactgccagaactcatagtgtgagtatgctgcaacgtaggaatcactatgaccgcgttcacgcaccactatctcagctccatccacgacgatctca

SEQ ID NO: 81829 - DNA, 396 bp, Zea mays
  unsure (1)..(396): unsure at all n locations
ctcatcgagaggctcctcaagacctcttccttccaagtgaccactgtcgactccgggagcaaggcgctgcagttcctggggctccatgaccaggacagcacggttcctcctgtccacacgcaccagctggatgtggctgccaatcaagatgtggctgtgaacctgatcatcacagactactgcatgcctggcatgacaggatatgacctgctcaagaagatcaaggagtcgtcgtctctcagagatatcccggtggtgatcatgtcctctgagaacattccttcaaggatcaatangtgcctggaggaaggagctgacgagttcttcctaaaacctgtgcggctatcagacatgaacaagctcaagcccacatactgaaaagcagatgcaacagga

SEQ ID NO: 81830 - DNA, 381 bp, Zea mays
accaacgtgtggctggaccacctctccctctccaactgccaggacggcctcatcgacgtcatcgccaagtccactggcgtcaccatctccaactgccacctcaccaaccacaacgacgtcatgctcttcagctccagcgacaagcatcccgaggaccagatcatgcagatcaccgtcgccttcaaccacttcggcagaggcctcgtgcagaggatgccaaggtgccgctggggcttcttccacgtggtcaacaacgactacacgcactggctcatgtacgccatcggcggcagcaaggcccccaccatcatcagccagggcaaccgctacatcgcgccgcccaaccttgccgcgaagcaggtcaccaagcagcatgacacg

SEQ ID NO: 81831 - DNA, 425 bp, Zea mays
acggacgcgtggggcatttcgaataacacaggtgagcgcgacgatgggatccctcgttaataacatcatggtcgtgggcgccgtccttgcggcgctcgtcgccggcgggtcgtgcgggcccccgaaggtgccacccggccccaacatcaccaccaactacaacggcaagtggctcaccgctagggccacctggtacggtcagcccaacggtgccggcgctcctgacaacggcggtgcgtgcgggatcaagaacgtgaacctgccaccctacagcggcatgacggcgtgcggcaacgtccccatcttcaaggacggcaagggctgcggctcatgctacgaagtgagatgcaaggaaaaacctgagtgctcgggcaatccagtcacggtgtacatcactgacatgaactacgagcctatcgctccct

SEQ ID NO: 81832 - DNA, 421 bp, Zea mays
aaatggcaaaggctctcctaggtggcctatcggcgatcctcgtcgtggcggtggtcgtcggtgtggtcgccaccgtcacccgctccggcaagaaggccggcgacaacttcacggtcccgggggaggcttcccttgccacgtccggcaagtcggtcaagtccctgtgcgcgcccaccctatacaaggagtcgtgcgagaagacactgtcccaggccaccaatggcaccgagaaccccaaggaggtgttccacagcgtggccaaggtggcgctggagtcggtccagacggcggtcgagcagtccaagtcgatcggcgaggccaaggccagcgactccatgaccgagagcgcgcgcgaggactgcaagaagctcctggaggacgccgccgacgacctgaggggcatgctcgagatggccggcgg

SEQ ID NO: 81833 - DNA, 376 bp, Zea mays
  unsure (1)..(376): unsure at all n locations
attatatcattctctatacacatcattcgggcgacaagaaagaagagtactatctcagctactggattgggaaggatagcttggtggacgatcaagtgtcggcatctcaaataatcaatacaatgtggaattcattgaaaggacggccagttctgggccgtatataccaagggaaggagccaccacaatttgttgctcttttccagcccatggttatcttgaagggtggaatcggatctggatacaagaagctcatagaagaaaaaggtgctatgggtgagacttatactactgaaggcatagctctaattcgagtatctgagacatctatctacaacaacaagactcttcaagtagatgcngtagcaccgtcttt

SEQ ID NO: 81834 - DNA, 377 bp, Zea mays
cccacgcgtccgctatttacacccaaggaaggccatggatacagtgaagatgaggatcacttggctttaatgatggaactacttggcaagatgccgaagaagattgcaaccatgggaacacgatcaaaggaatattttgaccgccatggagatctgaagcggatacgaaggctgaaattgtcatccattgaacgtgttctcgttgacaaatacaaaatttctgaatctgatgcccgggaattcgccaattttctttgccctttactcgactttgcaccagagaagaggccaacagctttagattgcctaaagcatccatggcttaaacatgacgaggataaaacatgtgggtctcttaacaataatgatgccaagag

SEQ ID NO: 81835 - DNA, 421 bp, Zea mays
ggcaacttcactgtaggcacttgccacactcccaatgcaaagcagatcgttgagaaggaatgcctcgacaagccatcctgcatgctgccggtggatcacacggtgtacggcgcggacatcaactgccaatcaacgactgctacactgggggtgcaggtgagatgcggagggggcaagaagggtgcctgagaataacaagatggatgctgctaattaatggacgtttcagcttgtttgtttgttcatcccttcggtttggcactgatgcttacattgttctgacattgcaattgaaatgtgattggaacattcttgatcgggaactaacatgaaatgagtggagggtagatgctgatcagaccaaagatgtgtatttcccccctctttccttctgtctcgtgttgtttcatgtaaccatcac

SEQ ID NO: 81836 - DNA, 343 bp, Zea mays
gttcaagaaggttgggagcttccttggtcgcttcaagtcgatacctagcattgttgagcttgacagcttgaaggtttccggtgatgtttggttcggttctggaattgtactgaaggggaaagtgaccatcactgcaaaacctggcgtcaagctagaaatcccagacggagcagtgattgggaataaggatatcagtggccctgaggacctttagataagaatcagcgaatcagcaaggaggctcacttcgccaagtggcggatcatttttcgtgttttttttcctgtatattcaaacaggttccatgatattatggagaatattaattgccagtataatccag

SEQ ID NO: 81837 - DNA, 390 bp, Zea mays
aaacaatgcgatgagagccttgttcctcctggtcctcttctgcatcgtgcatggtgagaaggaagagtcaaagggcatcgatgcgaaagcgtccgggcctggtgggtccttcgacatcaccaagttgggcgcctccggcaatggcaagacagacagcacgaaggctgtgcaggaggcatgggcatcggcgtgcggcggcactgggaagcagacaatcctcatacccaagggcgacttccttgtcggacaactcaacttcacaggcccttgcaagggcgacgtgaccatccaggtggatggcaatctgctggcgaccacggacctaagccagtacaaggaccatggtaattggatcgagattctacgcgtggataacctggtcatcaacgg

SEQ ID NO: 81838 - DNA, 390 bp, Zea mays
  unsure (1)..(390): unsure at all n locations
ccacgcgtccgactccctccacctcgacggctacgccttcttcggcgtcgggatggggcctgggacgtggtcgccggagatgaggaagacgtacaacctactggacacggtgagccggcacacgatccaggtgtacccgcggtcatggacggcgatcatgctgacattcgacaacgcgggcatgtggagcgtccggtccaacgtctgggagcggtactacctcggggagcagttctacatcagcgtcatctcgccggcgcggtcgctgcgcgacgagtacaacatgcccgacaacgccctccgctgcggcaaggtcgtggggctgccgctgccgccatcctacgcccccgcgcgctaaagacgacgaaggcgccggtnttcacctcgtgt

SEQ ID NO: 81839 - DNA, 411 bp, Zea mays
gatgggttttgctagaggttcttgacaaaatttctccagggtcagttaactggaagcatgcatccaaaccaccaatcattatgccgtttagaaaggttgaaaactgcaaccaggttatcaaaatcggcaaggagctaaacttttctctggtaaatgtagcaggaaatgatattgtgcaaggaaacaagaaactgattctagctttcctgtggcaactcatgaggactagtatcctacaattgctgaggaacttgagatcccactctaaagagaaagagatgacagatgctgacattctcatttgggctaatagcaaggtcaaggaatcaggcaaaaattcacatattgaaagcttcaaggacaaaacgatagcagatggggtgttcttccttgagctcctaagtgctgtgc

SEQ ID NO: 81840 - DNA, 403 bp, Zea mays
caacgtcatggactgcacgcttaagaagacggccaatggcgtccgcatcaaggcatatgaggacgctgcctccgtgctcaccgcctccaagatccactatgagaatatcaagatggaggactcgggctaccccatcatcatcgacatgaagtactgccccaacaagttatgcaccgccaatggtgcctccaaagtcaccgtcaaagacgtcaccttcaagaacatcaccggcatctcctccaccccggaggccgtcaacctgctctgctccgccaggatcccatgcaccggtgtcacgatggacgacgtcaacatcaactacagtggcaccagcaacaagaccatggctgtatgcaagaacgctaacggcagcgccaaaggttgcctgaatgcgctcgcatgc

SEQ ID NO: 81841 - DNA, 407 bp, Zea mays
  unsure (1)..(407): unsure at all n locations
ggccgaggtcaccaaggcctgcagcgtcacctgcgccaaggagaagaacccgcgcctcagcgagaactgcaagaggtcctgcacccctcctccttcttgaagcgaagccccttgaaatgaatgaaccatgcatgcatgcatgtatgcatgcgccggggtgacgtggcgttcagctcaggcgctgagcgagtctatacgtacgtcgtcaccggctggccacgcatgcgataaccatctgatatggacggaactatatattgtattcctattaatctggcattttctaagctaattgtttttttccaaatataccgtcgatggaactccaaatgtaatgtcacgcanatgtgtgtttttcatcgattgaatgggtaataatanaaaggcatgctggcagttactactaa

SEQ ID NO: 81842 - DNA, 416 bp, Zea mays
  unsure (1)..(416): unsure at all n locations
agtcacagtgtacatcactgacatgaactacgagcctatcgctccctaccacttcgacttgagcggcaaggccttcggctccctggcaaagcccgggctcaacgacaagattcgccactgcggcatcatggacgtcgagttcagaagggtgcgatgcaagtaccccgccgggcagaagatcgtgttccacatcgagaagggctgcaaccccaactacctggccgtgctggtgaagtatgtggcggacgacggcgacatcgtgctgatggaaatccaggacaagttgtcggctgagtggaagcccatgaagctctcttggggcgccatctggaggatggacactgccaaggcgctcaagggccccttcntcatccgcctcaacagcgagtccggcaagaaggtcatcgccaaagacg

SEQ ID NO: 81843 - DNA, 397 bp, Zea mays
  unsure (1)..(397): unsure at all n locations
gttctagatcgcgatctagaacgaagactgcaatgtttacacggggaagcggctgcacgcggccttgttcttcgtgatgggattctggctgctggacttttccaacaacacggtgcagggccccgcacgcgcgctgatggcggacctcgcaggcagccacggacccagcacggcgaacgccatcttcgtgtcgtggatggcgatcgggaacatcctgggctactcgtcggggtccaccgacaagtggcacacctggttcccgttcctgcagacgaaggcatgctgcgaagcgtgcgccaacctcaaggccgccttcctggtgtccgtggtgttcctgngcctgtccacggtggtgaccatgatcttcgcccgcgaggtgccgctggacccggcggcg

SEQ ID NO: 81844 - DNA, 435 bp, Zea mays
cgagcgatctcctctccctctccctctccgatccattctccagcgcagcgaagtaaacatgtctgaccgggcaaagatgtcgtggcaggcgtacgtggacgagcacctgatgtgcgagatcgagggccaccacctcgcggcggcggccatcgtcggccacgacggtgccgcctgggcgcagagcacggcgttccccgagttcaagaccgaggacatggccaacatcatgaaggacttcgacgagccagggcacctcgcgccgacaggcctgttcctcggacctaccaagtacatggtcatccaaggcgagcctggtgccgtcatccgtggcaagaagggatcaggaggcatcaccgtgaagaagacagggcaggcactcgtggttggcatctacgacgagccgatgacgcctgggcagtgcaacatggtggtggg

SEQ ID NO: 81845 - DNA, 406 bp, Zea mays
acaggtcatagctaagcaggtctgacaggatgtcgtggcagacatacgtcgatgagcacctcatgtgcgagatcgagggccaccacctgacctccgctgccatagtcggccacgacggcgccgtttgggcccagagcaccgcattcccacagttcaagacagaggagatgaccaacatcatgaaggacttcgacgagcccgggttcctggccccgaccggcctcttcctcggccccaccaagtacatggtcatccaaggcgagcccggcgctgtcatccgcgggaagaagggatctggaggcataactgtgaagaagacagggcaagcgatggtggtcggcatctacgacgagcccatgacccccggccagtgcaacatggtggtcgagaggctcggcgactacct

SEQ ID NO: 81846 - DNA, 420 bp, Zea mays
gcggcatttcgaataacacaggtgagcgcgacgatgggatccctcgctaataacatcatggtcgtgggcgccgtccttgcggcgctcgtcgccggcgggtcgtgcgggcccccgaaggtgccacccggccccaacatcaccaccaactacaacggcaagtggctcaccgctacggccacctggtacggtcagcccaacggtgccggcgctcctgacaactgcggtgcgtgcgggatcaagaacgtgaacctgccaccctacagcggcatgacggcgtgcggcaacgtcaccatcttcaaggacggcaagggctgcagctcatgctacgaagtgagatgcaaggaaaaacctgagtgctcgggcaatccagtcacggtgtacatcactgacatgaactacgagcctatcgctccctaccac

SEQ ID NO: 81847 - DNA, 383 bp, Zea mays
aacgcgtcgcatccgctccacaggatcctctgcgccaccgcaaccgtgtgaccgcccgtgccgccggcgatcccgatccgccgacccgtcccagccccgctcgcagccatgtcgccgtcggagccgacgcgggaggagagcgtgtacatggccaagcttgcggagcaggcggagcggtacgaggagatggtcgagttcatggagcgcgtcgcgcgctacgccgggggcgccggcggcggggaggagctctcggtggaggagcgcaacctgctgtccgtcgcctacaagaacgtcatcggcgcccgcagggcctcgtggcggatcatctcctccatcgagcagaaggaggaaggccgcgggaacgaggcgcacgccgcatccat

SEQ ID NO: 81848 - DNA, 357 bp, Zea mays
ctgacggccagcgccgcgcgccccaacccgcaaggctcctaccactacggccagatcaacatcacccgcaccatcaaggtcatggtctcccgcggccacatcgacggcaagctccgctacggcttcaacggcatctcccacagggacaccgagacccccctcaagctcgccgagtacttcaacgtcaccgacggggtgttcagctacaaccagatgggcgacgtgccccccgccgtttacgggccactccatgtcatccccaacgtcatcaccgccgagttccggaccttcatcgagatcgtcttcgagaaccccgagaagagcatagactccctccacctcgacggctacgccttc

SEQ ID NO: 81849 - DNA, 364 bp, Zea mays
gccgggttcgtgaccaacgtcaccgagtacatcgcgggcgccaaggtgaggctggagtgcaggcacttcggcaccggcaagctcgagcgcgccatcgacggggtcaccgacgcgaccggcacctacacgatcgagctcaaggacagccacgaggaggacatctgccaggtggtgctggtggccagcccgcgcaaggactgcgacgaggtccaggcgctcagggaccgcgccggcgtcctgctcaccaggaacgtcggcatctccgacagcctgcgccccgccaacccgctcggctacttcaaggacgtgccgctccccgtctgcgccgcgctgctcaagcagctggactcggacgacgacgacg

SEQ ID NO: 81850 - DNA, 422 bp, Zea mays
  unsure (1)..(422): unsure at all n locations
agaagtacttcagaaaaggaacttgtaagagagcaggtctttgtccttggtcgaatgggaaatgctaaggaacctctttcgacaattataaataaactggaagacattaatacatatttagcctctattactgcatctgaggtctggtctgtttacatgaaggtctgaacaagtggaacctgacaaggatgggtgtggctggattacaacaggattgaagttgattggcaggaaatgatgctacttagcaattgttccctgactataactgcctacaaagttgtgcaattgtgatgtcgcatcgctggagaagacgggcacggcgacgagtccgacctggtcaagagctgcaactgcgaaatggacaaaaaaggtacctcgtggagttttgtgtgggggatcangtcgttgggtacatccac

SEQ ID NO: 81851 - DNA, 373 bp, Zea mays
gggcgaggagcaccacaagaaggacgacggggagcacaaggagggcatcgtggagaagatcaaggacaagatcaccggcgagcacggcgacaagtccggcgaccacaaggacaaagaccataaggagaagaaagataagaagaagaagaaagagaagaagcacggggaaggccatgaccatggtgatggtgacggccacagcagcagcagcagcgacagcgactgatctcgcctcgccgagcgccgtacgcacaaatgcaccgcgcaggttataatacgagctgtccgccgaacaccatgcgcatatattatacagtactcgccaagattgttgttctgcaatcttcgggataaaaaggttctttttttgttt

SEQ ID NO: 81852 - DNA, 377 bp, Zea mays
caactcgttgctgggggcgggatcccggccgagcaccatgcgaggaaataacatgccgcggcacacgtcgccgttactttttgccttgttggcgaccctgctcagcgtcggcgacgcgttggtcgtcgacggcctgcaggtggggttctatggaaagacgtgcccggcggccgaaggcgtcatcagcgacatcgtcaacaacgaaatcgctatggaccggggcatctcccctggcctcattcgcctcttcttccacgactgcttcatcacgggttgcgacgcttccattctcctggacgagtcgcccgccggcgacgtcccagagaaggagtcgtccgccaacggcttcaccctggtccggctcagaaacatcgaca

SEQ ID NO: 81853 - DNA, 445 bp, Zea mays
gggtccatgcacgcgtctgaacacgcgtctggcacctcagcgagaactgcaagaggtcctgcagccctcctccttcttgaagcgaagccccttgaaatgaatgaagcatgcatgcatgcatgtatgcatgcgccggggtgacgtggcgttcagctcaggcgctgagcaagtctatacgtacgtcgtcaccggctggccacgcatgcgataaccatctgatatggacgggactatatattgtagtcctaagaatctgggcattttctaagctaagtgtttttttccaaatatagcgtcgatggaactccagagtgtaaaggtcacgcagatggtgtgtttttcagcgattgaatgggtaataataaaaaggcatgctggcagttactagtaggagagaggcgaggggggcgggggagggagggagggaggggggggggggaggggg

SEQ ID NO: 81854 - DNA, 128 bp, Zea mays
ccggggccacccacgcgtccggatacgccggcgacatctggagcttcggcctcagcatcctcgagttctacatgggccgattcccgctgggcgagaacctggggaggcagggcgactgggccgcgctc

SEQ ID NO: 81855 - DNA, 410 bp, Zea mays
atctaagcgatcttcatccagccttctgctctgctccctcgaaatggaggcgacgagcaaggcgatggcttcaggcctcctcgttctgctgcttctcatcaacacaggctttgtcctgcccgtccattccgaggactgctgggccgacacccgcgtcatctgcaccaagacgcacaactgccgggacgacacttgcgcggggcgcggcatgccggacggccgctgccactgggagttccccaacctggtgcccttctgccagtgcctgcgccccaactgccactagtccgggcgcctcggattggctcacttcgccggcgatgatggatggtgcccaactgcgactgcccagtctgctccattcgttgttgtttaaggcataatatataaactgccaaattcacatgtat

SEQ ID NO: 81856 - DNA, 339 bp, Zea mays
aaacaacaagaccatggctatatgcacgaacgcgaagggcagcaccaagggttgcctcaaggagcttgcatgcttctagaccctccgtcgactgacccatctctctagttataatttttctctcgtccttgcattgcccattacatgctatccattggtaacgcacaagagtaaaacgacagacatccgacagctatattatgttcgacggtgtaacaccctgaatttgagggtataaaatttcttcgctaaataccagccaaattcaggtgttacctcgtgtctctctcgctctcgcttttccttttgattaagagtaagtgaaaaagaggaaaagca

SEQ ID NO: 81857 - DNA, 423 bp, Zea mays
accacgcgtccgcggacgcgtgggttcgttatcctcctcgatcttaattacaggtcatagctaagcaggtctgacaggatgtcgtggcagacatacgtcgatgagcacctcatgtgcgagatcgagggccaccacctgacctccgctgccatagtcggccacgacggcgccgtttgggcccagagcaccgcattcccacagttcaagacagaggagatgaccaacatcatgaaggacttcgacgagcccgggttcctggccccgaccggcctcttcctcggccccaccaagtacatggtcatccaaggcgagcccggcgctgtcatccgcgggaagaagggatctggaggcataactgtgaagaagacagggcaagcgatggtggtcggcatctacgacgagcccatgacccccggccagtgc

SEQ ID NO: 81858 - DNA, 408 bp, Zea mays
attaccccttcggcctccacctatcaccacccgggacgtcttccatggcctcctcgtagtagaatagttctatctcaccgcaacaactcctcattacatcctttatgagaggctgatcgattggtagatacgtactcgggtggagcagagcaacgagagacatggcgacgacgacgcgtgttgccgccgccgccaccggcgtgctgctggtcctgtcggcgttggcgaccctggcgcgggccgaggacccgtacctgttcttcgagtggaaggtgacgtacgggaccaagtccctgctgggcgtgccccagaaggtcatcctcatcaacggcgagttccccggccccaggattaactgctcctccaacaacaacatcgtcgtcaacgtcttcaaccagctcgaccatc

SEQ ID NO: 81859 - DNA, 413 bp, Zea mays
ccaccaagctcaacaacagccagctcgcgaaaataatgaagagccgcagcatggcatcatcggccgcgctcttggtgctagccctcgcgctagtggcggccaccgccccacaggtagcggaggcaaagaagaagagagcggcggagagcggcgaggcggcggaggcgaagaagatccaggacgacttctgctcgacgctgtgcgagggcaagaaggggacggacctggtcgtgtgcaaggagtcctgcgcgctctcccagcagtccaacctggtgctgtacggcaggatccagtgcaagggcaagtgcaccgagcagaagggcatcacggcgccggccatgaaggtctgccaggaggagtgcgacaaggcgtacgtggtgaaggcggccgaggtcaccaaggcctgcagcgtc

SEQ ID NO: 81860 - DNA, 429 bp, Zea mays
ctcgcgagtcgacccacgcctctagtgtgaatcatacataatcttgctggggataggcgtaggaccgttatgaggccaccacaagttcttagggagggaacaaagaagacagtttttgttaactttatggatttgtgtaaaacgatgcataggcaacctgagcatgtgatgatgtttttacttgctgaaatgggaacaagcgggtcacttgatgggcagcaaaggttggtgatcaaaggaagatttgcccccaaaaactttgaagcaatcctgaggagatacatcaatgagtacgtcatctgcaatggatgcaagagccctgataccattctgtccaaggaaaatcgtctgttcttccttcgctgcgaacagtgtggatcttcaaggtccgttgctccaatcaaagctggattcgttgctcaagtcggt

SEQ ID NO: 81861 - DNA, 429 bp, Zea mays
cacgagggcgaaacccacaaaccctctccctcccgtactccggcctacacatccaggggcgatgacgctgggtagctccggcgccggatcgagcgtcgtcgttccccgaaacttcaggctattagaggagctcgagcgtggagagaagggcattggtgatggaacagtgagctatggaatggatgatgccgatgacatctacatgcggtcatggactggtaccatcattggccctcacaatactgtacatgagggtcgcatctagcagctgaagttgttttgtgacaaggactatccggagaagccaccatctgtcagattccactcaagaatcaacatgacatgcgttaatcacgagacaggaatgggtgatccaaggaagtttggtttgctagcgaactggcagcgggactacacaatggagaacat

SEQ ID NO: 81862 - DNA, 405 bp, Zea mays
acacaacctatctcaaaacttgaatttgagtttgagaagcggaaactggccaaagatgatgtccgagaattgatttaccgagagattttggagtaccatcctcaaatgctacaagaatacctacaaggagcagaccacaatcagatgaccttcatgtatccaagtggggtggatcgcttcaggcgccaatttgctcatttggaagaaggtactgcaaagggtgaaaaacacagtccacagctgcgacagaatgtttctttgccaagggaaagagtaattggcaataaacatggagatggcaatacaggtgataagctagcgcatgcctcagtgacggatggcatcagccaaccgagcttgagtgagagaagctttctgaagagtgaaagcatcagtgcttccaag

SEQ ID NO: 81863 - DNA, 426 bp, Zea mays
agacggggaagctgggcgtcaagtcggacatctactcgctcggcgtgctcctgctgcaggtggtcaccgcgcggccacccatggggctcacgcaccacgtcgagaaggccatcgacgcgggcaccttcgcgcagatgctcgacatcaccgtcaaggactggcccgtcgaggaggcgctcggctacgcaaagctcgcgctcaagtgcacggagatgcggcggagggaccggccggacctcgcaaccgtcgtactgccggagctcaaccggttaaggaacctcggccacgcgtacgaggcacgcatgagcgccgtcgggaccaacagtggaagtggcgaaagtaatgaccaggtcagcgggagctcgccgacggcgggtggttcatggagaacggcggaaagctagcgggtggtacggcgtggccatg

SEQ ID NO: 81864 - DNA, 426 bp, Zea mays
agcgcgggagcgcggagtcggagcagggcatcaacgagttcaacacggagatccagatgctgtcgaagctgcggcaccggcacctggtgtccctgatcggctactgcgacgagaaccaggagatgatcctggtgtacgagtacatgcacaacggcgtgttccgggaccacatctacggcagcgaggggaaggcgccgctgccgtggaagcagcggctggagatctgcatcggcgctgcccgggggctgcactacctgcacacgggcacggcgcaggggatcatccaccgcgacgtgaagaccaccaacatcctgctggacgacaacgtcatgggcaaggtgtcggacttcgggctgtccaaggacgggcccggggatgaccagctgcacgtgagcaccgccgtgaagggcagcttcgggtacctgg

SEQ ID NO: 81865 - DNA, 421 bp, Zea mays
aaacaaaccacagattgagcagctcatattttggtgtcagtattggattttagttgccctgttgacagttttggagagatttggagattttacaatatcatggctaccgttttactcagaagcaaaggtgttgttctttgtatatttgtggtaccctaagacaaagggaactacgtatgtttatggaactttctttaagccatatatttctcagcatgagaatgaaatcgaccgaaatcttcttgagctcagagctcgagccaccgatatggttgtcctttacttccataaggctgcttcggtagggcaaaatactttctttgacgttttaaaatatgttgctgcccagtcgccttctcggaaatcaaggctgcaccctcatcaggaaccacagcagcagcaagcacaagtgcaggtggag

SEQ ID NO: 81866 - DNA, 431 bp, Zea mays
agttgccctacctgcaggcaagagctgggcgacatcaggtgcctggcgctggagaaagtcgccgagtcgctggagctcccctgcaggtactactcgctggggtgccccgagatcatgccttactacagcaagataaagcacgaggcgcagtgcggcctgagaccgtacaactgcccctacgccggctccgagtgcagcgcggccggcgacatcccttccctcgtctcccacctgagggacgatcacaaggtggacatgcacagcggctgcaccttcaaccacagatacgtgaaatccaacccgcgggacgtggagaacgccacctggatgctgacggtgttccactgcttcggccactacttctgcctgcacttcgaggcgttccagctcgggatggcgcccgtgtacatggacttcctccgcttcatggg

SEQ ID NO: 81867 - DNA, 413 bp, Zea mays
agaacgtgctgatcgacacagtgacggtcaaggcccccggcgacagccccaacacggacggcatccacatcggcgactctagcaacgtgaccatcagcagcaccaccatcggcgtcggcgacgactgcatctccatcggccccgggagcaagatgatccgcatccatggcgtcaagtgcggcccatgccacggcatcagcgtcggcagcctggggcgctacaaggacgagaaggacgtggaagacgtgcaggtgacggggtgcacgatcgccggcaccacgaacggcctgcgcatcaagtcgtacgaggactccaagtcgtcgctcaaggccagcaagttcctgtacgagggcatcaccatggacaatgtctcctaccccatcatcatcgaccaggagtactgccccaacaac

SEQ ID NO: 81868 - DNA, 428 bp, Zea mays
  unsure (1)..(428): unsure at all n locations
agaatactcccatgacgccactaacaaattcaacatttaccctgagcaaatcccttcctggcttgttgactggattcctgagaaaggaggttaccttatanggaatctgcagccagctcacatggattttaggttcttctctcttggcaacctttgggccatagcttcgtctctaactactccaaaacaagctgagggaattcttagccttattgaagaaaaatgggatgatcttgtagcaaacatgcccctgaagatatgcttccctgcaatggaagatgatgaatggcgcattattactggcagtgatcctaaaaataccccatggtcatatcataatggtggatcttggccaaccttattgtggcagttcacattggcctgcataaaaatgggcagaccagaattggcccggagagccattgctg

SEQ ID NO: 81869 - DNA, 127 bp, Zea mays
acgcgaccagcgaggactgcagtgttgcttggggagtctgtaatcatgcttttcacttccactgcatcagcaggtggcttaagactcgtcaagtgtgcccaggatataatagtgagtgggagttcgt

SEQ ID NO: 81870 - DNA, 291 bp, Zea mays
cgacacaggcctccaagcgagccaagccagcgcgaccagcgaggagtgcactgttgcttggggagtctgtaatcatgcttttcacgtccactgcgtcagcaggtggcttaagactcgtcaagtgtgcccaggggagaacagtgggtgggagttccagagatagggccacgagttcctgggcacgctcatgtgatgttggggcttacttctagtgagtgctaccactcgagtgtagttttttctgcgaggcagctccatcgtttaacgccttggctgcgtgcaggtagcaga

SEQ ID NO: 81871 - DNA, 412 bp, Zea mays
accacgcgtccgcggacgcgtgggcgaacgtcgtacgagaacctttctccctcctccacctttctccttttcttgccacggcaaaacaccttcgccggcgagagcatggcgatggcgtaccgtgtcctggaggtcaccctggtgtcggcaaatgacctcaagaaagtgtcgctcttctcccggactcgcatctacgccgtggcttccatctccggattcgacctccgcatcccttcccacagcacccaagcagaccacagcaacggctgcaacccctgctggaacgccgtggtacacttccccatcccggctgccgctgacacccgcggcctcgcactccacgtgaggctccgcgcccagcgtctatacctgggcgatcgcgacatcggcgaggtgtttgtgcccatcgacg

SEQ ID NO: 81872 - DNA, 428 bp, Zea mays
ctgacatcaacggcctcatgaccgacatggtcaagttcctgcacgaccacggcgcgcccttcgtcgtcaacatctaccccttcctcagcctgtaccagagcgacaacttccccttcgagttcgccttcttcgacggcggcaagaacatccaggacaagggcggcgtcacctactccaatgtgttcgacgccaactacgacacgctcgtgcacgcgctgaagaaggccggcgtgcccgacctcaaggtcatcgtcggcgaggccggctggcctaccgatggcaacaagtacgccaacttcaagctggcgcggcggttctacgacgggctcctcaggaagctggccaagaacgaaggcaccccggtccggaagggcaagatggaggtctacctgttcggcctattcgacgaggacatgaagagcatcgcg

SEQ ID NO: 81873 - DNA, 435 bp, Zea mays
ctaccctcgacgtcgtctcactcaccccgccttcacgcctccctcaccaaataaggtcccgcccttttccgacattcacaggggggacaggaaatcagcggccatggcctcgattccggcgacgaccttcgccgtcatcttatccgtcctcttctgtgccgcggctggcaccgccgtcgacaacgacctccccgactacgtcatccagggccgcgtctattgcgacacctgccgcgccgggttcgtgaccaatgtcaccgagtacatcgcgggcgccaaggtgaggctggagtgcaagcacttcggcaccggcaagctcgagcgctccatcgacggggtgaccgacgggaacggcacgtacacgatcgagctcaaggacagccacgaggaggacatctgcgaggtggtcttggtggagagcccgcgcaaggactg

SEQ ID NO: 81874 - DNA, 422 bp, Zea mays
agcaagagccgacttcatctccctccacatgccgctgataccgacgacgtccaagatcttcaacgacgagtccttcgcaaagatgaagactggtgtccggatcatcaacgtggccaggggtggagtgatcgacgaagacgctctggtcagggcgcttgactccggcaaagttgcccaggcggctcttgatgtcttcaccgtggagcccccgcccaaggacagcaagctggtgttgcatgagaatgtcactgtaacaccccaccttggagcaagcactgtcgaggctcaggaaggcgtcgctatcgagattgcggaagccgtggttggtgcgctgagaggggagctcgcagcaaccgctgtgaatgcgcccatggtcccagctgagatccggtcagagctggctccatatgtttctctggccg

SEQ ID NO: 81875 - DNA, 435 bp, Zea mays
ctcgcgagtcgacacacgcctccaaaggatctcagcatagacttgatttagttatggacggattggtaggcctcttgaaagttcgcgtggtccggggtatcaaccttgcctaccgcgacgcaagaggcagcgatccgtatgtcgtcctacggcttggcaagaagaaactgaagacaagcgtgaagaagagatccgtgaaccccatatggcaagaggagctaactctgaccgtcacagatcccagccaaccactgaagctggaggtgttcgacaaggacaccttcagcagagacgaccccatgggagacgcggaggtggacgtggcgccactgatggaggcggtgagcatgaacccgcgggaggagagtctgaggaacggcgccatcatcaggtccgagcggccgagcgccaggaactgcctcgccgacgagagcc

SEQ ID NO: 81876 - DNA, 434 bp, Zea mays
tcgcgagtcgatacacgcctctagcatgtatcgtgaaagcgacgaggctggccttggcagcggcgttggttctgtgcctgcttctggcgaccgggccgcaggaggccgccggcgccgaggggatgctgtcgtatgataagttgctcagctgcaaggtgctgggcaactgcgacaagaacaggggccccggggccacccgcccggggaagcccgtaaacaagtacacccgcggctgcagcccgctgacccggtgccgcggcggctgatcatgggcctgtttggttcagcttttttctgaccagcttttctgaaaatctggttgtgggaagaatctagctgtggggagaatctgagtatcattacgattacgtgtgaggaagataaagttgttcatagggctcaggatctagaaagtaacggattcctactattac

SEQ ID NO: 81877 - DNA, 441 bp, Zea mays
cgcgcgtacgctcctatccgcacaccttgagaatcgactcgtgactcactcatcgaggttggggccagtcggaggttcagccgttcctgttcttgataaaacgagagaaggatggcagtgtttcagggagctgtcctattcttgtttctcctcctcgtcgcagcagaggtgggaaccatcgatgccaaaatgggagtagccatgcccatgcatgccttgataatggagaaagcgaaacagcaggagacggagaagaaggaggagaaaagcacggagaaggaagagagtcaatgcttatcgccgagtctccagttcgagggcttctgcttcaacagcgacagatgcgccgaggtgtgcatgaaggagagctttcccggtggcgagtgcaagcgggacgtggccatgcgcaagtgcttctgcaagaagccttgctagttcatc

SEQ ID NO: 81878 - DNA, 415 bp, Zea mays
  unsure (1)..(415): unsure at all n locations
aaacaacagccagctcgcgaaaataatgaagagccgcagcatggcatcatcggccgcgctcttggtgctagccctcgcgctagtggcggccaccgccccacaggtagcggaggcaaagaagaagagagcggcggagagcggcgaggcggcggaggcgaagaagatccaggacgacttctgctcgacgctgtgcgagggcaagaaggggacggacctggtcgtgtgcaaggagtcctgcgcgctctcccagcagtccaacctggtgctgtacggcaggatccagtgcaagggcaaatgcaccgagcagaaaggcatcacggcgccggccatgaaggtctgccangaggagtgcgacaaggcgtacgtggtgaaggcggccgaggtcaccaaggcctgcagcgtcacctgcgccaag

SEQ ID NO: 81879 - DNA, 413 bp, Zea mays
acaacatcgacttcatcttcggcagcggccagtccatcttccagtgccccgagatcttcgtgaggcctgaccggcggacggagatccgcggctccatcaccgcgcaggtgcggcaggaggaggacagcagcggcttcgtcttcctcaagggcaaggtgtacggcgtcggggaggtgtacctgggccgcgtcaccgcgccggactcgcgcgtcatcttcgccgacacctacctctccaagaccatccacccggccggctggacaaccatacgctacagcggcagcaccgacaaggtgacgctcgccgagttcaactgcactgggccgggcgctgacgtgacgaaccgcgtgccatggtcgcagaggttctctcgcgacgacgcggccaagtacctcaccatcgacttcatcaag

SEQ ID NO: 81880 - DNA, 412 bp, Zea mays
atggctcttgctattgtggcaccaggtaatgaaaacaagatgccaacttctcaagacttatttgcccttgacaagactggatgggaattggcactggttactgcaccaagtaaccacacaaatcaacaagtggacaatcaattggctgggggatttgacaagctattgctagacagtctttacgaagacgaggcaaggaggcagcaaatagccagtgtgacctacactggaagtactgcagcaaacccatttgaccacagtgatccatcttgcaaagtcagcccatgggcagcgccgctcctgacgagcttccgctggcggccaagagctccaccacctccgacgcgtacgcatctccaaggcagcagcaagtcgccagcagccagcccatgtctggtggcgctcccgacga

SEQ ID NO: 81881 - DNA, 414 bp, Zea mays
gtcaacatcttcatgtacggcgacgggcctaagcaaagccgcgtgaccggccgcaagagcttcgccgacggcatcaccaccatgaagaccgccaccttctccgtcgaggcgtccgggttcatctgcaagaacatggggttccacaacacggccggcgcggagcggcaccaggcggtggcgctccgggtgcagggggacctcgcggcgttctacaactgccggttcgacgcgttccaggacacgctgtacgtgcacgcgcggcggcagttcttccgcaactgcgtggtctccggcaccatcgacttcatcttcggcaactcggcggcggtgttccagaactgcctcatcatcacgcggcggcccatggacaaccagcagaactcggtgacggcgcacgggcgcaccgaccccaac

SEQ ID NO: 81882 - DNA, 420 bp, Zea mays
cacacgtccaggactggcttcaaaaaaatgcaaccaaaaacttccgaccggacagccttcttgggaaaggagggtttgggcatgtctacaaaggttggattgatgagcacacgcttgctccttcaagacctgggagtggtatggttgttgctgtgaagaagcttaaaccggaaggttttcaaggacacaaggaatggctgacagaggttgattaccttggccaacttcaccacaagaatcttgttaagctcattggttattgctcagatggtgacaaccggcttctggtgtatgaatttatgcccaagggaagtttggagaaccatctgtttagaagaagtgctgatcctttgtcatgggcaataaggctcaaagttgccattggagctgctaggggcttgtcatttttacatgatgctg

SEQ ID NO: 81883 - DNA, 430 bp, Zea mays
gggtcgagacaagcctctataatgggtcctcaacatgaagaccgccaccttctccgtcgaggcgtccgggttcatctgcaagaacatggggttccacaacacggccggcgcggagcggcaccaggcggtggcgctccgggtgcagggggacctcgcggcgttctacaactgccggttcgacgcgttccaggacacgctgtacgtgcacgcgcggcggcagttcttccgcaactgcgtggtctccggcaccatccacttcatcctccgcaactcggcggcagtgttccagaactgcctcatcatcacgcggcggcccatggacaaccatcagaactcggtgacggcgcacgggcgcaccgaccccaacatgaagtccgggctcgtcatccagaactgccgcctggtgcccgaccagaagctgttcccggac

SEQ ID NO: 81884 - DNA, 408 bp, Zea mays
acgatcacgacaagatggcatgcacaaacaatgcgatgagagccttgttcctcctggtcctcttctgcatcgtgcatggtgagaaggaagagtcaaagggcatcgatgcgaaagcgtccgggcctggtgggtccttcgacatcaccaagttgggcgcctccggcaatggcaagacagacagcacgaaggctgtgcaggaggcatgggcatcggcgtgcggcggcactgggaagcagacaatcctcatacccaagggcgacttccttgtcggacaactcaacttcacaggcccttgcaagggcgacgtgaccatccaagtggatggcaatctgctggcgaccacggacctaagccagtacaaggaccatggtaattggatcgagattctacgcgtggataacctggtca

SEQ ID NO: 81885 - DNA, 392 bp, Zea mays
acccacgcgtccgcccacgcgtccgaccggcgtcaccatggatgacgtcaacgtcgagtatagcggcaccaacaacaagaccatggctatatgcacgaacgccaagggcagcaccaatggttgcctcaaggagcttgcatgcttctagaccctccgtcgactgacccatctctctagttataatttttctctcgtccttgcattgcatattagttgctatccattggtaacgcacaacagtcctacgacaaacatccaacatctatattatgttcgacagtgtaacaccctgaactttagggtataaaatttcttctttaaatgcaaaccaaattcaggtgttacctcttgtctctctctcgatcatttccttttgattaaaagtaagtgaa

SEQ ID NO: 81886 - DNA, 383 bp, Zea mays
acaacactctatagtgacgtcgtattaagccctcagaatggcatcaacacgtgtgatctccaccttgagtatagcggcagcaactaggcaggaccacggcgatatgcacaaactcgacgggcagcacaaatggttgactcaccgaacttgcatgcttcaaaacactgtctcgactgacgcatctcactacttatcagttatctcacgtccctgcattgcatatcatgtgctatccattggttacccacaacagtataacgtacaacatccagcagctatattatgttctacagtgtaacaccctgaattttacggtacaaaatttcatctttaaatgcaaaccacattcaggtgttacctcttgtctctctctctatcttttc

SEQ ID NO: 81887 - DNA, 395 bp, Zea mays
  unsure (1)..(395): unsure at all n locations
ttcaacggacgcataggctaatcaacaattccttgtgcaggtttcagctgtctcaagattgaagcatgagaatgttgtccaactcgtcggatactgcgccgaagggagcacccgcgtccttgcttatgagtatgcaactaggggatcattgcatgatatcctccatggtaaaaagggtgtcaaaggagcccagccagggccagtcctgtcatggatgcagcgagctaggattgccgtatgtgctgctcggggtctcgagttcctccacgagaaggccgatcctcgagtggtccaccgcgacatcaagtcaagcaacatactgctctttgaccatgatgttgcgaagatcggggacttcgacatctcanaccaggcccctgacatggctgcgcgcc

SEQ ID NO: 81888 - DNA, 404 bp, Zea mays
aagtcgtattacggaccttcatcgagatcgtcttcgagaaccccgagaagagcatagactccctccacctcgacggctacgccttcttcggcgtcgggatggggcctgggacgtggtcgccggagatgaggaagacgtacaacctactggacacggtgagccggcacacgatccaggtgtacccgcggtcatggacggcgatcatgctgacattcgacaacgcgggcatgtggagcgtccggtccaacgtctgggagcggtactacctcggggagcagttctacatcagcgtcatctcgccggcgcggtcgctgcgcgacgagtacaacatgcccgacaacgccctccgctgcggcaaggtcctggggctgccgctgccgccatcctacgcccccgcgcgctaa

SEQ ID NO: 81889 - DNA, 399 bp, Zea mays
ccacgagtccgcccacgcgtccggtcgtcgtctcactcaccccgccttcacgcctccctcaccaaataaggtcccgcccttttccgacattcacaggggggacaggaaatcagcggccatggcctcgattccggcgacgaccttcgccgtcatcttatccgtcctcttctgtgccgcggctggcaccgccgtcgacaacgacctccccgactacgtcatccagggccgcgtctattgcgacacctgccgcgccgggttcgtgactaatgtcaccgagtacatcgcgggcgccaacgtgaggctggagtgcaagcacttcggcaccggcaagctcgagcgctccatcgacggggtgaccgacgggaacggcacgtacacgatcgagctcaaggacagcca

SEQ ID NO: 81890 - DNA, 407 bp, Zea mays
actttcgttatcctcctcgatcttaattacaggtcatagctaagcaggtctgacaggatgtcgtggcagacatacgtcgatgagcacctgatgtgcgagatcgagggccaccacctgacctccgctgccatagtcggccacgacggcgccgtttgggcccagagcaccgcattcccacagttcaagacagaggagatgaccaacatcatgaaggacttcgacgagcccgggttccttgccccgaccggcctcttcctcggccccaccaagtacatggtcatccaaggcgagcccggcgctgtcatccgcgggaagaagggatctggaggcataactgtgaagaagacagggcaagcgatggtggtcggcatctacgacgagcccatgacccccggccagtgcaacat

SEQ ID NO: 81891 - DNA, 430 bp, Zea mays
gggtcgatacaagcgtctacactcacttctgcgtgtctcagctatcgggtttgagggctatgagaagcgccttgagatcacattctctgaggcacctgtctttgtggaccctcatgggcgtggtttgcgtgccctctccagggcccagattgactctgttctggatcttgcacggtgcacaattgtgtctgagctctccaacaaggatttcgactcatatgtcctttctgagtcaagcttgtttatctatcctctgaagattgtcatcaagacctgtggcactaccaagctcctgctcaccattccaagaatccttgagcttgctgaagagctgtctatgccacttgctgctgtgaagtactcccgtgggacgttcatctttcctggcgcacagccagccccccacaggagcttctctgaggaagttgct

SEQ ID NO: 81892 - DNA, 244 bp, Zea mays
  unsure (1)..(244): unsure at all n locations
gcgtctagctacattcctaatatctgttttccactgctttgacggcgagaacgtggagagtgctcctcctcctatgaagaaggactacaagctggctaatcttctctgctgggaagangaagcggatgccatggaggagaaggcgggagtgcttgatgagtaagacgggcttctggggtcgatttgcttctgagttgtttattttatatcgtcgcaatttcgtggttgtcgtttggttattctg

SEQ ID NO: 81893 - DNA, 318 bp, Zea mays
aacgaccatgccgcaccatttcacctggaacgggatgcagcacaggaagaactcgtggatggacgggatgccaggcacgcagtgtccgatcctgcctaacaccaacttcacgtacaagtggcagcccaaggaccagatcggcagcttcttctacttcccgtccatcggcatgcagcgggcggcgggcggctacggggccatcagcgtggtcagccgcctcctcatcccggtcccgttcgaccagcccccgccggagaacgaccacgtggtgctcatcggaaactggtacaccaaggagcacgaggtgccagtgcgcca

SEQ ID NO: 81894 - DNA, 404 bp, Zea mays
agcgcccggggcccccggatcacggaatcctacccttaccaaccctagcctccattggtcgccgtctcgggccatggcagggccggcgccggatcgggccgccctgactgtgggtccgggcatggacatgccgatcatgcacgacagcgaccggtacgagctcgtgcgcgacatcggctccggcaacttcggcgttgcccgcctcatgcgcgaccgccgcaccaccgaactcgtcgccgtcaagtacatcgagcgtggcgagaagatagatgagaatgtccagcgcgaaataattaaccatagatcattgaaacaccctaacattattaggtttaaagaggttattttaacaccgacccatcttgctattgtcatggaatatgcctctggcggtgagctttttg

SEQ ID NO: 81895 - DNA, 296 bp, Zea mays
aagtacgtctcgctcggctgcgacgccatgcccgtcctcaagggacgcacgcccgtcgagtgctacaccgacttcatgcgcgcgttccgcgaccacttcgccgactacctcggcaacaccatcgtggaaatccaagtcggcatgggccccgccggcgagctgcgctacccgtcctacccggagagcaacggcacctggaagttcccaggcatcggcgccttccagtgcaacgacaggtacatgcgtagccgcctgaaagcggcagcggatgccgccggcaagccctgagtgggggc

SEQ ID NO: 81896 - DNA, 400 bp, Zea mays
ggaagggctccgcgtcgtgtcccttctcttcctcctcctcctcctcctctctccaacaccccatccatcagcgctgccctccgcattgctcttgatcccatccagtacatcgattctccccccaagatcaaaggccggaggaggaagaaagtttataattttggacctagccggttcccagccccaacccctgtcatctccactggcagagctcagccaattgcagtaccggccattcatctggaagagctgaaggaaattacaaaaaacttcagcagtgatgccctcattggcgagggctcgtatgccagagtctattttggtgtgctgaaagatgggacgaaatctgcagtgaagaagcttgactccagcaaacagcctgatcaagaattccttgtgc

SEQ ID NO: 81897 - DNA, 209 bp, Zea mays
gaactgaggtgccgattacgaagctggcgtgccataggcctgtcagggagattgcgcatgatttcaagacggatctgcgcttccatagccatgccgtgcttgctctgcaggatgcaccagtggcctagctggttggtctcttccaaaataccaatctgtgcgcgatccatgccaagcgcgtgaccatgatgccaatggacgttcagctg

SEQ ID NO: 81898 - DNA, 267 bp, Zea mays
atcaacggcatctcccacagggaccccgagacccccgtgaagctcgctgaatacttcaacgtcaccgacggggtgttcagctacaaccagatgggcgacgtgccccccgccgtgaacggtcccctccatgtcatccccaatgtcatcaccgccgagttccgcaccttcatcgagatcgtcttcgagaaccccgagaagagcacaaactccctccacgtctatggctaggccttcttcggcgtcggcgatgggccccgggaagtggtc

SEQ ID NO: 81899 - DNA, 411 bp, Zea mays
ctcaacccacgcgcccgcaacaccccccgccccctctctctctctcttcttcttcttcttcaatcctccctccccgcgctggagttggaggagggagaggggacaagctttccggcgccgacgccgacgcggaccccgcgccgacacgatccggtggatcaagtgcatcacacctttagggaggccccttggacagcagtttgtgctgcaaattctatatagctctgtcgcagcatggcctcggtgggcgtggcacgctcttctttgggatttcagaatggcacaagttctagcaatgacccagatcgtcttcccaacgagttgggcagtatgagcataagggacgacaaggacgttgaagatattgtagtcaatggcaatggggcggagcctggtcatatcatagtgacc

SEQ ID NO: 81900 - DNA, 417 bp, Zea mays
tactctgtctctctacagtgcttctgctcgccggcccaaaatcgcctcatcgaccacgcccccttccaggctcccgtctccatgggtctcctctcaaacaggattgggagggagagcctcaaggcgggggatcatatctactcctggagggcggcgtgggtctacgcgcatcacggaatatatgtgggcgatgataaggtgatccatttcacaagaggaagaggacaggaggtcggaacaggaactgtcgtcgatattattcttgtgagttccaccccaaaacgaagcaacacgccttgcccggtgtgcaccgacgaaaccagcgacagcagcacagagacgaacggcgtggtatcctcctgcctcagctgcttcctagctgggggtgctctctaccgtttcgagtacgcagtcaac

SEQ ID NO: 81901 - DNA, 135 bp, Zea mays
gtattatggcacgctgcggcacgccgtgatccaggaccggccgctgtggatcgtgttcgcgcgcgacatggtgatcgagctgccgcaggaactgatcgtgaaccacatcaagacggatcgatggtgggggcgcgc

SEQ ID NO: 81902 - DNA, 301 bp, Zea mays
aaacggcggacaggacacgctgtacgaccacaagggcctgcactacttcaagggctgcctcatccggggcagcgtcgacttcatcttcggcttcggccgcagcttctacaaggactgccgcatcgagtcggtggtcaaggaggtggcggtgctgacggcgcagcagcgttccaagtccatcgagggcgccatcgacaccggcttctcgttcaagaactgcagcatcggcggcgtcaagggcggccagatctacctgggccgcgcctggggggactcctcccgggtcgtctactcgtacacg

SEQ ID NO: 81903 - DNA, 381 bp, Zea mays
gaatcgtattataaggtcccgcccttttccgacattcacaggggggacaggaaatcagcggccatggcctcgattccggcgacgaccttcgccgtcatcttagccgtcctcttctgtgccgcggctggcaccgccgtcgacaacgacctccccgactacgtcatccagggccgcgtctattgcgacacctgccgcgccaggttcgtgaccaatgtcaccgagtacatcgcgggcgccaaggtgaggctggagtgcaagcacttcggcaccggcaagctcgagcgctccatcgacggggtgaccgacgggaacggcacgtacacgatcgagctcaaggacagccacgaggaggacatctgcgaggtggtcttggtggagagc

SEQ ID NO: 81904 - DNA, 396 bp, Zea mays
aggtcatcctctggagatccaggctctgttctattctgctttacgctgtgcccgagaaatgattggggtaaccgatggatccaagaacttgatccgtgctattaacaacaggctcagtgctctgtcatttcacatcagggagtattattgggttgatatgaagaagataaatgagatttatcgctataagactgaggagtattcccatgatgctattaacaaattcaacatctacccagagcaaattccatcttggcttgcagactggattcctgtgaaaggcggttaccttataggcaatctgcagccagctcacatggatttcaggtttttctccctaaggaatctgtgggcgattgtcccatctcttgctactcaaaggcaagcagagggtat

SEQ ID NO: 81905 - DNA, 406 bp, Zea mays
cgactacacgcactggctcatgtacgccatcggcggcagcaaggcccccaccatcatcagccagggcaaccgctacatcgcgccgcccaaccttgccgcgaagcaggtcaccaagcagcatgacacgccggagtcggtgtggaagaactgggtgtggcactccgagaacgacctcttcatggaaggcgcctacttcaccgtcaccggcggccagatcaacaggcagttcaacaagaaggacctcatcaagcccaggaacgggtcctacgtcaccaggctcacgcgctacgccggctccctcgcctgcacgcccggcaagccctgctagatcaagccaccagcgaggacggccgacgaccagaagcagaccatgcattcgccggctcgccatgtaagaaacagggga

SEQ ID NO: 81906 - DNA, 370 bp, Zea mays
  unsure (1)..(370): unsure at all n locations
gctccctcaggcctttgcccgcctgagcgctgtttacggtggcacgtacatgctgaacaagccagaatgcaaggtcgagtttgatgagagtggaaaagcgtatggagtcacttctgaaggggagaccgccaagtgcaagaagatcgtctgcgatccttcgtatttgccagacaaggtgaagaaggttggaagggtggcccgcgcgatatgcatcatgaagcatccgatcccggacaccaaggactcgcactccgtgcagatcatcctcnccaagaagcagctaaagcgcaaatccgacatgtacgtgttctgctgctcctacgcncacaacgtcgcgcccaaaggcaagttcatcgccttcgtctccacg

SEQ ID NO: 81907 - DNA, 305 bp, Zea mays
aacctcaactcacacgtctgatacggtctgggacagctccctcacgcctttgcccgcctgagcgctgttgtacgtggcacgtacatgctgtcacaagccatagtgcaaagtcgagtttggtggtattggtaaatcgtatggggtcacttctgagcgggagaccgccagatgcatgaagatcatctgcgatccttcgtatttgccatgcaaggtgaagaaagttggaagggtggcccacgccatatgcatcactaagcatccgatcccggacaccattgactcgcactccgtgcagatcatcctcc

SEQ ID NO: 81908 - DNA, 408 bp, Zea mays
gtcaccttccaccttgaaaaggggtgcggccccaactacctggcactgctggtcaagtacgtcgacggcgacggtgacattgtggcagtggacgtcaaggagaagggctccgacacatacgagcccctgaagcactcctggggcgccatctggaggaaggacagcgacaaaccgcttaagggacccctcaccgtccgcctcactaccgatggaggcaccaagtccgtctacgacgatgtcatccctgccaactggaaggccaacaccgcctacaccgccaaataattaactttagtgctgacaatactttaagccgacctatgctagctatactagattgggttggatcccaagcaatgcattacacatgcatgcattggaccgtgatatctatttgctaccactacc

SEQ ID NO: 81909 - DNA, 419 bp, Zea mays
ctcacgggtcgatacacgcctctacacacacgttctgccaacgcgtccggcgacgactgcatctccatcggccccgggacctccaaggtgaacatcaccgacgtgacctgcggccctggccacggcatcagcatcggaagcctagggcggtacaaggacgagaaggacgtcacggacatcaacgtcaaggattgcactcttaagaagacgatgttcggcgtccgcatcaaggcgtacgaggacgccgcctccgtgctcaccgtctccaagatccactacgagaatatcaagatggaggactcagccaaccccatcttcatcgacatgaagtactgccccaacaagttgtgtactgccaacggcgcctccaaggtcaccgtcaaggacgtcaccttcaagaacatcaccggcacctcctc

SEQ ID NO: 81910 - DNA, 412 bp, Zea mays
  unsure (1)..(412): unsure at all n locations
ctggcccgtgcgacggcgacggcggtgctgggtttcgtcctggcggtggcgtcagctgaggcggcatcgggggacgtggagatggtgttcctcaaggccgcggtggccaaaggcgcagtgtgcttggacggcagcccaccggtgtaccatttctctcccggctccggttctggcgccaataactgggtcgtccacatggagggaggagggtggtgcaggaatcctgatgagtgtgctgtccgcaagggcaacttcaggggctcctccaaatttatgaagccactctcgttttcagggatattangcggcaaccaaaaatccaatcctgatttctacaactggaatagagtaaagatcagatactgtgatggttcatcatttactggtgacgttgaggctgtggacactgcga

SEQ ID NO: 81911 - DNA, 422 bp, Zea mays
acaaccctctggagtgagtcgtattatttttggtggaacctgccgatgtgaaggtggttgcatgaaggctgacaaaggcccttggaaggaccccgaaatcatgaagatggttcaaagtggtgatgggaggtgtggatcactcggtacggcctctttcgaggctccggagaaaatgatttgtgaagacgacacgtatcctaagaaacaagctttgtttgatggggaaacacaattagctggagacgagcattctcagtcacagaaaatttcccgtggccggattgaacatcctcacgtgtcacctcttcacgaggaacttatccccacttcaattcatacccctggattaccctattcttgtgatgtcccgatggttgaagaggccatagacgccatctgcaagagccacggaacaccaccag

SEQ ID NO: 81912 - DNA, 408 bp, Zea mays
ccaaatcgtcgctcaaggccaccaagttcctgtaccaggacgtcaccatggacaacgtctcctaccccatcatcatagaccagaagtactgccccaacaacatctgcgtcaagtccggcgcctccaaggtggccgtcaacgacgtcgtcttcaagaacatccacggcacctccaacacgccggaggccatcacgctcaactgcgccaacaacctgccctgccagggcgtgcagctcatcaacgtcgacatcaagtacaacaggtccgacaacaagaccatgtccgtctgcaagaacgccatcggcaagtccattggcatggcgaaggagctcgcctgcgtctgaacctacttgcatccatcactcactcttcgtcacctctctctttctcactctcgccagtcttttt

SEQ ID NO: 81913 - DNA, 407 bp, Zea mays
aaatcaatcaatgccccaatggacacacgctgtgttccacatgcaaggccagagtacacaaccgttgccctacctgcaggcaagagctgggcgacattaggtgcctggcgctggagaaagtcgccgagtcgctggagctcccctgcaggtactactcgctggggtgccccgagatcatgccttactacagcaagataaagcacgaggcgcagtgcggcctgagaccgtacaactgcccctacgccggctccgagtgcggcgcggccggcgacatcccttccctcgtctcccacctgagggacgaccacaaggtggacatgcacagcggctgcaccttcaaccacagatacgtgaaatccaacccgcgggaggtggagaacgccacctggatgctgacggtgttccac

SEQ ID NO: 81914 - DNA, 408 bp, Zea mays
atcgtttaagaaattcgccgcttgatgtgtggatccgtcgcggctgccgtcaagcatagacaccaagaaccagacctcggggtggatcatcggggtcgcggaggtctactggatggggtcaagaagtatccgggcaagtcgtctctgggaaccctgcttattgctcgccggatgctagcgccgccgtggactgcgcggctccgagaagtcgaggtcgtcgcgacatatcccaggaaccttcggacttggaacgaagctgtccataatatggaaagcatgattgggacgaaggtcgaatcaattctgaagctatgcgcaaggaagcttcggctcagtagcagaaaaaggaaccgacctaaaaaggaaaaggctatttagtcctcgatagattgtccttaagtcaattgt

SEQ ID NO: 81915 - DNA, 419 bp, Zea mays
gaccacgcgtcagcccacgcgtccggctactcagagggacactgtctcggcccggccaattgcccggccggaccttcgcccatgatcacagggagaacatcctttgcttcccatgggcatgaagaataaccaagactcccagttggtcatgggccggtacaggctgggccaactcctcggcagcggcaacttcgctaaggtgtacaaggcccataaggtggccaccggcgaggctgtggccgtcaaggtgctggacaaggatgctgtgcaccgctccggcatggcggagaaggtgaagaccgaggtcgacgtgatgcggcgcgtgcgccacccgaacgtcgtccgcctccacgagatgatggccacgcggtccaagatctacttcgtcatggaatacgccagcggcggggagctcttcc

SEQ ID NO: 81916 - DNA, 404 bp, Zea mays
taggatgagttgggaaaagcggacttgccactgccttcttcaatgataataactcatcactggcaagatctcttgctgacctaatgcaagaatctaaccaagaggtacctgcatggctattgcgctatgcagctcgtccttcttatggtggtggtggtggtgggaggaaccggcgatcagggggagggagccgctttggtggccgtgacttccgcaatgattcttcgtcatttggcaaggggggatcccgtggtggtggtgactactatggtggaggcagcagtggtggttatggtggtggcggacacggtggagctggggctccgagtgcctgggattgatgttacagttgctcccaagtagaggggtctgccaagtttaggtcactttttactctagttcta

SEQ ID NO: 81917 - DNA, 398 bp, Zea mays
  unsure (1)..(398): unsure at all n locations
tgacttccaaggatatacaggaaatggcacccttacatctgtattggcacggcttggtgaattggaggagaaggtacaggcaattgaagcaaagccatcccaagtgccatttgaaaagcaggaattgttgcatactttcgttaaccgcgtgggtgtgttggaagctgaactaatttctatgaagaaggtcttgtatgagacattggttcggcaggatgagctgcttgcatatattgaccaacgacgggcagccaaattttgtcggcagaagttctgcttctgagtgctgaagtacctgccacctatgttcttctattcggagttggcatgctgctattgtggacacagaatacttgcaaatatcttcatattttgttgcggtgtanagaattgcaata

SEQ ID NO: 81918 - DNA, 269 bp, Zea mays
agagtgcgtgcgtgcagccacaggcacgcgtcggcaccatgtcgtctttcaccggcaagcacgacaagtgcgcggagtgcgacgagaccgtccacttcatcgacctcctcacggccgacggcgtcacctagcataagacatgcttcaagtgcagccactgcagagggatcctcgcgatgtgcagctactcgtccatggacggtgtgctgtactgcatgacccacttcgagcagctcttcatggagaccgggagcttctccaagaacttc

SEQ ID NO: 81919 - DNA, 271 bp, Zea mays
gggggacgcttcccttgccacatccggcaagtcggtcaagtccctgtgcgcgcccaccctatacaaggagtcgtgcgagaagacactgtcccaggccaccaatgggacctagaaccccaacgaggtgttccacaacgtggccaaggtggcgctggagtcggtccacacggcggtcgagcagtccaagtcaatcggcgatgccaatgccagcgactccatgaccgagagcgcgcgcgatgactgcaagatgctcctggaggacgccgccgac

SEQ ID NO: 81920 - DNA, 256 bp, Zea mays
agcaatatctcctccctctccctcacggatgcaatcgccatcgcagcgaaatagacatgtctgatcgggcacagatgtcgtggcacgcatacgtcggcgaccacctgatgtgcgagatcgacggccagtacctcgcggcggaggacatcgtcggccacgacggtgccacctgcgcgcataacagagcagttccccgagttcaagaccgatgacatggccaacatcatgaatgacttcgacgagcctatgcacctcg

SEQ ID NO: 81921 - DNA, 269 bp, Zea mays
gaaacggaaggagcatagggaggagggcaacgagggcgacgggttctacggcggcataaggaagctccgcggcaacgatgacatctccaagtggaggcagctgtggccaacagacgtcctggagtaagcaggaaccgcatcccttctcacaccgacattgatccatcgctcaaatgacacgcctttctttcatcatcatattgaccaaattcgtcgtctctgtcgcgctgttgtaaacgggttagtagaagaacaaatcccgttagctg

SEQ ID NO: 81922 - DNA, 306 bp, Zea mays
gccgccgatcccgtgggcgcagcggttccggatcgcggcggagatcgcgacggcgctgctgttcctgcaccagacaaagccggagccgctggtgcaccgggacctgaagccggccaacatcctgctggaccgcaactacgtgagcaagatcagcgacgtcgggctggcgcgtctggtgccgccgtcggtggcggacagcgtgacgcagtaccggctgacggcgacggcgggcaccttctgctacatcgacccggagtaccagcagacgggggaaaggcctggggggggggcccggggtttttcccc

SEQ ID NO: 81923 - DNA, 335 bp, Zea mays
acccacgcgtccgcccacgcgtccgaccctccctccctcacacaaataataaggaaaggtcccgcccttttcctccgacatccacaaggggggaggggaaaacacgtacattcacccggcggcaataatggcctcggttccggctccggcgacgacgaccgccgccgtcatcctatgcctatgcgtcgtcctctcctgtgccgcggctgacgacccgaacctccccgactacgtcatccagggccgcgtgtactgcgacacctgccgcgccggggtttcggtttggaaaaccccccaaaaaaaacccggggggtttttcccccaaaaaacccccc

SEQ ID NO: 81924 - DNA, 271 bp, Zea mays
  unsure (1)..(271): unsure at all n locations
ctcgtctcaccctccctccctcacacaaataataaggaaaggtcccgcccttttcctccgacatccacaaggggggaggggaaaacacgtacattcacccggcggcaataatggcctcggttccggctccggcgacgacgaccgccgccgtcatcctatgcctatgcgtcgtcctctcctgtgccgcggctgacgacccgaacctccccgactacgtcatccagggccgcgtgtactgcgacacctgccgcgccgggttcgnntgaccaac

SEQ ID NO: 81925 - DNA, 260 bp, Zea mays
gcctggcgggcgcgtggtacacgacaaccacggcaagttcacggccgggccgtggaaacccgcccacgcaaccttctacggcgggcgtgacgggtccggcaccacggcgggcgcgtgcgggtacaaggacacgcgcacgcaggggtacggcgtgcagacggtggccgtgagcactgtgctgttcggtgacggcgcggcctgcggagggtgctacgaggtgcggtgcgtggacagccctagcgggtgcaagcccgacgcgg

SEQ ID NO: 81926 - DNA, 398 bp, Zea mays
gaaagaagtcgcctaattctttcgatcgaattatgcgccttcttcgtcacacgctccgtctttatttgtaatctgaagcttacaggaacatttgagtggatcatggacggattggtaagcctcttgaaagtccgggtggtgaggggcatcaaccttgcctaccgcgacgcaagaggcagcgatgcgtatgtcatcataggacttggcaagaagaagcttacgacgagcgtgaagaagagatctgtgaaccccatctggcacgaggagctaactctgaccgtcacagatcgcagcctagctctgaagctggatgtgttcgacaaggacacgttcagcagggacgacccgatgggggacgcggagatcgacgtggcgccgctggtggatgcggcgaacgc

SEQ ID NO: 81927 - DNA, 285 bp, Zea mays
ccgacccgcccgtccacccgagtatcattccaaggcgacaaaagtggcagtgccccctaaggatgacgatgatgagagcggtgaagaatatgaagaggaagagcgtgataacaccttatgtggatcatgtggaacaaatgacggcaaggacgaattctggatctgttgtgatagttgtgagcggtggtaccatgggaagtgtgtcaagatcactcctgcacgtgctgagcacatcaagcactacaaatgcccagattgcaacaacaagagggcaagagcctagcg

SEQ ID NO: 81928 - DNA, 264 bp, Zea mays
catatatatattcctgccaagataaaggtaatggagtcgtcacgcaggttccagccggccgtcatcctgcttctcctgctcattgtgtccaccgatatggcacaggcaagggaatgcgagaagtacagtgagcgatttgttggggcatgcatgatcgcagacaactgcgccaatgtgtgccgcggtgagggcttcttggccggcaggtgcagcaccttccgccgccgctgcatctgcactaggcagtgctaaacaagatcgctc

SEQ ID NO: 81929 - DNA, 267 bp, Zea mays
agcagggaatcggtggtctcgaggcttcgtgagctcctgtcagacgcggcggtcgggagcaatccgattctccgggtgatggccggcaccgtcttcatgcacgaacgcgattacgccgaggctctcaagcacaccaactccggtggcagcatggagctgcttgcgctgaatgttcagatataccttcaaatgaacaggacggaccacgcagagaagcagctcagggtgatgcagcagctggacgaagaccacacgctgacgcagctc

SEQ ID NO: 81930 - DNA, 409 bp, Zea mays
atcttgcctcctctttcgcgctgtccggagaggaggggcaggaggaggccgcaccaaatctatctggggatcggagcgcgggcgacaagatgccacgcggcggcaagcccgcggcttcgtcgaagccgaacccgttcgactcggactcggactcggagtccagcaataagccggcgaacaagtccggggcgtcgtcgtaccaggcccccgccgacgccaagaagcggtacaaggacgggttccgggactcgggcgggctggagaaccagtcggtgcaggagctggagcactacgcggcgtacaaggccgaggagacgacggacgcgctcgccggctgcctgcgcatcgccgaggacatcaggcaggacgccagcgacacgctgatcacgctgcacaagcagggggagca

SEQ ID NO: 81931 - DNA, 268 bp, Zea mays
tgaaggttgatggaatggatgttcttgctgtgaagcaagcgtgcaaatttgcaaaagatcatgctgttgcaaatggcccaattgtccttgagatggatacctacaggtaccatggccactctatgtcagatccaggaagcacttaccgcaccagggatgagatttcaggtgtcaggcaggaacgggacccaattgaaagggttagaaagttgcttttggctcacgacttggcaactgctgctgagctcaaggatatggagaaaaagaa

SEQ ID NO: 81932 - DNA, 328 bp, Zea mays
  unsure (1)..(328): unsure at all n locations
agggggcacctcgccccgaccggcctgatactgggaggcaccaagtacatggtcatccaaggcgaacctggagctgtcatccgtggcaagaagggatccgggggcatcactgtgaagaaaacagggcagtcactcatcattggcatctacgacgagcccatgactcccgggcagtgcaacctggtggtggaaaggctgggcgactacctgctcgaacaggggatgtaatgacaaccccttcccctggaatgcatgttgatgatgtttgcctgggggtttttccccccaaanaaaccccccttttttttccccccgggggggttttttt

SEQ ID NO: 81933 - DNA, 329 bp, Zea mays
  unsure (1)..(329): unsure at all n locations
aggtctctgtcgcgctgttgtaaacgggttagcagaagaacacacagggtgacaacaaatccttgttcggttatttctaatacatatggattggatgagattggaaaaaattaagaagaagtttaacttgtttgcgattcaaacacatccaatctcattcaattcacatggattgagagctaaccgaacaagcctgtagttggacaagggtgtaacacttatttgtcaggcgtaccgggcacagaccgcttcctatttgttcngtgggggaantggnntttaaaaaancccnnttgggnnnttttaaaaaaaaaaggggggcccccccc

SEQ ID NO: 81934 - DNA, 401 bp, Zea mays
  unsure (1)..(401): unsure at all n locations
cccacgcgtccgctgacagcgacgatgatgccacagctgcgtagcctcgtcgcgctggtcctcgtggccacggccatagccgccgctcccggcgttgggtttgtcgtcaccggccgcatctactgcgacaactgccgcgccgggttcgagacaaacgtgtcccacgccatccaaggcgcgacggtggagatggagtgccgccacttcgagtcgcagcaggtccacgacaaggcggaggcgacgacgggccccggcggctggtacaggatggagatcagcggcgaccaccaggacgagatctgcgacgtgcgcctgctcaagagccccgaggcggactgcgccgagatcgaccactcccgcgaccgctgccgcgtcncgctcacccgcaacgacggcatcaa

SEQ ID NO: 81935 - DNA, 406 bp, Zea mays
cgagaatgccacgagcagctcatctgtggagaagagctacgagctgcctgatggtcaggtgatcaccattggggcagagaggttcagatgccctgaggtcctcttccagccttccttcattggtatggaagctcctgacatccatgagaccacctacaactccatcatgaagtgcgatgtctacatcacgaaggacttgtatggtaacattgtgctcagtggtggcacgaccatgttccctggtattgcggaccgtatgagcaaggatatcactgcccttgcgccgagcagcatgaatatcaaggtggtggcaccgcctgagaggacatacagtgtctggataggacgatcgatccttgcctcgctgagcaccttccaacagatgtggatctcaaacgctgagtat

SEQ ID NO: 81936 - DNA, 268 bp, Zea mays
ggcgaaccaagccagcgcgaccagcgaggagtgcactgttgcttggggagtctgtaatcatgcttttcacttccactgcatcagcaggtggcttaagactcgtcaagtgtgcccattagataacagtgagtgggagttccagaaatatggccactagttcctgggcaccctcatgtgatgttggggcttacttctagtgactgctaccactcgagtgtatttttttctgccaaacagctccatcttttactgctttggatgcttgcat

SEQ ID NO: 81937 - DNA, 262 bp, Zea mays
cggacgcgtccgcccacgcgtccgggtggtcaagatgtactggggtgacccgagggagaaggtgtgcgacgcggtggaggagctccagatcgagtcgctcgtcatgggcagccgcggcctcggccagatccaaaggattctgctgggaagtgtgacgaactacgtgctgtccaatgcgtcatgccccgtgaccgtcgtcaagtcgaagtagtggctctggcctttcatttccagaaagatgaatctgcagctaacctatacg

SEQ ID NO: 81938 - DNA, 406 bp, Zea mays
cgacgagccagggcacctcgcgccgacaggcctgttcctcggacctaccaagtacatggtcatccaaggcgagcctggtgccgtcatccgtggcaagaagggatcaggaggcatcaccgtgaagaagacagggcaggcactcgtggttggcatctacgacgagccgatgacgcctgggcagtgcaacatggtggtggaaaggctgggcgactacctgcttgaacagggcatgtaactactacgtaccagctggaatgcatgtcgacgacgatggtttcgagtttcgacttccaataatagtaacaacaaagcaaaggccttcctcccggcgtatttgctttggctcttctcctccacgccataagatatctagcaattggtgactcgccttaattagttcgctttg

SEQ ID NO: 81939 - DNA, 391 bp, Zea mays
  unsure (1)..(391): unsure at all n locations
cccacgcgtccggacaagatggcgtgcacaaacaatgcgatgagagccttgttcctcctggtcctcttctgcatcgtgcatggtgagaaggaagagtcaaagggcatcgatgcgaaagcgtccgggcctggtgggtccttcgacatcaccaagttgggcgcctccggcaatggcaagacagacagcacgaaggctgtgcaggaggcatgggcatcggcgtgcggcggcactgggaagcagacaatcctcatacccaagggtgacttccttgtcggacaactcaacttcacaggcccttgcaagggcgacgtgaccatccaggtggatggcaatctgctggcgaccacgggacctaagccagtacanaggacatggtaattggatcgagatt

SEQ ID NO: 81940 - DNA, 401 bp, Zea mays
atcatgtctggtcgttcgtggacaataatggcgcctctcctagcgtcgatgctgctcgtcgggctcgccgcgggctccgaggaggaggaggacggcggcggcaaaaagaagccccacgtcaaccacggcaagtttaaggcggagccgtggacggacgggcacgcgacgtactacggccgggcgccacggttaaactgacacaacggacagcggcccgtgcggctacaagggcgagctggggaaagactacggcaccctgacggcggccgtgggcccgtcgctgtacaccaacggcaccgggtgcggcgcgtgctacgagctcaagggccccaagggcaccgtggtggtgacggccaccaacgaggccccgccgccggtgagcgggcagaagggcgagcact

SEQ ID NO: 81941 - DNA, 335 bp, Zea mays
gtgacaagatggacccagcagaacttgtgcggttgattgatatattgaatcccgaaaacagggctgggagaataaccatcatcacaagaatgggacctgaaaacatgagggtgaaacttccacacctgatacgcgctgtccgtggggccggtcagatagtaacatgggttactgacccaatgcatgggaacactatgaaggccccttgcggactcaaaacccgctcgttcgataggattttgggtgaggtgcgtgcgttctttgatgttccaacggaaaacccaaaaaaaggggaaaaaaaagggggggggggggaaaaaaaggggccccccccc

SEQ ID NO: 81942 - DNA, 328 bp, Zea mays
  unsure (1)..(328): unsure at all n locations
gtccggtccggttctcttcgccgcggcggcggatggccctgccgctctacggctgcaggtcctgcgctgtgcatgatgccatcatcttctgccactgctgtgacgccaggctgtgcctgcactgcgacgccgccgtgcacggggctaccgaggcgggggcgctccacccgcgcgcccggctctgcgacgcgtgcggcgccgcgccggccgcgctgcgctgcgacggcaccgtgacgctgtgcgccgtgtgcgtcggccgcggtgctcccnggcgttgggaacccccncccgggggcccaaaaaaccgcccccccccccggggggcccc

SEQ ID NO: 81943 - DNA, 261 bp, Zea mays
cgagattctacgcgtggataacctggtcatcaccggcaagggaaaccttgacgggcagggcccagctgtgtggagcaagaactcctgcaccaagaagtacgactgcaagatccttcccaactcgctggtgatggacttcgtgaacaacggggaggtgtccggggtcacgctgctcaactccaagttcttccacatgaacatgtaccggtgcaaggacatgctgatcaaggacgtgaccgtgacggcgcccggggacagccc

SEQ ID NO: 81944 - DNA, 405 bp, Zea mays
cccacgcgtccgcgttatcctcctcgatcttaattacaggtcatagctaagcaggtctgacaggatgtcgtggcagacatacgtcgatgagcacctgatgtgcgagatcgagggccaccacctgacctccgctgccatagtcggccacgacggcgccgtttgggcccagagcaccgcattcccacagttcaagacagaggagatgaccaacatcatgaaggacttcgacgagcccgggttccttgccccgaccggcctcttcctcggccccaccaagtacatggtcatccaaggcgagcccggcgctgtcatccgcgggaagaagggatctggaggcataactgtgaagaagacagggcaagcgatggtggtcggcatctacgacgagcccatgacccccggcca

SEQ ID NO: 81945 - DNA, 402 bp, Zea mays
  unsure (1)..(402): unsure at all n locations
cccacgcgtccgcgcgaggaagccggcgggcggcagcctgcggctgcagcggcaggcgtgctgcgagccgtcggtggcgccgtcgcgggcggtgttcgcctgccgggccgcggcgtcggggagcgcggccgacctggcctccgggggcaggaggtcgtccggcgtgccggtgttcgtcatgatgccgctggacaccgtcaaggagtgcggcaccgcgctgcaccgccgcaaggcggtgcaggccagcctctccgcgctcaagagcgcgggcgtcgagggcgtcatggtggacgtgtggtggggcatcgccgagcgcgacggcccgggccggtacaacttcgcgggctacgcggagctcatggagatggcgcgcnaagccgggctcaaggtccaggccgtcat

SEQ ID NO: 81946 - DNA, 403 bp, Zea mays
gttcatggtgctatttaggcgtgaagtatcatttggagactccttatacctctgggagatgatgtgggctctagaatacgaccctgacattttcttcgcaacatgcgaagaacaaggtgcagtacataaaaataaagtttctaaatccaaactgaaaggactgcgccattttggcaagtgggataaggacaaggataaggaagatgataagaatggggctgaggacggtgaagatggtccggttccgatttcagtcttcatggttgcaagtgtcctcaaggagaagagagaaaagctgttacaagaagccagaggactggatgatcttatcaggatattgaacgatgtaaatgggaacttagatgctaagaaagcttgcgctggagcattgaaacttcacaaa

SEQ ID NO: 81947 - DNA, 267 bp, Zea mays
tattatgttgctccagaggttctacacagatcatacagtatggaagcagacatttggagtataggtgttataacatacattctgctctgtggcagtcggccattctgggcaaggacagaatctgggatcttccggtccgtattgagggctgatcccaattttgacgattcaccatggccttcagtatcggctgaggctaaggattttgtgaagagatttctgaacaaagattaccgcaaaagaatgactgctgtccaagcactgact

SEQ ID NO: 81948 - DNA, 268 bp, Zea mays
aggtgttcaacttcgtgaagctggcggagctgtactacgccgggagccacggcatggacatcaagggacccacggcgcagtccaagcacagcaaggcaaaggccgaagctgttatgtgccaaccagcgagcgcgttcctgcccgtcattgacgaggcgtaacgcgcgctgacggcgaggaccgcgccgatccccggcgcgacggtggagaacaacaagttctgcctctccgtccacttccgctgcgtccaggaggagaaatggcgcgc

SEQ ID NO: 81949 - DNA, 331 bp, Zea mays
  unsure (1)..(331): unsure at all n locations
aactgcgactgcctccaagggttccaagtatgccactccctgggtggcggcactggttctggcatgggcacgctgctcatctccaagatccgggaggagtacccagaccgcatgatgctgaccttctccgtgttcccgtcgcccaaggtgtccgacaccgtcgtggagccctacaacgcgacgctgtccgtgcaccagctggtggagaacgccgacgagtgcatggtccttgacaacgaggcgctctatgatatttgcttccgcaccctcaaagctttcaaacccccaaaaaaaacccccccccccccnttttttttttcccccacaaaaa

SEQ ID NO: 81950 - DNA, 269 bp, Zea mays
acccacgcgtccgcccacgcgtccgggaggactcagccaaccccatcttcatcgacatgaagtactgccccaacaagttgtgtactgccaacggcgcctccaaggtcaccgtcaaggacatcaccttcaagaacatcactggcacctcctccaccccggaggccattagcctgctctgcactgccaaggtcccatgcaccggcgtcaccatggatgacgtcaacgtcgagtatagtggcaccaacaacaagaccaatggctatatgcac

SEQ ID NO: 81951 - DNA, 355 bp, Zea mays
cggacgcgtggcagaaaacaaggaggaactcctcatcctcctcgcttctgccctttccaaaaggttcctccttgtcctggatgacttggagagcccgagcatatgggacaatctgctcaaagattcattgggagatggtgttgtcagaggaagaatactgatcacaactcggaacgaggaagtggcaacaagcatgaaggcaactatccaccatgttgacaaaatggaccctgagagtgcctgggcattattgtgcaatcaagttgatgcagaatgcaattcggaagagcttgcaacattaaaggatgttgggattaagattgcagagaaatgtgatggccatcctctagcaatc

SEQ ID NO: 81952 - DNA, 362 bp, Zea mays
acggcgctggaggatatcccggtgagcaacaccaagcgcgtgatcctggatctcaagcccggcgctcaattccgcgagaatctgttcctgaacatcaggaagccgttcatcacgttccggtcgggccccaagaagcccgccgtcgtggtctggaacgacactgcaggcacaagcggcatcgacggcaagccggtgggcacggtggggagcgccacgctggcggtggagtcggactacttcacggcgtacggcgtggtgttccggaacgacgcgccgctggacaagcccggcgccaagggcggacaggcggtggccgtgcggctgttcgggaccatgacgcatatctacaactgcaccatcga

SEQ ID NO: 81953 - DNA, 404 bp, Zea mays
aagcggcggtcgccatcgtcggccacgacggtgccgcctgggcgcagagcacggcgttccccgagttcaagaccgaggacatggccaacatcatgaaggacttcgacgagccagggcacctcgcgccgacaggcctgttcctcggacctaccaagtacatggtcatccaaggcgagcctggtgccgtcatccgtggcaagaagggatcaggaggcatcaccgtgaagaagacagggcaggcactcgtggttggcatctacgacgagccgatgacgcctgggcagtgcaacatggtggtggaaaggctgggcgactacctgcttgaacagggcatgtaactactacgtaccagctggaatgcatgtcgacgacgatggtttcgagtttcgacttccaataatagt

SEQ ID NO: 81954 - DNA, 415 bp, Zea mays
  unsure (1)..(415): unsure at all n locations
agtgccagacgagaaagacgtggcggttgtaggggaggaggtggaggcggaggcggagacggagacagagactgaaggcgaagcggaggcagaggtcgaggccgaggtggaggtcgaggtggaggcggaggccggtgcatcgtctgcgaagaagaaccgtatccaggtgtccaccaacaagaagccgctctatttctacgtcaatctcgccaagaggtacatgcagaactacgacgaggttgagctctccgctctggggatggccattggtaccgtggtgaccgtcgctgagatcctcaagaacaatggcctcgccactgaaaagaagatcctcacatcaaccatcggcaccaaggatgantgcaanggccggcttgtccgtaaagccaagatcgagatcctgctgtgcaaatca

SEQ ID NO: 81955 - DNA, 416 bp, Zea mays
  unsure (1)..(416): unsure at all n locations
cccacgcgtccggacaagatggcgtgcacagacaatgcgatgaaagccttgttcctcctggtcctccttctgcatcgtgcatggtgagaaggaagagtcaaagggcatcgatgcgaaagcgtccgggcctggtgggtccttcgacatcaccaagttgggcgcctccggcaatggcaagacagacagcacgaaggctgtgcangaggcatgggcatcggcgtgcggcggcactgggaagcagacaatcctcatacccaagggcgacttccttgtcggacaactcaacttcacaggcccttgcaagggcgacgtgaccatccaggtggatggcaatctgctggcgaccacggacctaagccagtacaaggaacatgggtattggatcgagaatccacccgtggataacctggtcatca

SEQ ID NO: 81956 - DNA, 410 bp, Zea mays
gacgccgccgtcttcgagcgctgctgcctggagatggaggaggccctgaacgcggtgtacaggcagggccgcaacggggacgccatcgggccgctggagatccgggtggtgcgcggcggcacgttcgaggaggtgatggactacgccatctcgcgcggcgcctctatcaaccagtacaaggcgccgaggtgcgtgtcgttcggacccatcatcgagctgctcaactccagggtggtgtccagccacttcagcccggcgtgccccacgtacagcccgcacaagaagtgatgacctaatagcattggccgtcggagctcggaggctggggttcacggtcacgggccagactgagctactacacttctgctagtactatatattgctacttgttgctctctacagtgcgtgtc

SEQ ID NO: 81957 - DNA, 386 bp, Zea mays
agagcgctgctgcctggagatggaggaggccctgaacgcggtgtacaggcagggccgcaacggggacgccatcgggccgctggagatccgggtggtgcgcggcggcacgttcgaggaggtgatggactacgccatctcgcgcggcgcctctatcaaccagtacaaggcgccgaggtgcgtgtcgttcggacccatcatcgagctgctcaactccagggtggtgtccagccacttcagcccggcgtgccccacgtacagcccgcacaagaagtgatgacctaatagcattggccgtcggagctcggaggctggggttcacggtcacggcccagactgagctactacacttctgctagtactatatattgccacttgttgctctctac

SEQ ID NO: 81958 - DNA, 393 bp, Zea mays
aagacacgacggaagactgcaatgtttacacggggaagcggctgcacgcggccttgttcttcgtgatgggattctggctgctggacttttccaacaacacggtgcagggccccgcacgcgcgctgatggcggacctcgcaggcagccacggacccagcacggcgaacgccatcttcgtgtcgtggatggcgatcgggaacatcctgggctactcgtcggggtccaccgacaagtggcacacctggttcccgttcctgcagacgagggcatgctgcgaggcgtgcgccaacctcaaggccgccttcctggtgtcggtggtgttcctgggcctgtccacggtggtgaccatgatcttcgcccgcgaggtgccgctggacccggcggcggcggcga

SEQ ID NO: 81959 - DNA, 403 bp, Zea mays
aggacgccatcaaagatacccttcgagaaagggttggcccaaaggtttatccagccctctggatctggtgttgacttgggattcttttctcttgatgagctttcgagttcatcaggggaagtattcccacttgttgtttatgcagaagcatatccatctccagaggaaggtggcccgtcagtaaacgccactcgtgcacagattactcttgctgttttggagaagcacaacaacgaccttcaagtcaaagttatgaagcaaatcttgtggattgatggcgtgaggtatgagctacaggaaatttttggtcttgtcaactccactgaagcggatgttgctgatgctgatgccgatgacacggggaatgaatgtgttatctgcttgtcagaaccaagagacactg

SEQ ID NO: 81960 - DNA, 428 bp, Zea mays
ctcgcgggccgacacacgcctcaacacgacggcatcctgctcggcaccggcgacctcagcgcgtaccaaaggaactggatcgagatcgagaacgtcgagaacctgtccatcaacggccacggcaccatcgacgggcagggagccctggtgtggagcaagaaccagtgccagcattcttacaattgcaagatcctcccgaatagcttggtgctggattttgtgacgaacgtccagatccgcggcatcacgctgctcaacagcaagttcttccacctcaacatcttcgagtgcaagaacgtgctgatcgacaaagtgacggtcaaggcccccggcgacagccccaacacggacggcatccacatcggcgactccagcaacgtgaccatcagcagcaccaccatcggcgtcggcgacgactgcatctccat

SEQ ID NO: 81961 - DNA, 373 bp, Zea mays
tgcacacctgcggccacgacgcgcacaccgcaatgctgctcggtgccgccaggatcctccatgagcgccgcaacgacctgcagggcacagtagtcctccttttccagccgggtgaggaggtcggtattggcgccaagaggatggtggaggcaggcgccgtggagaacgtggaggccatattcgggttccacgtcaccgtgctgctccccaccggcgtggtgggctctagggccggcccgctgctggccgggtgcgggttcttcgaggcggtgatcaccgggggtcggcggccacgccgcctccccccagaacatcatacaccccgtcctggcagcctccagcgtcgtgctcatcctgcaaagcctcgtgtcgc

SEQ ID NO: 81962 - DNA, 382 bp, Zea mays
cccacgcgtccgcccacgcgtccggcggccacgaacggcaaggacggcaagccggtgggcacggtggggagcgccacgctggcggtggagtcggactacttcacggcgtacggcgtggtgttccggaacgacgcgccgctggccaagcccggcgccaagggcggccaggcggtggcggtgcggctgttcgggaccaagacgcagatctacaactgcaccatcgacggcggacaggacacgctgtacgaccacaagggcctgcactacttcaatggctgcctcatccggggcagcgtcgacttcatcttcggcttcggccgcagcttctacgaggactgccgcatcgagtcggtggtcaaggacgtggcagtgctgacggcgc

SEQ ID NO: 81963 - DNA, 389 bp, Zea mays
gctcccgaggcagcgggcaggcagcggtggttctcccctaagactgagtgatggcgacgctccagaggcgggcgggcaagcggcgacggcagtcccgagtcgaacgagtggcggcgtcgcaccctaggctcggtggtaacggtgattgtgcgaggcacgataggcttcggcagtgacggtggtggccatgggacacgcgggtagctccgacgggcgcgtgaggcgcggtcgtctccagcggtggtggccacatgaggcgtggttggctccggtgtccttcgatgaccaactccttcgatctgatggcctcggcggcggcgtcctccgatgacctcctccaattctttgtttatgcatgcggctgttggttgagcccatactaatttttc

SEQ ID NO: 81964 - DNA, 405 bp, Zea mays
cgcgtgtctaggtttcctctctcaccatagcgcccgctctgtcgcccttcgttcacctctccttcctctcctccctgcctgccagggagaggggaagtcagaggcacggagtggcgcagagcagacgcacgtgaaccattgtagctgtccctgtcgtcgtcgtcgtcgtcaacgaatccacacaaggaaaggatggagaagaagccgaccatcctcatgaacaggtacgagctcgggcgcacgctcgggcagggcaccttcgccaaggtgtaccacggccggaacctcgcgtccggcgagagcgtggccatcaaggtcatcgacaaggagaaggtgatgcgcgtcggcatgatcgaccagatcaagcgcgagatctccgtcatgcgcctcgtccgccaccccaac

SEQ ID NO: 81965 - DNA, 396 bp, Zea mays
gagctgctggagcccttttggtttatgatatcactaggagggagaccttcaatcatctcgcaagttggctagaagatgccaggcaacatgcaaatgctaacatgacagtgatgctgattggaaacaaatgtgacctttctcataggcgtgctgtcagctatgaggaaggcgaacagtttgccaaggagcatggtctggtttttatggaggcatctgctaaaactgcacaaaacgtcgaggaggcattcattaagaccgctggtacaatatacaagaaaatccaagatggcatatttgatgtatcaaatgagtccaacgggatcaaagttggctatgctgttcccaactcatctggacgtggtgctggctcgtcctcacaggctggtggctgctgca

SEQ ID NO: 81966 - DNA, 408 bp, Zea mays
caacgcttctcctgctggttactccgcgcgccttctctttctctcccggacgtcgatcgtgttcttcagcacgggctagctagctccctccctcccagccatggcgacgccggacaacaaggggcacgggcatccgctgcccaagtttggggagtgggacgtgaagaatccggccacgtccgagggcttcaccgtcatattccagaaggcccgcgacgacaagaagaccaccaccggccctggggctgggaacgcgcgcgcaggcattccgccggccttcaggaacggcggcggcgacggcgggtacaggcccgacttcggcgacggcaaccagtacacgccgcccaaacggaagaagtgggccttctgtggctgctgaatccaaacctccctgtgctgctgtgctga

SEQ ID NO: 81967 - DNA, 371 bp, Zea mays
cccacgcgtccgcgcgtccgtatgatcgaccagatcaagcgcgagatctccgtcatgcgcctcgtccgctagacgaacgtcgtggatctgcacgatgtgatggtcagcatcatcaagatatacttcgccatggagtacgtccggggcggcgaactcttcgcccgcgtcgccagctgtcggctcaacgaggacgccgcgagaacgtacttccaccagctcgtcggcgccttcgactctctgccacagccgctgcgtctagcagcgcgaccgcaatcccgagaacctcctcgtcgaccatcagggcatgctcaaagtctccgatctccgccgcagcgctctcatgtagtgccagcatcaagatcgcctgctgc

SEQ ID NO: 81968 - DNA, 372 bp, Zea mays
  unsure (1)..(372): unsure at all n locations
caagtacaagaagagcactgagttgctgattangaagctgccgttccagaggcttgtcagggagattgctcaggatttcaagacggatctgcgcttccagagccatgccgtgcttgctctgcangaggcagcagaggcctacctggttggtctcttcgaagataccaatctgtgcgcgatccatgccaagcgcgtgaccatcatgcccaaggacattcagctggcaagaaggatccgtggcgagagggcgtaagtctgtcgacgggaggaagaactctgcgctcgttttgtgtgttcgcctctctcaccctgtaagttttgtgagaagatgatctagtaaactgtacttggcctgtttgactgtanccgcag

SEQ ID NO: 81969 - DNA, 315 bp, Zea mays
agtgagtcttagtattggtggatcaggaagctgccgttcgacacgcttgtcacggacattgctcaagatttcaagacggatctgcgcttctagagccaggccgtgcttgctctgcaggatgcagcacacgcctacctggttgggctcttcgaagataccagtctgtgcgcgatccatgccaggcgcgtgaccatcatgcccagtgacattcagctggcaacaaggatccgtggcaagagggcgtatgtctgtcgacgagatgaagaactctgcgctcgttttgtgtgttcgcctctctcaccctgtaagttttgt

SEQ ID NO: 81970 - DNA, 403 bp, Zea mays
cccacgcgtccgcacgacgccaagtccgcctccgccgtcatccgctacgccggctccagcggcgccccgccggcgcccaacatgaccgagccaccggccggctgggcctggtccatcaaccaggccaggtcgttccgctggaacctgacggccagcgccgcgcgccccaacccgcagggctcctaccactacggccagatcaacatcacccgcaccatcaaggtcatggtctcccgcggccacatcgacggcaagctccgctacggcttcaacggcatctcccacagggacaccgagacccccctcaagctcgccgagtacttcaacgtcaccgacggggtgttcagctacaaccagattggcgacgtgccccccgccgttaacgggccactccatgtcatcc

SEQ ID NO: 81971 - DNA, 273 bp, Zea mays
aggacgagttccgcacgttcggggttcttcgcagtgtctgggttgctcggaaaccacctggctttgcgtttattgattttgatgataagagggacgcagaggatgcaatccgtgacctagatggtatgtgatcaatgtattgctgtcaacatgttataaacctctattggtatgttgtatcagatgtttatatgacattccatatgttgtcggtgttatttgtgaagaatatctgagttggtactaaattacattcagagctctatttggtat

SEQ ID NO: 81972 - DNA, 410 bp, Zea mays
  unsure (1)..(410): unsure at all n locations
cggccgagcaccatgcgaggaaataacatgccgcggcacacgtcgccgttactttttgccttgttggcgaccctgctcagcgtcggcgacgcgttggtcgtcgacggcctgcaggtggggttctatggaaagacgtgcccggcggccgaaggcgtcatcagcgacatcgtcaacaacgaaatcgctatggaccggggcatctcccctggcctcattcgcctcttcttccacgactgcttcatcacgggttgcgacgcttccattctcctggacgagtcgcccgccggcgacgtcccagagaaggagtcgtccgccaacggcttcaccctggtcgggctcagaaccatcgacatcgccaagtcccacgtanagggcatgtgcccgggcaaggtctcgtgcgcagacatcct

SEQ ID NO: 81973 - DNA, 394 bp, Zea mays
attcctggacctggagtgaaggaacagctccagaacctttgcaatgtctatgccctctacattctccacaagcacctgggcgacttcctggcaaccgggtgcatcacacccaagcagggagcgctggcaaacgagcagctgggcaagctttacgcacaggtgcgtccaaatgctgttgcgctggtggatgccttcaactacacagaccactacctggggtctgtgctggggcggtacgatgggaatgtgtacccagcgctgtacgaggaggcgtggaaggaccctctgaacgagacggtggtgcccgaggggtaccacgagtacctccgccccttgctcaagcagcagctcaagctctccaggctctagtctgatcggctaccccccctggaat

SEQ ID NO: 81974 - DNA, 412 bp, Zea mays
agttcctgtacgagggcatcaccatggacaatgtctcctaccccatcatcatcgaccagaagtactgccccaacaacatctgcgtcaagtccggcgcctccaaggtggccgtcaacgacgtcgtcttcaagaacatccacggcacctccaacacgccggaggccatcacgctcaactgcgccaacaacctgccatgccagggcgtgcagctcgtcaacgtcgacatcaagtacaatggatccggcaacaagaccatggccgtctgcaagaacgccatcggcaagtccatcggcttggcaaaggagctcgcctgcatctgaaccaattgactaacatgcatatattatatatataatcactcttcggtacctctccccttctcacgtaatctcaagtctccaccgaatatata

SEQ ID NO: 81975 - DNA, 374 bp, Zea mays
cgtacgagaacctttctccctcctccacctttctccttttcttgccacggcaaaacaccttcgccggcgagagcatggcgatggcgtaccgtgtcctggaggtcaccctggtgtcggcaaatgacctcaagaaagtgtcgctcttctcccggactcgcatctacgccgtggcttccatctccggattcgacctccgcatcccttcccacagcacccaagcagaccacagcaacggctgcaacccctgctggaacgccgtggtacacttccccatcccggctgccgctgacacccgcggcctcgcactccacgtgaggctccgcgcccagcgtctatacctgggcgatcgcgacatcggcgaggtgtttgtgccc

SEQ ID NO: 81976 - DNA, 356 bp, Zea mays
agccaacgcagacccagcgatcctcgtcgcgcgtcctcctcccccacggagggaaggatggcggagcccaaagcggcggcggcggcgaggaagacgcgggtgggcccgtacgaggtcggcaagaccatcggcgagggcagcttcgccaaggtcaagcacgcgcgcgactcccgcaccggcgccgtccgcgccatcaaggtgctcgaccgcaaccacgtcctccgccacaggatggtcgagcagatcaagcgggagatttcgactatgaagctgatcaaacatcccaatgtggtacagctgcatgaggttatggcgagcaaaacgaagatatacatggttcttgaatttgttgatgg

SEQ ID NO: 81977 - DNA, 410 bp, Zea mays
aagagagtagtactggacagaagcaacctcctgttcttgtcatagtgttgcagtttataactgcaatggttgttatggacacatggcagtacttcatgcacagatacatgcacattaacaagtttctgtataaacacatccattctaagcaccatactcttgtagtcccttattcctttggagctctatacaaccatcctcttgagggccttattttggacaccattggtggtgcactctcattcctcgtctctggtatgactccacggacatccatattctttttctcctttgcaaccatcaaaactgtggatgatcattgtgggctgtggcttcctggtaatatcctccaggcgctgttcagcaataacagtgcttatcatgaacatcacaatcagctctatggaaac

SEQ ID NO: 81978 - DNA, 392 bp, Zea mays
atacttggatctcaagcgcgacgagtgctctcgactctttcctgcagggcggatatactcgcaagcgttccaccttgcagggcagggtttcttcctctcggctcactgtaacatggagcagcaaagcgcgttctactgcttcgggctcttcctgtggatgcaagagaatggctccacgagtgtgacagtggactacgagttcgctgcaaggacgagaccatccggcgagtttgtgagcaagtacaagggtaactacacattcaccggtggaaaggctgttggatacatgaatctctttgcaatcccatggcagaagttcttggccgatgacagcctcttcttcgtggatgggatgctgcatctgagagccgagcttacgataaagcaaccct

SEQ ID NO: 81979 - DNA, 362 bp, Zea mays
ggcgtgcacaaacaatgcgatgagagccttgttcctcctggtcctcttctgcatcgtgcatggtgagaaggaagagtcaaagggcatcgatgcgaaagcgtccgggcctggtgggtccttcgacatcaccaagttgggcgcctccggcaatggcaagacagacagcacgaaggctgtgcaggaggcatgggcatcggcgtgcggcggcactgggaagcagacaatcctcatacccaagggtgacttccttgtcggacaactcaacttcacaggcccttgcaagggcgacgtgaccatccaggtggatggcaatctgctggcgaccacggacctaagccagtacaaggaccatggtaattgga

SEQ ID NO: 81980 - DNA, 426 bp, Zea mays
acgcgtccacccaagcgtccgcgctggccgccgccgtcatgtcgctcacctaccccaccatcgcgtggggcgcgtcggtggacaagggcaggatggcgggcgtggactaccacctgcgcgcgaccacgacccccggcaaggtgttcggcttcttcggcgcgctgggcgacgtggcgttcgcgtacgccgggcacaacgtggtgctggagatccaggccaccatcccgtcgactcccgagaagccgtccaagaagcccatgtggaagggcgtcgtcgtcgcctacgtcgtcgtcgcgctctgctacttccccgtcgcgctcatcggctactgggcgttcggcaacagcgtccaggacaacatcctcatcacgctcagcaagcccaggtgggtcaacgcgctcgccaacatgatggtcgtcatccacg

SEQ ID NO: 81981 - DNA, 373 bp, Zea mays
gcgtccacccacacgtccgaagaagtcgcctaattctttcgatcgaattaggcgccttcttcgtcccacgctccgtctttatttgtaatctgaagcttacaggaacatttgagtggatcatggacggattggtaggcctcttgaaagtccgggtggtgaggggcatcaaccttgcctaccgcgacgcaagaggcagcgatccgtatgtcgtcctacgacttggcaagaagaaacttaagacgagcgtgaagaagagatctgtgaaccccatctggcacgaggagctaactctgaccgtcacagatcccagcctagctctgaagctggaggtgttcgacaaggacacgttcagcagggacgacccgatggggga

SEQ ID NO: 81982 - DNA, 401 bp, Zea mays
  unsure (1)..(401): unsure at all n locations
gaccatccctgcaaattaccgcgatggctcccaagatcctagtcatccttgtgttcctcgccgtggcctcaccggcggctctggccgccttcgatgtgatagagatgctggccgacaagcccacgtactccacgttcctgaagctcctgcaggacaccaaggtcgcgggcgaggcgaatcagctccggtcggcgacgctactggtcgtccccgacaaacttgccaagcctctggcgtcgctgcccgccgataaggtgcggccggcggtggagaaccacgtccttctcagttacttcgaccccatcaagctggacgagatgaagacacgcaccgccatcctccccacgctgctctccgtcancgacaagaaactcggcgtcctcaactacaccagggccgac

SEQ ID NO: 81983 - DNA, 406 bp, Zea mays
  unsure (1)..(406): unsure at all n locations
ggcggccgaggtcaccaaggcctgcagcgtcacctgcgccaaggagaagaacccgcgcctcagcgagaactgcaagaggtcctgcacccctcctccttcttgaagcgaagccccttgaaatgaatgaaccatgcatgcatgcatgtatgcatgcgccggggtgacgtggcgttcagctcaggcgctgagcgagtctatacgtacgtcgtcaccggctggccacgcatgcgataaccatctgatatggacggaactatatattgtattcctattaatctggcattttctaagctaattgtttttttccaaatataccgtcgatggaactccaaatgtaatgtcacgcanatgtgtgtntttcatcgattgaatgggtaataataaaaaggcatgctggcagttacta

SEQ ID NO: 81984 - DNA, 319 bp, Zea mays
ctctaactcagttggttaggtggtctgagtagcactcctcgggtcctgggttcgacttcccgtgggagcgaattttagactgtggttaaaaaattcccctcgtctgtcccacgccaaagcacaggtctaaggcttagccccggtcgtggtcgttctcacatgggcttcaatgccgctgtcgtacccccccccccccccagtacctgcacgtcaggtttttttttcagcaaattccatctgataaggtaagaaatttataatgtaattcctattaatctggcattttctaagctcattgtcttttttccacatataccgt

SEQ ID NO: 81985 - DNA, 308 bp, Zea mays
gtgagtcgtattaatacgtggtctgagtagcactcctcgggtcctgggttcgacttcccgtgggagcgaattttagactgtggttaaaaaactctcctcgtctgtctcacgctaaagcacaggtctaaggcttacctccggtcgtggtcgttctcacatgggcttcaatgccgctgtcgtacccccccactccccagcgtacgtcatcgtcaatttggtcacacatgcgactatccatgctgatatggacggcgctcatgtagtctattcctactaagtctggcattttccagggctaagtgtttttt

SEQ ID NO: 81986 - DNA, 401 bp, Zea mays
  unsure (1)..(401): unsure at all n locations
agccatcgcgcaccgctccccgtgtcccctccttctcgcccggcaacgtcgaactcggctgtggnaacagaacaaacccatcaaccatggcgaactcggcgtcggggatggccgtgagcgacgagtgcaagctcaagttccaggagctcaagtcgaagcgaagcttccggttcatcacgttcaagatcaacgagcagacgcagcaggtggtggtggacaggctggggcagccgggcgacacctacgacgacttcaccggctccatgcccgagagcgagtgccgctacgccgtcttcgatttcgacttcaccaccgacgagaactgccagaagagcaagatcttgttcatctcctggtccccggacacctcgagggtcangagcaagatgctgtacgcgagc

SEQ ID NO: 81987 - DNA, 414 bp, Zea mays
  unsure (1)..(414): unsure at all n locations
gggtcgagcacgcgtccgaccacacgtccgacagcaattccacgacccagcaagaagtgaaggcgctcctctctcagatgtcatctgtgcggggcctcgatggttcttccagtgaaggatctcctagccccggtaccagcgctccgaacgaagagagcaaccctgcggcagcgagcaagaggccgtatctcgagaggaactactccgtgctggaaccttcagaagggagccagctcgccgacgacgtggaaggggaaagctctctcgagaacgtgaagaaacagctcgagctcaacaagaaggcaatggccgctctttacaaggagcttgaggaagaacggagcgcttcggcggtcgcggctagccagacgatggccatgatcaataggctgcangangagaaggctgcaatgc

SEQ ID NO: 81988 - DNA, 414 bp, Zea mays
  unsure (1)..(414): unsure at all n locations
gatggagctgcgggtacaaggacgtgaacaagccccccttcaatagcatgggcgcatgcggcaacatccccatcttcaaggatggtctgggttgtgggtcctgcttcgagatcaagtgcgataagcctgtggagtgctccggcaagcccgtggtggtgcacataacggacatgaactatgagcctatcgcggcgtaccacttcgatttagcaagcacggcgttcggcgccatggccaagaagggcgaggaggagaagctgcgcaaggcgggcatcatcgacatgcagttccgaagggttaagtgcaagtacgactccaaggtcaccttccaccttgaaaaggggtgcggccccaactacctgncactgttggtcaagtacgtcgacggcgacggtgacattgtggcagtggacg

SEQ ID NO: 81989 - DNA, 371 bp, Zea mays
agaccatcaccgaggccatcaccgccgtgcccaacaccttcgaggggcgcttcgtcatctacgtgaaggccggcacgtataaggagtacgtcaccgttcccaagaacatggccaacatcttcatgtacggcgacgggccgacacagacggtggtcaccggcgacaagagcaacgcaggcggcttcgccaccttcgcctcagccaccttctctgctgagggcaacgggttcatctgcaagtcgatggggttcgtcaacacggcggggccggaggggcaccaggcggtggcgatgcacgtgcagggcgacaagtcggtgttctacaactgccggttcgaggggtaccaggacacgctgtacgtgcacgccaac

SEQ ID NO: 81990 - DNA, 416 bp, Zea mays
  unsure (1)..(416): unsure at all n locations
aaacaatgcgatgagagccttgttcctcctggtcctcttctgcatcgtgcatggtgagaaggaagagtcaaagggcatcgatgcgaaagcgtccgggcctggtgggtccttcgacatcaccaagttgggcgcctccggcaatggcaagacagacagcacgaaggctgtgcangaggcatgggcatcggcgtgcgccggcactgggaagcagacaatcctcatacccaagggcgacttccttgtcggacaactcaactttacaggcccttgcaagggcgacgtgaccatccaggtggatggcaatctgctggcgaccacggacctaagccagtacaaggaccatggtaattggatcgagattctacgcgtggataacctggtcatcaccggcaagggaaaccttgacgggcaaggcc

SEQ ID NO: 81991 - DNA, 440 bp, Zea mays
cgtccgaagaagcaggatcgagccgaatcctccggaactcgccgccggggccaaccgacctcacactattgatcgaggatgtcgtacgcctacctcttcaagtacatcatcatcggcgacacaggcgtggggaagtcatgcctgctgctgcagttcacggataagcgcttccagcccgtgcacgatctcaccatcggcgttgaatttggcgcccgcatgatcaccatcgacaacaagcccatcaaactccagatttgggacacggctggccaagaatcattcagatctattactaggtcatactacagaggagctgctggagcccttttggtttatgatatcactaggagggagaccttcaatcatctcgcaagttggctagaagatgccaggcaacatgcaaatgctaacatgacagtgatgccgattgggaacaaatg

SEQ ID NO: 81992 - DNA, 410 bp, Zea mays
agattgagttcgctcaacatggtagtctctcacagcaccttcacgtcaaagagtttgagcatctggactgggctgcgaggatgagggtcatcatgggcgtcgcatactgccttcaatacatgcaccatgagctcagtccacctatggcgatccacgacgtgcggtctgacacaaccttcatttcagatgattatgctgccaagattgcagatgttggtgtatggaacgagcttgctgccaaagcgaaggctggaaaggaggacggcagcagccgtgctgaagctcctccggatctcccaagcaacgcctactgcttcggcgcgctcatgatcgagaccatatccgggagggttcctgacccgtatgatcacaaacccatatgcagctgggcttctgagcatctgaaagac

SEQ ID NO: 81993 - DNA, 409 bp, Zea mays
  unsure (1)..(409): unsure at all n locations
gattcatcgtgttcaagatcaacgagaacgtgcagcaggtggtggtggacaggcttgggggaccaggtgaaagctacgatgcgttcagggcctgctttcncgccaacgagtgccgctacgcggtgtttgattttgactttgtcactgatgagaactgccagaagagcaagatcttcttcatctcttgggccccagatgcatcgagggtgagaagcaagatgttgtacgcaagctccaaggaccggttcaagagggagctcgacggcattcaagtggagctacaagcaactgagccgagcgaaatgagcatggacatcatcaagtcgcgagccctctgaaacagcccggcatcagctcctgcatgcccgtcgattccttcggtgttggtaacggtcatccgttttcgtgt

SEQ ID NO: 81994 - DNA, 406 bp, Zea mays
aaaaaacgttgccaatcccatggagcatccgcttcaggatcgccgctgacatcgcaactggactcctcttcctcgaccaagcgaagccagaaccacttgtccaccgggacctgaagcccgccaacatcctcctcgaccacaacttcgtcagcaagatcagcgacgtcgggctcgcgaggctggtgccacagtccgcggccgacgtcacgcagtacaggatgacatcgacggccggcaccttctgctacatcgacccggagtaccaacagactggcatgctcaccaccaagtccgacgtgtactcgctcggcatcatgctgctccagatcatcacggcgaggtcgcccatggggctcacgcaccatgtggagaacgccatagagagaggagccttccaggagatcct

SEQ ID NO: 81995 - DNA, 406 bp, Zea mays
ggcgccgctcgggcctgtcccacgccgccgtcttccgcccgcagcaaccttacccgagccgactccgggacaccttcgccgcgtccatgcccgaccacgcgttccgactcctcgccatgctcctctccctcgaccctgccgcccgcggcaccgctgccgccgccctcgacgccgagtacttcacgacggcaccgtacgcatgcgaccccgggagcctgcccaagtacgcgcccaacaaggagatggacgccaagttccgggaagaatctagaaggaggagcaacctccggagccaaggcggcgagggggcgaagcggctgtcctgggggcacaagagcatgcagctgcaggacacgaaccagagccacgtgcacgccgaggaatcgctgcccgttgtggccaaaag

SEQ ID NO: 81996 - DNA, 404 bp, Zea mays
aatctgtccctctacggtgcttctgctcgccggcccaaaatcgcctcatcgaccacgcccccttccaggctcccgtctccatgggtctcctctcaaacaggattgggagggagagcctcaaggcgggggatcatatctactcctggagggcggcgtgggtctacgcgcatcacggaatatatgtgggcgatgataaggtgatccatttcacaagaggaagaggacaggaggtcggaacaggaactgtcgtcgatattattcttgtgagttccaccccaaaacgaagcaacacgccttgcccggtgtgcaccgacgaaaccagcgacagcagcacagagacgaacggcgtggtatcctcctgtctcagctgcttcctagctgggggtgctctctaccgtttcgag

SEQ ID NO: 81997 - DNA, 382 bp, Zea mays
accgcatctactacaccgtggaggggtccgcgacgcccggcaccctcccgccgcacgtgtccgcgtccgtcaacggcgtggccttcgtgggcacgctgtcagggcagctcttcttcggctggctgggcgacaagctcgggcgcaagaaggtctatggcatgacgctcatgctcatggtcctctgttccgtcgcgtcggggctctcgttcggccacaccccggcgtccgtcatggcgacgctgtgcttcttccgcttctggctcgggttcggcatcggcggcgactacccgctgtcggcgaccatcatgtccgagtacgccaacaagaagacgcgcggcgcgttcatcgccgcggtgttcgcgatgcagggcttcggcatcat

SEQ ID NO: 81998 - DNA, 419 bp, Zea mays
acgaggaggagtacgagaagaccggcaagatccccgacccggagtccaccgacaacgctgagttcaagatcgtgctcaccatcatccgcgacgggctcaaggctgaccccaagaagtaccgcaagatgaaggagaggcttgtcggcgtctctgaggagaccaccacgggtgtcaagaggctctaccagatgcaggagaccggcgccctcctcttccctgccattaacgtcaacgattccgtcaccaagagcaagtttgacaacctgtatggttgccgccactcactccctgatggtctgatgagggccaccgacgttatgatcgccggtaaggttgccgtggtctgcggatacggtgatgttggcaagggttgtgccgctgcactcaagcaagctggtgcccgtgtcattgtgaccgag

SEQ ID NO: 81999 - DNA, 389 bp, Zea mays
  unsure (1)..(389): unsure at all n locations
actcctccccaagaaaactggaattaaccggcaattttattgaaaagggaaatgaaaaggaaggccaaccaaaaattaagcggtacatgacaatgatggactccatgaccgatgcagagcttgacgggacggacccaaagctgatgaaccagtcacgaatcaaccggatcgctcggngatccggcangcgcgtggaggaagtggtgcacatgctggacgagtacaagcgaattgccaaggtgtggaagaaattgccagtgttgaacaacaacaggagatcggatatgaaccgcgacattangcgcataagcgatgcgattcctcccaatatgctgactcagcttggtggcatcgctgggctgcagaatatgatcaaacaaatgggcggg

SEQ ID NO: 82000 - DNA, 412 bp, Zea mays
accacacgtcgggttcttggatggttgcgcaacaactcccctggcggccccgccgggcccccttccaaccgttggcgcccattttcccaaagccgggcaagccaaacccctgaagccttgccggccttttgtacaagaaaaccaagggaagttcaacggcgggccgttgaaaaccgcccaagcgaccttctacggcgggcgggaccggtccggcaccacggcgggcgcgtgcgggtacaaggacacgcgcacgcaggggtacggcgtgcagacggtggccgtgagcacggtgctgttcggtgacggcacggcctgcggcgggtgctacgaagtgcggtgcgtggacagccctagcgggtgcaagcccgacgcggcggcactggtggtgacggtgaccgacctgtgcccgccc

SEQ ID NO: 82001 - DNA, 382 bp, Zea mays
gacgccggtgtggaaggtgatgacgaggcaccccatcttcgtcctctcggacacgctcgccgtcgaggcgctgcagaagatggttcaaggcaagttcaggcacctgccggtggtggacaacggcgaggtggtggccatgctggacatcgccaagtgcctctacgacgccatctcccggatggagagggcgtccgagaaggggaaggcggcgatcgccaacgtcgcggctggcgacgacaagtactccatcgtcgaagctctcaaggagcaaatgttcaggccctgcttgtctgccattgtcggcgaagactcaacggtcgtcatggtgtcgcctggtgattcggtccttgcagcgaccaagaggatggtggaagcgcatgcg

SEQ ID NO: 82002 - DNA, 410 bp, Zea mays
acgacggacccgcacatgaaggacctcttcgtcccgttccgatgcttctgcacccgcaaagacatcaattgcaaggacgtggtgctggacgagcacgacgtggccaagtccatcatcgagttctcggcgcaggcggccgtggagaagctcgtcctcggcgccacgacgaggggcggcttcgtccggttcaaggcggacatcccgaccaccatctccaagggcgccccagacttctgctcggtgtacatcgtcaacaaggggaaggtctcgtcgcagcgcaactccacccgcgccgcgccgcgggtgtcgccgctccggtcgcagatccagtcgtcgcagattgccgcaacgctcaagcccgagccgccgcagtcgcaccggtggtcctcgtcgtcgagaggccacgagca

SEQ ID NO: 82003 - DNA, 384 bp, Zea mays
tcggcaaccaccagaactccaaccgttcggccctggaaccttaagcctcttcgttccggctccggaatccaacggcggcgggaaaaaacgggcaattcccaaaacaggaaccgaaggaacaaggttggaggataaccccccgctaacaaaaacaataaagggtgcggtaaaaggaccccccccggggaacatctggggcaccgtcgtcgccacctggtacgacgtgccccgtgtggagcgccacgtcgcgctccctggccttatccggacgctcaagatgtgcggcacctacggggccaccttcgccaccatcgggggcctctacatcggcgtcgagcagctcgtgcagagccagcgcaagaagcgcgacttcgtcaacggggc

SEQ ID NO: 82004 - DNA, 432 bp, Zea mays
ccaccgccatcaccgtctccaacggccacttcacgaggcacgaccacgttatgctgttcggggccagcgacgccgcgtccaaggacagggagatgcaggtcaccgtcgccttcaaccacttcggcaaggggctggtgcagcggatgccgcgctgccgtcacggcttcttccacgtggtgaacaacgactacacgcactggctcatgtacgccatcggcggcagccggaaccccaccatcatcagccagggcaaccgcttccgcgccgtcgacgacagcaggttcaaggaggtgaccaagcgggagtacacgcagtacagcgagtacaagaactgggtgtggaagtcgcaggacgacctgttcctcaacggcgccttcttcaaccagtccggcggccagaacgagcgcaagtacgacaggctcgacctcatcc

SEQ ID NO: 82005 - DNA, 391 bp, Zea mays
  unsure (1)..(391): unsure at all n locations
cgggtcgaccagcgtccggatggtggcccggtcgggggccaaaacccggggcttccccaatggaaaggatttcgccaacggcttcaaaaacttcggcaacaagggcggaaacccggagcatttcgacccaagcataaacccgtcctacgccagggngctgcaggacgtgtgcagggactacctcaagggacccaccatcgccgcgttcaacgacatcatgacgcccggcaagttcgacaacatgtacttcgtcaacctcgagcgcggcctcggcctgctcagcaccgacgaggagctgtggacggacccacgcaccaagcccctggtgcagctctatgcatccaacgccacagccttcttcgacgacttcggccgcgccatggagaagctc

SEQ ID NO: 82006 - DNA, 379 bp, Zea mays
  unsure (1)..(379): unsure at all n locations
gcgtcgcatccgctccacaggatcctctgcgccaccgcaaccgtgtgaccgcccgtgccgccggcgatcccgatccgccgacccgtcccagccccgctcgcagccatgtcgccgtcggagccgacgcgggaggagagcgtgtacatggccaagcttgcggagcaggcggagcggtacgaggagatggtcgagttcatggagcgcgtcgcgcgctacgccgggggcgccggcggcngggacgagctctcggtggaggagcgcancctgctgtccgtcgcctacaagaacgtcatcggcgcccgcagggcctcgtggcggatcatctcctccatcgagcagaaggaggaaggccgcgggaacgaggcgcacgcggcatcca

SEQ ID NO: 82007 - DNA, 404 bp, Zea mays
aaagtgctcgggcaatccagtcacggtgtacatcactgacatgaactacgagcctatcgctccctaccacttcgacttgagcggcaaggccttcggctccctggcaaagcccgggctcaacgacaagattcgccactgcggcatcatggacgtcgagttcagaagggtgcgatgcaagtaccccgccgggcagaagatcgtgttccacatcgagaagggctgcaaccccaactacctggccgtgctggtgaagtatgtggcggacgacggcgacatcgtgctgatggaaatccaggacaagttgtcggctgagtggaagcccatgaagctctcttggggcgccatctggaggatggacactgccaaggcgctcaagggccccttctccatccgcctcaacagcg

SEQ ID NO: 82008 - DNA, 412 bp, Zea mays
atcgtcgtcgtctcactcaccccgccttcacgcctccctcaccaaataaggtcccgcccttttccgacattcacaggggggacaggaaatcagcggccatggcctcgattccggcgacgaccttcgccgtcatcttatccgtcctcttctgtgccgcggctggcaccgccgtcgacaacgacctccccgactacgtcatccagggccgcgtctattgcgacacctgccgcgccgggttcgtgaccaatgtcaccgagtacatcgcgggcgccaaggtgaggctggagtgcaagcacttcggcaccggcaagctcgagcgctccatcgacggggtgaccgacgggaacggcacgtacacgatcgagctcaaggacagccacgaggaggacatctgcgaggtggtcttggtgga

SEQ ID NO: 82009 - DNA, 414 bp, Zea mays
accacccccgactcgtggaagctcaacgagatcttcgccaccggcatcgtgctcggcacctacatggccatcatcaccgccgtcttcttctacctcgcccacgacaccgacttcttcacggacgtgttcggcgtgaattcgatcaaggagaacgacagggagctgatggcggcgctgtacctccaagtaagcatcatcagccaggcgctcatcttcgtgacgcggtcccggagctggtcgttcgtggagcggccgggcttcctcctgctcttcgccttcttcgccgcccagctggtggcgacgtgcatcgcggtgtacgccgactgggacttctgccgcatccaggggatcggctgggcgtggggcggcgccatctggatgttcagcatcgtcagctacatcccgctcgacgtg

SEQ ID NO: 82010 - DNA, 406 bp, Zea mays
ggctggttcgtggatggcggtgccacaacctctcctgctgtcgctgctggtcgccgtgctagcggtggccgccgatgtcgccaacgccggccacgccaagcccctaacgcctggcgggcgcgtggtacacgacaaccacggcaagttcacggccgggccgtggaaacccgcccacgcaaccttctacggcgggcgtgacgggtccggcaccacggcgggcgcgtgcgggtacaaggacacgcgcacgcaggggtacggcgtgcagacggtggccgtgagcactgtgctgttcggtgacggcgcggcctgcggagggtgctacgaggtgcggtgcgtggacagccctagcgggtgcaagcccgacgcggcagcgctggtggtgacggtgaccgacctgtgcccgccc

SEQ ID NO: 82011 - DNA, 386 bp, Zea mays
  unsure (1)..(386): unsure at all n locations
caacatcacgctggcgctcganggcaaggttgggacggtgacggtgaacggcaaagcgtacagcttcgagaagctgcactggcactcgccctccgaccacaccatcaacggccagaggttcccgctggagctgcacctggtccacaagagcgccgacggcgcgctggcggtcatcgggatcctctaccagctgggcgccccggactccttctactaccagctgaagcggcagctgggcgagatggcccaggaccggtgcgacttcgccgaggaggaggagtcgcgggtggaggccggcctcatccacctgcgctcgctgcagaagcgcaccggcagctacttccgctacacgggctccctcaccgtgccgccatgcaccgagaacg

SEQ ID NO: 82012 - DNA, 390 bp, Zea mays
cccacgcgtccgccacgcgtccgatcttctccgatccatcaacaatcgccgagagcgatcgagagataaataaagatgaagaaagtggcatcatcgtcagccgttctcttcgtgctagccctgacgctagtttgtgccccgctgatagcagaggcaaagaagaagagagtcgccgccgccgccgccgaggagaagaaggtgcaggacaacttctgctcgacactgtgcgagggcaggaaggggatggacctggtggtgtgcaaggagtcctgcgacctctcacagcgctccaacctggtgctgtacggccggattcagtgcaagggcaagtgcaccgagcagaagggcatcaccgcgccgcagatgaaggtgtgccaagaggcgtgcgac

SEQ ID NO: 82013 - DNA, 398 bp, Zea mays
  unsure (1)..(398): unsure at all n locations
gttatcctcctcttacattacaggtcatagctaagcaggtctgacangatgtcgtggcagacatacgtcgatgagcacctcatgtgcgagatcgagggccaccacctgacctccgctgccatagtcggccacgacggcgccgtttgggcccagagcaccgcattcccacagttcaagacagaggagatgaccaacatcatgaaggacttcgacgagcccgggttcctggccccgaccggcctcttcctcggccccaccaagtacatggtcatccaaggcgagcccggcgctgtcatccgcgggaagaagggatctggaggcataactgtgaagaagacagggcaagcgatggtggtcggcatctacgacgagcccaatgaccccgggccagtgcaaca

SEQ ID NO: 82014 - DNA, 427 bp, Zea mays
cctccatccgcgcgcatctcgcggtggtgctcctcctcctcctcccccggctcccggggcgggcgctctcctgttcctcctcctcctgctgctggtgccagggccgggagggcggcgcggaggtggcgctcatggggctcgccggggacgggtcggcggacaccgccaacctcagtaatagtgaaaatggtcggttcagttatggagttgcaagttctcccgggaaaagagcatcgatggaggacttctatgaggcaaggatagacgacgttgacggagagaaagttggaatgtttggtgtgtatgatggtcatggaggagtcagagcagctgagtacgttaagcagcatcttttcagcaatttaatcaaacacccaaagttcatcactgattacaagggcgctattgctgaaactttacaacgcac

SEQ ID NO: 82015 - DNA, 420 bp, Zea mays
cggacgcgtgggcggacgcgtgggcgccgccggccaagctgccggagggccccagcgggtgggcgtggtccatcaaccagtgcaggtccttccgctggaacctgacggccagcgcggcgcggcccaacccgcaggggtcgtaccactacggccagatcaacatcacccgcaccatcaagctcgccatgggccgcggcaaggtcgacggcaaggagaggttcgccttcaacggcgtgtcgcacgtggacccggaaacccccgtcaagctcgccgagtacttcaacgccagcgacggcgtgttcaagtacaacctcatcggggacgtgccgccctccaacacggcccccaccaagatggcacccaacgtcatcagcgccgagttccgcacgttcattgaggtggtcctcgagaaccccgaga

SEQ ID NO: 82016 - DNA, 425 bp, Zea mays
ggtcgaaataccgggtcgaccacgcgtcggggggtcattcgccatcctggcccgggggaaaggggggtccccggtttgaatagttgatttccatttcagggtgcgcatctgaagggtgcgccaggtgctcttgctgtgtgatctttgtcgccttgtgacgctggggaccgggttattggcgggagtttgtcagaataatacataaagaactggtgccacgagatcgggggacttcagatcagggaaaccttgagccatgggcacagttgtggatgccgctccagcagttgtggctgaggtcactgagaacatgttgggtggcaagaaagttacagttgtatttgtcctaagtggtcctggaagtggaaaaggcacacagtgtgccaacatcgtggagcactttggattcacccatcttagtgctg

SEQ ID NO: 82017 - DNA, 399 bp, Zea mays
  unsure (1)..(399): unsure at all n locations
gccatcagcgtggtcagccgctcctcatcccggtcccgtccaacaaccccccgccggaaaacaacaacgtggtgctcatcggagactggtacaccaaggaccacaaggtgctagcccgccagattcgacgccggcaagggcgtgggccgccccgcgggcgtgctcatcaacggcaagggcggcaaggacctggaggccgcgcctgccttcaccttcgaggccggcaagacgtaccgcctccgcgtctgcaacaccgggatcaaggcgtcgctcaacttccgcatccagggccactacatgaagctggtcgagctggagggctcccacaccctgcagaacacgtacgactcgctcgacgtccacgtcggncactgcctctccgtgctcgtcgacgccgac

SEQ ID NO: 82018 - DNA, 399 bp, Zea mays
  unsure (1)..(399): unsure at all n locations
cacaccttctataacgaactccgtgttgcgcctgaagagcaccctgtgctgctgaccgaagccccactcaacccaaaggctaacaaggagaagatgacccaaatcatgtttgagactttcaatgttcctgccatgtatgtcgccatccaggctgtgctttccctgtacgccagtggacgtacaactggtattgtattggactctggtgatggtgtcagccacacagtgccaatctatgaaggttatgcccttcctcatgccatcctgcgccttgaccttgctgggcgtgacctgactgacagcctgatgaagatcctcactgagagaggttactccttcaccacctctgctgaacgcganattgtaagagacatcaaggaaaagcttgcatatgtggct

SEQ ID NO: 82019 - DNA, 410 bp, Zea mays
  unsure (1)..(410): unsure at all n locations
acacgcgaccgctgcagttcaacctctgacagatgcagctaaggattttctcgctgtaaagtacaaggatttgattaagttccaagatgaagtgatgaacatccctcgtgctggaatcgaagccatcttgtcaagtaatgacctccaggtggcatctgaagataccatctatgacttcttactcagatgggcccgtgcacaatacccgaaatcagaagagagacgtgaggtccttagttctcggctgctccctcttgtgcgattcagtcatatgacgtgtangaagctgcggaaggtcctagcctgcacagatatagaccacgagcaagcaaccaagtgtgtcaccgaggctcttctgttcaaagctgatgcaccacaccggcaacgagctcttgcagcggacgcaataa

SEQ ID NO: 82020 - DNA, 417 bp, Zea mays
  unsure (1)..(417): unsure at all n locations
ctccgacttcacaacctttaacaacctcctgtctcagacgaagctcgcggaggatatcaaccgccggcagaccatcaccgtgctcgccgtggacaacggcgccgccggtggcatctcctccctcccatcagacgtccagcggaaggtgctctccatgcacgttgtcctcgactactacgacaccgccaagctggaggccatcaagaaccactccgccctgctgacgactatgttccagtcctccggccaggccaccgaccgcatgggcttcctcaacttcaccaagcgctccgacggtgtcatggtgttcggctccgctcagcccggagcgcagatgacctcccatatggtcaagtccgtcacttcncgcccgtacaacatctcagtgctgcaggtcagcgcccccatcgtgccgcc

SEQ ID NO: 82021 - DNA, 428 bp, Zea mays
ctccctgggcccaacaagttcaatggccaccaaaggcaaccccgggccgtcaacccccggaaaaaaggattctgaaggcataccggtgaaaaaaaccggaaaggccctggtaatcggaatctacaacaagcccatgacccctgaacattgcaacatggtggttgaaaggctcggtgactacctcttaaagcaaggcctgtgaatgcatcaaaacaacgacaccaacgccaaaattaattaattagtagtctcaatgccctgggattgtgcgtggccgctccgttgaacaccacccatccttcgttcggcattttttcccccctttgtttatataatttattgtatcgttttggcaaataattttgtgattcgaccccaaagcaagtttggttgtcctacgaattgtaaacctgggacaatatataatg

SEQ ID NO: 82022 - DNA, 424 bp, Zea mays
atttgaaataattgggaataaatagttcgtgaatccctgaagcgtgcatatatatattcctgccaagataaaggtaatggagtcgtcacgcaggttccagccggccgtcatcctgcttctcctgctcattgtgtccaccgatatggcacaggcaagggaatgcgagaagtacagtgagcgatttgttggggcatgcatgatcgcagacaactgcgccaatgtgtgccgcggtgagggcttcttggccggcaggtgcagcaccttccgccgccgctgcatctgcactaagcagtgctaaacaagatcgctcgatcgcttgccatgcatcgacaacctattcttaataacgttcattatctcgttcttatttatgacgaatgtcatgtatgttctggtgactgtcatgtatattctgatgactgtc

SEQ ID NO: 82023 - DNA, 378 bp, Zea mays
catcttctccgatccatcaacaatcgccgagagcgatcgagagataaataaagatgaagaaagtggcatcatcgtcagccgttctcttcgtgctagccctgacgctagtttgtgccccgctgatagcagaggcaaagaagaagagagtcgccgccgccgccgccgaggagaagaaggtgcaggacaacttctgctcgacgctgtgcgagggcaggaaggggatggacctggtggtgtgcaaggagtcctgcgacctctcacagcgctccaacctggtgctgtacggccggatccagtgcaagggcaagtgcaccgagcagaagggcatcaccgcgccgcagatgaaggtgtgccaagaggcgtgcgacaaggactacg

SEQ ID NO: 82024 - DNA, 395 bp, Zea mays
aggtgcaagcccagcgcggcggcgctggtggtgacggcgaccgacctgtgcccgcccaacgaccagcagtccgcggacagcggcgggtggtgcaacccgccgcgggagcacttcgacctcagcatgcccgcgttcctccagatcgcgcaggagaaggccggcatcgtgcccatctcctaccgcagggtggcgtgcacgaagcagggcggcattcggtacaccatcaccgggaacaagtacttcaacatggtgacgatcaccaacgtgggcggcgccggcgacatcgcggcagtgtcggtgaaggggagcaagcgcgttaagtggacggagatgaatcgcaactgggggcaagtgtggcagaccggggaggacctcacatgcgaatcgctgacgtt

SEQ ID NO: 82025 - DNA, 381 bp, Zea mays
cccacgcgtccgctctcctcgccccgctctagacgatcgatggccgcgacggcggcggaggagatggagaggatggtggaggcggagtgggaggaggggatgaggaagaggaagcggtacgggctggtggagtaccgggcgctgccggcttacctgcgggacaacgagtacatccaccgccactaccgctgcgagtggccgctcccgcaggttctgctctccgccttctccatccacaacgagaccctcaacgtctggacgcatcttataggatttttcatctttctcgctctgaccatatacacagcaacacaagttccaaatgcagtagatatccggagcttgcagcatttgccagatgtactgagaaaggctgatatt

SEQ ID NO: 82026 - DNA, 407 bp, Zea mays
gggtcgagcacgcgtccgctctcactgtctcgcggcccggggaaaaaggagggctccgcggtccccggggaaaaccccgcaattgcggcggccgccctgacgggggaaaatggttgccaagaattcaaaattgatctcaacagcccccttgttttccaagtttgccatcttgaggaacggtaccaggaatgggttcaccaaccgatcgtcagcaaggagggtccacgctttttcggaaatgatgtcctggagttcttgactcgcacgaagtggtgggctgtgccaactatatggctgcctgttgtctgctgcctgctcgtgaaatctattctgatgggtcatactgttcaggacgtagctatgatggctctgtttgggatatttatttggacgctgatcgaatacac

SEQ ID NO: 82027 - DNA, 427 bp, Zea mays
  unsure (1)..(427): unsure at all n locations
cccacgcgtccgcggacgcgtgggcgatcaccaatgtgggcggcgccggcgacatcccggcggtgtcngtgaaggggagcaagcgtgtcaagtggacggagatgaagcgcaactgggggcaagtgtggcagaccggggaggacctcacctgcgagtcgctgacgttccgggtgatgaccagcgaccaccgcaaggccacctcatggcacgttctccccgctgactggaagttcggtgtcacgtaccaggcatccanagaacttctaagtagccacttttcctcctcttcttcaacctgcatatgcccacaagcaaccatgcagatgataacatgcatcatgcatgcatattcattctttcgctcatgcattccgatatggtgccggagttaanaaaatgtaaatcaatgtgcaaactcaaatgacat

SEQ ID NO: 82028 - DNA, 273 bp, Zea mays
  unsure (1)..(273): unsure at all n locations
cacgccaaagcccctgacgcctggcgggcgcgtggtacacgacaaccacggcaagttcacggccgggccgtggaaaccntgccacgcgaccttctacngcgggcgggacgggtccggcaacacggcgggcgcgtgcgggtacaaggacacgcgcgagcaagggtacngcgtgcagacggtggctgtgagcacggtgttgtttggcgatggcgcggcctgcggcgggtgctacgaagtgcggtgcgtggacagccccagcgggtgcaagcccga

SEQ ID NO: 82029 - DNA, 414 bp, Zea mays
ctgctcgccacgcccctcgcagacggagcttccgaggcagaggcggcgggcctcgcgcagggcgcgtccgaggcggcggcgccggacgcgggcgcggacgcgcagcagcagcacctcctgccgcggcccctcgtcatcgagctcccgtcgtcgcgggccgaggacgaggacgagcccggcgccgacgccgtgccgccggacgtgcgctgcgccagctggcggctggcggcggaggccaacaacctcgcgccgtggagggcggtgccgccggagtgcgcgccgcacgtgcgggactacgtcaccggcgtcgcctaccgctccgacctcgacctcgtggcgcgggagtccgccgcctacgcgcgcgccgctgcgccgctcggggccgacgggcgcgacgcctgggtcttcgacgtc

SEQ ID NO: 82030 - DNA, 446 bp, Zea mays
gtcgatacacgcctctacacacacttctgttaatatactaactcgacccaagatttaataaagtcaaggtacccaaaaacaaacccatgggatataatgcttggcatgaacctctgggggaccatatataatgctgtaattatgtttgttgcgccattactattcagtaactggccatatgcaaatggttttgaggcattgagattttgccaggagaacccagaggtggcctgggacattttcctattctgcctatgtggcgccgtggggcagaacttcatcttcttaaccatcagccggtttggctctcttactaacacaacaatcactaccacccgtaaattcatgagcattgtggtttcatccgtcatcagtggcaatccattatctttgaagcaatggggtagtgttgtgatggtcttcttaagcctctctatccaaatata

SEQ ID NO: 82031 - DNA, 336 bp, Zea mays
aaacagattcagagcccgagcccgagccccagccccagaccaacgacgagaaaggacaatctgcggcggacctacccgaagtcggaggcagggcaaaaggcccgatcccccctccccgccggttgccgcgctcgtgccacggtgcgctagccccgtcgacgccggcggacagcgtgcactatgggttgctcctcctccgtgccagctacaaatactggagggctgaacactatcagcaacgatagctctccagccatcagttcaaaggacttgcgtgctaagttggtattgctgggagactcaggtgttgggaaaagttgcattgttcctcgtttt

SEQ ID NO: 82032 - DNA, 427 bp, Zea mays
cacacacatcaggtaccatctcggtaatgatgtctggacgggccacttatgacagacctgcaccgccgtcgtcaagaagggcgaccacagaggccatacagtggccgtcatgatcatctctaaagctaacatgacatccggcatttccagtgcagatgttcgtatggacgtcaagattttgaaatccctatcagggcaacataatctcgtcatattccatgatgcatgtgattgacccctcaatgtctacaatgtcatagtactaagtgcaggtgaagacttgctagacagaattttaccaaaatgtgggagatatccatgggaatatgccatagctatcattgtacagattttgagcgtacaggccttcagtcatcatcatggagtaatgcatcgtgatttgaagccagagaattttctcgtcaca

SEQ ID NO: 82033 - DNA, 404 bp, Zea mays
  unsure (1)..(404): unsure at all n locations
gtgaccatcaccaagactatgaagaacgtgaccctcttangtgacggctccaagaagtccatcgtcaccggcaagaagagcttcgccgacgggatcacgactttcaagacagcaaccttcactgcgcaaggcgacgggttcatggcgatcgggatggggttccagaacacggccggcgcggagaagcaccaggcggttgcgctgctggtgcagtcggacaagtccatcttcctcaactgcaagatggacgggttccaggacacgctgtacgcgcactccaaggcgcagttctaccgcaactgcatcatctccggcacggtggacttcatcttcggcgacgcggcggcggtgttccagaactgcatcctggtgctgcggcggcccatggacaaccagcagaacat

SEQ ID NO: 82034 - DNA, 405 bp, Zea mays
ggcgtggcgctgggcgactacttcctcggccccagcctcgacgctctggtgcagcagctcgccgagaacgacgcgggacggcacgggacgccgccggccaagaaggaggccgtggaggcaatgccgaccgtggaaatcgccggtggcaatggcaacgatgacgacacggccagctgccccgtctgcctggaggactacgcggccggcgagcgcgctcgggagatgccctgcaggcacaggttccactccaattgcatcgttccgtggctcgagatgcacagctcctgccctgtctgccggttccagctgccggccaccgacgacaagggctcatgcagcagcggcgacggtggttttgtcagtgtcgacgcggatggtgaaggcaatgacaacggcggcggcgat

SEQ ID NO: 82035 - DNA, 434 bp, Zea mays
cgggtcgacccaaacgtccagcgacacctgccgcgccgggttcgtgaccaatgtcaccgagtacatcgcgggcgccaaggtgaggctggagtgcaagcacttcggcaccggcaagctcgagcgctccatcgacggggtgaccgacgggaacggcacgtacacgatcgagctcaaggacagccacgaggaggacatctgcgaggtggtcttggtggagagcccgcgcaaggactgcgaccaggtgcaggcggacagggaccgcgccggcgtcctgctcaccaggaacgtcggcatcagcgacaacctgcgccccgccaacccgctcggctacctcaaggacgtgccgctgcccatctgcgcctcgctgctcaaacagttggactcggacgacgacgacgatcagtaatagcacatcgacgacgacgatcgatatg

SEQ ID NO: 82036 - DNA, 376 bp, Zea mays
  unsure (1)..(376): unsure at all n locations
tggctcaacatcagccagctcgcgaaaataatgaagagccgcagcatggcatcatcggccgcgctcttggtgctagccctcgcgctagtggcggccaccgccccacaggtagcggaggcaaagaagaagagagcggcggagagcggcgaggcggcggaggcgaagaagatccaggacgacttctgctcgacgctgtgcgagggcaagaaggggacggacctggtcgtgtgcaaggagtcctgcgcgctctcccagcagtccaacctggtgctgtacggcaggatccagtgcaagggcaagtgcaccgagcagaagggcatcacggcgccggccatgaaggtctgccangaggagtgcgacaaggcgtacgtggtga

SEQ ID NO: 82037 - DNA, 433 bp, Zea mays
gtgacatcaagccagacaacttccttatgggcttaagtcggaaagctaatcaggtctatatcattgattatggacttgctaagaaatacaaggaccttcatactcataaacacatcccgtacagggagaacaaaaatctgactggaacagcacgttatgctagtgtgaatactcatcttggaatagaacaaagtaggagagatgatctggagtctgctggctatcttctgctatattttttaagaggaagcctcccatggcagggtcttaaagctggcactaagaaacagaagtatgacaaaattagtgaaaagaaaatgcttacgtcagcagaggttctttgcaaatcttacccgtcggagttcgtctcatatttcaactattgtcgctccctgcgatttgaagacaggccagactactcttttctgaagaa

SEQ ID NO: 82038 - DNA, 426 bp, Zea mays
gcaggtccagagatctcgatcggtcctcttgcagaaacgaggaaagaaaacatgtcttctcgctgggttagggcggaggtgtacccgctgttcgcgacgacaggggtggcggtggggatctgcgtgatgcagctggtgcgcaacatcaccaccaacccggaggtgcgggtgaccaaggagaagcgggcggccggggtgctggacaaccacgacgaggggcggcgctactcgcagcacggcgtgcgcaggttctggctctccaagcgccgcgactacatgcaggccatggacaaggtgcccacggaccctaataagtagacgacgacgatataccccaatgcatggcaagaagatatatatatcagcacaacgcaactgcatgcgatgctgcttgttgctgcaattaatccactatactatatacta

SEQ ID NO: 82039 - DNA, 418 bp, Zea mays
cgaccacatctccatgtccaactgcgaggacggcctcatcgacgtcgtgcagagctccacggggatcaccatctccaactgccacttcaccaaccacaacgacgtcatgctcttcggcgccagcgactcctggccgcaggaccagatcatgcagatcaccgtcgccttcaaccacttcggcaggggcctggtgcagcggatgccaaggtgccgctggggcttcttccacgttgtcaacaacgactacacgcactggctcatgtacgccattggcggcggcgacgcgccaaccatcatcagccagggcaaccgctacatagcaccaccaaacatcgccgccaaagtgatcaccaagcactacgcggaagaaggcgtgtggaagaactgggtgtggcacacggaggacgacctgttcatg

SEQ ID NO: 82040 - DNA, 417 bp, Zea mays
gaaaaactggatcaaggcaatggccatgacagcatcacttttcccatttatgtgctttggaatcggcttggtgcttaacactattgctattttctatggatcgttagctgccataccatttggtacgatggtggttgttttcatcctgtgggccttcatctctttccctcttgcacttttgggaactgttgtcggtagaaattggagtggtgctccaaacaatccctgtagggtgaagactattcctcgccctattcctgagaagaaatggtacctcacaccatctgtcattgcgcttatgggaggactgcttccttttggtagtatctttattgagatgtactttgtcttcacatcgttctggaactataaggtctactatgtttacgggttcatgttgctggtctttctgatact

SEQ ID NO: 82041 - DNA, 432 bp, Zea mays
gaaccctacctcacgtcccggatcccatccggcggccaaggggagttacacgctagccggcggtcggccagccgccgccaaccgcctcagccccaacagtcgcaccgccgccgccgaggcaaactcgaagccacccccgccgccgcagccacagccgcgccgagcttgagccgtcgttgctccgctgaatcgcccccatcgtctctcctgaagagagaggacatttattgagacagcatgcctaagataaagacaagtcgtgtcaagtatcctgaaggatgggagcttattgaaccaaccatccgtgagttggatgccaaaatgagagaagctgaaaatgatccacatgatggaaagagaaagtgcgaagctctctggcctatttttcgtatttctcatcaaaggagccgctacatatatgatctttactac

SEQ ID NO: 82042 - DNA, 412 bp, Zea mays
cccacgcgtccgcccacgcgtccgcccacgcgtccggtcgcctaattctttcgatcgaattaggcgccttcttcgtcccacgctccgtctttatttgtaatctgaagcttacaggaacatttgagtggatcatggacggattggtaggcctcttgaaagtccgggtggtgaggggcatcaaccttgcctaccgcgacgcaagaggcagcgatccgtatgtcgtcctacgacttggcaagaagaaacttaagacgagcgtgaagaagagatctgtgaaccccatctggcacgaggagctaactctgaccgtcacagatcccagcctagctctgaagctggaggtgttcgacaaggacacgttcagcagggacgacccgatgggggacgcggagatcgacgtggcgccgctggt

SEQ ID NO: 82043 - DNA, 410 bp, Zea mays
agcgatctcctctccctctccctctccgatccattctccagcgcagcgaagtaaacatgtctgaccgggcaaagatgtcgtggcaggcgtacgtggacgagcacctgatgtgcgagatcgagggccaccacctcgcggcggcggccatcgtcggccacgacggtgccgcctgggcgcagagcacggcgttccccgagttcaagaccgaggacatggccaacatcatgaaggacttcgacgagccagggcacctcgcgccgacaggcctgttcctcggacctaccaagtacatggtcatccaaggcgagcctggtgccgtcatccgtggcaagaagggatcaggaggcatcaccgtgaagaagacagggcaggcactcgtggttggcatctacgacgagccgatgacgcct

SEQ ID NO: 82044 - DNA, 434 bp, Zea mays
agagccttgtgacatgggctacaccgaggcttagtgaagacaaggtgaggcaatgcgtcgatccaaggctcggagacgaataccctccaaaggctgtagccaagatggctgctgtggccgccctctgcgtgcaatacgagggtgaattccgtcccaacatgagcatcgtcgtcaaggctctgaaccccttgctgcacagccggtctggcaaccgccctactgcctcgtcggcctcccacgctgccgagcgatccggactgtgatttctcatcgctgcgacaactttgggttcacgaaaaaggaccgtcttgtggagcgttggtgttgctgtgtcgtgactgccaaagccttggcgcagagaagagctttgccatgcagctgtgtattgtaaattgttttgtaagcgatgcgcctcctggtttgtgtgccctgtc

SEQ ID NO: 82045 - DNA, 417 bp, Zea mays
cccacgcgtccgcccacgcgtccgcccacgcgtccgcctgggcaccatgctcgtggccggcggcctggccggggtcgccagctgggtgtgctgctacccgctggacgtggtcaagtcgcggctccaggcgcagggcgcggcgtcggcgcccaggtaccgcggcgtcgtcgactgcttccagaggagcgtccgggaggaaggcctccccgtgctgtggcgcggcctcggcaccgccgtcgcccgcgcgttcgtcgtcaacggcgccatcttctccgcctacgagctggccctgcgcttcattgccagcggcggcggccccaggctggtcatggaggacaagtgagtcagactggaccatgttgtacataggctagtataagtatccattccagtggttggtggagagtaccatgccac

SEQ ID NO: 82046 - DNA, 433 bp, Zea mays
cgtgaacaacggggaggtgtccggggtcacgctgctcaactccaagttcttccacatgaacatgtaccggtgcaaggacatgctgatcaaggacgtgaccgtgacggcgcccggggacagccccaacacggatggcatccacatgggcgactcatccgggatcaccatcaccaacaccgtcattggcgtcggcgacgactgcatctccatcggccccgggacctccaaggtgaacatcaccggcgtgacctgcggccctggccacggcatcagcatcggaagcctagggcggtacaaggacgagaaggacgtcacggacatcaacgtcaaggattgcactcttaagaagacgatgttcggcgtccgcatcaaggcgtacgaggacgccgcctccgtgctcaccgtctcaaagattcactaccagaatatcaag

SEQ ID NO: 82047 - DNA, 401 bp, Zea mays
gttatcctcctcgatcttaattacaggtcatagctaagcaggtctgacaggatgtcgtggcagacatacgtcgatgagcacctcatgtgcgagatcgagggccaccacctgacctccgctgccatagtcggccacgacggcgccgtttgggcccagagcaccgcattcccacagttcaagacagaggagatgaccaacatcatgaaggacttcgacgagcccgggttcctggccccgaccggcctcttcctcggccccaccaagtacatggtcatccaaggcgagcccggcgctgtcatccgcgggaagaagggatctggaggcataactgtgaagaagacagggcaagcgatggtggtcggcatctacgacgagcccatgacccccggccagtgcaacat

SEQ ID NO: 82048 - DNA, 406 bp, Zea mays
ggctagttcgtggatggcggcgccacgacctctcctattgccgctgctggtcgccatgctagcggtggtcgccgatgtcgccaacgccggccacgccaagcccctgacgcctggcgggcgcgtggtacacgacaaccacggcaagttcacggccgggccgtggaaacctgcccacgcgaccttctacggcgggcgggacgggtccggcaccacggcgggcgcgtgcgggtacaaggacacgcgcgagcaggggtacggcgtgcagacggtggctgtgagcacggtgttgtttggcgatggcgcggcctgcggcgggtgctacgaggtgcggtgcgtggacagccccagcgggtgcaagcccgacgcggcggcgctggtggtgacggcgaccgacctgtgcccgccc

SEQ ID NO: 82049 - DNA, 420 bp, Zea mays
cccacgcgtccgcccacgcgtccgcccacgcgtccgcccacgcgtccggaagggcatcaccgcgccgcagatgaaggtgtgccaagaggcgtgcgacaaggactacgtggtcaaggcggctgaggtcaccaaggcctgcaacaccacctgcgccaaggagaagcagcctctgctcagcgagaactgcaggaggtcctgcacccctcctccttcctgaacgcagagcacgcccgccggtcgtcgtcttctgcctgcttgcgtgacactgaatcactgatacatcatacatgcatgcatgggatgcgatgacgatttgatgcatgcatgcatgggtatacctaccaatttgatgaccgacgatgtatagtttcgtcgactgcttcatacacatatatagcagcccaattaatgtaacgtcac

SEQ ID NO: 82050 - DNA, 194 bp, Zea mays
caatgtgtttggttgttggatgctgagagattggttctcagctcagatgcaagctgcgcctagcctgtgtaggtttgtgctggtacattgagagctcttatttatttgctttgattgcaattaaccaggatgaccatagcccttgtttggtttgctgtttttataagttgcatgaacacaacttctgtttggtt

SEQ ID NO: 82051 - DNA, 402 bp, Zea mays
agggagagtacttttgtgatatatgcaaattttatgatgatgatacagacaaagggcagtaccattgcatcgattgtggcatatgcagggttggtggcaaggaaaacttcttccactgtgtgaagtgtgggtcctgctattctgttatactccgtgataaccatcagtgtgtggagaactcaatgaggcagaattgcccaatctgttatgagtatctatttgactcattacaaggaacaagagttctgaactgtggacacacaatgcacttgacatgttttgaagaaatggtggcgcataacaaatacacttgtccaatatgctctaaaacagctcttgatttgacacatcattgggaaatgttggatcaagagatcgaagccacgatcatgcctcctgtgt

SEQ ID NO: 82052 - DNA, 332 bp, Zea mays
gcacgcgtccgatcatcatctccgatgcatcaacaatcgccgatagcgatcgagagatacgtcaagatgagtaaagtggcatcatcgtcagccgttctcttcgtgctagccctgacgctaatgtgtgccgcgctgatagcagaggcagagcagaagacattcgcagccgccgccgccgaggagaagtaggtgcatgacaacttctgctcgacgctgtacgatggcacgaatgggatggacctgatggtgtgcaaggagtcctgcgacctctcacagcgctccaagttgatgttgtaccgtaggatccaatgcaatggcaagtgcaccgagca

SEQ ID NO: 82053 - DNA, 398 bp, Zea mays
cgcggcctgcggcgggtgctacgaggtgcgctgcgtggacagccccagcgggtgcaagcccagcgcggcggcgctggtggtgacggcgaccgacctgtgcccgcccaacgaccagcagtccgcggacagcggcgggtggtgcaacccgccgcgggagcacttcgacctcagcatgcccgcgttcctccagatcgcgcaggagaaggccggcatcgtgcccatctcctaccgcagggtggcgtgcacgaagcagggcggcattcggtacaccatcaccgggaacaagtacttcaacatggtgacgatcaccaacgtgggcggcgccggcgacatcgcggcagtgtcggtgaaggggagcaagcgcgttaagtggacggagatgaagcgcaactgggggc

SEQ ID NO: 82054 - DNA, 403 bp, Zea mays
accctcgtctcaccctccctccctcacacaaataataaggaaaggtcccgcccttttcctccgacatccacaaggggggaagggaaaacacgtacattcaaccggcggcaataatggcctcggttccggctccggcgacgacgaccgccgccgtcatcctatgcctatgcgtcgtcctctcctgtgccgcggctgacgacccgaacctccccgactacgtcatccagggccgcgtgtactgcgacacctgccgcgccgggttcgtgaccaacgtcaccgagtacatcgcgggcgccaaggtgaggctggagtgcaagcacttcggcaccggcaagctcgagcgcgccatcgacggggtcaccgacgcgaccggcacctacacgatcgagctcaaggacagcca

SEQ ID NO: 82055 - DNA, 418 bp, Zea mays
cccacgcgtccgcccacgcgtccgcccacgcgtccgcccacgcgtccgcccacgcgtccgggctgtgcaggaggcatgggcatcggcgtgcggcggcactgggaagcagacaatcctcatacccaagggtgacttccttgtcggacaactcaacttcacaggcccttgcaagggcgacgtgaccatccaggtggatggcaatctgctggcgaccacggacctaagccagtacaaggaccatggtaattggatcgagattctacgcgtggataacctggtcatcaccggcaagggaaaccttgacgggcagggcccagccgtgtggagcaagaactcctgcaccaagaagtacgactgcaagatccttcccaactcgctggtgatggacttcgtgaacaacggggaagtgtccggggtc

SEQ ID NO: 82056 - DNA, 412 bp, Zea mays
  unsure (1)..(412): unsure at all n locations
aagactgacagcgacgatgatgccacagctgcgtagcctcgtcgcgctggtcctcgtggccacggccatagccgccgctcccggcgttgggtttgtcgtcaccggccgcatctactgcgacaactgccgcgccgggttcgagacaaacgtgtcccacgccatccaaggcgcgacggtggagatggagtgccgccacttcgagtcgcagcaggtccacgacaaggcggaggcgacgacgggccccggcggctggtacaggatggagatcagcggcgaccaccaggacgagatctgcgacgtgcgcctgctcaagagccccgaggcggactgcgccgagatcgaccactcccgcgaccgctgccgcgtcncgctcacccgcaacgacggcatcaagcagagcggcgtccgctac

SEQ ID NO: 82057 - DNA, 377 bp, Zea mays
cggacgcgtgggctgcagtcatctcctccatcaccaccaccaagctcaacaacagccagctcgcgaaaataatgaagagccgcagcatggcatcatcggccgcgctcttggtgctagccctcgcgctagtggcggccaccgccccacaggtagcggaggcaaagaagaagagagcggcggagagcggcgaggcggcggaggcgaagaagatccaggacgacttctgctcgacgctgtgcgagggcaagaaggggacggacctggtcgtgtgcaaggagtcctgcgcgctctcccagcagtccaacctggtgctgtacggcaggatccagtgcaagggcaaatgcaccgagcagaagggcatcacggcgccgggcatg

SEQ ID NO: 82058 - DNA, 424 bp, Zea mays
ataaatagttcgtgaatccctgaagcgtgcatatatatattcctgccaagataaaggtaatggagtcgtcacgcaggttccagccggccgtcatcctgcttctcctgctcattgtgtccaccgatatggcacaggcaagggaatgcgagaagtacagtgagcgatttgttggggcatgcatgatcgcagacaactgcgccaatgtgtgccgcggtgagggcttcttggccggcaggtgcagcaccttccgccgccgctgcatctgcactaggcagtgctaaacaagatcgctcgatcgcttgccatgcatcgacaacctattcttaataacgttcattatctcgttcttatttatgacgaatgtcatgtatgttctggtgactgtcatgtatattctgatgactgtcatgtatcttgttcatgt

SEQ ID NO: 82059 - DNA, 429 bp, Zea mays
gtttgatttccagaagtacatcaagcggtctctggaggatgacttcaaggtgatcgtggggatcagtcctcctctgtgggcttctgctctcatcttcctcttcctcaacgtcaatggatggcacaccatgctctggatctccatcatgccggtggtgatcatcctgtcggtggggacgaagctgcagggcatcatctgccgcatggcgatcgacatcacggagcgccacgccgtcatccagggcatcccgatggtgcaagtcagcgactcctacttctggttcgcacgccccaccttcgtgctcttcctcatccacttcaccctcttccagaatggcttccagatcatctacttcctctggattctgtatgagtacggcatggactcgtgcttcaacgactccgaagaattcgtctttgcacgactctg

SEQ ID NO: 82060 - DNA, 433 bp, Zea mays
atccatacgcacagcgatgcaccagcacgagatactagccatcatgcgcctgtcgtccctcctcctcgtcgtggccgccctctcggcgcgcgccgcggcgcagcaggtgccgccggtgggcggcagcgctctgaagccggactactacagccagtcgtgcccgcgcgcggagaggatcatcgcggaggtgatgcagacgaagcagatggcgaacccgacgacggccgcgggcatgctgcgcgtcttcttccacgactgcttcgtcaccgggtgcgacgcgtcggtgctgatcgcgtccacccagttccagaagtcggagcacgacgcggagatcaaccactcgctccccggggacgccttcgacgccgtggtgcgcgccaagctggccctggagctggagtgccccggggtggtgtcctgcgccgacatcctc

SEQ ID NO: 82061 - DNA, 343 bp, Zea mays
  unsure (1)..(343): unsure at all n locations
atagggtgcttgttgacactgctgcaccaatagaatctgttaaagaggctgtaagcaaatttggaggcattcttgactggaaagagagacgtaagaatgtccagaatgagcttgataaggcattggaagatgctcctaggtacaaaagaagagcggaagctgcagaagctgagaaaagcaaagttgtcatggaattgtgtaccactaggagaaccattgaagggttgaagctaaatctagagaagacacaaattgaggcaatacaagcacaacaagactcggagcttgctgacatacggttcaaagagattcaacaaggaattgcatgtanagagagtgctgc

SEQ ID NO: 82062 - DNA, 408 bp, Zea mays
ccgccgtcctgaggagccccctgtccgtcctcctctacatcctcgccgccgtgcccgccaccgccgcggcgacgccgaccgacgccgccatcgacgaggcgtacgcgcatctcgtcaacctcaccgctaaccaggagtactgggcggagcgcgcggaggcggcgcacgcgtacaaccgcgcggcgtaccagaccgaccccgtggccgtcgtgcagcgcttcaacgacggcgtgcacagggcgacggcgacgcggtcgcggtccctggcgcacagggcgcggggcccctgcacggcgaccaaccccatcgaccagtgctggcggtgccgccgcgactgggcccgcgaccgcaagcgcctggccaggtgcgccatgggcttcggccacaggaccaccggcgggctgggcg

SEQ ID NO: 82063 - DNA, 453 bp, Zea mays
ctcacgggtcgatgcacgcgtctagcatgccacccctcttcgcttccgttcctgtcctctcctctgtccctctacggtgcttctgctcgccggcccaaaatcgcctcatcgaccacgcccccttccaggctcccgtctccatgggtctcctctcaaacaggattgggagggagagcctcaaggcgggggatcatatctactcctggagggcggcgtgggtctacgcgcatcacggaatatatgtgggcgatgataaggtgatccatttcacaagaggaagaggacaggaggtcggaacaggaactgtcgtcgatattattcttgtgagttccaccccaaaacgaagcaacacgccttgcccggtgtgcaccgacgaaaccagcgacagcagcacagagacgaacggcgtggtatcctcctgtctcagctgcttcctagctgggggtgctctct

SEQ ID NO: 82064 - DNA, 426 bp, Zea mays
agccgcgttcctccgcccggggaagcccctgcgccgccgctacggcgcctgggccgtcgtgacgggcgccaccgacggcatcggccgcgccgtcgcgttccgcctcgccgcggccgggctcgggctcgtcctcgtcggccgcaacccggagaagctggccgccgtggccgccgagatcagggccaagcaccccaaggtccccgaggtgcgcaccttcgtgctcgacttcgccagcgatgggctcgcggccggcgtcgaggcgctcaaggactccatccggggcctcgacgtcggcgtgctcgtcaacaacgccgggctgtcctacccgtacgcgcgctacttccacgaggtggacgaggagctgatgcgcagcctcatccgggtcaacgtcgagggcgtcacgcgggtcacgcacgccgtgctgcc

SEQ ID NO: 82065 - DNA, 421 bp, Zea mays
gcgcggaccacgcccgtggacccaaagacgcacggcacgggtctccccttcaacaggtactcatggctgacgacgcacaactcgtttgcggtggtgggcaccaagtcgccgctggggtccgccatcatctctccgcccaaccaggaggactcggtgaccgaccaactgaagaacggtgtgcggggcctgatgctggatgcctatgacttcaacgacgccgtgtggttctgccactccttccacggccgttgcctgaccttcaccgcctacgtgccggcgctgagcgtgcttacggaggtccgggtgttcctggacgccaacccgtccgaggtggtcaccatcttcctcgaggactatgcagcgccggggtcactcagcaacactttcaacgccgccggactgtccaagtactggttccccg

SEQ ID NO: 82066 - DNA, 428 bp, Zea mays
ggctttaccgtggatttaacatatcttgtgttggaattattgtttatcgtggcctgtatttcggactttacgattctatcaagccagttgtcctcactggcagcctccaggacaacttctttgccagttttgctctgggttggctgatcaccaacggtgctggtcttgcatcttaccccattgatactgtccgcagaaggatgatgatgacttctggtgaggctgtcaagtacaagagctcattggacgcattccagcagatccttaagaaggaaggccccaagtccctgttcaagggtgctggtgctaacattcttcgtgccattgctggcgctggtgtgctttctggctacgaccagctccagatcctcttcttcggaaagaagtacggctccgggggtgcttaaatggagaaaaatgatgacgaa

SEQ ID NO: 82067 - DNA, 327 bp, Zea mays
aaattgaatcatgagaatgttgtccaactcgtcggatactgcgccgaagggagcacccgcgtccttgcttatgagtatgcaactaggggatcattgcatgatatcctccatggtaaaaagggtgtcaaaggagcccagccagggccagtcctgtcatggatgcagcgagctaggattgccgtatgtgctgctcggggtctcgagttcctccacgagaaggccgatcctcgagtggtccaccgcgacatcaagtcaagcaacatactgctctttgaccatgatgttgcgaagatcggggacttcgacatctcaaaccaggcccctgac

SEQ ID NO: 82068 - DNA, 358 bp, Zea mays
accaccaccacctcctccggtccccaacccctgtcgcaccgcagccgccggccatggcctgcctcaccgacctcgtcaacctcaacctctcggacaacaccgagaagatcatcgcggaatacatatggatcggtggatctggcatggatctcaggagcaaagcaaggaccctctccggcccggtgaccgatcccagcaagctgcccaagtggaactacgacggctccagcacgggccaggcccccggcgaggacagcgaggtcatcctgtacccgcaggccatcttcaaggacccattcaggaggggcaacaacatccttgtgatgtgcgattggtacaccccagccggcgagccaat

SEQ ID NO: 82069 - DNA, 422 bp, Zea mays
acacgtccgaacacagttgagcgcgacgatgggatccctcgctaataacatcatggtcgtgggtgtcgtccttgcagcgctcgtcgccggcgggtcatgcgggcccccgaaggtgccgcccggtcccaacatcaccaccaactacaacggcaagtggctcaccgccagggccacctggtacggtcagcccaacggtgccggcgctcctgacaacggcggtgcgtgcgggatcaagaacgtgaacctgccaccctacagcggcatgacggcgtgcggcaacgtccccatcttcaaggacggcaagggctgcggctcatgctacgaggtgagatgcaaggaaaaacctgagtgctcgggcaatccagtcacggtgtacatcactgacatgaactacgagcctatcgctccctaccacttcgact

SEQ ID NO: 82070 - DNA, 424 bp, Zea mays
cacgcgtccggaaggccggcatcgtgcccatctcctaccgcagggtggcgtgcgcgaagcagggcggcatccggtacaccatcaccgggaacaagtacttcaacatggtgacgatcaccaatgtgggcggcgccggcgacatcgcggcggtgtcggtgaaggggagcaagcgtgtcaagtggacggagatgaagcgcaactgggggcaagtgtggcagaccggggaggacctcacctgcgagtcgctgacgttccgggtgatgaccagcgaccaccgcaaggccacctcatggcacgttctccccgctgactggaagttcggtgtcacgtaccaggcatccaagaacttctaagtagccacttttcctcctcttcttcaacctgcatatgcccacaagcaaccatgcaaatgataacatgcaat

SEQ ID NO: 82071 - DNA, 371 bp, Zea mays
  unsure (1)..(371): unsure at all n locations
acgcgtcggcccacgcgtccgcccacgcatcggccagatgctgtcgaagctgcggcaccggcacctggtgtccctgatcggctactgcgacgagaacgaggagatgatcctggtgtacgagtacatgcacaacggcgtgttccngaacgaggtcgacggcagcgaggggaaggcgccgctgccgtggaagcagcggctggagatctgcatcggcgctgcccgggggctgcactacctgcacacgggcacggcgcaagggatcatccacggcgacgtgaagacgaccaacatcctgcgggaggagaacttcgtggccaaggtgtccgacttcgggctgtccaaagacgggcccgggatgaaccagctgcacg

SEQ ID NO: 82072 - DNA, 229 bp, Zea mays
  unsure (1)..(229): unsure at all n locations
agatgctgctggagcaagcgacacatcctgtcgggcgccacgtccgtgttcggcgcggcgccggtggaggtctccgtgaangtggccggcatccactggcactacggcagccggtcgcacgcccccgagctcaccgcgggctagtacaacaggcggcgccacgacgggtacctcacgatcgcgcgcgtcctgtcgcgccacggcgccgtgctcaacttcacctgcgtgg

SEQ ID NO: 82073 - DNA, 379 bp, Zea mays
  unsure (1)..(379): unsure at all n locations
gcgtccgaggcggtgcagccgcgactgggcgcgcgaccgcaagcgcctggccaggtgcgccatgggcttcggccacaggaccaccggcgggctggccggcaagtgcgacgtggtcattgacgccancgacgacgccgcggacctcgtcacccccaggaagggcacgctccggcacgccgtgacccgggcccgggcgctgtggatcaccttcgcgcgcgacatggtgatcgagctcggccaggagctcatcgtgagcagccacaggagcatcgacggccgctgagcgcatgtgcacatcgtgggcgcgcagatcacgctgcagaacgtgcgcaacgtgatcctccacaacctgcacgtcgacgacgccgcggcgcacggc

SEQ ID NO: 82074 - DNA, 271 bp, Zea mays
  unsure (1)..(271): unsure at all n locations
accacgcgtcggcctcacctcnctcnctcacacagataataaggaaaggtcgcgcccttttcctccgacatccacaaggggggaggggaaaacacgtacattcacccggcggcaataatggcctcggttccggctccggcgacgaggaccgcggccgtcatcctatgcctatgcgtcgtcctctcctgtgccgcggctgacgacncgaacctncccgactacgtcatccaaggccgcgtgtactgcgacacctgccgcgccgggttcgtga

SEQ ID NO: 82075 - DNA, 229 bp, Zea mays
gaccggagatctagaggaaccaagtgtactgcaacggcgagctggtgctggtgacggggggcaccaagccggagtacacggtggacgtgtggtccggaaaccacccctactatgtcggcgacacctcggcgctcagtggcatggacagccagatcgagaagttccgcaagaagtggggccacatcaaggagtactggcccgaggaacagtggagggagatgcacccaga

SEQ ID NO: 82076 - DNA, 360 bp, Zea mays
cgcgtcggcccacgcgtcagtcgagatacagatctcgagaagttgcagctccccacaatggaaggtctggctaaaaaactaaaaaagaactctgggagcaagatcgagtctgctagtgttgcatgtcatccatcagaagcaggtactagtgactgccagctggtttaactccaagtcaggaaagaagattcctttgaaatcagtcacttcaatcgtcgatgggctaaagaaatcgtacattgagaagttgaggcccttggaaaaaacgtatcagttccatgacttcgtctcgcgcttgctgactagcagcgatttcgatgcgaaaccaatggtcatgctgttgggtcaatactccacggg

SEQ ID NO: 82077 - DNA, 260 bp, Zea mays
  unsure (1)..(260): unsure at all n locations
accaccgtcgacacatccgcatgaaggacgtcaagtgcggccgggccacgcatcagctcggcccctgnggcggtacaaggacgagaaggacgtggaggacgtgaaggtgacggggtgcacgctcgccggcaccacgaagggccggcgcatcaagtcgtacgaggactccaagtcgtcgctcagggccagcaagttcctgtaccaggacgtcaccatggacaacgtctcctaacccatcatcagtagacagaagtactgcc

SEQ ID NO: 82078 - DNA, 221 bp, Zea mays
  unsure (1)..(221): unsure at all n locations
ctgcgggaacactgtacaagagcgggaagccggcgctgccgtggcggcagcgcctcgagatcaccatcggcgccgcgcggcgcctgcactacctccacaccgccgccatctacacgagcatccgnctcgacgtgtccgcgaccacgatcctggtggacgacaactgggtagccagggtttccgacttcggcttgtccaagaccggcccgacggccatgaac

SEQ ID NO: 82079 - DNA, 101 bp, Zea mays
tcatagctaagcaggtctgacaggatgtcgtggcagacatacgtcgatgagcacctcatgtgcgagatcgagggccaccacctgacctccgctgccatagt

SEQ ID NO: 82080 - DNA, 134 bp, Zea mays
acgcgtcggccacgcgtccgcgagaacgagtacagcatatggaagcggcgttcaaagatgagggcgacaagtacatcaactgggcagcgaagatggccatctccaccaacatcggcataccgtggatcatgtgc

SEQ ID NO: 82081 - DNA, 254 bp, Zea mays
  unsure (1)..(254): unsure at all n locations
ggaatatccgggatgaccacgcgtcggacaacatgcccccggcataccgcaggtgctcatcgtcacgggcctcacctggctctcctggttcnccttcatcctcttcgacaccgactggatgggccgcgagatgtagcacggcaggcccgacggcagccccgangacgtggccaggttccagganggcgtccggcanggcgccttcngcctgctcctcaactccgtcgtcctcggagccagctccttcctcatcg

SEQ ID NO: 82082 - DNA, 95 bp, Zea mays
ggcctgccggtgagcgacgagtgcaaggtgaagttccgggatctgaaggcgcggcggagcttccggttcatcgtgttcaggatcgacgacaagga

SEQ ID NO: 82083 - DNA, 407 bp, Zea mays
  unsure (1)..(407): unsure at all n locations
cgcgtcggcacaatttctacgattcaaagctagcaacacagcatataagactgatgtcgaccggattgtcataactccagctggcccatcaggcccatcttctcctcagtctgaagctggggagtccaatgtgtttcaccaggaaaaagatgctgcagcagatggggcaccgcctgacactgatggagcagtggctgaggccggagaggaagaaacaacggaaaatgttggtgaagcgacatttagctatgaccgcttgatatccaaatccaccgatccagttcgtgggatagattacaaacgcagagaggcatacttatcagatagtgaattccaaactgtntttggcatgacaaaggatgcattctaccgacagccaaattggaaccaggaactacagaaccaaa

SEQ ID NO: 82084 - DNA, 464 bp, Zea mays
  unsure (1)..(464): unsure at all n locations
ggaatcacgggacgaccacgcgtcggccgacgcgtgggccgaggactangaggcgtagcgctgtgcagggcgcgagcgcgttcgttcggcatggaacagaacgccggctcgttcctcgccgtgcgtcgcctctccggtggcgccatccaccaccatcgtcaccactcttccccggctgaggtcgtgggcgtgtccactgcgtggctcggtaaggggctttcatgcgtctgcgcgcagaggagggagagcgacgtgcgcctgtccttcgatttgagtcccattcaggaagagtgcttgaataggttgcagaaccggatagaggtgcagtatgatggttcaaatctggagcatcagaaagcactggaagccctttggcgttcctcttttcctggaactgaacttctagggttagtatcagaccagtggaaggagatgggatggcaagggaaaagatcatctacaga

SEQ ID NO: 82085 - DNA, 426 bp, Zea mays
aggagttccaccgctactccatcctgtggacgcccgccgccgtggccttctacgtggacgacgtgccggtgcgcgaggtgcggcagtcggccgccatgggcggggacttcccctccaagcccatgtccgtgtacgccaccgtgtgggacgcctccacctgggccaccgccgggggccggtaccgcgtcaactaccgctacgggcccttcgtcgcctccttcaccgacctggccctcctcggctgccgcgttgacgggcccatccagcagacgacggcggagcggtgcgccgcagccgccgaggcactcagggcgtcggacgtggccgtcatgacggtggagaagcagcaagccatgcgcaggttccgggagcgcaacatggtctactcctactgctacgacacgctgcgctaccccgccgcgttcc

SEQ ID NO: 82086 - DNA, 356 bp, Zea mays
aatccgcctcactaccgagggaggcaccaagtccgtctacgacgatgtcatccctgccaactggaaggccaacaccgcctacaccgccaaataattaactttagtgctgacaatactttaagccgacctatgctagctatactagattgggttggatcccaagcaatgcattacacatgcatgcattggaccgtgatatctatttgctaccactaccctattacgacagtgatgctggcgccaacaatgatggtgtcatcctccttctccatcttcttcatctccatatatagctagagtgagacttcgctgttgtttaaaagagaagagttaagaaatggattgacacgttatat

SEQ ID NO: 82087 - DNA, 385 bp, Zea mays
aggaccagcagcgcctcatcttcgccggcaagcagctggaggatggccgcaccctggcggattacagcatccagaaggagagcactctccacctggtgctccgcctcaggggtggcatgcagatttttgtgaagacattgactggcaagactatcaccttggaggtggagagctctgacaccattgacaatgtgaaggccaagatccaggacaaggagggcattcccccagaccagcagcgtctgatctttgcgggcaagcagctggaggatggccgcactctcgcggactacaacatccagaaggagagcacccttcaccttgttctccgcctcaggggtggtatgcagatctttgtgaagaccctgactggaaaaaccataac

SEQ ID NO: 82088 - DNA, 414 bp, Zea mays
aagcgccacgacctctcctattgccgctgctggtcgccatgctagcggtggtcgccgatgtcgccaacgccggccacgccaagcccctgacgcctggcgggcgcgtggtacacgacaaccacggcaagttcacggccgggccgtggaaacctgcccacgcgaccttctacggcgggcgggacgggtccggcaccacggcgggcgcgtgcgggtacaaggacacgcgcgagcaggggtacggcgtgcagacggtggctgtgagcacggtgttgtttggcgatggcgcggcctgcggcgggtgctacgaggtgcggtgcgtggacagccccagcgggtgcaagcccgacgcggcggcgctggtggtgacggcgaacgacctgtgcccgcccaaggacaagtggtgcaagccgccgc

SEQ ID NO: 82089 - DNA, 373 bp, Zea mays
  unsure (1)..(373): unsure at all n locations
tttctcctcctcaactttctccttttcttgccacggcaaaacaccttcgccggcgagagcatggcgatggcgtaccgtgtcctgnaggtcaccctggtgtcggcaaatgacctcaagaaagtgtcgctcttctcccggactcgcatctacgccgtggcttccatctccggattcgacctccgcatcccttcccacagcacccaagcagaccacagcaacggctgcaacccctgctggaacgccgtggtacacttcnccatcccggctgccgctgacacccgcggcctcgcactccacgtgaggctccgcgcccagcgtctatacctgngcgatcgcgacatcggcgaagtgttttgtgccatcgacgaactcc

SEQ ID NO: 82090 - DNA, 437 bp, Zea mays
  unsure (1)..(437): unsure at all n locations
accacgcgtcggcaagatcactacgagaatatcaagatggaggactcagccaaccccatcttcatcgacatgaagtactgccccaacaagttgtgtactgccaacggcgcctccaaggtcaccgtcaaggatgtcaccttcaagaacatcaccggcacctcctccaccccggaggccgttagcctgctctgcactgccaaggtcccatgcaccggcgtcaccatggatgacgtcaacgtcgagtatagcggcaccaacaacaagaccatggctatatgcacgaacgccaagggcagcaccaagggttgcctcaaggagcttgcatgcttctnagacctccatcgactgacccatctctctagttataatttttctctcgtccttgcattgcccattagatgctatccattggtaacgcacaacagtaaaacgacaga

SEQ ID NO: 82091 - DNA, 538 bp, Zea mays
gggcattgcgagcgagcgttactctccgtccgcttccgccgtttgcccgtcgatcagttgttggctgccggccgggtactaccgcctgcacgagcagcggctagccacagcccacagacagacgacgtcaggtcttggcaggtgtgcaagcagacagagctcgctcggtcgccatgtctttcaccggcacgcaggacaagtgcaaagcctgcgacaagacggtccacttcatcgacctgctcaccgccgacggcatctcgtaccacaagacctgcttcaaatgcagccactgcaagggcgtcctctcgattagcagctactcttccatggacggcgttctgtactgcaagacgcacttcgaacagctcttcaaggagacagggaacttctccaagaaattccaaggtggaggtggagcatcttcaaacaagaacgacccggcaaaggctccgagcaagctgtcatctgcattctctggaactcaagacaaatgcgcagcctgccagaagaccgtgtatccattggagaagatgacgct

SEQ ID NO: 82092 - DNA, 436 bp, Zea mays
cggaattcatggaacgaccacgcctcgggacaagatggcgtgcacagacaatgcgatgagagccttgttcctcctggtcctcttctgcatcgtgcatggtgagaaggaagagtcaaagggcatcgatgcgaaagcgtccgggcctggtgggtccttcgacatcaccaagttgggcgcctccggcaatggcaagacagacagcacgaaggctgtgcaggaggcatgggcatcggcgtgcggcggcactgggaagcagacaatcctcatacccaagggcgacttccttgtcggacaactcaacttcacaggcccttgcaagggcgacgtgaccatccaagtggatggcaatctgctggcgagcacggacctaagccagtacaaggaacatggtaattggatcgagattctacgcgtggataacctggtcatcaccggc

SEQ ID NO: 82093 - DNA, 417 bp, Zea mays
accggagatcatcaacaagaagggctacgacggggccaaggccgacatctggtcctgcggcgtcatcctcttcgtgctcctcgccggctacctcccgttccacgacgccaacctggtggagatgtaccgcaagatcagcagagccgacgtcaagtacccgcagtggttctcccctgagctccggcggttgatgcccaagctcctcgaaccgaacccaaacaacaggatcacgatcgagaagctggtcgagcacccctggttcaagaaggggtacaggccggccgtcatgctgggacagccgcacggctccagcagcctcaaggatgtcaaggtcgccttcagcaacgccgaccacaaggacagcagcaccaaggtggaacagccggcggacagctccttgaagccggggagcctgaa

SEQ ID NO: 82094 - DNA, 409 bp, Zea mays
agatcacgacaagatggcgtgcacaaacaatgcgatgagagccttgttcctcctggtcctcttctgcatcgtgcatggtgagaaggaagagtcaaagggcatcgatgcgaaagcgtccgggcctggtgggtccttcgacatcaccaagttgggcgcctccggcaatggcaagacagacagcacgaaggctgtgcaggaggcatgggcatcggcgtgcggcggcactgggaagcagacaatcctcatacccaagggtgacttccttgtcggacaactcaacttcacaggcccttgcaagggcgacgtgaccatccaggtggatggcaatctgctggcgaccacggacctaagccagtacaaggaccatggtaattggatcgagattctacgtgtggataacctggtcatc

SEQ ID NO: 82095 - DNA, 260 bp, Zea mays
  unsure (1)..(260): unsure at all n locations
gacaccagatacgattcgcaagaccttcaacatcaagaatgacttcacccctgaggaggaagangagatccgcacggagaaacagtgggccttcgagtaaggaagtgctggatctattgatgcctaagtttcgtggtgtctactactatgtctactttatgttgtcctaatggttgtaagtattttgggagtcactttgcttgcgaatgtctcgcgtaagacttatgtggtcaatggtcggttattaacttattaccatg

SEQ ID NO: 82096 - DNA, 445 bp, Zea mays
gcgtcggcccaggcctccgctcacgcatccgcaacatctgcgtcaagtccggcgcctccaaggtggccgtcaacgacgtcgtcttcatgaacatccacggcacctccaacacgccggaggccatcacgctcaactgcgccaacagactgccatgccagggcgtgcagctcgtcaacgtcgacatcaagtacaatggatccggcaacaataccatggccgtctgcaagaatgccatcggcaagtccatcggcttggcaaaggacctggcgtgcatttgaaccaattgactaacatgcatatattatgtactaggtttgtgcccgtgcgttgacacggaagttaaaaattactataacacagagatacatagcgataagtatcactatgacattcacaatccatgtggcacaatatcactgtaaccatctatgattgtgcattgcga

SEQ ID NO: 82097 - DNA, 458 bp, Zea mays
  unsure (1)..(458): unsure at all n locations
aggttgaaataattatgtatgcaaggcatgctatccgcaccgccttctgtctgtacaaaattcttgagtacaaagaacgtgatatacacactaccggttgcgctcatcctgtactcaacccactagcctggcaccatcagtcttcatggttgcaagtgtcctcaaggagaatagagaaaatctgttacaagaagccagaggactggatgatcttatcaggatattgaacgatgtaaatgggaacttagatgctaagaaagcttgcgctggagcattgaaacttcacaaaaaatacctgaaaaacgtacaagcanagaaaccttaaacgtgccatggaacacacgtccccaatggggctatcgttcacatttcaacatacacgaccattttctacacacaactttgagtgacgatttatcggacacaggtggtaatcgtctgacatgtcctgagataca

SEQ ID NO: 82098 - DNA, 445 bp, Zea mays
ccacgcgtcgggccaagctcgagcacgccaacgacggggtcaccgacgcgaccggcacctacacgatcgagctcaaggacagccacgaggaggacatctgccaggtggtgctggtggccagcccgcgcaaggactgcgacgaggtccaggcgctcagggaccgcgccggcgtcctgctcaccaggaacgttggcatctccgacagcctgcgccccgccaacccgctaggctacttcaaggacgtgccgctccccgtctgcgccgcgctgctcaagcagctggactcggacgacgacgacgaccagtaaactataccacggcggcgtcgcggacatgctgcacaaaactacaacgatacagagcgaacgcatggcatggatagcagtatctacggaaagaaaaggaagaaaaggaaaattaaaaatgtatcagagtgcttgattca

SEQ ID NO: 82099 - DNA, 542 bp, Zea mays
accacgcgtcggccgtgtccctccttctcgaccggcaccgtcgagctcggctgtggaaacagaacaaacccatcaaccatggcgaactcggcgtcggggatggccgtgagcgacgagtgcaagctcaagttccaggagctcaagtcgaagcgaagcttccggttcatcacgttcaagatcaacgagcagacgcagcaggtggtggtggacaggctggggcagccgggcgacacctacgacgacttcaccggctccatgcccgagagcgagtgccgctacgccgtcttcgacttcgacttcaccaccgacgagaactgccagaagagcaagatcttgttcatctcctggtcgccggacacctcgagggtcaggagcaagatgctgtacgcgagctccaagggacggttcaagagggagctggagggcatccagctggagctgcaggccaccgaccccagcgagatgagcatggacattgtcatggcgcgagctctctgaagaggaagacgcgcatccgctcgcgcgatcgccatgcatgcccc

SEQ ID NO: 82100 - DNA, 401 bp, Zea mays
accacccctcagcgcgacgaaggtaagatgttcctgcggaggatcctgaccggcgggggcggcctggcggccctgagggcggcgcgcgccgtgaaggagacgacggggatcgtgggccttgaggtggtgcctaacgcgcgagaggttctggtagggctctacgagcgcacgctcaaagagatcaaggccgtccccgaagacgagggttaccgcaaggccgttgaatccttcaccggtcaccgcctccagatctgccaggaggaggaggactggaagcgcatcgaggaccgaatcggatgcgggcaggtcgaggagctcatcgaggaggccgaggacgagctcaagctcatcgctaaaatgattgaatgggatccatggggtgttcccgatgactacgaatg

SEQ ID NO: 82101 - DNA, 357 bp, Zea mays
aatacgccaagcgcgccttcgtgcactggtacgtcggtgagggtatggaggagggcgagttctccgaggctcgtgaggatctggctgcgctcgagaaggactacgaggaggtcggtgctgagtttgacgagggtgaggacggcgacgagggtgacgagtactagacgctctactggcgcggcttcttcggccttgtgtgccactgctaccctgtgatctgccctgattggctccaatcgtgtaatgttccggtcggttcttatcaacctgtcgttgtgtggttaacaccttacgttgtaagactttattcccccgctttgcaactgggtaattaattttggcgtaatggttttcttg

SEQ ID NO: 82102 - DNA, 441 bp, Zea mays
  unsure (1)..(441): unsure at all n locations
ctgggcggacgagtgggatcgtctcactcaccccgccttcacgcctccctcaccaaataaggtcccgcccttttccgacattcacaggggggacaggaaatcagcggccatggcctcgattccggcgacgaccttcgccgtcatcttatccgtcctcttctgtgccgcggctggcaccgccgtcgacaacgacctccccgactacgtcatccagggccgcgtctattgcgacacctgccgcgccgggttcgtgaccaatgtcaccgagtacatcgcgggcgccaaggtgaggctggagtgcaagcacttcggcaccggcaagctcgagcgctccatcgacggggtgaccgacgggaacggcacgtacacgatcgagctcaaggacagccacgaggaggacatctgcgnagtggtcttggtggagagcccgcgcagngactg

SEQ ID NO: 82103 - DNA, 483 bp, Zea mays
  unsure (1)..(483): unsure at all n locations
cgcgtcggcccacgcgtccggtcgccaaattcattcgatcgaattaggcgccttcttcgtcncacgctccgtctttatttgtaatctgaagcttacaggaacatttgagtggatcatggacggattggtaggcctcttgaaagtccgggtggtgaggggcatcaaccttgcctaccgcgacgcaagaagcagcgatccgtatgtcgtcctacgacttggcaagaagaaacttaagacgagcgtgaagaagagatctgtgaaccccatctggcacgaggagctaactctgaccgtcacagatcccagcctagctctgaagctggaggtgttcgacaaggacacgttcagcagggacgacccgatgggggacgcggagatcgacgtggcgccgctggtggaagcggcgaacgcgagcccggaggcgagcctgangaacggcgccatcatcctgtcggtgcggccgagcgccacgaactgcctcgc

SEQ ID NO: 82104 - DNA, 555 bp, Zea mays
cggaatcacggcccgaccacgcgtcggtcctcctactcgggctacaacgacgagctgctgtgggccgcgacctggctgtacctggcgacgaggcggcaggtgtacgcggacttcatcgcccacgaggccatctcgtcgagcgtggccgagttcagctgggacctcaagttcccgggcgcgcaggtgctgctggccgagttcaacatgacctcggcgggcggcgcgcagaacttcaagtcgcaggcggacaacttcgtgtgcgcggtgctgccggacacggcgttccaccaggtgttcatcaccccgggcggcgtgatccacctccgcgacggcgccaactcgcagtacgtgaccagcacggcgttcctgctggtggtgtacgcggacctgctgctgccgacggggcagacggtgctgtgcgggaaacagccgctgccccgggccgggtgcacgagttcgcgcggcagcagatggactacctgctggggcgccaacccgcggcacagctcctacgtcttgggcttcggcgccaacccgcccaagcagccgcacaac

SEQ ID NO: 82105 - DNA, 500 bp, Zea mays
  unsure (1)..(500): unsure at all n locations
ggaattcatcggacgaccacgcgtcggcacatctcttgccacctcattcgcgctgtccggagaggaggggcaggaggaggccgcaccaaatctatctggggatcggagcgcgggcgacaagatgccacgcggcggcaagcccgcggcttcgtcgaagccgaacccgttcgactcggactcggactcggagtccagcaataagccggcgaacaagtccggggcgtcgtcgtaccaggcccccgccgacgccaagaagcggtacaaggacgggttccgggactcgggcgggctggagaaccagtcggtgcaggagctggagcactacgcggcgtacaaggccgaggagacgacggacgcgctcgccggctgcctgcgcatcgccgaggacatcaggcangacgccagcgacacgctgatcacgctgcacaagcagggggagcagatagccggacgcacgagaaggccgtcgagatcgacaggnactcgcaagagcgagacct

SEQ ID NO: 82106 - DNA, 400 bp, Zea mays
gcgtcggcccaggcgtccgcagaggaggagataaagatgttgttacaagcgggcgatatacatggaactgacacattagattgtgaggaatttgtgacagtcttgcttcacattaaaaagatgagtaatgacgagtatctacctaaagctttcgagttcttcgacaaagacgggaatggttttattgaaatgtccgagttaatggagactctaagtgatggtgaactaaagcctgatgagcaattggttaacgacattattcaagaggttgacaaggataaggatggtcgcatcagttacccagagtttgaattgatgatgaaaagtggatcggactggaggaacgcctctagacgttactcaacagagaatttcagcagcctcagtcaaaaaactgtgc

SEQ ID NO: 82107 - DNA, 426 bp, Zea mays
  unsure (1)..(426): unsure at all n locations
gcgtcggcccaggcgtccgcatcgcaatcgcacaccgcctcnccgtgtcncctccttctcgcccggcaccgtcgagctcggctgtggaaacagaacanacccatcaaccatggcgaactcggcgtcggggatggccgtgagcgacgagtgcaagctcaagttccaggagctcaagtcgaagcgaagcttccggttcatcacgttcaagatcaacgagcagacgcagcaggtggtggtggacaggctggggcagccgggcgacacctacgacgacttcaccggctccatgcccgagagcgagtgccgctacgccgtcttcgacttcgacttcaccaccgacgagaactgccagaagagcaagatcttgttcatctcctggtccccggacacctcgagggtcaggagcaagatgctgtacgcgagctc

SEQ ID NO: 82108 - DNA, 484 bp, Zea mays
  unsure (1)..(484): unsure at all n locations
accacgcgtcggcccacgcgtccgcacacgaatccgcttgattcagttttggaaacatctcagcatgttggaaggtcgtcagtgtcaacaaaccaggatctgcctttcaaggacgtagccaaccaatgtgaagcacttctgattgggaagcagcaaaagctatctgcgtgcatgagtgtctgtgaaaaagaggctggtgaatcttccgtcgagcagtcatctcggcaggatcctcaagcagatacgtttctctgcacagctgatgaacaatggcaccccaattcctgtaagctgccagcgctgtgtcnctacgaccggttccttgcaacgtctgggtgctaagatgatctcttctgcgatgtggatctctataaccaagaacgtgttcagtggacgcctaannaattggtggttccagagctcatgcatgctaaaatatgtgctgtcgtgtgtgagtgcagatgacatgatttccctgttttgg

SEQ ID NO: 82109 - DNA, 484 bp, Zea mays
  unsure (1)..(484): unsure at all n locations
ccacgcgtcgggcttatcgtggtctgtacattgggctctatgattccatcaagccagttgtccttactggcaacctccaggacaatttctttgccagtttcgctctgggttggctgatcactaatggtgctggtcttgcatcttaccccatcgataccgtccgcagaaggatgatgatgacatctggtgaggctgtcaagtacaagagctccttggacgcgttccagcagattcttaagaaggaagggcccaagtccctgttcaagggtgctggtgctaacattcttcgtgccattgctggtgctggtgtgctttctggctatgaccagctccagatcctcttcttcggaaagaagtacggctccggcggtgcttaaatggagaaatatgatgacgaacaagagcagtgtgtgttcncggtcctttccaatcanggatctggtgaagtttttgcctttcatatcgaagaaattaataattcatg

SEQ ID NO: 82110 - DNA, 487 bp, Zea mays
tggttcgtggatggcagcgccacggcctctcctgctatcgctgctggtcgccgtgctagcggtggccgcggatgtcgccaacgccggccacgccaagcccctgacgcctggcgggcgcgtggtacaccacaaccacggcaagttcacggccgggccgtggaaacccgcccacgcgaccttctacggcgggcgggacgggtccggcaccacggcgggcgcgtgcgggtacaaggacacgcgcgcgcaggggtatggcgtgcagacggtggccgtgagcacggtgctgttcggcgacggcgcggcctgcggcgggtgctacgaggtgcgctgcgtggacagccccagcgggtgcaagcccagcgcggcggcgctggtggtgacggcgaccgacctgtgcccgcccaacgaccagcagtccgcggacagcggcgggttggtgcaaccgccgcgggagcacttcgactcagcatgcccgcgttcctccaga

SEQ ID NO: 82111 - DNA, 392 bp, Zea mays
acgccctcgttgcggtcgtccacatccttttctctcctcctcgccggcccaacctgaatggtcctccaccaagaaggaaaaagggagggagggaacggaagcatcaaccatgtccaactccgcgtccggaatggccgtccgtgatgaatgcaagctcaagttccaagagctcaaggcaaagaggagcttccgcctcatcgtgttcaagatcaacgagaacgtgcagcaagttgtggtggacaagctgggggggccaagaaaaaactacgacgccttcacggcctgcttccccgccaacgagtgccgctacgccgtgtccgattttgacttcgtcactgacgagaactgccagaagagcaagatcttctttatctcttgggccccggatacat

SEQ ID NO: 82112 - DNA, 351 bp, Zea mays
cgcgtcggccctgcctctgccacctcgaggtgatgaacttgtattccgcccccttgaacatctccaacctgtgaaatactcccggcctggattacccttgttgggttttggagaggagattttggacaatgctttgactaaggcagaaaaaaataagatcaatttacatttggtggctgcagaagaagctcttgcattgtcgatatggactatggctacagtttgtcgttctctgtctttggaaagtgtgctaggcttattcactggagttttgctggagaagcaaattgtggtaatatgcccaaatctgggtgttctgtcagcaattcttttgtctattataccgatgat

SEQ ID NO: 82113 - DNA, 428 bp, Zea mays
  unsure (1)..(428): unsure at all n locations
cacgcatccgaaattgcgccactgctcgttatcctcctcttgcattgcattgcaggtcgtagttgagcagcagcaaccactgcacaagatgtcgtggcagacgtacgtcgatgagcacctcatgtgcgagatcgaggggccacacctgagctctgccgccatagtcggccacgacggcgccgtttgggcccagagcaccgcattcccacagttcaagccagangagatgaccaacatcattaaggacttcgacgagcctgggtttctggccccgatcggcctcttccttggccccaccaagtacatggtcatccaaggcgagcccggcgctgtcatccgcgggaagaagggatctggaggcataactgtgaagaagaccggacaagcgctggtgatcggcatctacgacgagcccactgaccctggac

SEQ ID NO: 82114 - DNA, 407 bp, Zea mays
ccacgcgtcgggccggcgccacagcctctcatgctgtcgctgctggtcgccgtgctagcggtggccgccgatgtcgccaacgccggccacgccaagcccctgacgcctggcgggcgcgtggtacaccacaaccacggcaagttcacggccgggccgtggaaacccgcccacgcgaccttctacggcgggcgggacgggtccggcaccacggcgggcgcgtgcgggtacaaggacacgcgcgcgcaggggtatggcgtgcagacggtggccgtgagcacggtgctgttcggtgacggcgcggcctgcggcgggtgctacgaggtgcgctgcgtggacagccctagcgggtgcaagcccagcgcggcgacactggtggtgacggcgaccgacctgtgcccgcccaacga

SEQ ID NO: 82115 - DNA, 407 bp, Zea mays
ccacgcgtccggacagaaaacagtgggatcgagttgtttcactgcacgagcacatcctccggcgaccaccggcctccctctccgtcctctagcgaccgaccaacgcgtcgagcgaagatgtcgtggcagacgtacgtggacgagcacctgatgtgcgagatcgagggccaccacctcacgtcggcggccatcgtcggccacgacggcgccacctgggctcagagcaccgcattccccgagttcaagcccgaggagatggctgccatcatgaaggatttcgacgagccggggcacctcgccccgaccggcctgatactgggaggcaccaagtacatggtcatccaaggcgaacctggagctgtcatccgtggcaagaaggggatcgggggcatcactgtgaagaaaac

SEQ ID NO: 82116 - DNA, 412 bp, Zea mays
aagaagttcccaggcatcggcgccttccagtgcaacgacaggtacatgcgtagccgcctgcaggcggcagcggaggcggccggcaagcctgattggggccacggtgggccgaccgactctggcggctacaacaactggccggaggacaccgtcttcttccgcggcgacaacggtgggtggagcaccgtgtacggcgacttcttcctgtcgtggtactcgcagatgctgctggagcacggcgacctcatcctgtcgggcgccacgtccgtgttcggcgccgcgcccgtggaggtctccgtgaaggtggccggcatccactggcactacggcagccggtcgcacgccccggagctcaccgcgggctactacaacacgcggtgccacgacgggtatctcaacatcccgcgcctcc

SEQ ID NO: 82117 - DNA, 340 bp, Zea mays
  unsure (1)..(340): unsure at all n locations
acatcgatctccccccagcggcgaggagagccggcggccacaggaaggagaaatggcttccgcacacaacgctctccgggtgtttttcatcctagccgtggtatgtgccgtatgcacagcgaaaaggacaggagccaacaaggaagaatcggcggcagcccccggtggcgctgctggaggcagcggcgggacgttcgacatctccaagctcggcgcgaccagcgacggcaagacggactgcacaaaggcagtccaggacgcgtggacgtcagcgtgcgaagcgaccggaagcgccacggtggtgattcccaagggcgactnactgntcggccctctcaac

SEQ ID NO: 82118 - DNA, 375 bp, Zea mays
atctggggttcacctgctccaatggctgttctttctgctgctgatgcttccccggtctcagctatcgggtttgagggctatgagaagcgccttgagatcacattctctgaggcacctgtctttgtggaccctcatgggcgtggtttgcgtgccctctccagggcccagattgactctgttctggatcttgcacggtgcacaattgtgtctgagctctccaacaaggatttcgactcatatgtcctttctgagtcaagcttgtttatctatcctctgaagattgtcatcaagacctgtggcactaccaagctcctgctcaccattccaagaatccttgagcttgctgaagagctgtctatgccacttgctgctgtg

SEQ ID NO: 82119 - DNA, 392 bp, Zea mays
aaaacaatgcgatgagagccttgttcctcctggtcctcttctgcatcgtgcatggtgagaaggaagagtcaaagggcatcgatgcgaaagcgtccgggcctggtgggtccttcgacatcaccaagttgggcgcctccggcaatggcaagacagacagcacgaaggctgtgcaggaggcatgggcatcggcgtgcggcggcactgggaagcagacaatcctcatacccaagggcgacttccttgtcggacaactcaacttcacaggcccttgcaagggcgacgtgaccatccaggtggatggcaatctgctggcgaccacggacctaagccagtacaaggaccatggtaattggatcgagattctacgcgtggataacctggtcatcaccggc

SEQ ID NO: 82120 - DNA, 337 bp, Zea mays
agcagtcatctcctccatcaccaccaccaagctcaacaacagccagctcgcgaaaataatgaagagccgcagcatggcatcatcggccgcgctcttggtgctagccctcgcgctagtggcggccaccgccccacaggtagcggaggcaaagaagaagagagcggcggagagcggcgaggcggcggaggcgaagaagatccaggacgacttctgctcgacgctgtgcgagggcaagaaggggacggacctggtcgtgtgcaaggagtcctgcgcgctctcccagcagtccaacctggtgctgtacggcaggatccagtgcaagggcaagtgcaccgag

SEQ ID NO: 82121 - DNA, 381 bp, Zea mays
accacgcgtccgcacagttgagcgcgacgatgggatccctcgctaataacatcatggtcgtgggtgtcgtccttgcagcgctcgtcgccggcgggtcatgcgggcccccgaaggtgccgcccggtcccaacatcaccaccaactacaacggcaagtggctcaccgccagggccacctggtacggtcagcccaacggtgccggcgctcctgacaacggcggtgcgtgcgggatcaagaacgtgaacctgccaccctacagcggcatgacggcgtgcggcaacgtccccatcttcaaggacggcaagggctgcggctcatgctacgaagtgagatgcaaggaaaaacctgagtgctcgggcaatccagtcacggtgtacatca

SEQ ID NO: 82122 - DNA, 420 bp, Zea mays
aaaaagggagtcattccaccaggggagtaaaggcgcaagaaagaaacccaaagcaattgacgggaatcggaaaaaggggtggatcacgtaaattaatccgatgtaaaccgagaaccttacctctccaagaaggtgttgcacggctgtcgaaagaacgtgctgtgaagtgagagaacgtacgagaaagccaagtgaggaaaagaaggcaagtagagggcggcccgagaaaggagagggcgtaagacgtgatacagagtaggaagaaaagagaagagagctagaaaggaggtaaaagaagagtaaaaggactagaagaggtacggaattcacgaggaaggagcgtgaaggaaggaggaatcccaagtaatcgaggaagaaaaagcttcggtgaaagcgtgaacggattttgtacacactgcc

SEQ ID NO: 82123 - DNA, 342 bp, Zea mays
aggtccgctcggcggcgctgttccagaactgcctcatgacggtgcgcaagcccggggacagccagtccaacatggtgacggcgcaagggcggacggaccccaacatgcccacgggcatcgtgctccagggctgccgcatcgtgccggagcaggcgctcttccccgaccgcctccagatcgccacctacctcggccggccgtggaaggagtacgcgaggacggtggtgatggagagcaccatcggcgacctcatcaggccggaagggtgggcggagtggatgggcgacctcggcctcaagacgctctactacgccgagtacgccaacaccggcccgggcgccg

SEQ ID NO: 82124 - DNA, 391 bp, Zea mays
aatcgaggatgatgaaatgggggctcagcagcggcacgcccgcggattcctactacgaggtacggtcagattgcacggacggtgtgcccaaaaacaagttcaagatcaaggctggcaaaacattaagtgctcggaaatggcaggctgcatttagtcccgatggctgtcttgatattgcctcagtcctaagccggatacaaagaggaggtgtccatccgacagtcagaggagaggtctgggaattcttacttggttgtttcgattccagaagtacctttgatgaaagggaagagataaggcaaatacggaggatacaatatgacagatggaaggaagattgtcgacagatggattcgcatgttggtagcggtaaagttatcacagcaccact

SEQ ID NO: 82125 - DNA, 392 bp, Zea mays
ggaggccaagagcgcagcggcgaagccatagccaagctcacccgatccagtccctgccgcccccagcgtgccacagccagtcccgcgctcagctcagctcagattcacgagctcgtctcccagatccagcttcgtttggttgaattctcttctttggaagtgctggtgggcggcgtggtttggtgctcttggggccggcgtgtttctgcgttctccgggctatctgcctgtcttgctgcggcctgcggcggcggggtggagatgggggtggccggggagaagttccagctggggacggtgggggcgctcagcctctcggtggtgtcctccgtctccatcgtcatctgcaacaaggctctcatgagctccctccgcttcaactttgccaccac

SEQ ID NO: 82126 - DNA, 449 bp, Zea mays
accacgcgtcagaacacgcgtccgcgccattggccatcgcttgaatccatttaggaaaaggttgcttcttggacgtatgccgctataagcaaaacggagtgacaaagttggaagaaaatgcctcgagcaggtaaagttgtgtctcgctcggttgtaggaggtgaccgaaacagaagagaaccaacacttataaggattggtcaacctcaagcttccactaccgcgaaaagttcgactagtgccaaaccacatagatatcgtccaggtacgagagcgctgatggaaatacgcaagtttcaaaagagtaccgacttgttgattcgcaagttaccgtttgcacgtctggttaaggaaataactcagcactatcatcacgaacttcgctggcaagtggaggcagtactagcccttcaaacaagtgcagaggactacctagttggtttgttgga

SEQ ID NO: 82127 - DNA, 445 bp, Zea mays
aaaccacgcgtccgcccacgcgtccggaacgcgtcggtgggtcgttcggtcggtcggtgaagagcacgacaagacgggatgttggtgtacaaagacgcttttacaggtgatgaagtatgttccgacgccatgaaaaacctccatgaagaggaaaacggtttgctgttggtatgtgactcgtacaacatttccaaaggaggggaagattatgggatagaagtaaacaacgatgaagatgaagaaggaggaggaggaggagcagataatgcggtggaacaagtgaatattgtggtcgagtcgtttggtttacaaccttttcccatcagcaaaaaggactttcaagtaactatcaagcgttatagcaaacgagtcaaggactatttggagaagaacaaccggatagagtggaaaagtttatggaaggaatgaagtcgtggttgcccaa

SEQ ID NO: 82128 - DNA, 388 bp, Zea mays
atcgacctctcgaattccgtctcttgtctctgtcctcctcgctcggcttccccggttcttgagaggggaaagatgacgcggacgatatggatggggagggacgacaggttcccagtgtgggaggccgcgctcggcgctggggtcgccgccgccttcgccgctgggctcgtcggggtttacctttccatgccggactccgactacagcttcctcaagctgccacgtaatctccaggaactccaaatcctcactggccatcttgagaactatactatcgactacaccctacacgtgttggtaggctactgccccgtgtacatcttcatgcagaccttcatgatcccaggaacgatattcatgtcactgcttgctggtgctctgtttgggc

SEQ ID NO: 82129 - DNA, 381 bp, Zea mays
acccacgagtccagccacgatggggtgcacagacaatgcgatgagagccttgttcctcctggtcctcttctgcatcgtgcatggtgagaaggaagagtcaaagggcatcgatgcgaaagcgtccgggcctggtgggtccttcgacatcacggggttgggcgcctccggcaatggcaagacagacagcacgaaggctgtgcaggaggcatgggcatcggcgtgcggcggcactgggaagcagacaatcctcatacccaagggcgacttccttgtcggacaactcaacttcacaggcccttgcaagggctacgtgaccatccaggtggatggcaatctgctggcgaccacggacctaagccagtacaaggaacatgggaattg

SEQ ID NO: 82130 - DNA, 403 bp, Zea mays
agttcctgtcctctcctctgtccctctacggtgcttctgctcgccggcccaaaatcgcctcatcgaccacgcccccttccaggctcccgtctccatgggtctcctctcaaacaggattgggagggagagcctcaaggcgggggatcatatctactcctggagggcggcgtgggtctacgcgcatcacggaatatatgtgggcgatgataaggtgatccatttcacaagaggaagaggacaggaggtcggaacaggaactgtcgtcgatattattcttgtgagttccaccccaaaacgaagcaacacgccttgcccggtgtgcaccgacgaaaccagcgacagcagcacagagacgaacggcgtggtatcctcctgtctcagctgcttcctagctgggggtgct

SEQ ID NO: 82131 - DNA, 397 bp, Zea mays
acagcgtcctcgatcctcactgagaaaggttactccttcaccacctctgcggcacgcgaaattgtgggagacatcaacgctcagcttgcatatgtggctcttgaatacgacgaggagctcgagaatgccaagagcagctcatcggtggagaagagctacgagctgcctgatggtcaggtgatcaccattggggcagagaggttcagatgccctgaggtccacttccagccttccttcattggtatggaagctcctgacatccatgataccacctacaactccatcatgacgtgcgatgtcgacatcatgaatgacttgtatggtaacattgtgctcagtggtggcaccaccatgttccctggtattgcggaccgtatgagcaacgagatgactgccc

SEQ ID NO: 82132 - DNA, 452 bp, Zea mays
taccggtcgtatatctcgggggctcgaacacgcgtcaagagaatggcatcaccttctttacaagtagaacaacgaccagtcacggaaacctattgtatggtctaatatcggagtgggtgcagttcttcaactgtttgaagttactactcgtggacagccgtttgaagttatcaagacacagcttgctgcaaatcgaaaggacagcatgatttctgctttgaagactatctattctagaggaggcatattgggcttttaacaaggactgattccctgggcatggattgaagctagtacgaaaggcggtgtcttatttttggcgcataatgaagcttctacctttgttgcgtcgttgggattttctccaaccgtttcagatacggtaggatgtacatttggtggtgtcgcacaagcttatactactatggggttctgtacgtttatgaaaaccg

SEQ ID NO: 82133 - DNA, 446 bp, Zea mays
attgcccttgtcgtctatcatagacacacgttaaccttggtccattactactaggaatgacccttcgtaaaccagtctttaccaaagtagaaaaactacaacccgggacacaggggcacaacttgatcgttcaagtgatgaacgtcggtgaggttatggaaaaagtgagaccgagtggtgacaaactgcaaatcgccgaagtgctacttgcagatgaaactggagcggtattatttacagcaaggaacgaacaaatcaaactttttaaaaagggagagtgtgtgaccgttcgaaacgcaaaagtcaatatggtgcgaggctttattcgtttagtagttgacaaatggggagctattaagccgcctggaccaacggaaaagttacaaggaccaccaaaagtagaaaacaatatttccaacatagaatatgaactcgtgtaagacact

SEQ ID NO: 82134 - DNA, 340 bp, Zea mays
acgagatccagaacgtcgacaacctgtccatcaacggccacggcaccatcgacgggcagggagccctggtgtggaacaagaacgagtgccagcgttcctacaactgcaaaatcctccccaacagcctggtgctggacttcgtgacgaacgcccagatccgcggcatcacgctgctgaacagcaagttcttccacatgaacatcttcgggagcaagaacgtggtgatcgacaaggtgacgatcaaggcccccggcaacagccccaacacggacggcatccacatcggcgactcgagcaacgtgaccatcagcggcaccaccatcgccgtcggcgacgactg

SEQ ID NO: 82135 - DNA, 416 bp, Zea mays
agacgatcctcatccccaagggcgacttcctcgtcggaccactcaacttcacaggcccatgcaagggcgacgtgaccatccaggtgaatggcaatctgctggcgaccacggacctaagccagtacaaggatcatggtaattggatcgagattctacgcgtggacaaccttgtcatcaccggcaagggaaagctcgacgggcaggggccagccgtgtggagcaagaactcctgcgtcaagaagtacgactgcaagatccttcccaactcgctggtgatggacttcgtgaacaacggggaggtgtccgggatcacgctgctcaactccaagttcttccacatgaacatccacaagtgcaaggacatgctgatccaggacgtaaatttgacggcccccggggaacgtccccacacggac

SEQ ID NO: 82136 - DNA, 393 bp, Zea mays
  unsure (1)..(393): unsure at all n locations
agcgccgtcgacgacagcaggttcaaggaggtgaccaagcgggagtacacgcagtacagcgagtacaagaactgggtgtggaagtcgcaggacgacctgttcctcaacggcgccttcttcaaccagtccggcggccagaacgagcgcaagtacgacaggctcgacctcatccaggccaagggcggccagtacgccgagtcgctcaccaggtacgccggcgcgctcaactgccgcgtcggcaggaagtgctagtgcgtgtgcagctctaggctgcagctttcatcattggcgatcgatcgtaacaatgcaaggttgtgttgtatataactcttgtgtttggaatgccgcccgtaattaatggtcaactctaacactgcttgcctttaanaaaaa

SEQ ID NO: 82137 - DNA, 360 bp, Zea mays
aaagaagtcgcctaattctttcgatcgaattaggcgccttcttcgtcccacgctccgtctttatttgtaatctgaagcttacaggaacatttgagtggatcatggacggattggtaggcctcttgaaagtccgggtggtgaggggcatcaaccttgcctaccgcgacgcaagaggcagcgatccgtatgtcgtcctacgacttggcaagaagaaacttaagacgagcgtgaagaagagatctgtgaaccccatctggcacgacgagctaactctgaccgtcacagatcccagcctagctctgaagctggaggtgttcgacaaggacacgttcagcagggacgaacccattggggacgcgg

SEQ ID NO: 82138 - DNA, 376 bp, Zea mays
agtaccattatggctggttcgtggatggcggcgccacggcctctcctgctatcgctgctggtcgccgtgctagcggtggccgcggatgtcgccaacgccggccacgccaagcccctgacgcctggcgggcgcgtggtacaccacaaccacggcaagttcacggccgggccgtggaaacccgcccacgcgaccttctacggcgggcgggacgggtccggcaccacggcgggcgcgtgcgggtacaaggacacgcgcgcgcaggggtatggcgtgcagacggtggccgtgagcacggtgctgttcggcgacggcgcggcctgcggcgggtgctacgaggtgcgctgcgtggacagccccagcgggtgcaagcccagcg

SEQ ID NO: 82139 - DNA, 390 bp, Zea mays
aaccgaccagccagcgaggaatcctgatttggagcactggacgggacgcgttgccattagctgtcgcgtcagttacgttttgcttgccctgttctcgttcggccttgacaacccggaaatcctccagccctctagtccccaacgacgcaggaagcaggatcgagccgaatcctccggaactcgccgccggggccaaccgacctcacactattgatcgaggatgtcgtacgcctacctcttcaagtacatcatcatcggcgacacaggcgtggggaagtcatgcctgctgctgcagttcacggataagcgcttccagcccgtgcacgatctcaccatcggcgttgaatttggcgcccgcatgatcaccatcgacaacaagcccatcaaact

SEQ ID NO: 82140 - DNA, 397 bp, Zea mays
aatcccatccgtgtcccggagcccagggagcggaggcgggcgggccggcgggcggccatggacgtggactgcgtctcgctgcccgacgccccggcgggcgacgtggatggcggcgccgcccggccgtggcccaaggccgtcaccaacggcggcgtccacgagctgctggagtgccccgtgtgcaccaactccatgttcccgccgatccaccagtgccccaatggacacacgctgtgttccacatgcaaggccagagtacacaaccgttgccctacctgcaggcaagagctgggcgacatcaggtgcctggcgctggagaaagtcgccgagtcgctggagctcccctgcaggtactactcgctggggtgcccggagatcatgccgtactacagcaaga

SEQ ID NO: 82141 - DNA, 380 bp, Zea mays
aagaccgttgaactgaacaaaccacagattgagcagctcatattttggtgtcagtattggattttagttgccctgttgacagttttggagagatttggagattttacaatatcatggctaccgttttactcagaagcaaaggtgttgttctttgtatatttgtggtaccctaagacaaagggaactacgtatgtttatggaactttctttaagccatatatttctcagcatgagaatgaaatcgaccgaaatcttcttgagctcagagctcgagccaccgatatggttgtcctttacttccataaggctgcttcggtagggcaaaatactttctttgacgttttaaaatatgttgctgcccagtccccttctcggaaatc

SEQ ID NO: 82142 - DNA, 390 bp, Zea mays
acccacgcgtccgcccggcgctccctttgccgtggtgggggcgggccggccgcggtgcgctcgtccgcgcccgcgcccgcgccgtccgcgcggcgctacggcccccgagccagtggtccgtcgggagctggcggggccgcccggcgcagcagcagcccgagtacccggacaaggcggacctggaagacgtgctgcggacggtgggaacgttcccgcccatcgtcttcgccggcgaggcgcgcaccctcgaggagcgcctcgcggaggccgccgtcggccgggccttcctcctccagggcggcgactgcgccgagagcttcaaggagttcaacgccaacaacatcagggacaccttccgcgtcctcctgcaaatgtccgttgtgctcatgt

SEQ ID NO: 82143 - DNA, 350 bp, Zea mays
acgaggctcaaatgcctagccctagtaagggcggcggtgactggccgctgctcagggacatgatcgccgataaccaccggctcatcgtgttcacatccaagaaagggaagcaggggacggaggggctcgcgtaccagtgggactacgtcgtggaaacccaatacgggagcgagggcatggcggatggcagttgcccaaagcggaccgagtcgaagcccatggactctaaggcccagtcactagtgctgctgaacttcttcaccagcaacccgagccaaagctgggcctgcagcaacatctccgcgccgctcatcagcatgcttaacgcctgctaccacgcctccgccaaa

SEQ ID NO: 82144 - DNA, 381 bp, Zea mays
gccgcggctgacatgtccaaggtgctgcaggtggagatctcagccggcgccgccgaggaggacgccgtggctgcgactgcgactgcgcctgcgccggcgtcggcgtcggcgtcctttgggctcttctccggggagttcctccgccggcacgggctgcacctcctgggcacgtcctcgacgtggttcctgctggacatcgccttctactcgcagaacctgttccagaaggacatcttcagcgcggtggggtggatccccaaggcggcgacgatgaacgcgctggaggagctgttcagcatcgcgcgggcgcagtccctgatcgcgctgtgcggcacggtgcccggctactggttcacggtggcgctgatcgacgtgttgggg

SEQ ID NO: 82145 - DNA, 409 bp, Zea mays
agctaccgcgccgtcgacgacagcaggttcaaggaggtgaccaagcgggagtacacgcagtacagcgagtacaagaactgggtgtggaagtcgcaggacgacctgttcctcaacggcgccttcttcaaccagtccggcggccagaacgagcgcaagtacgacaggctcgacctcatccaggccaagggcggccagtacgccgagtcgctcaccaggtacgccggcgcgctcaactgccgcgtcggcaggaagtgctagtgcgtgtgcagctctaggctgcagctttcatcattggcgatcgatcgtaacaatgcaaggttgtgttgtatataactcttgtgtttggaatgccgcccgtaattaatggtcaactctaacactgcttgcctttgcctgcgggcaaccaaca

SEQ ID NO: 82146 - DNA, 421 bp, Zea mays
gcacgcgtccgaaagtacgtcgatggcgacggtgacattgtggcagtggacgtcaaggagaagggctctgacacgtacgagcccctaaagcactcctggggcgccatctggaggaaggacagcgacaaaccgcttaagggacccctcaccgtccgcctcactaccgagggaggcaccaagtccgtctacgacgatgtcatccctgccaactggaaggccaacaccgcctacaccgccaaataattaactttagtgctgacaatactttaagccggcctatgctagctatactagaattggttggatcccaagcaatgcattacacatgcatgcattggaccgtgatatctatttgctaccactaccctattacgacagtgatgctggcgccaacaatgatggtgtcatcctcccttctcca

SEQ ID NO: 82147 - DNA, 382 bp, Zea mays
acccacgcgtccgcccacgcgtccgggttaagagcctcaaaggaggtaaggagatgaggatggatgttcttctgatggaaaatcttttgtttgagcgcgatgtgacaacattgtatgatttaaagggctctgccagatcaagatataacccagactcaaatggtagcgataaagtacttcttgatcagaacttaattgaagcgatgcctacatcacctatatttgtcggaaacaaggcaaagaggctgctggagagagctgtttggaatgacacgtcctttcttgcttccatcgatgtaatggattactctttacttgttggtgttgatgagaaaaggcatgaacttgtaatgggtattatagatttcataaggcaatatac

SEQ ID NO: 82148 - DNA, 380 bp, Zea mays
ggagctcgccgaggcgtcggcgagggaggcgtacaggcccgacccgtacaacgtcaccaacagcttcaacgccgccgtccacagagctgtcagcagcagtcggcgtgagatgcgggagaggccgaggaagcacaagaagaggggcccatgccgggcgacgaaccctatcgacaagtgctggcgctgccgcagggactgggcgacggaccggcagcgcctggcccgttgcgccagaggcttcgggcacgcgaacaccggcggccttggcggcaagatctacgtggtgaccgaccccaccgacctcgacgtggtgaacccgcgccccggcacgctgcgctggggcgtcatccagcccggcccgctgtggatcatcttcgcgc

SEQ ID NO: 82149 - DNA, 407 bp, Zea mays
cacacgcgtcaaatcgtcttgggggaaaacacatgatagacctaaagaaagctcaggcctgcgcataggacttttcgaatctcgaagggcctagccacgaaagccatcagggcctagaggagtctcgcacaggtttcgattgaactccgctacgaggggcgttacaacgcaacgagagcagtctggagagcatgggcattgggctttgacggagagaggatggtcaagtccttcatgaccaagggcaacgtcgttgtcgtatgtgacaacttcataggcccttgcaagggcgacgtgaccatccaggtggatggcaatctgctggcgaccacggacctaagccactacaaggaacatggtaattggatcgagattctacgcgtggataacctggtcatcagcggcaa

SEQ ID NO: 82150 - DNA, 443 bp, Zea mays
  unsure (1)..(443): unsure at all n locations
tgtaccggtcatgntccgggtccacccagcgtccgaaaaaaggaaccaagagagaaaaagacgccaggccgcccggcaacattcaagaaggaaggaaccccaaaaacccggcggcggcaacaatggctccgcgcacctcatcggcggcaacttgcctgtgcctcgctctcgccgcggccacgctggcgctggcccacggggcccaaggaggaggaccatcggcatcggcggcggacctggacaaggtcacggccgagaccttcctcgacatcgagatcgacggcaagcctgcaggccggatcgtgctgggactgtttggggacaccgttcctaaaacagcagagaacttccgagcactttgcacaggggagaaaggaatggccaagtccggcaagcctctatggtacaaggggtcgacgttccacaggatcatcccggggttc

SEQ ID NO: 82151 - DNA, 388 bp, Zea mays
  unsure (1)..(388): unsure at all n locations
aanaaacganagatgactgtcgtgagcaacaagttgtcattaatgcaagttcaagttctggtggccgttggaacatcatttctaataaggggtgcctgntgttgtcctcccaaggtttccccangaaagaacatcacaagcaactatggcagtgattggctaaatgccaaggcaacatggtatggcaagcctacaggtgccggccccgacgacaatggtggcggatgtgggtacaaggacgtgaacaaggcccctttcaacagcatgggcgcatgtggcaacgtccccatcttcaaggatggtctgggttgtggatcctgcttcgagatcaagtgcgacaagccagcggagtgctctggcaagcccgtggtggtatacattacagaca

SEQ ID NO: 82152 - DNA, 395 bp, Zea mays
ggccgaggcccgcgtccgaagcgaccgggcctggtgggtccttcgacatcaccaagttgggcgcctccggcaatggcaagacagacagcacgaaggctgtgcaggaggcatgggcatcggcgtgcggcggcactgggaagcagacaatcctcatacccaagggcgacttccttgtcggacaactcaacttcacaggcccttgcaagggcgacgtgaccatccaggtggatggcaatctgctggcgaccacggacctaagccagtacaaggaccatggtaattggatcgagattctacgcgtggataacctggtcatcaccggcaagggaaaccttgacgggcagggcccagccgtgtggagcaagaactcctgcaccaagaagtacgactgcaag

SEQ ID NO: 82153 - DNA, 420 bp, Zea mays
ttcgagtaacacagttgagcacgacgatgggatccctcgctaataacatcatggtcgtgggcgccgtccttgcggcgcttgtcgtcggcgggtcgtgcgggcccccgaaggtgccgcccggccccaacatcaccaccaactacaacggcaagtggctcaccgccagggccacctggtacggtcagcccaacggtgccggcgctcctgacaacggcggtgcgtgcgggatcaagaacgtgaacctgccaccctacagcggcatgacggcgtgcggcaacgtccccatcttcaaggacggcaagggctgtggctcatgctacgaggtgagatgcaaggaaaaacctgagtgctcgggcaatccagtcacggtgttcatcacagacatgaactaacgagcctatcgctccctaccacttcgac

SEQ ID NO: 82154 - DNA, 90 bp, Zea mays
  unsure (1)..(90): unsure at all n locations
cgtcgggccacggcacgctgcgctggggcgtcatccancccggcccgctgtggatcatcttcgcgcggtccatgatcatgcagctctcgc

SEQ ID NO: 82155 - DNA, 313 bp, Zea mays
  unsure (1)..(313): unsure at all n locations
gcgtcggccggcgtcggnggtgctggatcacatgaccggcggcccccnggtaccgattccgctggggcgcaaggactcgctgtcgtcgtcgcgcaagaggccnacgtcgagctgccacacgccaacttcaccgtggaccgcctcatccagatgttcggcgccaaggggttcacggtgcaagagctggtggcgctgtccggcgcccacacgctgggcttctcccactgcaaggagttcgccgaccgcctctagaacttccgcagccagggcgggaagccggagccgttcgacgccagcatgaacccgtcctacg

SEQ ID NO: 82156 - DNA, 462 bp, Zea mays
  unsure (1)..(462): unsure at all n locations
ccgctcctgcgcacgccatccgatgcggtcactggccggggagggctcagaaacctttcatccaatacatacatctatctgagccctttcgcgcggtgaggcccgaccggagtccacacacacacggtgtcgatggcggccgtaataaggagccgccgccgcgtgtccgttttcttctacgtcgtcctcgccgcagctgcagctgcagccgcggcgcaggcatccaataacgtcacctcggacgaggagtactgggcggagcgcgccgaggtggctcggtcgcgcaacctcgccgcctaggtcagcgacgccgtggccgccacgaaccgcttcaacgcggacgtgctgagggccacgacgcggcnggcgctggcgaagtacgatggcccgtgcatggcgaccaaccccatcgaccggtgctggcgctgccgcgccgactgggcgacggaccggaagcggctg

SEQ ID NO: 82157 - DNA, 387 bp, Zea mays
cgaaaaacacaggtgagcgcgacgatgggatccctcgttaataacatcatggtcgtgggcgccgtccttgcggcgctcgtcgccggcgggtcgtgcgggcccccgaaggtgccacccggccccaacatcaccaccaactacaacggcaagtggctcaccgctagggccacctggtacggtcagcccaacggtgccggcgctcctgacaacggcggtgcgtgcgggatcaagaacgtgaacctgccaccctacagcggcatgacggcgtgcggcaacatccccatcttcaaggacggcaagggctgcggctcatgctacgacgtgagatgcaacgataaacctgagtgctccggcaatccagtcacggtgtacatcactgacatgaac

SEQ ID NO: 82158 - DNA, 392 bp, Zea mays
ccggcggcctcgtggccatcgtcgtgtccgcgtcgttcaaggccaggttcccagccccggcctacgccgtcgaccccgccgggtccacgccgccgcaggccgacttcgtgtggcggatcatcctgatgctgggcgcgatgcccgcggcgctcacctactactggcgcaccaagatgcccgagacggcgcggtacacggcgctggttgccaagaacgccaagcaggccgcggctgacatgtccaaggtgctgcaggtggagatctcagccggcgccgccgaggaggacgccgcggctgcgactgcgactgagcctgcgccggcgtcctttgggctcttctccggggagttcctccgccggcacgggctgcacctcctgggcacgtcctcgacg

SEQ ID NO: 82159 - DNA, 390 bp, Zea mays
cggaagcgtggcggacgcgtgggttcacgcctccctcaccagataaggtcccgcccttttccgacattcacaggggggacaggaaatcagcggccatggcctcgattccggcgacgaccttcgccgtcatcttatccgtcctcttctgtgccgcggctggcaccgccgtcgacaacgacctccccgactacgtcatccagggccgcgtctattgcgacacctgccgcgccgggttcgtgaccaatgtcaccgagtacatcgcgggcgccaaggtgaggctggagtgcaagcacttcggcaccggcaagctcgagcgctccattgacggggtgaccgacgggaacggcacgtacacgatcgagctcaaggacagccacgacgaggacatct

SEQ ID NO: 82160 - DNA, 182 bp, Zea mays
  unsure (1)..(182): unsure at all n locations
tcgcccacgcgtccgccaccatccgacagtaagcgagtacaaaactgggtgtggaagtccaggacgactgttctcaacgggcctcttcagcagtccgggggcagaacancgcaagtaaacaggctcgactcatccangcaaagggcgcagtacccgagtcgctcacaagtaccccgcgcgct

SEQ ID NO: 82161 - DNA, 424 bp, Zea mays
  unsure (1)..(424): unsure at all n locations
accacgcctcgggctcggtccttcgacatcaacaagttgggcgcctccggcaatggcaagacagacatcacgaaggctgtgcaggaggcatggncatcggcctgcggcggcactgggaagcagagaatcctcatacccaagggcgacttccttgtcggacaactcaacttcacaggcccttgcaagggcgacgtgaccatccacgtggatggcagtctgctggcgaccacggagctaagccagtacaaggaccgaggtaattggatcgagattctacgcgtggataacctggtcatcaccggcaagggaagccgttgacgggcacggcccagctgtgtggagcaagaactcctgcaccaagaggtacgactgcaaggtcctgtcggactcgctggtgatggacttcgtgaacaacggggaggtg

SEQ ID NO: 82162 - DNA, 437 bp, Zea mays
ggttacctctctcaccatagcgcccgctctgtcgcccttcgttcacctctccttcctctcgtccctgcctgccagggagaggggaagtcagaggcacggagtggcgcagagcagacgcccgtgaaccattgtagctgtccctgtcgtcgtcgtcgtcaacgaacccacacaaggaaaggatggagaagaagccgaccatcctcatgaacaggtacgagctcgggcgcacgctcgggcagggcaccttcgccaaggtgtaccacggccggaacctcgcgtccggcgagagcgtggccatcaaggtcatcgacaaggagaaggtgatgcgcgtcggcatgatcgaccagatcaagcgcgagatctccgtcatgcgcctcgtccgccaccccaacgtcgtgcagctgcacgaggtgatggccagcaagagcaggatatac

SEQ ID NO: 82163 - DNA, 423 bp, Zea mays
  unsure (1)..(423): unsure at all n locations
tccggaagaccaccgtcggccgggcgcgcagtgcaatcagttcgcgcagatcacgctgcaaactgcagaacgtgatcctgcaaacctgcacatccacgactccaagggcactcgggcggcatgatccgcgactcgaagcggcactacgggctgcgcacgcggagcgacggcgacggcgtctccgtgctgtcgtccagcaacgtgtggatcgaccacctgtccatgtccagctgctccgacgggctgatcgacgtggggaacgggtcgacgggcatcaccgtgtccaacagccacttcaccgaccacgaccacgttatgctgttcggggccagcaaggacagcccgcaggacgcggtgatgcaggtcacggtggcgttcaggcacttcggccgcgggctggtgcancggatgccgcgctgccgc

SEQ ID NO: 82164 - DNA, 425 bp, Zea mays
ggattccggatcgaccacgcgtcgggcaatctgctggcagacacggacctaagccagtacaaggatcatggtaattggatcgagattctacgcgtggacaaccttgtcagcagcggcaagggaaagcgcgacgggcaggggccagccgtgtggagcaagaactcctgcgtcaagaagtacgactgcaagatccttcccaactcgctggtgatggacttcgtgaacaacggggaggtgtccgggatcacgctgctcaactccaggttcttccacatgaacatgtacaagtgcaaggacatgctgatcaaggacgtcaatgtgagggcgcgcgggggaagcccaacagcgacggcatccacatgggcgactcgtccggggtcacgatcggcaagcacgtcatcggcgtcggcgatgactgcatctcc

SEQ ID NO: 82165 - DNA, 331 bp, Zea mays
cgttcatcagcagtgcggcgatgaaggcagccgtggccgctctgctggtgttcgccgcggtgtcgcctgccgcgcgcgcggtggcggcggaggcggaggcgaaggcgaaggctgtgggaggcgcgccgtcggtgcccgctggctcgctggacatcgcgcagctgggcgccaagggcgacggcaagtcggacagcaccccgatggtgctcaaggcgtggaagcacgcgtgcgaggcgacggggcagcagaagatcgtcatccccaagggcaactacctgacgggcgcgctggacctggtgggcccctgcaagtcctccatcatcatccgcct

SEQ ID NO: 82166 - DNA, 344 bp, Zea mays
gatcacctctccctctccctctccgatccattctccagcgcagcgaagtaaacatgtctgaccgggcaaagatgtcgtggcaggcgtacgtggacgagcacctgatgtgcgagatcgagggccaccacctcgcggcggcggccatcgtcggccacgacggtgccgcctgggcgcagagcacggcgttccccgagttcaagaccgaggaaatggccaacatccataaggacttccacgaaccaagggaactcgcgccgacaggcctgttcctcggacctaccaagtacatggtcatccaaggcgaacctggtgccgtcatccgtggcaagaagggatcaggaggc

SEQ ID NO: 82167 - DNA, 431 bp, Zea mays
  unsure (1)..(431): unsure at all n locations
attaattgcgccactgctcgttatcctcctcttgcattgcattgcaggtcgtagttgagcagcagcaaccactgcacaggatgtcgtggcagacgtacgtcgatgagcacctcatgtgcgagatcgagggccaccacctgagctctgccgccatagtcggccacgacggcgccgtttgggcccagagcaccgcattcccacagttcaagccagaggagatgaccaacatcattaaggacttcgacgagcctgggtttctggccccgatcggcctcttccttggccccaccaagtacatggtcatccaaggcgagcccggcgctgtcatccgcgggaagaagggatctggangcataactgtgaagaagaccggacaggcgctggtgatcggcatctacgacgagcccatgacccctggacagtgcaacatg

SEQ ID NO: 82168 - DNA, 423 bp, Zea mays
aactcaccccgccttcacgcctccctcaccaaataaggtcccgcccttttccgacattcacaggggggacaggaaatcagcggccatggcctcgattccggcgacgaccttcgccgtcatcttatccgtcctcttctgtgccgcggctggcaccgccgtcgacaacgacctccccgactacgtcatccagggccgcgtctattgcgacacctgccgcgccgggttcgtgaccaatgtcaccgagtacatcgcgggcgccaaggtgaggctggagtgcaagcacttcggcaccggcaagctcgagcgctccatcgacggggtgaccgacgggaacggcacgtacacgatcgagctcaaggacagccacgaggaggacatctgcgaggtggtcttggtggagagcccgcgcaaggactgcgacca

SEQ ID NO: 82169 - DNA, 401 bp, Zea mays
acggagcaaggacatgctgatcaaggacgtgaccgtgacggcgcccggggacagccccaacacggatggcatccacatgggcgactcatccgggatcacgatcaccaacaccgtcattggcgtcggtgacgactgcatctccatcggccccgggacctccaaggtgaacatcaccggcgtgacctgcggccctggccacggcatcagcatcggcagcctagggcggtacaaggacgagaaggacgtcacggacatcaacgtcaaggattgcactcttaagaagacgatgttcggcgtccgcatcaaggcgtacgaggacgccgcctccgtgctcaccgtctccaagatccactacgagaatatcaagatggaggactcagccaaccccatcttcatcgaca

SEQ ID NO: 82170 - DNA, 502 bp, Zea mays
  unsure (1)..(502): unsure at all n locations
ccacgcgtcgggcaattctagggttagtaacagaccagtggaaggagatgggatggcaagggaaagatccatctacagatttcaggggcggtggttttatatctttggagaatttactgtatttctctaggaactatccaaaatccttccaggagctcctccgtaagcagaatggtgatagagcattgtgggaatatccctttgctgtagctggtgtaaatattacattcatgctgattcagatgcttgaccttcaagcagctaagccaacgtcgttggttggagcagttttcctaaatctacgcttataaaatgatcgancgttcgacattctttactgcataaccttcagactgatggatcagaaatggcgttaaatgcacgccagttacatggatttcaatacggttattaaatcaacacggcgccagctcgagagggagctgttgctagaagatatcaagagaatcgaggacatgccatcgtacaggtttctcgcctg

SEQ ID NO: 82171 - DNA, 450 bp, Zea mays
accacgcgtccgccgcgtgggcctgaacggagagaacgcgctgccgcgctacgacgacacggcgcacgaccaggtggtggccactgccgccgacagggccgccgacgaccgcatggtggccttcacgtacctgcgcatggggcccgacctgttccagcccgacaactggcgccgcttcgccgcgttcgtcaagcgcatgacggagccgggcgcgcgggaggcgtgccgggagcaggtggagcgggaggccgacggcgtcgcgcaggcgacccatcccctcgtgcacgaggccgccgtcgcgctcacgagcgtgccggaccgggcggcgttcgccatcgactgtgttcgatcgctagacggggtggcacgctgcgaggactacctgtatggcgagtccctatacttactcatacataagctgcgccgccgtgtcgtcggtgcgtgcaccgc

SEQ ID NO: 82172 - DNA, 165 bp, Zea mays
gcgtcgggccccatgtggtcgtcgatacgggcacaggttgcgatggctgtggtgttggtgttcttggtgagcggcgcatggtgcggtcctcgcaaagtcgcgccacgcagagagcatcacggccacctatggcaacgactggctggacgctaaagcgacatggta

SEQ ID NO: 82173 - DNA, 397 bp, Zea mays
  unsure (1)..(397): unsure at all n locations
accacgcgtcggcgcgagcgccgcccttttttttttttttttatataattataaaggctagtttgacaacttcattttctcaagtgaatcctatttttcaggagaaaatgaattaaattcccttgaaaaaataaaacctcttagaaaaaataaggttgtgaaactagccctattaataaatttatgcacgaatgcaacatcggtttcagcatgttcctctttacagaatactactgcttccgtgtatacagagaaactacatttcacggagtagtaaataaacagggattaattagcgccgtgtgcatgcatgcatacngcgttgggctggccgacatgatcataacaattaattaattaattaaggcgaagacagcaagcgtggaggatcgatgcg

SEQ ID NO: 82174 - DNA, 339 bp, Zea mays
acgcgtccaatccaggatcaccatcaccaacaccgtcattggcgtcggcgacgactgcatctccatcggccccgggacctccaaggtgaacatcaccgacgtgacctgcggccctggccacggcatcagcatcggaagcctaaggcggtacaaggacgagaaggacgtcacggacatcaacgtcaaggattgcactcttaagaagacgatgttcggcgtccgcatcaaggcgtacaaggacgccgcctccgtgctcaccgtctccaagatccactacgagaatatcaggatggaggactcagccaaccccatcttcatcgacatgaattactgccccaa

SEQ ID NO: 82175 - DNA, 418 bp, Zea mays
caacgcgtccgcggacgcgtgggcgggaggcgagagtgcgtgcgtgcagccacaggcaggcgtcggcaccatgtcttctttcaccggcacgcaggacaagtgcgcggagtgcgacaagaccgtccacttcatcgacctcctcacggccgacggcgtcacctaccataagacatgcttcaagtgcagccactgcaaagggatcctctcgatgtgcagctactcttccatggacggtgtgctgtactgcaagacccacttcgagcagctcttcaaggagaccgggagcttctccaagaacttcacgccaggtggcaagtcttcagacaagggtgaactgacaagggccccagcaagctatcatctgcgttttctggtactcaggataagtgtgcagcttgccagaaaacagtgtacccgc

SEQ ID NO: 82176 - DNA, 399 bp, Zea mays
cccacgcgtccggcagagggagagattggagggaggcccctgcccaaggcaagagaaaccgcggcgcgcggagagggaggaagggcagacgcagacgcagacgggcgaacaagatgagggagatcatcagcatccacatcggccaggccgggatccaggtcggcaacgcctgctgggagctctactgcctcgagcacggcatcgagcacgatggcaccatgcccagtgattcctcggttggcgtcgcacatgatgccttcaacacgttcttcagcgagactggttccggcaagcatgtgcccagggccatcttcgtcgaccttgagcccactgtcatcgacgaggttcgcactggctcgtaccgccagctcttccacccagagcagctcatctcgggga

SEQ ID NO: 82177 - DNA, 408 bp, Zea mays
ggccgtccggcgcgctcacccagcagtccaacctggtgctgtacggcaggatccagtgcaagggcaagtgcaccgagcagaagggcatcacggcgccggccatgaaggtctgccaggaggagtgcgacaaggcgtacgtggtgaaggcggccgaggtcaccaaggcctgcagcgtcacctgcgccaaggagaagaacccgcgcctcagcgagaactgcaagaggtcctgcacccctcctccttcttgaagcgaagccccttgaaatgaatgaaccatgcatgcatgcatgcatgtatgcatgcccccggggtgacgtggcgttcagctcaggcgctgagcgagtctatacgtacgtcgtcaacggctgggcacgcatgccataaccatctgatatggacggaactata

SEQ ID NO: 82178 - DNA, 310 bp, Zea mays
gctcgtcgtagtctcactcaccccgccttcacgcctcgctcatcaaataaggtcccgcccttttccgacattcacaggggggacaggaaatcagtggccatggcctcgattccggcgacgaccttcgccgtcatcttatcgctcctcttcggtgccgcggctggcaccgccgtctataacgacctccccgactatgtcattcagcgccgcgtctattgcgacacctgccgcgccgggttcgtgaccaatgtcaccgagtacatcggcgggggccaaggttagggctggagttcaagcaacttcggcaccg

SEQ ID NO: 82179 - DNA, 318 bp, Zea mays
acgaacgtcgtacgagaacctttctccctcctccacctttctccttttcttgccacggcaaaacaccttcgccggcgagagcatggcgatggcgtaccgtgtcctggaggtcaccctggtgtcggcaaatgacctcaagaaagtgtcgctcttctcccggactcgcatctacgccgtggcttccatctccggattcgacctccgcatcccttcccacagcacccaagcagaccacagcaacggctgcaacccctgctggaacgccgtggtacacttccccatcccggctgccgctgacacgcgcggcctcgcactcca

SEQ ID NO: 82180 - DNA, 340 bp, Zea mays
tgacggacatgaacctgtcgagcacctacggcaagctcgccatggtgctcgtgggctccagcgtggggcgcaacgacggcggcgtcgtcgccggcctcgtggcctgtgggatcgtgatggggaccatgtccaacgccaacaacctgatgcaggacctcaagacggggtacctgacgctgacctcgccgcacaccgtgttcatcagccaggccatcggcacggcgctccggtgcgtccgtcaaccggtcatgttctgggcttctacagggtggtgcagaacggcgacaccgacgtcttcgacgcgccctacgcccgagtgtaccgcagcatcgccatgctg

SEQ ID NO: 82181 - DNA, 292 bp, Zea mays
cccacgcgtccgcccacgcgtccgccatgaccttaagtcacggtttggtatcatacctcaggaacctgttctccttgaagggaccattaggagcaacattgatccgcttgagcagtattccgatgatgaaatctggcaggcattgggccgctgtcagttgaaagaagccgtagcttcaaaacccgaaaagcttgatgcttcagtcgtcgacaatggtgaaaactggagtgttggacaacgtcaactgctatgcctggggcgggtgatgctaaagcacaacaaaatactgttc

SEQ ID NO: 82182 - DNA, 363 bp, Zea mays
ggggaggaagcagttccagcaggaggtggaggtgctcagctgcatccgccaccccaacatggtgctcctcctcggtgcgtgccccgagtacggctgcctcgtgtacgagtacatggagcacggcagcctcgaggaccggctgttccgtcggggcggcacgccgccgatcccgtgggcgcagcggttccggatcgcggcggagatcgcgacggcgctgctgttcctgcaccagacaaagccggagccgctggtgcaccgggacctgaagccggccaacatcctgctggaccgcaactacgtgagcaagatcagcgacgtcgggctggcgcgtctggtgccgccgtcggtggcggacagcgtgac

SEQ ID NO: 82183 - DNA, 345 bp, Zea mays
cggacctggtcgtgtgcaaggagtcctgcgcgctctcccagcagtccaacctggtgctgtacggcaggatccagtgcaagggcaagtgcaccgagcagaagggcatcacggcgccggccatgaaggtctgccaggaggagtgcgacaaggcgtacgtggtgaaggcggccgaggtcaccaaggcctgcagcgtcacctgcgccaaggagaagaacccgcgcctcagcgagaactgcaagaggtcctgcacccctcctccttcttgaagcgaagccccttgaaatgaatgaaccatgcatgcatgcatgcatgtatgcatgcgccggggtgacgtggcgttcagct

SEQ ID NO: 82184 - DNA, 354 bp, Zea mays
  unsure (1)..(354): unsure at all n locations
tccgcggacgcgtaggcggagatggagattcccgaggagtatatcgagtccctgccgaagaacggaggtcattcttggagactccatgtacaagatcataaccgacgacgtcttcgaccccaacgagctcctgcagtccgtggacctgtcgacggagcacaagatcgtggacctcaaggaccggatcgaggcctccgtcgtcatctggcaccggaagatcagcaacaagctctcgtgggggcccgccggcgtcagcctggagaagcgggaggagttcgaggagcgggcgcagancgccctgctcatcctcaagcacaggttcccggcatccctcagtcggcgctcgacatcagc

SEQ ID NO: 82185 - DNA, 398 bp, Zea mays
cccacgcgtccggcagagggagagattggagggaggcccctgcccaaggcaagagaaaccgcggcgcgcggagagggaggaagggcagacgcagacgcagacgggcgaacaagatgagggagatcatcagcatccacatcggccaggccgggatccaggtcggcaacgcctgctgggagctctactgcctcgagcacggcatcgagcacgatggcaccatgcccagtgattcctcggttggcgtcgcacatgatgccttcaacacgttcttcagcgagactggttccggcaagcatgtgcccagggccatcttcgtcgaccttgagcccactgtcatcgacgaggttcgcactggctcgtaccgccagctcttccacccagagcagctcatctcgggg

SEQ ID NO: 82186 - DNA, 395 bp, Zea mays
atgtcactgcctgtgagaccaaggtcattcctggcaaccttgggtttgttgcacaactcaatgaagggcgccatcttaagaagcgccctactgagtttcgtgtggaccgtgtgctccagccgtttgaccctgccaaattcaatttcacaaaagttggccaggaagaggttctcttccaatttgagaatagtggtggtgatgacagctatttcctgaacaacgctccaatcattgctgttgatcgggctccaaatgttattgctatcaatgtaagcccaattgaatatggacatgtgcttctcattcctcgtgttctggaccgcctgcctcagaggattgattcagagagcttcttgcttgcactgcaaatggcagccgagggaggtagcccatac

SEQ ID NO: 82187 - DNA, 448 bp, Zea mays
gaaagaagtcgcctaattctttcgatcgaattaggcgccttcttcgtcccacgctccgtctttatttgtaatctgaagcttacaggaacatttgagtggatcatggacggattggtaggcctcttgaaagtccgggtggtgaggggcatcaaccttgcctaccgcgacgcaagaggcagcgatccgtatgtcgtcctacgacttggcaagaagaaacttaagacgagcgtgaagaagagatctgtgaaccccatctggcacgaggagctaactctgaccgtcacagatcccagcctagctctgaagctggaggtgttcgacaaggacacgttcagcagggacgacccgatgggggacgcggagatcgacgtggcgccgctggtggaggcggcgaacgcgagcccggaggcgagcctgaggaacggcgccatcatcctgtcggtgcggc

SEQ ID NO: 82188 - DNA, 345 bp, Zea mays
acccacgcgtccggaactggatcgagatcgagaacgtcgagaacctgtccatcaacggccacggcaccatcgacgggcagggagccctggtgtggagcaagaaccagtgccagcattcttacaattgcaagatcctcccgaatagcttggtgctggattttgtgacgaacgtccagatccgcggcatcacgctgctcaacagcaagttcttccacctcaacatcttcgagtgcaagaacgtgctgatcgacaaagtgacggtcaaggcccccggcgacagccccaacacggacggcatccacatcggcgactccagcaacgtgaccatcagcagcaccaccatcg

SEQ ID NO: 82189 - DNA, 347 bp, Zea mays
agctaacttgtaatctgcaggatctaagcaaagacttgatttagttatggacggattggtaggcctcttgaaagttcgcgtggtccggggtatcaaccttgcctaccgcgacgcaagaggcagcgatccgtatgtcgtcctacggcttggcaagaagaaactgaagacaagcgtgaagaagagatccgtgaaccccatatggcaagaggagctaactctgaccgtcacagatcccagccaaccactgaagctggaggtgttcgacaaggacaccttcagcagagacgaccccatgggagacgcggaggtggacgtggcgccactgatggaggcggtgagcatgaacc

SEQ ID NO: 82190 - DNA, 434 bp, Zea mays
cggacgcgtgggcggacacgtgggcacagttgagcacgacgatgggatccctcgctaataacatcatggtcgtgggcgccgtccttgcggcgcttgtcgtcggcgggtcgtgcgggcccccgaaggtgccgcccggccccaacatcaccaccaactacaacggcaagtggctcaccgccagggccacctggtacggtcagcccaacggtgccggcgctcctgacaacggcggtgcgtgcgggatcaagaacgtgaacctgccaccctacagcggcatgacggcgtgcggcaacgtccccatcttcaaggacggcaagggctgtggctcatgctacgaggtgagatgcaaggaaaaacctgagtgctcgggcaatccagtcacggtgttcatcacagacatgaactacgagcctatcgctccctaccacttcgac

SEQ ID NO: 82191 - DNA, 396 bp, Zea mays
gggccgagcacgcgtccgagcgcgatctcccagcagtccaacctggtgctgtacggcaggatccagtgcaagggcaagtgcaccgagcagaagggcatcacggcgccggccatgaaggtctgccaggaggagtgcgacaaggcgtacgtggtgaaggcggccgaggtcaccaaggcctgcagcgtcacctgcgccaaggagaagaacccgcgcctcagcgagaactgcaagaggtcctgcacccctcctccttcttgaagcgaagccccttgaaatgaatgaaccatgcatgcatgcatgcatgtatgcatgcgccggggtgacgtggcgttcagctcaggcgctgagcgagtctatacgtacgtcgtcaccggctggccacgcatgcgataacca

SEQ ID NO: 82192 - DNA, 413 bp, Zea mays
gggtcgagcacgcgtccgctcctccatcaccaccaccaagctcaacaacagccagctcgcgaaaataatgaagagccgcagcatggcatcatcggccgcgctcttggtgctagccctcgcgctagtggcggccaccgccccacaggtagcggaggcaaagaagaagagagcggcggagagcggcgaggcggcggaggcgaagaagatccaggacgacttctgctcgacgctgtgcgagggcaagaaggggacggacctggtcgtgtgcaaggagtcctgcgcgctctcccagcagtccaacctggtgctgtacggcaggatccagtgcaagggcaagtgcaccgagcagaagggcatcacggcgccggccatgaaggtctgccaggaggagtgcgacaaggcgtacgtggtga

SEQ ID NO: 82193 - DNA, 391 bp, Zea mays
cggacgcgtgggctcgccggcccaaaatcgcctcatcgaccacgcccccttccaggctcccgtctccatgggtctcctctcaaacaggattgggagggagagcctcaaggcgggggatcatatctactcctggagggcggcgtgggtctacgcgcatcacggaatatatgtgggcgatgataaggtgatccatttcacaagaggaagaggacaggaggtcggaacaggaactgtcgtcgatattattcttgtgagttccaccccaaaacgaagcaacacgccttgcccggtgtgcaccgacgaaaccagcgacagcagcacagagacgaacggcgtggtatcctcctgcctcagctgcttcctagctgggggtgctctctaccgtttcgag

SEQ ID NO: 82194 - DNA, 432 bp, Zea mays
gggtccggcccgcgtccggatttatcaaggcaagaaagtttgatatcgagaaggcaaagcaaatgtggtctgatatgctgaagtggagaaaggagttcggtgcagataccattctcgaggaattcgaattcgaagaagctgataaggtggcagaatgctaccctcaaggttaccatggggttgataaggaaggcaggcctgtctactttgaacggcttggacagatcgatgtgaatacgctaatgcaggtcactacaatggatcgctttgtcaagaaccatgtcaaggagttcgagaagaactttgctgttaagttcccagcttgctcaatcgccgcgaaccaccatattgaccagagcacaacaattcttgacgtgcaaggagtggggatgaagcagttcagtaaagctgcaagggagctcattgggatgc

SEQ ID NO: 82195 - DNA, 441 bp, Zea mays
gccacatcgacggcaagctccgctacggcttcaacggcatctcccacagggaccccgagacccccgtgaagctcgctgaatacttcaacgtcaccgacggggtgttcagctacaaccagatgggcgacgtgccccccgccgtgaacggtcccctccatgtcatccccaatgtcatcaccgccgagttccgcaccttcatcgagatcgtcttcgagaaccccgagaagagcatagactccctccacgtcgatggctacgccttcttcggcgtcgggatgggccccgggaagtggtcgccggaggtgaggaagacgtacaacctgctggacacggtgagccggcacacgatccaggtgtacccgcggtcatggacggcaatcatgctgacgttcgacaacgcgggcatgtggagcgtgcattccaacatctgggagcggtact

SEQ ID NO: 82196 - DNA, 450 bp, Zea mays
gggtcgagcacgcgtccatcaccatccgcctcactaccgagggaggcaccaagtccgtctacgacgatgtcatccctgccaactggaaggccaacaccgcctacaccgccaaataattaactttagtgctgacaatactttaagccggcctatgctagctatactagaattggttggatcccaagcaatgcattacacatgcatgcattggaccgtgatatctatttgctaccactaccctattacgacagtgatgctggcgccaacaatgatggtgtcatcctccttctccatcttcttcatctccatatatagctagagtgagacttcgctgttgtttaaaagagaagagttaagaaatggattgacaagttaaaaaaaaaaaaaaaaaaaaaaaaagaaaaaaaaaaaaaaaagaaaaggaaaagaaaaaaaaggaaaggagaacag

SEQ ID NO: 82197 - DNA, 368 bp, Zea mays
ctcgtcgtcgtctcactcaccccgccttcacgcctccctcaccaaataaggtcccgcccttttccgacattcacaggggggacaggaaatcagcggccatggcctcgattccggcgacgaccttcgccgtcatcttatccgtcctcttctgtgccgcggctggcaccgccgtcgacaacgacctccccgactacgtcatccagggccgcgtctattgcgacacctgccgcgccgggttcgtgaccaatgtcaccgagtacatcgcgggcgccaaggtgaggctggagtgcaagcacttcggcaccggcaagctcgagcgctccatcgacggggtgaccgacgggaacggcacgtacacgatcgagctc

SEQ ID NO: 82198 - DNA, 435 bp, Zea mays
ggctgtccatgtcctccaccttcgtgggcaactccacctccatccaggagatgttccgccgcgtgagcgagcagttcacggccatgttcaggcgcaaggccttcctgcattggtacaccagcgagggcatggacgagatggagttcaccgaagccgagagtaacatgaacgacctcgtcgccgaataccagcagtaccaagacgccacagccgaggagtacgacgaggaagagcaggacggcgaggaggagcacgcctgatcgatgcaacgggattcagagtcttcgctgctgtggtacatcaattgggactataagttcctacaatcctatactaccttaagcatatgtattcatgcacttccgtatttccgttgctgctgctagcttgtgtgtgtgtgtgtgtaactacaatcgtgtatgttagtgttttgtg

SEQ ID NO: 82199 - DNA, 440 bp, Zea mays
  unsure (1)..(440): unsure at all n locations
cggacgcgtgggcgcgagcgcagaaggcacacacgtacagccatggcgaactcgtcgtccggcctggcggtgagcgacgagtgcaaggtgaagttccgggatctgaaggcgcggcggagcttccggttcatcgtgttcaggatcgacgacaaggacatggagatcaaggtggaccgcctcggcgagccgaaccagggctacggcgacttcaccgacagcctccccgccgacgagtgccgctacgccatctacgacctcgacttcaccaccgtcgagaactgccagaagagcaagatcttcttcttcccctggtcccctgatactgcacgcacccggagcaagatgctgtacgccagctccaaggacaggttcagganggagctggacggcatccagtgcgagatccaggccaccgaccccagcgagatgagcctcgacat

SEQ ID NO: 82200 - DNA, 442 bp, Zea mays
  unsure (1)..(442): unsure at all n locations
cacctcgtctcaccctccctccctcacacaaataataaggaaaggtcccgcccttttcctccgacatccacaggggggaggggaaaacacgtgcattcacccggcggcaataatggcctcggttccggctccggcgacgacgaccgccgccgtaatcctatgcctatgcgtcgtcctctcctgtgccgcggctgacgaccccaacctccccgactacgtcatccagggccgcgtgtactgcgacacctgccgcgccgggttcgtgaccaacgtcaccgagtacatcgcgggcgccaaggtgaggctggagtgcaggcacttcggcaccggcaagctcgagcgcgccatcgacggggtcaccgacgcgaccggcacctacacgatcgagctcaaggacagccacgaggaggacatctgccangtggtgctggtggccagcccg

SEQ ID NO: 82201 - DNA, 455 bp, Zea mays
aaccgacgaaacaaaagaagctattttgacaccacacacacacacacagaggagagaagataagagaacgaggggcagggcagccagcgccgctagctgaagcaaggcagggcaagagaatccgtacgtcgaggacttcgacaagctccaccgcgcgctcggggacgccttcttcggcgcactgggaggccaggacgacgccaccgccgcggcggacggcgccggcgccggcgccggcgccgaggaggacgagcaggagatgcgggaggcgttcaaggtcttcgacgtcgatggcgacggcttcatctccgccgctgagctgcaggaggtgctcaagaagctcggcctccccgaggccagcagcatggccaacgtccgggagatgatctgcaacgtcgaccgcgacagcgacggccgcgtcgacttcaacgagttcaagtgcatgatgcagggga

SEQ ID NO: 82202 - DNA, 390 bp, Zea mays
ctgatgatgacggtgttcatgctggggctggccgtgccgtacgagcactggacgacgccggggcaccacatcggcttcatcgtcatgtacggcctcaccttcttcttcgccaacttcgggcccaacgcgaccacgttcatcgtgcccgcggagatcttcccggccaggctgcggtcgacgtgccacggcatctcggcggcgtcggggaagctgggcgccatcatcggctccttcgggttcctgtacctggcgcaaaaccgggacccggccaagacggaccacgggtaccccgcgggcatcggcgtgcgcaactcgctgttcctcctcgccggctgcaacctgctgggcctggcattcacgttcctggtgccggagtccaagggcaaatcc

SEQ ID NO: 82203 - DNA, 417 bp, Zea mays
  unsure (1)..(417): unsure at all n locations
aaaacgtcgtacgagaacctttctccctcctccacctttctccttttcttgccacggcaaaacaccttcgccggcgagagcatggcgatggcgtaccgtgtcctggaggtcaccctggtgtcggcaaatgacctcaagaaagtgtcgctcttctcccggactcgcatctacgccgtggcttccatctccggattcgacctccgcatcccttcccacagcacccaagcagaccacagcaacggctgcaacccctgctggaacgccgtggtacacttccccatcccggctgccgctgacacccgcggcctcgcactccacgtgaggctccgcgcccagcgtctatacctgggcgatcgcgacatcggcgaggtgtntgtgnccatcgacgacctcctggccggcgccgacaagggtggc

SEQ ID NO: 82204 - DNA, 311 bp, Zea mays
attctccatcatgctcgccacgacgacactggctacatttttcgtgattggttcgtgcaccaccccgctcaccttcgaggtcggcaaaggctccaagcctggccacctggtcctcacccccaacattgccaccatctccgaagtggagatcaaggagcacggtggcgatgacttctcctttgagctcaaggagggcccggccggcacctggacgcttgacaccaaggccccgctcaagtaccccctctgcatccgctttgccgtcaagtctggcggctaccgcatcgccgatgacgtcatccctgaaaatt

SEQ ID NO: 82205 - DNA, 443 bp, Zea mays
aggacgcgtgggctcctccctcctccccaccccaccccaccccatcccacctcggatctgctgcctccaccgtttcaatccacatgcgagcggaaatcgagcgggcgaattgaatcccgtcccgttcgggctcggccagcgagcgagcggcgtccggccggctgggcattggttcgtgctcgctcgatcgatcagaaaatggcgcatcgtgtgaacaacgagtacgactacctcttcaagatcgtgctcatcggcgactccggcgtcggcaagtccaacatcctctcgcgattcacgcgcaacgagttctgcctcgagtccaagtccaccatcggcgtcgagttcgctacccgcaacctgcagatagacgggaagactgtcaaggcacagatatgggacacggcagggcaggagaggtaccgcgccatcaccagcggctacta

SEQ ID NO: 82206 - DNA, 393 bp, Zea mays
aagaaacaacaagactgacagcgacgatgatgccacagctgcgtagcctcgtcgcgctggtcctcgtggccacggccatagccgccgctcccggcgttgggtttgtcgtcaccggccgcatctactgcgacaactgccgcgccgggttcgagacaaacgtgtcccacgccatccaaggcgcgacggtggagatggagtgccgccacttcgagtcgcagcaggtccacgacaaggcggaggcgacgacgggccccggcggctggtacaggatggagatcagcggcgaccaccaggacgagatctgcgacgtgcgcctgctcaagagccccgaggcggactgcgccgagatcgaccactcccgcgaccgctgccgcgtcccgctcacccgcaacg

SEQ ID NO: 82207 - DNA, 439 bp, Zea mays
caccacgcgtccgcccacgcgtccgggcggttgtaggggaggaggtggaggcggaggcggaggccggtgcatcgtctgcgaagaagaaccgtatccaggtgtccaccaacaagaagccgctctatttctacgtcaatctcgccaagaggtacatgcagaactacgacgaggttgagctctccgctctggggatggccattggtaccgtggtgaccgtcgctgagatcctcaagaacaatggcctcgccactgaaaagaagatcctcacatcaaccatcggcaccaaggatgaggcgaagggccggcttgtccgtaaagccaagatcgagatcctgctgtgcaaatcagagaacttcaacagcatcatgtcgagcaagaagtccgagcgcccgaagccgcccgccgaggaagagataaggtgtgatctatccgaacaacg

SEQ ID NO: 82208 - DNA, 378 bp, Zea mays
cggtgccacaacctctcctgctgtcgctgctggtcgccgtgctagcggtggccgccgatgtcgccaacgccggccacgccaagcccctaacgcctggcgggcgcgtggtacacgacaaccacggcaagttcacggccgggccgtggaaacccgcccacgcaaccttctacggcgggcgtgacgggtccggcaccacggcgggcgcgtgcgggtacaaggacacgcgcacgcaggggtacggcgtgcagacggtggccgtgagcactgtgctgttcggtgacggcgcggcctgcggagggtgctacgaggtgcggtgcgtggacagccctagcgggtgcaagcccgacgcggcagccctggtggtgacggtgaccgacc

SEQ ID NO: 82209 - DNA, 417 bp, Zea mays
atccgaaaggacagcactctgatcatgcagctcctgcgcgacaacttgaccctatggacttccgacaccaacgaggatggcggcgacgagatcaaggatgctgctgccccgaaagaatctgcggagggtcagtaagatggattcagtctcacgacctgctgctgctgatgttgaggagtaaccagaaccagaaccgccgtcctcgattctgatagattatcttctagtataccttgtgttgttgctgttgtcgtcgtcgcgccggtgtatgcgatgaagctgccattgctgctgttttaattaagcattctagatgttataccgcatgctttgtttcggtttctaatgtcgataaatggtggccggatgctggttttcgtgctccgagccggccaccaggaagaagacctgcctgcc

SEQ ID NO: 82210 - DNA, 359 bp, Zea mays
acccacgcgtccgcggggcggcaatggccgccggggaccttgaggtgctcaccgcgctcgacaccgcgaagacgcaatggtaccacttcaccgccatcgtggtcgccggcatggggttcttcaccgacgcctacgacctcttctgcatctccctcgtgactaagctcctcggccgcatctactacaccgtggaggggtccgcgacgcccggcaccctcccgccgcacgtgtccgcgtccgtcaacggcgtggccttcgtgggcacgctgtcagggcaactcctcctcggctggctgggcgacaagctcgggcgcaagaaggtctatggcatgacgctcatgctcatggtcctctgttcc

SEQ ID NO: 82211 - DNA, 355 bp, Zea mays
cacgccgcgccggtcgtcgcgttctgcgacgcgtacgccttcggcgtgacggacatgaacctgtcgagcacctacggcaagctcgccatggtgctcgtgggctccagcgtggggcgcaacgacggcggcgtcgtcgccggcctcgtggcctgtgggatcgtgatggggaccatgtccaacgccaacaacctgatgcaggacctcaagacggggtacctgacgctgacctcgccgcacaccgtgttcatcagccaggccatcggcacggcgctcgggtgcgtcgtcaacccggtcatgttctgggccttctacagggtggtgcagaacggcgacaccgacgtcttcgacgcgccct

SEQ ID NO: 82212 - DNA, 395 bp, Zea mays
aacagccaaccccatcttcatcgacatgaagtactgccccaacaagttgtgtactgccaacggcgcctccaaggtcaccgtcaaggacgtcaccttcaagaacatcaccggcacctcctccaccccggaggccgttagcctgctctgcactgccaaggtcccatgcaccggcgtcaccatggatgacgtcaacgtcgagtatagcggcaccaacaacaagaccatggctatatgcacgaacgccaagggcagcaccaagggttgcctcaaggagcttgcatgcttctagaccctccgtcgactgacccatctctctagttataatttttctctcgtccttgcattgcccattacatgccatccattggtaacgcacaacagttaaacgacagaca

SEQ ID NO: 82213 - DNA, 449 bp, Zea mays
acgcgtccgaatttctcctagaaggtcgagaggagaagaaggcgagacgtgcagtccgtcgggctccgatcgagaacagggaagcaagaggctgctagagatcgagctcatcaaccaatcaagtcgtacgtcgtcagcatcacgcgaccggatggcgcgcgccgcgtccagctatgtatccaggagggggctctccgcagcgatgacggtggcggaggactccgtgaagaaggtggaggacaaggcggtgaagctgggaactgtggccaaggacatcgccagcgccatggccaccacgacggaggagaagacggcgttctgggaacctgaccccgagaccggatactaccgtccggtcaccggcacgaaggaggtggacgccgccgacctgcgcgccgagatgctcaagcgggggattctgcaggacgactgatgcatgcaacatgcac

SEQ ID NO: 82214 - DNA, 428 bp, Zea mays
accacgcgtccgcccacgcgtccgccatgaccttaggtcacggtttggtatcatacctcaggaacctgttctctttgaagggaccattaggagcaacattgatccgcttgagcagtattccgatgatgaaatctggcaggcattgggccgctgtcagttgaaagaagccgtagcttcaaaacccgaaaagcttgatgcttcagtcgtcgacaatggtgagaactggagtgttggacaacgtcaactgctatgcctgggccgggtgatgctaaagcacagcagaatactgttcatggacgaggccactgcttccgttgattcccagaccgatgctgtgattcagaagatcatccgggaagactttgcagcttgtaccattatcagcattgcgcacagaatacctacggtgatggactgcgacagggtcc

SEQ ID NO: 82215 - DNA, 425 bp, Zea mays
accacgcgtccggcagcctgcggctgcagcggcaggcgtgctgcgagccgtcggtggcgccgtcgcgggcggtgttcgcctgccgggccgcggcgtcggggagcgcggccgacctggcctccgggggcaggaggtcgtccggcgtgccggtgttcgtcatgatgccgctggacaccgtcaaggagtgcggcaccgcgctgcaccgccgcaaggcggtgcaggccagcctctccgcgctcaagagcgcgggcgtcgagggcgtcatggtggacgtgtggtggggcatcgccgagcgcgacggcccgggccggtacaacttcgcgggctacgcggagctcatggagatggcgcgcaaggccgggctcaaggtccaggccgtcatgtccttccaccagtgcggcggcaacgtcggcgactccgtcagc

SEQ ID NO: 82216 - DNA, 388 bp, Zea mays
  unsure (1)..(388): unsure at all n locations
accacgcgtccgcttgtcaaccaatcacaaagatggagtttgagtttgaaaggagaagagtgacaaaagaagacattagggagctgatattccgtgagatattggaatatcatccacaactgctcaaagactatatcaatggcacggagaggacaacctttctgtacccaagtgctgtcgaccaatttaggaagcaatttgctcatcttgaagaaaatagtggaaacggacctgtgattccaatggaaagaaaacatacttctcttcctaggtctactattgttcactcatctccaattcctgtcaaggaacaaccccgtatcggcccatgtanggaaaggccttcatctgatgagtcctacaggaatcctcgggagacagaacaata

SEQ ID NO: 82217 - DNA, 354 bp, Zea mays
acgacgcgcaccaggggaggaagcagttccagcaggaggtggaggtgctcagctgcatccgccaccccaacatggtgctcctcctcggtgcgtgccccgagtacggctgcctcgtgtacgagtacatggagcacggcagcctcgaggaccggctgttccgtcggggcggcacgccgccgatcccgtgggcgcagcggttccggatcgcggcggagatcgcgacggcgctgctgttcctgcaccagacaaagccggagccgctggtgcaccgggacctgaagccggccaacatcctgctggaccgcaactacgtgagcaagatcagcgacgtcgggctggcgcgtctggtgccgc

SEQ ID NO: 82218 - DNA, 349 bp, Zea mays
ggagtctgaagtacgcaactggtgctttcagatatttcaggctcttgcttacatgcatcagaggggctactttcatcgtgacctcaaacctgagaatctgttagttagcaaagatgtcataaagctagcagactttggtcttgcaagggaagtttcatcattgccgccatatacagaatatgtctcaactcgctggtatcgggcaccagaagtattgctccagtcatctgcttatgattctgcagttgatatgtgggcaatgggtgccataatggctgagttgttgacactccatcctctctttcctggaaccagtgaagctgatgagattcacaagatatgcaatgtc

SEQ ID NO: 82219 - DNA, 316 bp, Zea mays
gtccgagcacatacacgatcgagctcaaggacagccacgaggaggacatctgcgaggtggtcttggtggagagcccgcgcaaggactgcgaccaggtgcaggcggacagggaccgcgccggcgtcctgctcaccaggaacgtcggcatcagcgacaacctgcgccccgccaacccgctcggctacctcaaggacctgccgctgcccatctgcgcctcgctgctcaaacagttggactcggacgacgacgacgatcagtaatagcacatcgacgacgacgatcgatatgtaatagcacgtcgtcgacgaccgaccgc

SEQ ID NO: 82220 - DNA, 403 bp, Zea mays
agtggatgcggtcgccggagaggaagctgctggcgtcgggcaaccagcccaagccgaacgcgatcgtggccaaggacggtagcgggcagttcatgagcatccagcaggccgtggacgccgtgcccaagggccatcaggggaggtacgtcatctacgtgaaggccggcctctacgacgagatcgtcatggtccccaatgacaaggtcaacatcttcatgtacggcgacgggcctaagcaaagccgcgtgaccggccgcaagagcttcgccgacggtatcaccaccatgaagaccgccaccttctccgtcgaggcgtccgggttcatccgccagaacatggggttccacaacacggccggtgcggagcggcaccaagcggtggcgctccgggtgcaaggggacct

SEQ ID NO: 82221 - DNA, 423 bp, Zea mays
cctggtcgtgtgcaaggagtcctgcgcgctctcccagcagtccaacctggtgctgtacggcaggatccagtgcaagggcaagtgcaccgagcagaagggcatcacggcgccggccatgaaggtctgccaggaggagtgcgacaaggcgtacgtggtgaaggcggccgaggtcaccaaggcctgcagcgtcacctgcgccaaggagaagaacccgcgcctcagcgagaactgcaagaggtcctgcacccctcctccttcttgaagcgaagccccttgaaatgaatgaaccatgcatgcatgcatgcatgtatgcatgcgccggggtgacgtggcgttcagctcaggcgctgagcgagtctatacgtacgtcgtcaccggctggccacgcatgcgataaccatctgatatggacggaactatata

SEQ ID NO: 82222 - DNA, 406 bp, Zea mays
cacacgagccgctgcacgcttaataacattgtagattggtacgggagggcgaggaaatggaataagacggctattccaatcctaatcgggacaaagtttgatgactttgctcagcttcctcttgagatgcaatgggccatcgttaaccaggccagagcatacgcaagagcgatgaaggcgaccctcttcttctcgagcgcgacgcacaacatcaacgtgaacaagatcttcaagttcatcacggccaagctcttcaacctcccgtggacggtggagcgcaacctcaccatcggcgagcccatcatagacttctgacgaccccttcctctaactagtaactcggcaacacacgcaagacgaaccttggtaaataacaagggtttacaaggtcctgtccttccattct

SEQ ID NO: 82223 - DNA, 333 bp, Zea mays
aggacgagtgggcggagatggagatccccgaggagtatatcgagtccctgccgaagaacggaaggtccattcttggagactccatgtacaagatcataaccgacgacgtcttcgaccccaacgagctcctgcagtccgtggacctgtcgacggagcacaagatcgtggacctcaaggaccggatcgaggcctccgtcgtcatctggcaccggaagatcagcaacaagctctcgtggggccccgccggcgtcagcctggagaagcgggaggagttcgaggagcgggcgcagaccgccctgctcatcctcaagcacaggttccccgggatccctc

SEQ ID NO: 82224 - DNA, 406 bp, Zea mays
aggtccatcgggtgcgagccgtgcaccaggcccgtcctgccagggcagcacgagcgtgaaggccggaggtggtgggaggacgccaaggccaaggagtgcggcctccacaagggcaacatcgacaaggacgcccaggcggcggcccccaggtccgccaacggcaacggctcggcgggcgccccggacatcttcgagagccccgccgtcgtgtccctcacccgcaccgggatccagaacctgctgcgcctggagaaccgcgccgagccgtggctcgtggtgctgtacgcgccctggtgcccgttctgccaggccatggaggcctcctacgtggagctggccgagaagctggcggggtccggggtgaaggtggccaagttccgcgcggacggcgagcagaagccgtttg

SEQ ID NO: 82225 - DNA, 409 bp, Zea mays
  unsure (1)..(409): unsure at all n locations
aaccttgacaggctgaggacccctgtggacaatgcccttagagatgcanagttgcaattcanagatattgatgaggttattcttgttggtggctcaactagaataccagctgttcaagagcttgtcaagaaaatgacaggaaaggaccccaatgtgacagtcaaccctgatgaggttgttgcacttggagcagctgtgcangctggagttctgtctggtgatgttagcgacattgtacttcttgatgtgacccccttgtccctaggtttggagacactgggtggtgtcatgaccaagattatcccacggaatacaaccttgcctacctcaaagtcggaagttttctcaacagcagctgatggccagactagtgtggagatcaatgttctccaangagaaagagagtttg

SEQ ID NO: 82226 - DNA, 390 bp, Zea mays
gagatcacgtcgcaagaacctgaacagaggtaattgggaaattacccttccccttcttccaaccaagcccttactatatcgggagttggaatttatactgcgcagtggcggacgcggacacgatggcgctggacgacatgcagcgcgacgaggtgttcaacagggacaacatcccgacgtggctgtcctacgcggggtacgccgcgctgagcctgatcgcggtgatcgccatcccgatcatgttccgggaggtgaggtggtactacgtggtggtggcgtacgcgctggcgccggcgctggggttctgcaacgcgtacgggaccgggctgacggacatgaacatggggtacaactacgggaagatcgcgctgttcgtgctggcggcgtggg

SEQ ID NO: 82227 - DNA, 415 bp, Zea mays
  unsure (1)..(415): unsure at all n locations
agcccacgcgtccgggcggcccaggctctcctctccggccggcagctgctgggccgccccgtgcagtcggccgtctctaggtcgtcggcgaggaaggcgcccttcgtcgtcagggccagctccagccctccagccaagcaaggtgccgacaggcagctgtggttcgcgtccaagcagtccctctcctacctcgatggcacgctgcccggcgactatggcttcgacccgctgggcctctcggacccggagggcaccgggggcttcatcgagcccaagtggctggcctatggcgaggtgatcaacggccgctacgccatgctgggcgcggtgggcgccatcgccccggagatcttcggcaagatgggcatcatcnccccggagaccgcgctgccgtggttcaagacgggcgtcatcc

SEQ ID NO: 82228 - DNA, 409 bp, Zea mays
aggattgacgagacagagattcaggcagcgaagtggatggcgctggaggagttcgtgaagcagcccttcatccaggaagaccacatgttccagaagatcatggacatctgcatccagcgcctccgcaagtgctactgtgggctgacgccgcaccacgtcgtctccaagttcgacgacagaacgtccacgctctactacaatgtcgccgagcccgaggacgtgaactgcagcgccgcctgatgtaatatgatgtgagggggagggggagccaccccagcatctactagtctaatttttgctgcgcagaagtttcatgatgcagcagtgttagtcgtgcgattactgagagtgaaatactagtggcagactgcgcgaggcaatagagttgccgagcctgtacatatacgtg

SEQ ID NO: 82229 - DNA, 382 bp, Zea mays
cgatcgacccaggatacttgccaagaggcggcccacgcgtccgcccacgcgtccgtgctgaagccgtccatggtgacgcccggcgcggaggccaaggacagggccaccccggagcaggtggccgcgtacaccctcaagctcctccaccgccggatccccccctccgtgcccgggatcatgttcctctccggcgggcagtccgaggtggaggcgacgcagaacctcaacgccatgaaccaggggcccaacccgtggcacgtgtccttctcctacgcgcgggcgctgcagaacacctgcctcaagacctggggcggccagccggacaacgtcaaagctgcgcaggacgcactgctgctgctcgccacggccaactccctggcgc

SEQ ID NO: 82230 - DNA, 406 bp, Zea mays
acccacgcgtccgcccacgcgtccgggcacagatgtaaaagtatggtttggaaaggttgaagatctgccagtttacttcttgggaccacaaaatggcatgttttgggttggatgtgtctatgggaagaatgatgatagtagatttggcttcttctgtcattctgctctggagtttctgctccaaagaggatcttctcctgatatcatacattgtcatgactggtcaagtgctctcgttgcttggctatacaaggaacagtatgctcttaatgggatgggaaatggtcggattgtatttaccatccacaatcttgagtttggagcgcatcacattggcaacgcaatggcacattgtgacaaggctacaactgtctctgatacatattcaaaggaagtggctggacac

SEQ ID NO: 82231 - DNA, 404 bp, Zea mays
gaagacgagtgtcaagtgaacctgaaacttgcggtgtcactggctggtagcctgagtgtgagtgagtgatcgagctagctgagctccgatcctcgctagctaggataccgccataccacaagtcttcttcacaagtttaggagtgacagcaacaagagatcgatggcctctgccaccgtgctcaagtcctccttccttcccaagaagtccgaatggggcgccaccaggcaggccgccgcgcccaggccgcccaccgtctccatggtcgtccgcgcctccgcctacgccgatgagctcgtgaagaccgcgaaaacgatcgcgtcgccggggcggggcatcctggcgatggacgagtcgaacgcgacgtgcgggaagcggctggcgtccatcgggctggagaacac

SEQ ID NO: 82232 - DNA, 405 bp, Zea mays
gggataagggctatgacggtattgtgctcgagtcctggtcaagatgggctatttatggtgtgctggatgaccaagagctacgttacatggcacttgaatttgttaagcagctgggagaggttttgcattcagtcaattccaaaatcaagtagccaccatttggaattaatttatgttattccagctccaagaatgcaaaagctcaataataaggactttggacccaaagatctcatgcatctggctgacactgtagatgggttttctcttatgacatacgacttctcaggacctcagaatcctggtcccagtgcacctctgaagtggatacatcattctttagcagcacttccttcagcaaaaggttcctctcatagcaattcacattcacggatgatattcctt

SEQ ID NO: 82233 - DNA, 415 bp, Zea mays
agaactttttatgctggaaaagcgggtgtgccagttactgaggtgaatgttcctgttgttggaggccatgcgggtattactattctgccactcttctcgcaggccactcctgcaagcaattcgttgtcccaagaagacattgaggccctcaccaagaggacacaagatggtgggacagaggtggttgaagcaaaggcgggaaaaggctctgcaacgttgtccatggcatatgctggtgctgtttttgcagatgcatgtttgaagggtctgaatggagttccagacattgtagagtgctcttttgtgcaatcaactgtgacagagttgccattctttgcctccaaggttcggctcggcaagaatggagtggaggaagtgcttggtctgggtgagctcaacgagttcgagaagaagg

SEQ ID NO: 82234 - DNA, 396 bp, Zea mays
acggaagcgtgggcggacgcgtgggcggtgcgttgcgttggtggccgccggcgacgatgtcgtcgtccgcgggcgacaagaggaagaagacggcgtgcgtgaccggagggaacgggtacatcggctccgcgctcatcaagatgctgctggaggacggatacgccgtcaagacgacggtcaggaaccccgacgacatggacaagaactcccacctcaagggcctgcagcagctcgggccgctgacggttctccgcgccgacatggacgaggagggcagcttcgacgacgccgtcgccggctgcgactacgccttcctcgtcgccgccccggtgaacctctcggcacaggatccagagaaagagcagatcgagccgtccgtccgaggcacgctgaacg

SEQ ID NO: 82235 - DNA, 408 bp, Zea mays
agcaatctctagcagcagatcctcgtgcgaagcaaagcgctagcccccttcgtactgtcccgatggcccgcacgaagcagacggcgaggaagtccactggcggcaaggcgccaaggaagcagctggccaccaaggcggcgcgcaagtctgccccggcgaccggcggagtgaagaagccccaccgtttccgccccggcaccgtcgcgctccgggagatccgcaagtaccagaagagcacggagctgctgatccgcaagctgccgttccagcgcctggtgcgtgagatcgcccaggacttcaagaccgacctccgcttccagagctccgccgtcgccgcgctgcaggaggcgtccgaggcctacctcgtcgggctcttcgagggacacaacctctgcgccattcacgcca

SEQ ID NO: 82236 - DNA, 417 bp, Zea mays
acgaattgtttcattgattcttgaagagatcgagcttcttttgcaccacaaggtcgaggatgtcttgcaactgcggatcaagctgcggctgcggctcaagctgcaagtgcggcaagaagtaccctgacctggaggagacgagcaccgccgcgcaggccaccgtcgtcctcggcgtggccccggagaagaaggccgcgcccgagttcgtcgaggccgcggcggagtccggcgaggccgcccacggctgcagctgcggtggcaactgcaagtgcgacccctgcaactgctgatcacatcgatcgacgaccatggatatgattattatctatctagcttgtggtggtggttgaacaataataagcgaggccgagctggctgccatacataggtattgtgtggtgtgtgtgagagagagag

SEQ ID NO: 82237 - DNA, 417 bp, Zea mays
  unsure (1)..(417): unsure at all n locations
gccacagggctgggccaaccagtcccgatcgatcagccagcatggcgtcctcctccaaacggtcgctgccatgcgtgctcctcctcctcctcctcgctgtcttccaccacggctgctcgtcggcgagggcccacagacgtgccggcgacatggaggggagcatgagcaccgacgacagctcgatgatagagcggttccagcggtggaaggcggcgtacaacaagtcctacgccacggtcgccgaggagcggcggcggttccgggtgtacgcgcgcaacatggcgtacatcgaggccaccaacgccgaggccgaggcggcggggctcacgtacgagctcggcgagacggcctacaccgaccttcacaaccangagtttcatggcatgtacacggcgcccgcgccggcgcagctgcccg

SEQ ID NO: 82238 - DNA, 411 bp, Zea mays
  unsure (1)..(411): unsure at all n locations
agacacacacagagagagacaagtggtttccaaagccaagtgtgtactagcagtctagcaaccagctagctcgggcggcagcaggcagccatcatgtcggaggagaagcaccaccacttcttcaaccaccacaagaaggacgaggagcagcccgccggcgagtacgggtactccgagaccgaggtggtcaccgccaccggcgagggcgagtacgagaggtacaagaaggaggagaaggagcacaagcacaagcagcacctcggcgaggccggcgccatcgccgccggcgccttcgcactctacgagaagcacgaggcgaagaaggaccccgagcacgcgcacaggcacaagatcacggaggaggtcgctgccgcngcggccgtcggcgccggcggctacgtattcgacgag

SEQ ID NO: 82239 - DNA, 418 bp, Zea mays
agcccacgcgtccgcccacgcgtccggcgtacgcgaggcgatcggagcatcccgtcccaagaggagaaactccggccggcgacgcgggggaaaatggggaagacgccggtgcggatgaaggcggtggtgtacgcgctgtcgcccttccagcagaaggtgatgccggggctgtggaaggacatcaccaccaagatccaccacaaggtcaccgagaactggatctccgccacgctcctcctcacccccgtcgtcggcacctaccaatacgccatgtggtacaaagagcaggagaagctttcccacagatactaaatgggatgtcctccaagttgctgcggcttgtcgcagttgaattttccatgatgggttgtataatctgtcaatgtcatttctttgctcagttttagttcaacccatt

SEQ ID NO: 82240 - DNA, 411 bp, Zea mays
agcaatgatccaaaaacgtatgtggaagaagatgtttttgttacagatgaatctgggactaagaaaaggatacggctagaggacaatattgtgcggtggagaaccattaggaatgcagatggcactacatcttgtgaaagcaatgcacgctttgtaaaatggaaggatgggactatgcagcttctgattggcaatgaggttcttgatatatctgtacatgaggcgcatcatgaccagtcccatctgtttttgaggcatgggaagggaattctacaatcacaaggaaggcttttgcacaaaatgcgatttatgccatcctccttgtcttcaaagtcgcatcgcttattaactgctctggttgattctcagaataagaaaactgttaagatgcaaaaatggtttgagactaag

SEQ ID NO: 82241 - DNA, 448 bp, Zea mays
  unsure (1)..(448): unsure at all n locations
cggtctagtaatccggctcgccncacgcgtcaggctgaagtggtggcacaagatgagaaggaaagtggccttcgagcaacactaaacctgggtcacacatttggccatgctattgagactgggacaggatatggagcatggctccatggggaggctgtcgcagctggaacagttatggcaactgacatgtctcaccgcctggggtggatagatgactccatcagaaaacgtgtggttgacatactaaagcaagccaaacttcccattgcacctcctgagaccatgaccgtagagaagtttaaaaacatcatggctgttgacaagaaggttgctgatggtctgttgagactcatccttctgaaaggaccgctanggtgctgtgtatttacgggggattatgacgggaatgcactcgatgaaacctacatgcattctgcgacaactgaga

SEQ ID NO: 82242 - DNA, 405 bp, Zea mays
  unsure (1)..(405): unsure at all n locations
agtttatttccttgctagattgagacatgtagaaaagttgagaatgcgctgaggcgggtggacaggaaggcctcgcagatcaaagttctccccttccatgctgcgctggatcaggcccagcgcatcgcaaacatcaaggagttcctgaacaagcaaacggctgactccatgttccttgtgtgcacagatagggcgtcgcggggcatcgactttgcgaacgtgaaccacgtggtgctcttcgactacccccgcgacccgagcgagtacgtgcggcgcgtcgggcggactgcccgcggcgcgtccggcaacggcaaggcgttcgtgttcgcggtgggcaagcaagtgtcnctggccaggagggtgatggagaggaacatgaaggggcaaccgctgcacgacgtgccg

SEQ ID NO: 82243 - DNA, 391 bp, Zea mays
  unsure (1)..(391): unsure at all n locations
acccacgcgtccgaaagcgcgcgcgcgcacgcggagaggctcggagagctgagtgagatggcacaagccatggcgtccatgaccggcctctcgcagggcgttctgcccagcaggcgcgccgccaacagggccaggacggccgccgtcgtcagggcgtccgccgaggcgcaggcgcaggcgcaggcgggccgccgcgccgtgctcgggctggtggccactggcatcgtcggcggcgccttgtcgcaggcggtgcacgccgagaccgtcaagaccatcaagatcggagccccgccgccgccctccggtggactccccgggactctgaactctgaccaggcgagggacttcgacctcnccttgaaggagcggttctacctgcagccgctgccgc

SEQ ID NO: 82244 - DNA, 413 bp, Zea mays
gcggcagtgggaaaataccgcaccgcacgcaccaatggagaacgccaacgcctcctcttgccgcaacggcgacggcacccagacgccaccgccgcacgtggcgatgcttgcgacgcccgggatgggccacctgatcccgctggcggagctggcgaagcgcctggcccagcgccacggcgtcacgtccacgctcatcacgttcgcgtccacggcgtccgccacgcagcgcgcgttcctcgcctcgatgccgcccgccgtcgcgtccatggcgctgccgccggtggacatgtccgacctcccgcgcgacgccgccatcgagacgctcatgtccgaagagtgcgtgcgcgccgtgccggcgctcaccgaagcgctcctgagcctcaagcagcggcccaccacgaccggccgtctcg

SEQ ID NO: 82245 - DNA, 411 bp, Zea mays
  unsure (1)..(411): unsure at all n locations
aggctcccgcaacgacagcgcgcacttggattcggcgaccaccggagcgcggaggaggcacaggcgccgatctaaagacgatggccgccgcgggctcctcgccgtccttctcctcctcgagtaagcgactggaagggaaggtggccctcgtcactggtggcgccaccggcatcggcgaggccatcgttcgcctcttcatggagcacggcgccaaggtctgcatcgcggacatccaggatgaggccgggcagcagctgcgcgacgccctgngaggtgacgcgcagggcgccatgttcgtccactgcgacgtgacgtcggaggaggacgtgagccgcgccgtggacgctgcggcggagcggttcggcgcactggacgtgatggtgaacaacgccggcgtgacgggcgccaagg

SEQ ID NO: 82246 - DNA, 410 bp, Zea mays
aaggaagtttggtttgctagcgaactggcagcgggactacacgatggagaacatcctcacccagctcaagaaagagatggctgcctcgcagaatcgaaagttagtgcagcctccagaagggacattcttctaacgaagtgttcacttggcccgtcatgggatccaacagtaattgaaagttttatgggctaaaaaacagcgtctacatctggtgcccctgcctgtctttgtgattttttatgacttttatgttcttgtatcgtgaaccgcagtgaacaacggttgttgcaagttccagggatatctttggaagtggtaaacaaatgcgtcttatttctatgtaatattagaccccgtgcgtgtgtggtttcgaggtacagctccctatcaactgttgccgtgcattccgt

SEQ ID NO: 82247 - DNA, 408 bp, Zea mays
agatgagatgacccaatcaggagcacgcggatttcaagttcaagcaagagctctggatggtcattagcatgtcctctgttgcggtcgtgaagttcttcctcatgctctactgccgaacgttcaagaatgagatcgtgagggcctacgcccaggaccatttcttcgacgtaatcacaaactctgtcggcctggtctcggcgctgctcgctgtccggtacaaatggtggatggaccctgttggcgccatactgatcgcgttgtacacgatcacgacgtgggcgcgaacggtgctggagaacgtaggcacactgataggcaagtcggcgccggcagagtacctgacgaagctcacgtacttgatctggaaccaccatgaggagatccagcacatcgacacggtgcgagcct

SEQ ID NO: 82248 - DNA, 411 bp, Zea mays
  unsure (1)..(411): unsure at all n locations
cgccgcggcccgtgcgcttcggtatcctgggctgcgccgccatcgcgcgaaagctggcacgcgccatgctgctcgcgcccggcgcagccgtcgccgccgtcgggagccgctccgaagtgaaggcccgcctcttcgccgccgacaacggcctcgacgtcgccaccacccgcctccacggctcgtacgatgcgctcctcgacgacccggacatcgacgccgtctacatgccgctccccaccagcctccacgtgcgctgggctaccgcagccgccgcacgtggcaagcacgtgctcctagagaagcccacggcgctgtgcgccgccgacctcgacaccatcctcgcggcttgcgacaccgcgggggtccagttcatggactccaccatgtggatgcnacacccgcgcaccgcca

SEQ ID NO: 82249 - DNA, 418 bp, Zea mays
cccacgcgtccgcggacgcgtgggtgccggctccgggaacgccggcggcgggacctacgcgaaggacaagctgggcaacgacatcacggtggaggcgtggctcaacacgcacggtcccaacgaccgcacgctcgcgcaggggctcaagggtgaccccacgtacctggtggtggagcaggacaagacgctggccacctacgggatcaacgccgtgtgcactcacctcggctgcgtcgtgccgtggaacggcgccgagaacaagttcatctgcccatgccacggatcccagtacaacaaccagggcaaggtggtccgtggaccggcgcctctgtcgctggccctggttcacgccgacgtcgacgacggcaaagtcctcttcgtcccgtgggtggagaccgacttcaggaccggcgaggac

SEQ ID NO: 82250 - DNA, 385 bp, Zea mays
ccgggctcaaccaacgcgtcaggatgttttgaaccaaccaacccaatcaacggaaattgataacttcctggaggtggttgacctgtggcggataaggtcggtaaacccggggttggggggcaaaaccttaaccaaaagtcaattaaagaaaattgcaaaactgaaaaggtaatgtgcaaaaaagggagtgaaccccgggattgaggttgatggtggtgttggtccgaaaaatgcctacaaggttattgaagctggcgcaaatgccattgtcgcaagttctgcagtttttggggctccagactacgctgaagctatcaaaggaataaagaccagccaaagacctctagctgtagccgcataaagagctggacgtgtaatcatttac

SEQ ID NO: 82251 - DNA, 404 bp, Zea mays
agatcgcccgccccatctagtcggtgtcggtgtggtgtgggggcggtgctgcgcgtgtgcgctcctctgttcggcaggactccttcaagcagaaggggcggagcagcatggcggggcgctacgacggcaaccccttcgaggaggaggacgtgaaccctttctcggaacaagcgcgcggcaaggctggcgggcagtccaacttcggcggtggtgcgttttacatgcctaacaccagaaacatgcctcctgcatccaattcgcgcctttcgccgcttcctcctgaaccagcagacttcagtgctacagtggacatacccctggactcgtcaaaggacctgaagagaagggagaaggagctgcaagcaagggaagcggaattgaacaagagggagaaggaactaaaa

SEQ ID NO: 82252 - DNA, 400 bp, Zea mays
acttgctccaggacgtacgtacgtacgtagatcgatccatcgatcgctagctagctgacgaccatggcgtccctctcctctgccgccatcaccgccccttccttcacggccgcgcccgctcgcgcagtggtcagcaggaggtccttcaccgtgcgtgcctctctccgcaaggccactgccaccgccgccgtggccgttgccgccagcgtcctgcttgccggcggcggcgccatggcccaggaggtgctgctgggcgcatgcgacggcgggctcgtcttcgagcccagccagttcaccgtcaaggccggcgacaccatcaccttcaagaacaacgccggcttcccgcacaacgtcgtgttcgacgaagacgaggtgccgagcggcgtccacgcctccaaga

SEQ ID NO: 82253 - DNA, 384 bp, Zea mays
aacttactccaggacgtacgtacgtacctagatcgatccatcgatcgctagctagctgacgaccatggcgtccctctcctctgccgccatcaccgccccttccttcacggtcgcgcccgctcgcgcagtggccagcaggaggtccttcaccgtgcgtgcctctctccgcaaggccactgccaccgccgccgtggacgttgccgccagcgtcctgcgtgccggcggcggcgccatggcccatgaggtgctgctgggcacaggcgacagcgggctcgtcttccaggccagccatttcacctgtcaacggcggcgacactatcaccttcaggaacaacgccggcttcccgcacaacgtcgtgttcgacgaagacgacgtgccgagcg

SEQ ID NO: 82254 - DNA, 414 bp, Zea mays
agtgctgaccctgaaatcaaggaggaggtggtcgacagctcccttgaattcctcatccttgctagcgacggactctgggatgttgtcactaatgaggaagctgttgccatggtcaagcctatccaggacccccaggaagcagcaaacaagcttctcgaagaagcttcccgaaggggaagctccgataacatcacagttatcatcgtccgcttcatagacggaactaccggtgagaaatcaggcgacgacaaagagaccaccaacgaccaacactcctagctgtctcgtgtagggatccatcgtgctgtgtgttcttctggctgttgtacctgatgctcagagtagacgctggctgctgctccgcaaggaaactgactcccccgaccgccgttcatgctcctgcctggctggctc

SEQ ID NO: 82255 - DNA, 413 bp, Zea mays
agggccgtggagaaggtggccaagcgcatcatgggcaaggaggtgaacaccgcggctgcctccggggagaagacgccgtgggtgccggacccggtcaccggctactaccgcccggcgggtggcgccaaggaggtggacgcggcggagcttcgcgccaggctgctcaccaagaggatcgccaactaaatcaatctagcagcagagcagtgcggctgagattatttagcgccagttgatctcttgggcctagagcatgacggtgctgtaacttttgaggcataatatatatagatagatagatgggaagagctcgaacgtatctccgtttctagaaagaatggcgcaattcttgctttgctttttaacgagtcaatttgtcttgactttaccatattgtatacgaaaatgtacta

SEQ ID NO: 82256 - DNA, 412 bp, Zea mays
aggccgccggcggcacggcgaagcacacccgcacggtaaccaacgtcgggcagcccgggacgtacaaggtggccgcgagcgccgccgccgccggcaccccggtgacggtgaccgtggagccgtcgacgctgagcttcagcagggccggcgagaagcagagctacacggtgagcttcacggcgggcgggatgccgtcgggcaccaacgggttcgggcggctcgtctggtccagcgaccaccacgtggtcgccagcccgatcgcggcgacgtggacctaatggctagcggcggccgtaccgtagcaatagcgagataaaatcccgattgggggacggcaatggcgagcgcgcgccattctcgaatgcgagagagatggcggatatcgtcgaggatgtgctgttgtattgtgtgc

SEQ ID NO: 82257 - DNA, 412 bp, Zea mays
acccacgcgtccgctagaaggtaacttgtggaaggaactgtgggaggctgcaaaacctatacctgctgttgaacagactcctatatatgatgaagatttagctgtggagagcatctttgatgcgttggaggttattgagccatcaaaactgtttgagcagctacttggcgtcattctttctgtatgctttgtggcagctgaatcagttttagcagcagatagcaatctgtcaaaattattctacgattgcaaggactacataattggcgtttaccacaatgacatgtcaaaagatgagctagatgagatgtacaaggtgtacgagacgatggaagccatagtaacccaccctgaagaagctctccagatcatggagcaacctgatgagaagtctgttgacaataaaaaccgc

SEQ ID NO: 82258 - DNA, 405 bp, Zea mays
aggacagcggctgggcctcgccagggcgatcggcgtcagcaacttcaccaccaggcacctggacaaggtcctggccgtggccgcggtcccgcccgcggtgaaccaggtggagctgaacccggcgtggcagcagcggacgctgcgggcgtactgcgccgaccggggcgtccacgtcgccgcctactcgccgctgggagggcagaactgggacgggcggggcaacgccgtgctcgactcggaggtgctcgcggagatagccagggcgagggggaagaccgtggcacaggtggcgctgcgatggatacatgagcagggagtgacgtgcatcgtcaagagctacaacaaggagaggctgaagcagaacctcgagatattcgactgggagctgaccgatgacgaccggct

SEQ ID NO: 82259 - DNA, 422 bp, Zea mays
agcgagaggcaaggccatcgtccgccatgacgctctccctctccacctctttcctccccatccccgccgccgcgaggaccaccgcccgcaccctacgctccgtcgtcccctcccaggggatgcgctgctcgatgcgcaagaaggggttgcacccggagatctacgaggacgcgaaggtgtactgcaacggcgagctggtgctggtgacggggggcaccaagccggagtacacggtggacgtgtggtccggaaaccacccctactatgtcggcgacacctcggcgctcgtggtcatggacagccagatcgagaagttccgcaagaagtggggccacatcaaggagtactggcccgaggaccattggagggagatgcacccagacggcgacccggagttcgagcccgagggggacaactgattg

SEQ ID NO: 82260 - DNA, 412 bp, Zea mays
  unsure (1)..(412): unsure at all n locations
ggcgcgacctgaacatcgtccgcgaccagctgtccggcgagcggcgctggagctggaacgtggagtggagcaacggcaccgccttcctgttcgactccgcgtcctgccgcacattccagttcgccgtgggcctcctgccgcccgactggaaggcccgcggcgccgcttacctgnggcgcgaccgcgtcgacggcttcgactgccacgtctggtacaacttcgtcttcgcccgctactacgaggacgtcgccaccggacgccccgtcagctggaacttcaatgggctgcagcggcatgtgctgagcttcgaggcgggggcagtgctgctggactcctccaagtggcaggcgccggcttactgctttcacanncacaatggcagcagtgccaacgccgccgcttcgtcctcctg

SEQ ID NO: 82261 - DNA, 410 bp, Zea mays
agcccacgcgtccgcccacgcgtccgaacctcacaagtggaaggcatggttatcgctggctgaattctggtacaatacatcataccatacttccctggattgttctccattcaaggccttgtacggctatgatccaccatttgctgctgcccctattattccatctgatactgatcattcagtggcccaggtgttggctgagcgtgctcactttactgagatgttgaaagaccagttggctgttgctcagaacaggatgaaactcaaagcggatcgcttgcggtctgagcggcagttccaggtgggggatttggttttgctcaagttgcaaccatatgctcagcattcggtggtgaaccgaccctgtcccaagctcgcgttcacaatttttggggccatacaaagtgctg

SEQ ID NO: 82262 - DNA, 370 bp, Zea mays
agtgtacagattttgagcgtagtggccttctgtcatcttcagggagtagtgcatcgtgatttgaagccagagaattttctcttcacaacaagagatgaaagcgctcctatgaagttgattgactttggtctgtcagattttattagaccagatgaaaggctcaatgatattgttggaagtgcttattatgttgctccagaggttctacacagatcatacagtatggaagcagacatttggagtataggtgttataacatacattctgctctgtggcagtcggccattctgggcaaggacagaatctgggatcttccggtccgtattgagggctgatcccaattttgacgattcaccatggccttcagtat

SEQ ID NO: 82263 - DNA, 371 bp, Zea mays
aggtcatgtagagtatttctgtcactatattgtgtgttgcagctcgagaactatttcatattcaatgatcggcatagaggaatgaggatggatatcgacggcatgtcctacgaagtatgtctggatctctaccccttactctgacgacgccattttctgatttccttcgttacttcatcctcctctctctctctctctctctctctctctctctctctccagtcagcaagcagttcttgtttgtcatgcttttgtaagtgtagttatataatttgtgacactctgctttaaaggagttgcttgctttgggggagcgaattggtaccgtaaacacaggtctttcagacgacgcgttatccgcgtgcctgaac

SEQ ID NO: 82264 - DNA, 398 bp, Zea mays
agggactcttcagtagtagaaagaagggggagaaccgaaaagcaagtcatctttgaagattcggaacactcttcaacatattgtcttgcatttaaagtgattaatccaagtcatttgcctcctttgaaggagctgcaaaaattgatgagaatccagtcactgcgttgtcatgcactgtataaccatggcgccaccaggttatctgtaattccaattcatgcatcgcgatctcaggctctaaggtatttgtctatttgctggggcatagagttgccagatgctgtggtcattgttggtgaaactggtgattctgattacgaagaactgtttggaggtcttcacaagacagtcatccttaagggtggattcaacactcctgccaataggattcatacggt

SEQ ID NO: 82265 - DNA, 386 bp, Zea mays
aggaccaactagcaacatagaaagcacaatagtgtaccaacaatggcagccaaaatattttgcctccttatgctccttggtctttctgcaagtgctgctacggcgaccattttcccgcaatgctcgcaagctcctatagcttcccttcttcccccgtacctctcaccagcggtgtcttcggtatgtgaaaacccaattcttcaaccctacaggatccaacaggcaatcgcagctggcatcttacctttatcacccttgttcctccaacaatcatcagccctattacaacagttacctttggtgcatttattggcacaaaacatcagggcacaacaactacaacaacttgtgctagcaaaccttgctgcctactctcagcaacagca

SEQ ID NO: 82266 - DNA, 371 bp, Zea mays
agcccacgcgtccgcggacgcgtgggcggacgcgtgggcggacgcgtgggggagcacctgtgcttcgagactctgcagcgcttcacggccgccacgctggagcacggcatgcacccgccggtctctcccaagcccgagtggcgcaagctcatggacgagatggcggtcgtggccacggaggagtaccgctccgtcgtcgtcaaggaggcgcgcttcgtcgagtacttcagatcggctacaccggagaccgagtacgggaggatgaacatcggcagccggccagccaagatgaggcccggcggcggcatcacgaccctgcgcgccatcccctggatcttctcgtggacccagaccaggttccactccccgtg

SEQ ID NO: 82267 - DNA, 408 bp, Zea mays
agcggacgcgtgggtgattcttgaagagatcgagcttcttttgcaccacaaggtcgaggatgtcttgcaactgcggatcaagctgcggctgcggctcaagctgcaagtgcggcaagaagtaccctgacctggaggagacgagcaccgccgcgcaggccaccgtcgtcctcggcgtggccccggagaagaaggccgcgcccgagttcgtcgaggccgcggcggagtccggcgaggccgcccacggctgcagctgcggtggcaactgcaagtgcgacccctgcaactgctgatcacatcgatcgacgaccatggatatgattattatctatctagcttgtggtggtggttgaacaattattagccaaggcccacctggctgccatacataggtattgtgtggtgtgtgta

SEQ ID NO: 82268 - DNA, 330 bp, Zea mays
agcccacgcgtccgcccacgcgtccgcccacgcgtccggtatgtagaagtacctagtgacagtggtattacattcaatgttgcacccaatatgaaggcgcttgaaattgctgagaaagccagggatgctctcctaagtggaaagtttgaccaggtacgtgtcaacctgccaaatggtgacatggttggtcacactggtgatattgaggccaccgtagttgcttgcaaggcagctgatgaagctgttaagattattttggatgctgtcgagcaagttggtggtatttaccttgttaccgccgatcatggcaatgctgaggatatggtgaaa

SEQ ID NO: 82269 - DNA, 357 bp, Zea mays
aggacccgtcgctacatgacggacatgatcacctacgccgacaccgacgtcgtcatcgtgggcgccggctccgcggggctgtcctgcgcgtacgagctctccaaggaccccgccgtgagcatcgccatcgtggagcagtcggtgtcgccgggcggcggcgcgtggctgggcgggcagctgttctcggccatggtggtgcgcaagccggcgcacctgttcctggacgagctgggcgtggcgtacgacgaggccgaggactacgtggtcatcaagcacgccgcgctcttcacgtccacggtcatgagcctgctcctggcgcgccccaacgtcaagctgttcaacgccgtgggcgtggag

SEQ ID NO: 82270 - DNA, 395 bp, Zea mays
agcctgaccaaggctaggaagtacaccttcttcaagcccaagttcatcttctacgccacctacctgtccgagaagatcgggtactggaggtacatcaccatcttcaggcacctcaaggcgaacccggagtaccaggtgtaccccatcttcaagtatttcgagaactggtgccaggacgagaacaggcacggcgacttcttctctgccctgctcaaggctcagccgcagttcctcaatgactggaaggccaagctctggtcacggttcttctgcctctcggtgtatgtgaccatgtacctgaatgactgccaacgcactgcattctatgagggaattggtctggacaccaaagaattcgacatgcatgtgatcattgagaccaacgcacaacggcg

SEQ ID NO: 82271 - DNA, 386 bp, Zea mays
acgcgtcagccagaccaaggctaggaagtacaccttcttcaagcccaagttcatcttctacgccacctacctgtccgataagatcgggtactggaggtacatcaccatcttcaggcagctcaaggcgaacccggagtaccaggtgtaccccatcttcaagtatttcgagaactggtgccaggacgagaacaggcacggcgacttcttctctgccctgctcaaggctcagccgcagttcctcaatgactggaaggccaagctctggtcacggttcttctgcctctcggtgtatatgaccatgtacctgaatgactgccaacgcactgcattctatgagggaattggtctggacaccatagaattcgacatgcatgtgatcaatggga

SEQ ID NO: 82272 - DNA, 405 bp, Zea mays
aggtcgcggcgtgagcgagcgagaggggaaaacccaaaaccctagcaccccccgccccgtcgccgacggccgccggagtagagagatggcggtggacgaggtgaactcggtctacgtcggcggccttccctacgaggccaacgaggagatgcttcgcgacgccttcgggtactacggcaccatcgtctccgtcaaggtgattaatgatcatgctgtcaaaggcaagtgttatggttttgttactttcactcaccccagagctgctgagcaagcaattgcgggcatggacggcaagaaattaggcaaccgtattgttcgagtaaatgaagtgcgtacaagaggcccccgcgattttggccgagatggtttcagacgagatccaagaaggtatggtagagatccata

SEQ ID NO: 82273 - DNA, 407 bp, Zea mays
agtagttctttgggaaatctaacctacctatccctcctacaactagaacagaacaacctcaaagcaaatgataatgagggatgggaattcatagatgcattgcgcaaatgtcagttcctggaaaaactcttattatcttacaatcagctaggaggagccataccaaattcagttgggaagttatccaacaacagccttcagtacctacgattcggcagaaacaacttgtcgggagctgttccggagagcatggggaaccttattgccttaaatacgttagatctagaacaaaacaatttgaacggtctgattggatcatgggttggaaagttgaacaacttggtaagattatctctttcagacaataacttcagtgggcccattccatagtccattagttggtaata

SEQ ID NO: 82274 - DNA, 335 bp, Zea mays
agctctggtggctgatgagatagcggagcaggctgaattcttctccttcggaacgaacgacctgacgcagatgacctttgggtacagcagggatgatgtgggaaagttcattcccgtctatcttgctcagggcatcctccaacatgaccccttcgaggtcctggaccagaggggagtgggcgagctggtgaagtttgctacagagaggggccgcaaagctaggcctaacttgaaggtgggcatttgtggagaacacggtggagagccttcgtctgtggccttcttcgcgaaggctgggctggattacgtttcttgctcccctttcaaggttccga

SEQ ID NO: 82275 - DNA, 369 bp, Zea mays
agcgaacgcgtgggcggacgcgtgggcagaaattggggatgataagaaaatccttaagaaggttctcaaggagggagaaggttatgagcgtcccaacgagggtgctgttgttgaagtcaaaattatcggaaagcttcaggatggcgcggtgtttacaaagaaggggcatgacgaagagccatttaaattcaagaccgatgaagaggaagttattgccggtcttgatcgtgctgtgttgaacatgaagaagggcgaggttgctcttgtcacaattcctcctgaatatgcatttggttcaactgagtcaaagcaggatcttgctgttgttccacctaacagcacagtaatatatgaagttgagcttaattc

SEQ ID NO: 82276 - DNA, 378 bp, Zea mays
agctcaagctgctttatatactcatcaccaatacattgcagggttcatcatgacaggggcttttgctcatggagctatttttttcattagggattacaatccggaacagaatgaagataatgtattggcaagaatgttagaccataaggaagctatcatatctcatttaagttgggctagcctcttcctaggattccataccttgggcctttatgttcataacgacgttatgcttgcttttggtactccagaaaagcaaatcttgattgaacctatatttgcccaatggatacaatctgctcatggtaagacgacatatgggttcgatatactcttatcttcaacgaatggccccgctttcaatgcaggtcgaaacat

SEQ ID NO: 82277 - DNA, 355 bp, Zea mays
agggtacatggacttcaaaaatccaggatcgcaagcagaggaagggacattcatagggttagaggctgcactcgcaggtcaacagccaggctaccccgggggcccactgttcaatccactaggactcgcaaaggatatagagaatgctcatgacgagaagctcaaagaaatcaagaacgggaggttggcaatggtagccatgcttggcttcatggtgcaagcatccgtaactcatgccggccccatcgacaatctcttgacacacctttcggacccgttcaacaaaaatattattcacacattctcctcttcctaagtactcgtcccaatgcccggatgccatggcgggcacaaa

SEQ ID NO: 82278 - DNA, 402 bp, Zea mays
  unsure (1)..(402): unsure at all n locations
agcgccgccgccagcgtgagagtgagcaatgagctcggcgccggccaccccaagtccgcgtatttctcggtgtgggtagtgaccgcgctgtcgacgctcatatctatcatgctcggcgttctggtcctctgcctgcgcaactacatcagctacttgttcacggagggcgaggtggtgtccaacgcggtggccgatctctgcccgctgcttgccgtcacgctcgttctcaacggcatccagcctgtgctgtcaggtgtcgccgttgggtgcgggtggcagcagttcgtggcctacgtgaacattggctgctactacatagtcggcgttcccctcggcgccctgctcgggttcttcttcangctccgtgttaagggcatttgggctgggatgatcggagggacc

SEQ ID NO: 82279 - DNA, 388 bp, Zea mays
agcccacgcgtccgcggacgcgtgggaggaggccgagggcgagggcggcgcaggggcactcacggggacgctggtcgcaggagcgctactggttggtttcgtaggggggtttggggcggccggatacgtgtacaaggaccagatcaacaccttcctcacgcagttctcagggttcattgacggctatggtccagccggatatgctctgttcgtacttgtatatgcaggattggaggttctcgctattcccgcaatacctttaaccatgtcagctggtctattatttggtagtgtgaccggtacaattattgtttcaatcagtggaacactagctgcagcggtggccttccttatcgctagatacttcgccagagatagaattcctaaa

SEQ ID NO: 82280 - DNA, 399 bp, Zea mays
agcgcgctagctgaggacggtacagcggcacagaggtgcgacgtacgacgacgacgacgcaggcgccacacatggcatcccagctctccgccgccgtgccccggttccacggcctccggggctacgccgcgcccaggtccgcggtggcagcgctgccgtccgtgagggtgggcaggaagaggtcgtcgtcgcagggcatccgctgcgactacatcggctccgccaccaacctgatcatggtgacgacgacgacgctgatgctgttcgcggggcggttcgggctggcgccgtccgcgaaccgcaaggcgacggcggggctgaagctggaggcgcgcgactccggcctgcagacgggtgaccccgccgggttcaacctcgccgacacgctggcctgcggcg

SEQ ID NO: 82281 - DNA, 407 bp, Zea mays
agggcagagggcaggaaaagattgggatctaacacagcagtccaagggaacgtggatcctggtgttctttttggatccaaagagtttataagcaggcggatttacgacactgtgcagaaggctggcaatgttggacatgtactgaaccttggccatggcatcaaggttggaactccggaggaaaatgttgctcacttcttcgaggtcgcaaaagggatcagatactaaagaaccttgcatggttctttcctttctccaaatcggcagaagttgtagagtcggcggtcgaggatagatgcagaaagccatgtgcagtatagagtccctgaaaacatttttgtgactgattctgtctgtcgcaattcaagttccggtttcaatgtgatattgtaagcagatttgagacg

SEQ ID NO: 82282 - DNA, 342 bp, Zea mays
aggatgttacatgtgtttccaccacattatttgagccagtaatattgtttttgcaggctatatgattgttctatttcttgcttattttgtataccataatagtgctgctatatacaatgatgattttgtttaataaaaaaaacatatatagaagtgacagatgtaaagatatatgttctcttcctcaactagttcagtctgccagctaaatttcttttttgattcatgatttgtagagtaaaatctttatttttaattgatttcagttcaaggagctcgcacaagcctatgaggttttgagtgatccagagaaacgtgagatttatgatcagtatggtgaag

SEQ ID NO: 82283 - DNA, 350 bp, Zea mays
agcccacgcgtccgcccacgcgtccgcggacgcgtgggcttccgttctcaaaccaacctaggcaattcgccgcagcctctcaccctcgcgagtcccgacctcccgcagccgccgcacagatggcacccaaggcggagaagaagccggcggccaagaagcccgcggaggaggagcccgcgacagagaaggtggagaaggctccggcggggaagaagcccaaggccgagaagcgcctcccggcgggcaagtccaaggagggcggcgagggcaagaaggggaaaaagaaggcgaagaagtccgtggagacctacaagatctacatcttcaaggtgctgaagcaagtgcacccc

SEQ ID NO: 82284 - DNA, 318 bp, Zea mays
agcccacgcgtccgcctcgccagtccccaactcgaacctcagtcaggcagcgtgaggagggagagttcaaggaccgaggcggcgtcgggcgagatgaagcttaacgtcaagaccctcaagggcaccaacttcgagatcgaggcgagccccgatgcgtcggttgctgacgtgaagaggatcattgagaccactcagggtcagagtacctaccgggcggaccagcaaatgcttatataccaagggaaaattctcaaggatgagaccactttggaaagcaacggagttgctgagaacagcttccttgttataatgttgtcc

SEQ ID NO: 82285 - DNA, 386 bp, Zea mays
gtgaacctgaaacttgcggtgtcactggctggtatagcctgagtgtgagtgagtgatcgagctagctgagctccgatcctcgctagctagctaggataccgccataccacaagtcttcttcacaagtttaggagtgacagcaacaagagatctcgatggcctctgccaccgtgctcaagtcctccttccgtcccaagaagtccgaatggggcgccaccaggcaggccgccgcgcccaggccgcccaccgtctccatggtcgtccgcgcctccgcctacgccgatgagctcgtgaagaccgcgaaaacgatcgcgtcgccggggcggggcatcctgtcgatggacgagtcgaacgcgacgtgcgggaagccgctggcgtccatcggg

SEQ ID NO: 82286 - DNA, 356 bp, Zea mays
agggctgtggctgccagacaccaccgtttcatctaccgcctccgttctatatgccgcctccgttctatctgccgccgcagcagcagccgcagccatggcaataccccactcaaccaccgcagctaagcccgtgccagcagttcggatcctgcggcgtcggcagcgtcggcagcccgttcctgggccagtgcgtcgagttcctgaggcaccagtgcagcccggcggcgacgccctacggctcgccacagtgccaggcgctgcagcagcagtgctgccaccagatcaggcaggtggagccgctgcaccggtaccaggcgacatacggtgtggtcctgcagtccttcctgcagcagcag

SEQ ID NO: 82287 - DNA, 337 bp, Zea mays
agaggaggaagatgagggagtgcatctccgtccacatcgggcaggccggcatccaagtcggcaacgcgtgctgggaactttactgcctcgagcacggcatccagcctgatggccaagtgcctggagataagaccgcgggacatcacgatgatgccttcagcaccttcttcagccagactggtgctgggaagcacgttccccgtgcaatcttcgttgatctagaacccactgtgatcgatgaggtgcgcactggcacgtaccgccagctcttccaccctgagcagctcatcagtggcaaggaggatgccgctaacaatttcgcccgtggccactacac

SEQ ID NO: 82288 - DNA, 332 bp, Zea mays
agccagcatgtgacagtgggcgtggttggcggatccgatctggtgaagattaccgagcagctcggcagtacagttattactgattatgattacgtcttctccgaaaacggcctggttgcacacaaaaatggccaactaattggaacccaaagtttgaaatcatttatcggagaagacaagctgaaggaatttattaacttcactcttcattatattgctgacttggatatcccaattaaaaggggtacattcatagagttccgaagtggaatgattaatgtatctcctataggaagaaactgtagccaagaagaacgtgatgaatttgagaa

SEQ ID NO: 82289 - DNA, 404 bp, Zea mays
agcgtcatcgtcgagtacgtcgacgagaccttccaccatggcgcggcgccggggatcctcccggccgacccctacgaccgcgccaccgcccgcttctgggctgacttcatcgacaacaagtgcttgaagccgatgtggctgtcgatgtggacggacggcgaggcgcaggcgcggttcgtcagggagacgaaggagagcctgggggtgctggacgcgcaactccaggggaagaggttcttcgccggcgacgcgctcggcttcgtcgacctcgccgcctgcacgctggctcactggctaggcgtgctggaggaagtggccggagtgcacctgatagcggcggacggcgagtaccccgctctgcgccgctgggccaaagagtacgtctccgatgaggtcgtgagccg

SEQ ID NO: 82290 - DNA, 323 bp, Zea mays
agcggcggcgggacctacgccaaggacaagctgggcaacgacatcacggtggaggagtggctcaacacgcacggtcccaacgaccgcacgctcgcgcaggggctcaagggtgaccccacgtacctggtggtggagcaggacaagacgctggccacctacgggatcaacgccgtgtgcacccacctcggctgcgtcgtgccttggaacggcgccgagaacaagttcatctgcccctgccatggatcccagtacaacaaccagggcaaggtggtccgcggaccggcgcctctgtcgctggccctggttcacgccgacgtcgacga

SEQ ID NO: 82291 - DNA, 387 bp, Zea mays
  unsure (1)..(387): unsure at all n locations
agcccacgcgtccgggaatccagtagcaacaatagagcaacaatggcgaccaagatattttccctccttatgctccttgctctttctgcatgtgttgctaacgcgacaattttccctcaatgctcacaagctcctatagcttcccttcttcccccataccttccatcaatgatagcttcagtatgtgaaaacccagctcttcaaccctataggctccaacaagcaatcgcagcaagcaacatacctttatcacccttgtttcaacaatcgccagccctatctttggtgcagtcattggtacaaaccatcagggcacagcagctgcagcaactcgtgctacctgtgatcaaccaagtagctctggcaaacctttctncctactctcag

SEQ ID NO: 82292 - DNA, 331 bp, Zea mays
agcccacgcgtccgcccacgcgtccgcgatgcagatcctgagagtttacgttcctagctacgagagctacggacgaatgtggccacacatgcacacgaggatcatcgcggctctgatggtttaccagaccaccatgatcggcttcatctccctgaagaagttcgcctacgcgtccgttctcgtgcccctgcttccagccagcataatcttcgcctacgtctgccacatgcgcttctacccggcgttcgccaagactcccctggaggtggtggtgcggcacgacctgaaggagactccgaacatggaggccatctacaccgcgtacataccg

SEQ ID NO: 82293 - DNA, 394 bp, Zea mays
agatcaggtcttcggggtcgtggaggtgcaggttttccttctggtctcaaatggtcctttatgcccaaggtttcagatggacgcccttcttatcttgtcgttaatgctgatgagagtgagcctggaacttgcaaagatagagaaatcatgcgccatgacccccacaagcttctggaaggatgccttattgctggagttggaatgagggcatcagctgcttacatctacattagaggtgaatacgtgaatgagcgtctcaaccttgagaaagctcggcaggaagcgtatgcagctggacttctgggtaagaatgcttgtggctctggttatgattttgatgtgcatattcattttggtgctggtgcgtacatctgtggtgaatagaccgccctac

SEQ ID NO: 82294 - DNA, 375 bp, Zea mays
aggatccagtctcgcggtcgcggccacgctgagggacagcgagaagagacagacacagatcgcgcgcggagatgtcgtcggactcgtcgtcgtgggcgcgcgccctggtgcagatctcgccctacaccttctccgcaatcggtatcgccgtctccatcggcgtctccgtcctcggcgcggcatggggtatcttcatcacggggagcagcctcatcggggccgccatcaaggcgcccaggatcacttctaagaacctcatcagtgtcatcttctgtgaggctgtcgcaatttatggcgtaattgtggcaatcatcctccagacaaagcttgaaagtgtgccaacatctcaaatgtatgatccggagtctcttcgag

SEQ ID NO: 82295 - DNA, 348 bp, Zea mays
agggattgggaagggcaacattagcctatattacagttgcctcttttctccttggagcgttatgttctggaatagctggttttgttggaatgtgggtgtccgtacgtgcaaatgtacgagtttcaagtgctgctcgtcgctctgcaagggaatcattgcagattgccgtccgtgctggtggtttctcagccattgtggttgtttgcatggctgtatttggcgtggcaatactgtactcaacattttatgtttggcttggagtagattcacctgggtcaatgaaggttaccgacttgcctcttctccttgtgggatatggttttggtgcctcttttggtgcccattttg

SEQ ID NO: 82296 - DNA, 360 bp, Zea mays
cccacgcgtccgcccacgcgtccgcccacgcgtccggcggggcctacgtcgcgaggcaggctgccaagagcatcgtcgccgccggcctcgcccgccgcgccattgtccaggtctcctacgccatcggcgtgcccgagcccctttcggtgttcgtggacacgtacggcaccggcgcgatccccgacaaggagatcctgaagatcgtgaaggagaacttcgacttcaggcccggcatgatcatcatcaacctcgacctcaagaaaggcggcaacgggcgctacctcaagacggcggcctacgggcactttgggagggacgaccccgacttcacctgggaggtggtgaagcccctcaaggcgg

SEQ ID NO: 82297 - DNA, 419 bp, Zea mays
caccacctcgccggccacactcgtctttctcacgagccacaggcacaggcaggctctcgagctcagtccacccatcgcaggggatggcgtcgtcgttcgccgtggcaacggtcccgtcgctggcggccccggcggccaagaagcggtccggcggcgtcacgtacgtggagggcatgaacgcctacagcggcctcaaggggctcaacaaggtgaacatgctcggggtgcgcaagaccgccgactactccttcgccaaggtcgtggcgtcgctcagccccgcggggaggaagcggcgcggcggcgcgttcggcgcccagatgaacgccgccgccgagatcttcaggatcgccgccaccatgaacggcctcgtgctcgtcggcctccccgttcggttccgtgctgcctccgggtggaggccg

SEQ ID NO: 82298 - DNA, 431 bp, Zea mays
gactagttctagatccccgacgagaccgtgagcacggcgaaccaccgggaccggatcctgaggctggtgaagggcctgtcgcccaaggtgctcacgctggtggagcaggagtccaacaccaacacggcccccttcgcgcagcggttcgcagagacgctggactactacacggccatcttcgagtccatcgacctggcgctgccgagggacgacagggagcggatcaacatcgagcagcactgcctggcccgggagatcgtgaacctggtggcctgcgagggcgaggagcgggtggagcggcacgaggtgttcggcaagtggaaggcgcggctgatgatggccggcttcagcccgtccccgctcagcgccctggttaacggcaacaatcagaaagctgctgcaaagctactcgccggactacaagctcgccg

SEQ ID NO: 82299 - DNA, 404 bp, Zea mays
cgtcaattcacgggtcgagccaagcgtctgcacatcctattccgaaaaagctgctccttctaaggagccaaaggcaaaggatgtcaagaaggaggctccaaaggaggcccccaagccaaaggtggttgaggcaccagcagaagaggaagcaccaaagccaaagccaaagaatcctcttgacttgctgccaccaagcaagatggtccttgatgactggaagaggctatactcaaacacaaagactaacttccgggaggttgccatcaaaggtttctgggacatgtacgacccagagggctactctttgtggttctgtgactacaagtacaatgatgagaacaccgtctcctttgtgaccctgaacaaggttggtggattcctgcaacggatggacctgtgccgca

SEQ ID NO: 82300 - DNA, 377 bp, Zea mays
gcagaactacgatggtggtgacctccacggagaccctaccagcggccttcccatcaccaacctcaccctcaagaacatcaagggcaagaacgccgttgacgccaagggaaagaatgctgctatcgtctgtggcaagggagcttgcactaactggacttggtccaacgttcaagtttctggtggaaagaagtacgacagctgccagaaactttcccagcgttgcttcttgctaagggatatccatttattaattttccaactccacttggaggatttacaacgtgtaatatggaaagatagacttcattcttgtatataacataaccattggggccagctcgacaagttcttgctgtggttcctaacaatataactct

SEQ ID NO: 82301 - DNA, 348 bp, Zea mays
aggagctggagcgcggcaccggggggttcgacgacgcgcacctcgtcaacggcagcgtgtacaaggccaacatcgacggcctggtgttcgccgtgaagaagatgaagtgggacgcctgcgaagagctcaagatcctgcaaaaggttaaccacagcaacctggtgaagctggaggggttctgcatcgactcggcgacgggcgactgctacctggtgtacgaatacgtggagaacggatcgcttgacctgtggctgctggaccgcgaccacgcgcggcgcctgaactggcgcgcgcgcctccacatcgcgctggacctcgcccacggcctgcagtacatccacgagcaca

SEQ ID NO: 82302 - DNA, 408 bp, Zea mays
accacgcgtccagacgcacgcagagccgcagagatccgtcacactgcaagttttgaaaactgaactgtaagatggcatcagcagagctttcccgtgaggaaaatgtgtacatggcgaagctcgccgagcaggcagagaggtacgaggaaatggttgagttcatggagaaggtagcgaaaactgttgactcggaggagctcactgtggaggagcgcaacctcctgtctgttgcatacaagaacgtcattggagcccgccgtgcctcatggcgcatcatctcctccatcgagcagaaggaggagggtcgaggcaatgaggaccgtgtaacactcatcaaggactaccgtggcaagattgaaactgagctcaacaagatctgtgatggcatcctcaagcctctcgaatctc

SEQ ID NO: 82303 - DNA, 396 bp, Zea mays
ctgcacaagctgtgcagtccgaataaaatcaggacagataaggcagcctgaagcacttgggatatctgcagaactaaaagataagggctatgctttgttgtgtgttggtttcccatctggcgatgttgaagtcgagactcaagatgaagatgaggtatattggctccaatcaggacagataaggcagcctgaagcacttgggatatctgcagaactaaaagataagggctatgctttgttgtgtgttggtttcccatctggcgatgttgaagtcgagactcaagatgaagatgaggtatattggctccaattcgggagatactttgcacgagggccagtggaaagagatgattacgcgctagaacttgcaatgggagacgaatgagctgtgcctaa

SEQ ID NO: 82304 - DNA, 409 bp, Zea mays
acggacgcgtgggttttttttgaatcgaaagcatacatcacgttatatatatatcacggcttatgaagcaggcgcgagcgccctactcggcctcctcgacggcggcctccacccggagcagcacgaagccgacggcgacgccgacgagcacgaggccgctcatggtggcggcgatcctgaagatctcggcggcggcgttcatctgggcgccgaacgccccgccgcgccgcttcctgcccgcggggctgagcgacgccacgaccttggcgaaggagtagtcggcggtcttgcgcaccccgagcatggtcaccttgttgagccccttgaggccgctgtaggcgttcatgccctccacgtacgtgacgccggcggcgggcctcctcttggctgccggggccgctaacgacgg

SEQ ID NO: 82305 - DNA, 361 bp, Zea mays
aaggctacggtggtggtggcggcggctacggcggtggcaaccgtggcggcggctacggcaactccgacgggaactggaggaactgagcggtggggcccgcgcggccaagttatcctgttcgctaccgtgttgtttaccctagtccagagtgtttatcttcgttcgtctcgtgtttgttgttgcccatctgtgtttttgattgaaggtcgctctgtgtcagttgttagtgctgtgttcatcctcggctccagcagacccatgcatcaaccagcatggactgcggatcgatgggtgctgttacccccgtcaggctttattctaagttaaatcctaaggaaaaaaatggtgcttcttgggtgct

SEQ ID NO: 82306 - DNA, 428 bp, Zea mays
acccaaggtgtcgggcttcgccaaggtggacctcgaggccggcaccgtcgacaagttcatctacggcgacggccggtacggcggcgagccctgcttcgtgccgcgccccgacgcccccgcgggcgccgcggaggacgacggctacgtgctgtgctacgtgcacgacgaggcccgcggcgcgtcggaaatgctcgtcgtcaacgcccgcgacatgcgagccgaggccgccgtcaagctgccgggccgcgtcccgtacgggttgcacggcacgttcatcgccggcaaggagctgcagcggcaggcctagtgtggtgccgttgccgtgtcgtgctgctgctacctcgtcgatcacgaactcgaccaactcacgtacatacactgatacacacaacagacactacaattaccaggcttgatattgacttggc

SEQ ID NO: 82307 - DNA, 450 bp, Zea mays
ccggtcggccacgcgtccacccacgcgtccgcggacgcgtgggcggacgcgtgggcgactgcgagcgcgtgcgcgtcgacggcctcttcgtcagctcgccggcgtccagccccaacacggacggcgtccacgtcgagaacaccaagtccgtccagatcctcaactctaggatctacaacggcgacgactgcgtctccatcggcgccggatgctccgatgtccacgtcgagaacataacatgcggccacggccatggaattaggtacctgtcagtctgtcactcactcactcaccaacgtgcttccatggcgcgcggtaccgtttgtagtgaacctgacgcggcgagctgctgctgtcaccctcgcagcatcggcagcctgggtgtccacaacacccacgcctgcgtgttcaaagttcacggtccggaacgtgcggatactcgactccgac

SEQ ID NO: 82308 - DNA, 399 bp, Zea mays
agagatctcgctcagaagagactctgaagagataacgagctgcgcttcttcgtcctcgatcaactagcttctctgatcgcttccatatggagagagctgcgtcaagctgcgctagcctcctagcacaaaggaggtgctactccgtggccgcggtcgtggtgaagggatgcgggcggaaggccgtggagaaggtggccaagcgcatcatgggcaaggaggtgaacaccgcggctgcctccggggagaagacgccgtgggtgccggacccggtcaccggctactaccgcccggcgggtggcgccaaggaggtggacgcggcggagcttcgcgccaggctgctcaccaagaggatcgccaactaaatcaatctagcagcagagcagtgccgctgaaaataat

SEQ ID NO: 82309 - DNA, 433 bp, Zea mays
acccacgcgtccgggtgaagccgccgccgctgcagtgtccatagccaccgcaggagactgagatggggggttttgtcaagacccacaagagcaatgcatacttcaagcgtttccaggtgaagttcaagagaaggcgcgctggcaagacagactacagggccaggataaggctgattaaccaagacaaaaacaagtacaatacacccaaatacagatttgttgtgcgatttaccaacaaggacatcacagcacaaatcatatctgctagtatagcaggtgatatggttcttgcttctgcttactcgcatgagttgccacgatatggtctcgaagttggtctgaccaactatgcagctgcctactgcactgggcttccgtttggtcccccttttgcacaagacccgtggtttagataaggaatatgagggcaatg

SEQ ID NO: 82310 - DNA, 390 bp, Zea mays
acccacgcgtccacccacgcgtccgagcagcccggcgaaaaccctagtaagcaaaccaccggagcagcggcgcttgcgcgggcggagccatggcggacgacgattacaacgaaattgacatggggtatgaggatgagcccccagaaccggagattgaggaaggagctgaagaagagcctgagaacaacgaagatgcccctgatgacgtcataggtggtgagggtgaagataaggaacaggaaaagaccaagcgtgaacgcaaaacaacaaaatacatgacgaagtacgaacgtgcgcgcatcctgggtacacgagccttgcagataagcatgaatgctccagtcatggttgagcttgagggtgaaactgaccctcttgagattgcaatga

SEQ ID NO: 82311 - DNA, 365 bp, Zea mays
  unsure (1)..(365): unsure at all n locations
gaaaagagctagatataagaagatgattcgccggcatatggacttccgaatgcttcactctaagatcaagagtggcgcaatctcttgcaccaaggagcttctgagagatgtgctcattttcatcaataatgtaataacattctatccgaaggctacattggagcacatggctgcggttgagcttcgtgagtctgcatgcaaaactgtgaagcagagtgcaagcttgttcttgaaaagccatggagagaccggaacagctggtgcccctgtagtaaagaatactcgagtcctgcagcctcgatgcnctggccccggtgatgcaaggccaagcaaggttttcttcaaggacgctactgccaaggaaa

SEQ ID NO: 82312 - DNA, 378 bp, Zea mays
gggccggcccacgcgtccacgtaaagatagtggaggtggggcctcgggacggcctgcagaacgagaagggcaacgtcccggcgtccgtgaagatccagctgatacacaagctggtcggcgcgggcctgtcggttgtcgaggccaccagcttcgtctccccaaagtgggtgccgcagctagccgacgcagaggaggtgctgaagggtataaagcaggagccaagcgtgcggtacccggtgctaacacctaacctcagagggttcgaggctgccatcgcagccggcgcgaaggaaatcgcggtcttcgcgtccgcgtctgaatccttctccagttccaacatcaactgcaccatcgaggaaagccttgctcggtaccgcg

SEQ ID NO: 82313 - DNA, 436 bp, Zea mays
aggtaatctggtccactagcgctccattcgaccccacccacagccatggctgccgtgaccgcggcggccgtctctctgccctcctcctcctcctcccctgccgccgccaaggccaaggcgtccgcgtccgcgtccccgtcgtctccatgcggccacctccagttcccgcggcggcacggcggcccgcgcgcggtgcggctgcgcgtgcaggtgtccaccaccgagaccgcggaggcggagccggtcaagaagctggagaaggtgtccaagaagcaggaggaggggctcgtcaccaacaagtacaagcccaaggagccgtacgtcgggaggtgcctgctcaacaccaggatcaccggcgaccaagccgccggggagaacttgcacaatggtctccagcaaagaaggcgaggtcccctacagagagggccagtccatc

SEQ ID NO: 82314 - DNA, 387 bp, Zea mays
  unsure (1)..(387): unsure at all n locations
aaagcgagcgaaggacccggggcggaagaagagagagaagacgtctctctcctctcggcgtccccgttccccaacctctcgtctgctgcctgcctgcctgcaaaaaggagtttgtcatggcgtctaagcgcatcctcaaggagctgaaggacctgcagaaagacccccccacatcatgcagtgcaggtcctgctggtgaggacatgtttcattggcaagcaacaattatgggaccacctgacagtcnctatgctggtggtgttttcttagtgaacattcatttcccgccagatttacccttcaaacctccaaatgtttctttcaagacaaaggtcttccatcctaatatcaacagcaatggaaatatatgccttgacattctcaaag

SEQ ID NO: 82315 - DNA, 417 bp, Zea mays
gggagcgtaagctttttggcagtggtggttctggaatgcagcagcaacacctgatgcagatgaaccagaacatgatggggggctacacctctcctgccgccgtgaccaccgatctcatccagcagtacctggacgagaacaagcagctgatcctggccatcctcgacaaccagaacaatggcaaggcggaggagtgcgaacggcaccaagctaagctccagcacaacctcatgtacctggccgccatcgctgacagccagccgccacagaccgcgccactatcacagtacccgtccaacctgatgatgcaaccgggccctcggtacatgccaccgcagtccgggcagatgatgaacccgcagtcgctgatggccgcgccgtcctccatgatgtacgcgcaaccgttcctgtcgccgc

SEQ ID NO: 82316 - DNA, 363 bp, Zea mays
cccacgcgtccgcccacgcgtccgcgttgatcgagcccacgtcggggaacatgggcatcgggctggcgttcatggcggcgctcaaggggtacgagctcgtgctcaccatgccgtcctacaccagcctggagaggagggtgacgatgcgggcgttcggcgccaacctggtgctgaccgacccggccaaagggatgggcgggacggtgaggaaggcgacggagctgtacgagagacatcccagcgcgcacatgctccagcagttccagaaccctgccaacgtcaaggtgcactacgacacgaccggaacgggaaatctggaaggacacgcttgggcaggtcgatatcttcgtcatggggatcggg

SEQ ID NO: 82317 - DNA, 381 bp, Zea mays
acccacgcgtccgcggcgtccgtggacttcagcgccggtgggagcccgctgctgcccccgaccgtgaacgccgcgccgctgcacgcgcacttcgaggccgtcgccgccgacacggtcggcgtgggcgccgtccgtggcgccatggagccctgcatgggcagcgaggacttcgcgtccttctcggcggccgtccccgcctcgcacttctacttcgtcggcatagggaacgaggcgatcggggccgtgcacgccgcgcactcgccgcacttcctcgtcgacgatggtgcgctcccgtacggcgccgcgatgcacgccaacctcgccatcgagtacttgcggaaccacgcgatagccaataggtccgttggtccccacgacgag

SEQ ID NO: 82318 - DNA, 373 bp, Zea mays
acttgcatcccgtccccgtccgcgccggccgacgccgccttttcgtccccgcgtcagcgtcgcggctccactgagcgtgcgtgtcaccggcgggaggcaagggcaggcggtggtggcgatggcgtccgctgacgcgcgcttggcggggatcgcctcctccatccgcgtcatccccgacttccccaagccagggatcatgttccaggacatcacgacgttgctgctcgatcccaaggcgttccgtgacaccatcgacctctttgtcgagcggtacaaggaccaagggatcaccgtggttgctggtgttgaagctagagggttcatttttggtcctcctatcgctttagccattggcgcaaaatttgtgcctttg

SEQ ID NO: 82319 - DNA, 436 bp, Zea mays
agcggacgcgtgggcggacgcgtgggtgcagtacgtgctggaccaccccgccgcgctgtggttcgtcggccccacgttcgccgcgctcactggcctcgtcttcaaagaaggtctctgctatgggaaactggaagctggcatcttgacgtttcttatccctgggcttcttcttgggcatttgtctggtttaatggataacagcacaaaggcaggtcttttaggactgtggatgcttcttttcacaatctttgccgctagaaaattccagcagcccatcaaggatgacgtcggagacaaatctgttttcatgttcaacgctctccctgaagaggaaaagaaggcgtggatccagaaactcgagaggcaaaaggggcaagaattgtttgagtatgaaaagattaccttgtcttggtgcagccaatagttcgtccgtgaa

SEQ ID NO: 82320 - DNA, 436 bp, Zea mays
agatcaggttgccccaacgttggttcctctgctgaagttttacttccatgaggaagtcaggagagctgctgttgcggccatgccggaacttctacgctcagcaaaattggctgttgagaaagggcaggctcaaggacgtgatgagtcttatgtcaaacagttgtctgactacataattgcagcacttgttgaagcactgcacaaggagccagaaacagaaatgtgctcatccatgctggattctttaaacgagtgtatgcagctttcgggtcttttgcttgatgaagcccaagtacgagctatcatagatgagattaaaaacgtcattatagccagtgccacccggaaaagagaacgctcggagagaacaaaagccggagaattttgatcctgatgaaggagagctactcaaagaagagaatgaacaggaggagga

SEQ ID NO: 82321 - DNA, 374 bp, Zea mays
accacgcgtcaaggcatcaccgccgcgacgacgatggcagcctcgctccaagccgcggccaccctgatgcagccggccaagatcggcggccgggcgccctttgcctcgctgccgtcccgcccgtcgtcgcaactcgcctgcagggcgttcggcgtcgacgccggcgccgccaggatcacgtgctccctgcaggacgtcgccagcaggtgcgtcgacgccgcgaagctcgccggcttcgcgctcgccacctcggcgctcctcgtctcgggcgcgagcgcggagggcacgcccaagaagctgacctacgacgagatccagagcaaaacgtacatggaagtgaaaggcacgggcacggcgaaccagtgcccgaccat

SEQ ID NO: 82322 - DNA, 402 bp, Zea mays
accacgcgtccgcccacgcgtccgcccacgcgtccggcaatcgcgctgcactcgcaggtcatcaccgagttctgcaagaccatcggcgccgactccaagcagcggcagggcctcatccgcctcgccaagaagaacggagagaagctcggattccttgcctgagacgaccatgttctacgcacatatataagtatataatctataagtactacatcatcaagtagtggcggacaatgataattatattgataccttcttccttgctcccatcgagtcctctatcaagtggtagccagtacatgtcatgtgatgatgcttcaattcagcttccgatgctcggctgtccatcatcagctagctgcatgcttttgttttgcttcattcctgcagagattactattg

SEQ ID NO: 82323 - DNA, 357 bp, Zea mays
ccccaaaagtaataactagtaaacagagctgcgtccaggcttcttcgatcggtccatggctgtcgtcacgagggacgcggcgtgcctccccctcgtcctcctgctcctagtcttctccgcggccccgtctccggctgacggctgcgaccgctgcgtgcgccggtccaaggccacctactaccaggcctcctcgctcgccctcaacgccgggtcgtgcgggtacggctccttggcggcgtccttcaacggcggcctgctcgccgcagccagccccgagctgtacaggggcggcgtcggctgcagcgcctgcttccaggtgcggtgcagggacagcgagctgttcagcgccgccggcgc

SEQ ID NO: 82324 - DNA, 382 bp, Zea mays
acccacgcgtccggttccacctgcataccttgatgagctctcactacttcaggaccgcatagcaccattttcaaacgatgttgcttttaatattatagagaaagagcttgggcttccactggatatggttttctctgagataacaccagagcctgttgctgctgcatctcttgggcaggtttaccaggctaggctccgctccagtgggaagattgttgctgtcaaagtacaaagacctggagttcaagcagcaatttcattagacatatatatcttgaggttcctagctaatcttgcaaggaaggctgccaagttgaacacagaccttccagctgtgcttgacgaatgggcatcaagcctattccgggagatggattataga

SEQ ID NO: 82325 - DNA, 338 bp, Zea mays
acgcgtccactttactcctatccactgcggcctggacgcgtgcgagagacttgacaaagcagcagcagggatggcgcctctgaagctgtacgggatgccgctgtcccccaacgtggtgcgcgtggccaccgtgctcaacgagaagggcctccacttcgagatcgtccccgtcgacctcaccaccggcgcccacaagcagcccgacttcctcaccctcaaccctttcggccagatcccggctctcgtcgacggagacgaagtcctcttcgagtcccgcgcgatcaaccggtacatcgccagcaagtacgcgtcggatggcacggacctgctccccgcga

SEQ ID NO: 82326 - DNA, 378 bp, Zea mays
aacccacgcgtccgcccacgcgtccgcacacacaccacaccacacctcctcgcttccactccgctcgtctgacatctcgtcccgtcctttcgtttcgaagcctcgcgagccccgacgatggccaccgccgcggtgtcggtcgacgagaagctcgacaagcttcgcgccgaggtcgccaagctcgaccagatcaggcgagtgcccccctcctctccgcactagatctcgccgcccgatcgcttcgcctcccatttttgctgatttctgagtgtgtttttccgcgcagcgagaacgagaagtccgggttcatcagcctcgtgtcacgctacctcagtggggaagcggagcagatcgagtggagcaagatccagaccccta

SEQ ID NO: 82327 - DNA, 393 bp, Zea mays
acaggcaatcgcagcaggcatcttacctttatcacccttgttcctccaacaaccgtcagccctattacaacagttacctttggtgcatttgttggcacaaaacattagggcacaacaactacaacaacttgtgctaggaaaccttgctgcatactctcagcaacatcagtttcttccattcaaccaactggctgcattgaactctgctgcttatttgcaacaacaactaccattcagccagctagctgctgcctacccccagcaatttcttccattcaatcaactggcagcattgaactctgctgcttatttacaacagcaacagctaccaccattcagccagctagctgatgtgagccctgctgccttcttgacacagcaacagttgttgcc

SEQ ID NO: 82328 - DNA, 428 bp, Zea mays
  unsure (1)..(428): unsure at all n locations
accacgcgtccgcgacagacaaaatcagtcaagatggtcaacgttcccaagacccgccgtacctactgcaagggcaaggagtgcaagaagcacacccagcacaaggtcacccagtacaaggctggaaaggcttctctgttcgctcagggtaagcgtcgttacgaccgtaagcagtccggttacggaggtcagaccaagcccgtcttccacaagagggcgaagaccaccaagaaggttgtgctcccgtcttgagtgcactgcctgcaagaccaaggcacagctcgcccttaagcgatgcaagcacttcgagcttggcggtgacaagaagaccaagggtgccgcccttgtcttctaagcgtgtctcctctttctctctcttttgctgggccctcggcgtagtcttcaagcggacangatgggtggctttc

SEQ ID NO: 82329 - DNA, 395 bp, Zea mays
acggacgcgtgagtgccaaggttgatagaaagaggacaccctggctcattgtgttgttgcacgtaccatggtacaatagcaattgggctcatcagggtgaaggcgacagtatgatggcttcaatggagcctttgctgtacactgctcatgtggatatggtaatagcaggtcatgtccatgcttatgaacgtgcggagcgagtctacaattccagacctgatccttgtggcgctgtccacataactatcggcgacggtgggaaccgtgaaggcttggcccgcaggttacgttaaccgaagccagcgtggtcggtcttcagggaagcgagctttgggcacggcgagctaaagatcgtgaactccaaccatgcccactggacctggcacagaaacgac

SEQ ID NO: 82330 - DNA, 366 bp, Zea mays
acccacgcgtccacaaccagaagatcaccttccctggtgaagctgatgaagcgcctgatactgtcactggagacattgtattcgtcctccagcagaaggatcactccaaattcaaaagaaagggtgaagatctcttctatgagcacaccttgtctctgaccgaagcactatgtgggttccaatttgttcttacacatctggacaacaggcagcttctcatcaaatcagaccctggtgaagttgttaaacctgaccaattcaaggcgattaacgatgaggggatgccaatttaccagaggcctttcatgaaggggaagctgtacatccatttcacggtggagttccccgactcgctggcaccagagc

SEQ ID NO: 82331 - DNA, 363 bp, Zea mays
gcgtccgcccaagcgtccgcccacgcgtccgcacacatacatagtttcttctactacacgacgacaaacatggggaagcctgcgaagatcggagagtggggtggatacgccggcgatcgtcgggatctgagggctactccggaccggctgatcgaggtgaaggtcacggcggacaacagcagctgcatccgctccatctccttcatctacatcggagccgatggcaaaccgtacgaggaggggccatggggtttcggccatgctggcacggagtacaagattgatctgtgcaggttcgacgagagcttgacggagatctccgggaccacgggcccagcctacaacattgacaatctggtcaag

SEQ ID NO: 82332 - DNA, 399 bp, Zea mays
cgggccggcccacgcgtccaccaccacttcctgcgcttcgctctccccagggaccacctagacttaatgtactcgtttgtggaatatatttgttattggtgccttcgtcacttgctgttttgcttccgcactggtaacttggggggatctagggtttcaggaggagagtggagatcatcccgatgatgatgcgaggtggaaggctcacgggtttgacctctcaggttctgaggtgcttcagcacggagatatttgtcagcagattatcattctatacgacagaggaagaattcaaagatattttttcaccatttggcaccgtagaggaagctcgacttatgagagaccaccaaactggaaggatgaagggatttggttttgtcaaatattcatcgcaag

SEQ ID NO: 82333 - DNA, 433 bp, Zea mays
cccacgcgtccgccttactgagctttcattcaactggactggcttcatcaatgccatgatatcaaacatctcattcacttacaggagcatttattccaagaaagctatgactgacatggatagcaccaacgtgtatgcttacatctcaataatcgctctaattgtttgcattccacctgcattgatctttgaagggcccaagctaatgcagcatggatttagtgatgccattgcaaaagtaggtttgacaaagtttgtcagtgacctattcttggttggactgttctaccatctgtataaccagattgctacaaacaccttggagcgagtggctcctctgacacatgctgtcggcaatgtgttgaaacgtgtttttggcaaccgtttccccaatcattgtttttggcaacaaaattagcacacaaactggaat

SEQ ID NO: 82334 - DNA, 387 bp, Zea mays
ctccaaggaccccgccgtgagcatcgccatcgtggagcagtcggtgtcgccgggcggcggcgcgtggctgggcgggcagctgttctcggccatggtggtgcgcaagccggcgcacctgttcctggacgagctgggcgtggcgtacgacgaggccgaggactacgtggtcatcaagcacgccgcgctcttcacgtccacggtcatgagcctgctcctggcgcgccccaacgtgaagctgttcaacgccgtggccgtggaagacctcatcgtcaggggagggcgcgtcggcggcgtcgtcaccaactgggcgctcgtgtccatgaaccacgacacgcagtcctgcatggaccccaacgtcatggaggccaaggtcgtggtcagctcctg

SEQ ID NO: 82335 - DNA, 269 bp, Zea mays
cccactcgtccggtgaaacatgagaatcttgtcaagtttattggagcttgcaaagaaccattgatggtgatcgttagtgagctactaccagggatgtcactgaaaagttacctgcatagcatacggcctagccaactagatacacacactgcaataagctatgcactggacatagctcatgcaatggactgtttacatgccaatggcataatacatagagacctgaaacctgataatttattgcttacagcaaatcgcaagaagctgaa

SEQ ID NO: 82336 - DNA, 406 bp, Zea mays
gatactttggttatgtcaactgtggttaagaatggtggacttgcacctggtggcttcaactttgacgccaaattgcggagggaaagcactgatgttgaggacttgtttcttgctcatatctccggaatggacaccctggcccgtggcctccgcaacgccgccaagctgatcgaggatggttccctagatgctctcgtccgcaagcggtaccggagctttgatagtgagatgggtgccttgatcgaggctgggaaaggagactttgaggcgctggagaagaaggtccttgagtggggtgagcccactgttccgtccggcaagcatgaactggcggagattctgttccactctgctctataaatggcgccatgtccgtaccggtagctcctggaataagcaagcactg

SEQ ID NO: 82337 - DNA, 439 bp, Zea mays
gtcgtcatggggatcgctgctctcgtctgcacaacaggccaactatatcaccaactcttgtgcttgctaacatgtatcagcgccccgatatgataacccctggagttgatgctcaaggccaacctattgaccctgagaagatgcaggagcattttgaggacttctatgaggacatctatgaggagttggggaagtttggtgaagattgagaatctgaatgtttgtgataaccttgctgaccacatgattgggaatgtctatgtccagttcagggaggaagagcaagcagccgcagcatacaatgctcttcaggggcgcttttactctggccgccctataattgttgagtattctcctgtgaccgacttccgtgaagcaacctgtaggcagtttgaggagaacagctgcaaccgtggtggctactgtaatttcatgcatg

SEQ ID NO: 82338 - DNA, 447 bp, Zea mays
  unsure (1)..(447): unsure at all n locations
accacgcgtccgcccacgcgtccgcccacgcgtccggatggccagaaggatctccagccagtctagcaagcacgacgactaccgcggcgagtatcctcaagaggaggaggagcacaaggaggagttccggcctccgtctcctgccccgtcctacacggagaaggacgtgctctcgtcgatgctgagacggctcggtgagctggagggcagggtgcaggtgctcgagacgaagccgtccgagatgccgtttgagaaggaggagctgctcaacgcagccgtccgccgcgtggacgcgctggaagccgagctgatctccacgaagaaggccctttacgatgctctgatgcgacaggatgagctgctcgcgtacattgacaggcaggagctgatcaagttccgtaaaaagaagttctgcttctaagatctgnacatggagcagctggtcat

SEQ ID NO: 82339 - DNA, 381 bp, Zea mays
cccacgcgtccgcccacgcgtccggagaccaacaagcaacatagaaagtggaatccagtagcaacaatagagcaacaatggcgaccaagatattttccctccttatgctccttgctctttctgcatgtgttgctaacgcgacaattttccctcaatgctcacaagctcctatagcttcccttcttcccccataccttccatcaatgatagcttcagtatgtgaaaacccagctcttcaaccctataggctccaacaagcaatcgcagcaagcaacatacctttatcacccttgtttcaacaatcgccagccctatctttggtgcagtcattggtacaaaccatcagggcacagcagctgcagcaactcgtgctacctgtga

SEQ ID NO: 82340 - DNA, 319 bp, Zea mays
ggcataaactgggctctagttcgtgccgccacgcccccagagctggaggctcccctccaggatacattggaggccacactgcctcctcctgcagctgatgcggcccacaccgatatgttctgatcatacattgatctatgatgctgcatgttaatttgcttaaaggaagaaaaaaaatagatgatgaagatgcatgactttggcatagatgagaacaataatgtatgttaaggactaattatcttgatccatcaaaaaaaaaaaaaaaacaaaagaaaaaaaaaacaaacaaaaaacaaaaataaaaaaaaaataaaaa

SEQ ID NO: 82341 - DNA, 315 bp, Zea mays
gggtccagccacgcgtccgaaccatctaccagcgactcagcgagcgagagcagcacacactgcacgcagctagctaggagcagcagcagcggcggcgatggcggcctccatgatctcctcgtcagctctggcggtggcgcctcagggcctgccgcccctcggccgccgcgcctcctccttcgccgtcgtctgctccaagaagaagatcaagaccgacaagccctacgggattgggggtggcctgaccgtcgacgtcgacgccaacgggagaaagggcaagggcaagggcttgtaccatttcgtcaacaattacgg

SEQ ID NO: 82342 - DNA, 321 bp, Zea mays
cccacgcgtccgcccacgcgtccgtccttcacttccaaagtctgatcgtaagaagaaaaaggaaaagcctaaacttggcatgaaagagagtctgaaggttctgctctcctcgaggtatgtgagggatctagctaccctagtggttgcttatggcattagtatcaatcttgtcgaagtcacatggaaatcaaaactcaaggcacagttccctaatccaaatgaatactcatctttcatgggtgatttctcaaccgcaactggaattgcaactttcacgatgatgctgttaggacgtattatactacggaaatttggctgggg

SEQ ID NO: 82343 - DNA, 417 bp, Zea mays
acggacgcgtgggattggtttctggaccaacaacaacattgctgaagtatctgcgcagccggctttcatccgatgaggaagcatcaggatccagaagcaccccaactaaagatgaccaaattgctgcagcaaggcgcttgtccttatcttcaaaggaactggacttgagtggccttggagtgaccagtgtaccagctgccgcgtgggagacaagtgatgtggtgaaactggatctttctaaaaattcaatagaagatctaccaaatgagttgtcattatgctcatcacttcaatccttagttttgtctaataacaagataaaaaggtggcctcacacagtggtttcctcccttccctgtctgtcttccttaaagctggacaataaccccttggtagagatatcatccactgatcttg

SEQ ID NO: 82344 - DNA, 398 bp, Zea mays
actccggacgaaatcagcggcggcggagatgggagcggagtgccggtacgaggtggcgcaggcggcgtacatcaagctggcgctgcacgcactgaagcacccggcgaccgccgtcaacggcctcctcgtcggtcgcctcgtcgagccttcgtcctcaccggccgtcgtctcggtcattgacgccgtgccgctttctcaccacccgcaccatctgccgctgctccccacgctcgagctcgcgctcaccctcgtcgaggaccacttcgcaacccagggcgaaggcctcgccgtcgtcgggtactatcacgccaacccgcgctgcgacgacaccgagctcccgccagtcgccaagcgcgtcggagaccacatcttccgatacttcccccgctccgcggtgt

SEQ ID NO: 82345 - DNA, 284 bp, Zea mays
aacgcatgtgaaggcctggtggtctggtctgatggagaggccgtctgtccacaaggtcgctgccttgatgaagccgtctgcttgaaacggttgccctgtcaatcggtgaatggaataagccaagtctgttctgggttgtttgcttgttcagtgatgtgtctttctatgacgaaagttgagtgcctatgtgtgagcatgcttgcttgtaacgagaccttgaattgttcggaaatgagcattcctgtgctcttcttgaaaataaactttgcgttaggttcctcaat

SEQ ID NO: 82346 - DNA, 421 bp, Zea mays
  unsure (1)..(421): unsure at all n locations
ggggccagcacgcgtccggcaggatcaggccaagctggctgcctcctctatcgacagcatcgtgaacggcagcgacgccgtcatggagccggttgttgctggcagcaacacggtagtagctgttgcccaagttgagttgcaaacaatgaacgtgcagcagcccgctgatgttgccggacccagcgagggggtggcggcgatctccaaaggggggaaggtanggccgaaccggtgcagcgcctgcaggaagagggttggacttacgggattcaactgccggtgtgggaacttgtactgcgcactccaccgctactccgacaagcacgactgcaagttcgactaacggactgctgccaaggacgccattgccaagggctaatccggtggtgaaggcagacaagctcgacaagatctaaggggg

SEQ ID NO: 82347 - DNA, 433 bp, Zea mays
  unsure (1)..(433): unsure at all n locations
acggagcagccgcagtcccggcgatcccgccgccggtcgccctcatacttcctcgtcactgccttcgtttctctttccaacaatcaagatgagccgtggcggtagcgcgggtggtggtcaaagttctctgggttacctctttggaagcggtgagccccccaaaccagcagtggcaccagctgtaagtgctccacctgctgctgcaggtgctccacctgctgagaaaccacctgctgcaaagcctgatggcaccagtcagattgctgctggggttaccagccaaaccaataactaccacagggccgacggtcagaacaccggaaacttccttacggaccgtccttcgaccaaagtccacgctgctcctgncggtggctcttccctgggaatactgtttggtggcaactgatgccgctcaacaagctatcacccc

SEQ ID NO: 82348 - DNA, 410 bp, Zea mays
aggtcagagtggtttgagcttaaccgcgagctggctgtccagatagtagcggactacaagtactactccatcttcaggaagcactgcaggccatcctgttatccagacgagcattacataccgacttatcttcatctgttccatgggccactcaacgccaacaggactatcacatgggttgattggtcaagaggaggcccgcacccagcaagttatggtgccacagacatcacagaagacttcatccaggccatcaggaataatggtacgcagtgcttttacaactcgaagcccacctctgtctgctacctcttcgcgaggaagttcgctcctaatgctttgccacggctgatgaacctcacctcgaccgtgctggacttctgagccgattctcaccatgcgggcgggcg

SEQ ID NO: 82349 - DNA, 382 bp, Zea mays
ccagacagacccctttcccctccctcctcggcctcctcgaccactccgacgcccacagcgcctccggcgagctccacctctccaccggcggcagcgaggggcgagggggctgatactgtaggcggaggaggagccgagccgagccgatggggcagcagtcgctgatctacgcgttcgtggcgcggggcaccgtggtgctggccgagtacaccgagttcaccggcaacttcaccaccatcgccgcccagtgcctgcagaagctccccgccagcaacaacaagttcacctacaactgcgacggccacaccttcaactacctcgtcgaggacggattcacgtactgtgtagttgctgttgaatcagtcgggcgacaaatccccat

SEQ ID NO: 82350 - DNA, 420 bp, Zea mays
aaaaaatcttgagctcgcaaccatgaaattgtcccaagaactggcagagcaattgcgcctggttatggaaccaactcttgctagtaagcttcaaggggattatagaactggaaagagaataaacatgaagaaggttattccatatattgcgagtcatttccgcagggacaagatatggttgcgccgaactaagcctaataaacggaattaccaagtggttattgctgttgatgactctagaagtatgtctgagggcaaatgtggaaaatttgctatcgaggcattagttactgtgtgccgtgctatgtcacagcttgaggttggacaatttgcagttgcaagttttgggaagaaggggaacgttagtgtgctacacgattttgatcagatctttaatagtgaagctggagttaatgtgat

SEQ ID NO: 82351 - DNA, 367 bp, Zea mays
accacgcgtccgcggacgcgtgggctggtggagttttcctagttacaatccattttcctcctgattatcctttcaaaccaccaaaggtggcatttcgcactaaggtgttccatccaaacatcaacagcaacgggagcatttgcctcgacatcttgaaggaacagttgaattcggcactaaccatctccaaagtgctgctgtccatctgttccctgctgactgattcgaaacccgacgaacctttgggcccccaaataactcaaatgttcaagaccggccggcacaagttcgaaaacaccgccaggacctggacccagaagtatgccaagtagtaatttccctacctggcctttggggtctctgctgc

SEQ ID NO: 82352 - DNA, 409 bp, Zea mays
agtctactgggccgcgcagctgctcggcgccgtcgccgccgcgctcgtgctcaggctcgccaccggagggatgcatctgccggagtacgcgctggcggggggcgtgagcggatggaacgcggcggtgctggaggcggccatggcgttcgggctcatgtacgcctactttgcgacggtgatggacaaagcgcggagggtccgcgccggcgccggagcgctggcggcgccgctcgccgtggggcttctggcgggggccaacgtgctggcctgcggcgcgctggagggcgccgtgatgaatccggcgcgcgcgttcgggcccgccgtcgtgggctcccgtcgctggagacaccaatgggtgtactgggtggggcccatggtcggcgccggcctctccggcgtcctccacgag

SEQ ID NO: 82353 - DNA, 410 bp, Zea mays
cccacgcgtccgacgagcgacgaagcgcgcacaaagagaagaacctcggagctgagatggcacaagccatggcgtcgatgacaggcctctcgcagggcgtcctgcccagcaggcgcgccgacagcagaaccaggacggccgtcgtcgtcgtcagggcgtccgcggagggcgacgccgttgcgcaggcgggccgccgcgccgtgatcgggcttgtggccactggcatcgtcggcggcgccttgtcgcaggcggcgcgcgccgagaccgtcaagaccatcaagattggagccccgccgccgccctccggtggactccccgggactctcaactctgaccaggcgagggacttcgacctccccttgaaggagcggttctacctgcagccgctgccgccggccgaggccgcggca

SEQ ID NO: 82354 - DNA, 414 bp, Zea mays
  unsure (1)..(414): unsure at all n locations
acgggccaattatatcccgttgaaatacaatacagaagaagtttaaggtatcttcaacacagctcctgtactagtcatgcccataccgggcattgacgttgttccttgtcggtccattcctcgatggatttttgactaaccaaaatgtctttgctttcgactacacaactcaagttctgtttttcatcatgctgtcgtgcctgatttcagtctcggtgaacttcagcacttttctcgtgatcgggaagacgtctcctgtaacctacaaagtacttggccatctgaaaacatgcttggtcctcacctttggctatgtcctgcttcacgacctatttagctggagaaacatacttgggatcctaatcgtggtaattgggatggttctgtacttgtacttctgcactanagagactc

SEQ ID NO: 82355 - DNA, 393 bp, Zea mays
gggtccagcccgcgtccgcacacacgtccgatctgatctactgatctattgagaggaacggggaaacacacctttgttgttgttgctatcttcataccgtcgccctgtagagaagcaacagggcattgggatccaagccgctgtaggttgtcgcgtttccaaacactccgacgcctaggcgatgggggcctctgaggactagggttttagggcgaggtactagcgttagtctttcctgcgaccccttagtcctatatatagcgtcgtgtgtctgggggctccaaccgaggttagcgtgggccctcccaatcaagggcccatttaaagagatagatagttgggtttagcccaatccggtcacagttgaccagctgtagaggacacacccaacac

SEQ ID NO: 82356 - DNA, 394 bp, Zea mays
atgtcttgcaactgcggatcaagctgcggctgcggctcaagctgcaagtgcggcaagaagtaccctgacctggaggagacgagcaccgccgcgcaggccaccgtcgtcctcggcgtggccccggagaagaaggccgcgcccgagttcgtcgaggccgcggcggagtccggcgaggccgcccacggctgcagctgcggtggcaactgcaagtgcgacccctgcaactgctgatcacatcgatcgacgaccatggatatgattattatctatctagcttgtggtggtggttgaacaataataagcgaggccgagctggctgccatacataggtattgtgtggtgtgtgtgagagagagagaaacagagttcctcagtttgctatctctctctgcat

SEQ ID NO: 82357 - DNA, 416 bp, Zea mays
aacggacgcgtgggcacagtaagaaaagatggcgctgccatccatgagtcttgcggcaaagggtgtgcttcccttctcagcacgtacctcgagtggtgtcacacaaaggccggtgtcagtgaccgcttccttggagcacaaaaccagcgatgccagaaggaagttcctaaaacttgcacttgggaaccttggagttggactgcccaccttgttgggcgctaagaaagctctcgctgatgagcaaggcgtctcgtcctcgaggatgtcttattcgaggttccttgagtaccttgacaaggatagagtgaaaaaggttgatttgtttgagaatgggacaattgctattgtggaggccatttctcctgagcttggtaaccgcgtgcaaagagtccgtgtgcagcttcctggtctaagcc

SEQ ID NO: 82358 - DNA, 404 bp, Zea mays
agtcaggaatctctcccttgtctacactcttgctggagtggattgcattgattgtgcagcagatgcatctgtggtgggagcagtgaatgaaggtattgaagtagcagcatcaattgtaccaacagttcaaaggccttggctgatgattagtgttaatgatgattgcagagatcttcatttccgtaaagctgagtttgatcctgatgattgcccactggattgctcaaagccatgtgagaaagtttgcccagctgatgcaatatcactaaagcattccatggttgatggagagcgcacactatctgatcccttacgtggtaaatatgagggtggtgtaattactgagcggtgctatggatgtggtcggtgcttgccagtttgcccgtatgacagaataagagctg

SEQ ID NO: 82359 - DNA, 420 bp, Zea mays
  unsure (1)..(420): unsure at all n locations
cggacgcgtgggcccccatcaaggtgggctccttcggcgagggccgcatcaccatgcgcaagaccgtgggcaagcccaaggtggcggcgtccggcagcccctggtacggccccgaccgcgtcaagtacctcggccccttctccggcgagcccccgagctacctcaccggcgagttccccggcgactacggctgggacaccgccgggctgtccgccgaccccgagaccttcgccaagaaccgcgagctggaggtgatccactcccgctgggccatgctcggcgcgctcggctgcgtcttccccgagctgctctcncgcaacggcgtcaagttcggcgaggccgtctggttcaaggccggctcccagatcttcagcgagggcgggctggactacctcggcaaccccagcctgatccacgcgc

SEQ ID NO: 82360 - DNA, 409 bp, Zea mays
cgatagcattatcatgaagttccccaaaatagacgagagtttcagaaaatgcaagactatcttcgaacagtttgatgaagattcaaatggcgaaatagataaagaggaactgaaacattgttttcaaaagctggaaatctcattcacagaggaggagatatgtgatctctttgaagcttgcgatataaatgaagatatgggcatgaagttcaacgagttcattgtctttctgtgccttgtctatcttctcaatgaagcagctgtcttggaagcaaagataaagatgggactaggaaatcttgaggcaaccttcgagaccttggttgatgcgtttgtcttcttggataagaataaagatgggtatgtgagcaaggatgaaatgatccaagcaataaacgagaacacgaca

SEQ ID NO: 82361 - DNA, 429 bp, Zea mays
aagaaaaaaaaaaaagaaagagtaaataataaaacaggatattctgtttcataattctgaaatagagttcttttttttagtattactcctcattaggatgtatatattaatcatcctattttaatatatattaatcatcctattttaattaggttctaatccaattagtagtaagtattttcttttttatttaatagtctctgactatcattaaataaagggtagagcaattctttttttctagagattctagagaaagtgagacaaagtgaagcgaaagagttttctttgtataagaattaggtctatatcatatctaaatagaagggaaatcaaaaagaagggaagtggggattacattggatgaatccttaaggaagacatatcacaaaagaaataaaggctaaagtaagcggtccttgcctttgg

SEQ ID NO: 82362 - DNA, 430 bp, Zea mays
atttttgttaatgttcagtggatcgtccactttttcgtgtcaatagggtaacactacgaacttggttcttgtttcttcttcctaacggtgtgcagttctgatgcataacttttttttttttgctttgttcaggtggccttacccatttctagacttgacattccctggtgcacctgtatggtaaggtcgactagacgaaacaagtgactctatttttgctaaataccatggtctcatgtgtagcttacgcattagtttggctctgtttgtttacttccaggattatataatccagcttagggcctgttcggttagctctaaatccatgtggattgagtgggtttgggtgggttcaaatcccaaacaagtcaaaattgttctcaattttttccaatcccgtccaatccatagctaacgggattaaccgaac

SEQ ID NO: 82363 - DNA, 405 bp, Zea mays
  unsure (1)..(405): unsure at all n locations
aggcgtcgtccatgctctccgctaccaccgtgccactccagcaggggggcggcctgtccgagttctccgggctcaggagctccgcgtcgctgcccatgcgccggaatgccacctccgacgacttcatgtccgccgtctccttcaggacccacgcggtcggcacgagcggcgggtcgcggcgggcgccgacggaggcgaagctgaaggtggccatcaacgggttcggccgcatcgggcgcaacttcctgcggtgctgggaacggcgcggcgaacccttcgccctcgacgtcatcgccatcaacgacaccggcggtgtcaaagcagggtccanctgctcaagtacgactccacgctcgggatcttcgacgccgacgtcaagcccgtcggcgacaacgccatctccgt

SEQ ID NO: 82364 - DNA, 437 bp, Zea mays
cgtccgaacacgcgtccgcagacgcgtggggattcttgaagagatcgagcttcttttgcaccacaaggtccaggatgtcttgcaactgcggatcaagctgcggctgcggctcaagctgcaagtgcggcaagaagtaccctgacctgaaggagacgagcaccgccgcgcaggccaccgtcgtcctcggcgtggccccggagaagaaggccgcgcccgagttcgtcgaggccgcggcggagtccggcgaggccgcccacggctgcagctgcagtggcaactgcaagtgcgacccctgcaactgctgatcacatcgatcgacgaccatggatatgattattagctatctagcttgtggtggtggttgaacaataataagcgatgccgagctggctgccatacatatgtactgtgtggtgtgtgtgacagagagagacaca

SEQ ID NO: 82365 - DNA, 278 bp, Zea mays
acaattcctccttcggatctcgcattcagcgcagcgcaggtgtgaaggaagggggacgcggaggaagatggggctcgcgttcgggaagctcttcagccggctcttcgccaagaaggagatgcggatcctcatggtcggcctcgacgccgccggtaaaaccaccatcctctacaagctcaagctcggcgagatcgtcaccaccatccccaccatcggtttcaatgttgaaactgttgagtacaagaacattagcttcactgtctgggatgtcgggggtc

SEQ ID NO: 82366 - DNA, 401 bp, Zea mays
acggacgcgtgggggcgcgcaaggagcagtgcctggcgctcggcaccaggttgcgctccaagtacaagatcacctaccagttctaccgcgtcttccccaacggcgaggtgcagtacctccaccccaaggacggcgtctacccggagaaggtcaaccccggcagggagggcgtcggccagaacttccgcagcatcggcaagaacgtcaaccccatcgacgtcaagttcaccggcaaggccaccttcgactaatcacacttcacgtacgccgcacgccccagccgggatccaaattaaagaacttcttcttctattaattacagtatattgtaatttggctgctggtacggtggtggcatgatttgagatgtgcatgatgatccttgtgtaattttattacca

SEQ ID NO: 82367 - DNA, 380 bp, Zea mays
aacaagcaacatagaaagtggaatccagtagcaacaatagagcaacaatggagaccaagatattttccctccttatgctccttgctctttctacatgtgttgctaacgcgacaattttccctcaatgctcacaagctcctatagcttccctttttcccccataccttccatcaattatagcttcagtatgtgaaaacccagctcttcaaccatataggcttcaacaagcaatcgcagcaagcaacatacctttatcgcccttgttgtgtcaacaatcgccagccctatctttggtgcagtcattggtacaaaccatcagggcacaacagctgcagcaactcgtgctacctgtgatcaaccaagtagctctggcaaacctt

SEQ ID NO: 82368 - DNA, 429 bp, Zea mays
  unsure (1)..(429): unsure at all n locations
cacacgcgtccgcccacgcgtccgcggacgcgtggggtgctggaggcgcgggaggtggaggaccatcccgcgctaggcgaaggagaggtgctcctcgaggtcgccgccgcgggcgtcaatcgcgcggacaccgtgcagcggatgggccggtacccgccgcctgccggcgcgtccccttacccggggctcgagtgctccggcaccatcctcgcgctcggccccaacgtcncctcccgctgggccgtgggcgataaggtttgcgcgctcctcagcggcggcgggtacgcggataaggtggtggcgccggcggggcagctgctgccgatacccgagggggtgtcgctgacgcacgcagccggcttgcccgaggtggcctgcaccgtctggtcaaccgtattcatgaccagtcacctctcccccggtgaatca

SEQ ID NO: 82369 - DNA, 395 bp, Zea mays
accacgcgtccgcccacgcgtccgcccacgcgtccggaggaatggtggatctgattattttggcaaaggtgttcttaagaaatgactgtgaatgggaaagtaactctcaaagacaaatattcagttactgttgtatatgacaatcaattctttgcactccgaaaaaagtgttgcccatccgagcttgcatatattacttctttaagccgctgcaagaagtggaatgctcaaggtggaaagagcaaggcctattttgtaaagacaacagatgacaggttcatcattaagcaaatcaataaaacagagtttgagtcatttattaaatttgcacctgattactttaagcatgtttaccattctctggacactggaagccaaacttgtctcgccaaaat

SEQ ID NO: 82370 - DNA, 407 bp, Zea mays
aagatggcgagagtagcttgtaccctccgtggcaagagactggaaggtggggtgctgtactctcggaaacatggcgggcaccatggcgagggtaacgtgtaccaaccaggccaacggctggaaggtggggtgctgtactctcggaaacatggcgggcaccatggcgagggtaacgtgtaccaaccaggccaatggctggacggtggagtactgtgctctcggttggcggggacccgttctggtcttgagaaacccgtgggcgagttgacatatgcaagggttaagtgctacatatgtcgtgtggttggagatccccagctgggtattaatcgattcggatcgccaaactctcggatatgaagactggatcttcgaccctcatcctagataacaggtgaaactaaaga

SEQ ID NO: 82371 - DNA, 413 bp, Zea mays
  unsure (1)..(413): unsure at all n locations
ggctaacctccttttttctctctctatctttctctccatctgtggacttctccggttttgtttgacgagatgcctgcgctcgccgtcgacgccgcgacacccgtggcgcacgccttcgcgtcctgcgacgcggcgcgcttccccgccccgcccgtggtgggccccgccgccgcggccgaggccgccccctggtcggccgacctctccgcggcgctctacaacgtggacggctggggcgcgccctacttcttcgtcaacgacgacggcgacgtggccgtgcgcccgcacggcgccgcgactctcccgggccaggagatcgacctggccaaggtcgtggccaaggccgcgggcccgcgcgccggaggcgggctcggcctgccgctgccgctgctcgtgcgcttcnccgacgtcct

SEQ ID NO: 82372 - DNA, 394 bp, Zea mays
acccacgcgtccggtagaagaggagtggcagagcagggtgtggaaggtgtgcgtgtacgtcatcaccctgggcatgctggtggcgctgctgctgggcctcaacatgtcgtggagcgccatcaccgccgccctggcgctcatcgtgctggacttcaaggacgcccgcccctgcctggagaaggtgtcgtacccgctgctgctcttcttctgcggcatgttcatcaccgtggacggcttcaacaagacgggcatccccagcgcgttctgggacttcatggagccgtacgcgcggatcgacacgcccacggggacggccgtgctcgcgctcgtcatcctcctgctctccaacgtcgcgtccaacgtgccgacggtcctgctggctggcccccccctt

SEQ ID NO: 82373 - DNA, 379 bp, Zea mays
accagcacattcacgctcagctccagcaatggctgcctccaccatggcgatctcctccacggcgatggccggcacccccatcaaggtgggctccttcggcgagggccgcatcaccatgcgcaagaccgtgggcaagcccaaggtggcggcgtccggcagcccctggtacggccccgaccgcgtcaagtacctcggccccttctccggcgagcccccgagctacctcaccggcgagttccccggcgactacggctgggacaccgccgggctgtccgccgaccccgagaccttcgccaagaaccgcgagctggaggtgatccactcccgctgggccatgctcggcgcgctcggctgcgtcttccccgagctgctctcccgc

SEQ ID NO: 82374 - DNA, 377 bp, Zea mays
acccacgaatccggtggatttcttcgacctcgtgatcgacgagctcaacaagcccgaccctataatgaacgagaacatcgcgttggacctgttgttcctgctcctcttcgcgagccacgagacgacgtcgatgggactgaccgcgatactcaagttcctcacggacaacccaaaggccctgcaagaattgaccgaggagcatgaaaaaatcgtggaaacaagggtggatccggactctgatatcacctgggaggagtacaagtctatgagattcacatctcatgttatacatgaatctcttaggctagcaaacatcgctccggtggtgttcagacaggcaaaccaagacgtatacataaaggggtacactatcccag

SEQ ID NO: 82375 - DNA, 368 bp, Zea mays
aggcgttcgcgaagcgcgagaagaactcgatcaagaagctcaccgcgtcgctgaagaagtacgcgcccgacagcgcccccgcgctcgccatcaacgccaccatcgagaagaccaagcgccggttcgagaactacggcaagttcgggctgctgtgcggcgccgacggcctgccgcacctcatcgtcagcggcgaccagcggcactggggcgagttcgtcaccccgggcctgctcttcctctacatcgccggctggatcgggtgggtcggcaggagctacctcatcgccatcagcggcgagaagaagcccgccatgagggagatcatcatcgacgtcgagctcgccacccgcctcctccccagggggttc

SEQ ID NO: 82376 - DNA, 356 bp, Zea mays
agcagttaatatagttatattaactaatgcctccttcaactatgcgttgggcatgggagcattagccgaaccacctcaggacagctctgccgacggtgtgatcttgatcaaggatatggcggagtggcaaaagcactgggaccagactgctccatacaacaagctgctggtgtatgagttctacgaaaagaattcctcgctgtgcaaggccatggacaagccgttcgagaagctcgccacgcagtacaaaggcagggccgacttctgcaagctggacgtggacaactttgagcttttggcgcggatttgcggagtggagggagcgtatccgacgttcgtgctgttcaagaaatgcg

SEQ ID NO: 82377 - DNA, 383 bp, Zea mays
gaccgacccgtccagcaaagaggcagtgcgtagagaggatcgtcgaacagaacagcatgaagatggtcatcgttctcgtcgtgtgcctggctctgtcagctgccagcgcctctgcaatgcagatgccctgcccctgcgcggggctgcagggcttgtacggcgctggcgccggcctgacgacgatgatgggcgccggcgggctgtacccctacgcggagtacctgaggcagccgcagtgcagcccgctggcggcggcgccctactacgccgggtgtgggcagccgagcgccatgttccagccgctccggcaacagtgctgccagcagcagatgaggatgatggacgtgcagtccgtcgcgcagcagctgcagatgatgatgcag

SEQ ID NO: 82378 - DNA, 388 bp, Zea mays
acccacgcatccgcggacgcgtgggcgggccgggcggctggacgacatggagcggctcttcgcggccatggagcgcggcgacggcgcgagcgccggcgccccggacaccagcacgtacaacgtgctggtgaacgcgtacgggcgcgcggggtacctggaccggatggaggcggcgttccgctccctggcggcgcggggcctcgccgccgacgtggtgacgtggacgtcccgcatcggcgcgtacgccaggaagaatgagtacgggcagtgcctgcggatcttcgaggagatggtggacgccgggtgctacccggacgccggcaccgccaaggtgctgctcgccgcgtgctccgacgagcgccaggtggagcaggtcacagccattgtc

SEQ ID NO: 82379 - DNA, 400 bp, Zea mays
agcacaccaaggagagtacgtggaggagcagccatggcttcatcggtggccgccgcggcgagcacattcctgggcacccgcctggcggacccggcgccacagaacgggcgcatcgtggcccggttcgggttcgggttgggcggcaaggcgaagcctgctccgaagaaggtggcgaagacatcgacctcctctgaccggccgctgtggttccccggcgccgtggcgcccgactacctggacggctcgctggtcggcgactacgggttcgacccgttcggtctcgggaagcccgtggagtacctgcagttcgagttggactcgctggaccagaacctggccaagaatgaggccggcggcatcatcggcacccggttcgagtcctccgaagtcaagttcaacc

SEQ ID NO: 82380 - DNA, 437 bp, Zea mays
acaattcgcaagcccttccaacggcagtcatggcttccatcaccctcctctccctcgctcccaccgccatcttcctccacatcccggctttcacctcctcctccgtcgttggtcccggaatcctagccggccgctgggccgcgccccgcgccctcccgctccgcgcgctcccgccccgtcgcgtcaccgtcgtctgcagcagcgccgcggcggcagccgaggcctcggacgccgcagcgccagtggagaagttccggctcgacaatttggggccccagaaggggtcccgccggcggcccaagcgtaagggacgcggtattgctgcaggccaaggcgcgagctgcgggttcggtatgcgcgggcagaaatcgcgctcggggcccggggtccgggcccggttctcagggagggcagatgccgctctaccgccgtctccc

SEQ ID NO: 82381 - DNA, 384 bp, Zea mays
cggacgcgtggggtttctcaatgctgctgatgacaagcggaaggaagtcctctctaaaatagaagaggatgttgctaagctcagcggttctgcagccaactaagaagctacaagtgaatgccgaggagagcagcgatgacttggctaacccaccgaaggtagaggagaagcttggtgctgtccctcatggcctgtccaccgactctgaggttgcccagagggaagccgagtctatctctaggaagactctcaggagctcagccgagaagtttgagttccaagctgaggtttccagactcatggacatcatcatcaactcactctacagcaacaaggatatcttcctgagggagctcatatctaatgcctctgatgctggataag

SEQ ID NO: 82382 - DNA, 397 bp, Zea mays
agagagcttgcaccttttgttgtgctcgcagaaaagcttgggcgcttggctgtgcaactagttgctggtggtggtggtatcaagtctgtgaaagtgacctatgcatctgcgcgggcccctgatgatcttgacacgagacttctccgtgcaatgatcaccaagggattgattgaaccaatctccagcgtttttgtcaatctggtaaatgccgacttcaccgcaaagcagaggggagttcgcatcacggaggagaggatcctgctggacggctcacctgaaacacctatcgactacattcaagttcagattgccaatgtcgagtccaaatttcccagtgcgatatctgagactggagaaatcactgtggagggcagagtgaaggatggtgttcctcatc

SEQ ID NO: 82383 - DNA, 409 bp, Zea mays
ccgaccgacccgtccacccacgcatccgtttccattggaggtgccaacatatccaaacctttggaaaggttcatactccaaatgggagcgctacaccgtggaagatgcacatgatattgtcaactacgctaagaaaagaggtatcaatgtgatggcagaaattgacgtgcctggtcatgcagaatcatggggaaatggatacccaaagctctggccttctcccatttgtacagagccattagatgtctctagtgatttcacatttgaagtaatttttggaattttgtctgatatgaggaaaatctttccattcgggctgtttcacttgggtggtgatgaagtatacacagggtgctggaacacaacgcctcacgtgcggcagtggatggacgagcgcaaaatgaccacg

SEQ ID NO: 82384 - DNA, 428 bp, Zea mays
acccacgcgtccggaggtggagtcttcagacaccattgataatgtcaaggctaagatccaggacaaggagggcatacctcctgaccagcagcggcttatcttcgctggcaagcagcttgaggacggacgcacacttgctgactacaacatccagaaggagtcaaccctccacttggtgctgcgccttaggggaggcatgcagatctttgtcaagaccttgactggcaagacaatcacccttgaggtggagtcctcagacaccattgacaatgtcaaggcaaagatccaggacaaggagggcatcccacctgaccagcaacgtctcatctttgccggcaagcagttggaggatgggaggacccttgctgactacaacatccagaaggagagcaccctccacttggtgctgcgtcttaggggtggtatgc

SEQ ID NO: 82385 - DNA, 377 bp, Zea mays
acctggaagccgacgtgcggcgtgcggtgcatcctgacggacgaggaggcggcgctggtcgggggacggaaccacagccacgcgacgcaggacctgtacgactccatcgcggcggggagcttcccggagtggacgctgtacgtgcaggtgatggacccggacacggaggagcagtacgacttcgacccgctggacgacaccaagacgtggccggaggacctgctgccgctccgccccgtggggaggctggtgctggacaggaacgtggacaacttcttcaacgagaacgagcagctggcgttcgggccggggctggtggtgccagggatctactactcggacgacaagatgctgcagtgccgggtgttcgcctacgc

SEQ ID NO: 82386 - DNA, 350 bp, Zea mays
acggacgcgtgggcggacgcgtgggctccaccccgaccgacctatcctaatcggcgatggcgacggtggcgatggacatctcgaagcccacgccggtggcgtccggcgacgaggccgcggcggcggccaaggggaggagcggcggagggggcgaggggctgcggcagtactacctgcagcacatccacgacctgcagctccagatccggcagaagacccacaacctcaaccgtctcgaggcccagcgcaatgacctcaactcccgagttagaatgctcagggaagagttgcagttgcttcaagagcctggctcatatgttggtgaggttgtgaaggtcatggggaaatcg

SEQ ID NO: 82387 - DNA, 426 bp, Zea mays
  unsure (1)..(426): unsure at all n locations
gtctatcatagcttgtatgatgacttcatatggatggaaaagtttggagatcccttgttccagaggcatgttgcagctgcaagcatgtgggggcttgttgctcttaggctctcagatgaggagatcctacccttcaactacagcaattatgccacagagcttgagaatggagcattgggcataagtgaaagagtacagggaatgcctgtcagcttatcacccctgcacaagtcaatcaaagagttcagaaaggcagttgcaaaagtggattctgaattgaaggctctacagacatggaaaatttggtccccatggagaaacaaccccttaaaggtcagagacatcaatgatcggttgatgatgaccgaacgggcattcacagaccgggaaagactgtttngacggccatggtacaaacacctgatt

SEQ ID NO: 82388 - DNA, 400 bp, Zea mays
aagtttaccattcttgattcacagtttgtcagcgatgtaacaaaatacatcagtggttgcatggcttctctatctgctatgattcagcttgaacttcctcatatcaacatcctttcaaagatggatctggtctccaacaaaaaagatgtagaagagtacctggacccgaatgcacaggttcttctttcacagctgaatcggcagatggcacctcggtttggcaagttgaacaagtgtttagctgaactggttgatgattacagcatggttaatttcattccacttgatttgagaaaggaaagcagcatacaatatgtgctatcttctatcgacacatgtatccagtatggggaagatgcagacgtgaaggtcagggactttcaagaagacgaagactaac

SEQ ID NO: 82389 - DNA, 386 bp, Zea mays
acttacgatccggtgtacggcgcgcggccaataaggaggtggatcgagaagagggtggtgacgcagctgtcgaagatgctgatccaggaggagatcgacgagaactgcacggtctacatcgacgccgcgcccggtaaggacgaactggtctacagggtggaccggagcggcggtctggtgaacgctgagacggggatgaagtcggacatcctgatccaggtccccaccagctccaccaggagcgacgctgcgcaggccgtcaagaagatgaggatcatggaggaggacgaggacggcatggacgaggagtaaaaggcgggccggaggacgcggagctgcgcccaggccgcaggtctggcgccggcatcatcgagtgtcctttgaat

SEQ ID NO: 82390 - DNA, 369 bp, Zea mays
gtttgcaggctgaacacgcacgcggtgatcgagccgttcgtcatcgcaacgaaccggcagctgagcgtggtgcatccagtgcacaagctgctgagcccacactaccgtgacacgctgaacatcaacgccctggcacgccagacgctcatcaacgccgacggcatcttcgagcgcaccgtgttccctgcaaagtacgcgctggggatgtcctccgacgtgtacaagagctggaatttcaacgagcaggctctcccagcagacctcgtcaagagaggtgtggctgtgccggaccagtcgagcccctacggtgtccggttgctgatcaaggactacccttacgccgtggacgggctggtcatctggtgggcg

SEQ ID NO: 82391 - DNA, 436 bp, Zea mays
aagaaagcacaatagtgtaccaacaatggcagccaaaatattttgcctccttatgctccttggtctttctgcaagtgctgctacggcgaccattttcccgcaatgctcgcaagctcctatagcttcccttcttcccccgtacctctcaccagcggtgtcttcggtatgtgaaaacccaattcttcaaccctacaggatccaacaggcaatcgcagctggcatcttacctttatcacccttgttcctccaacaatcatcagccctattacaacagttacctttggtgcatttattggcacaaaacatcagggcacaacaactacaacaacttgtgctagcaaaccttgctgcctactctcagcaacagcagtttcttccattcaaacacactaaggtcaattgaactcggcttcttatttgcaacaacaacaactac

SEQ ID NO: 82392 - DNA, 372 bp, Zea mays
aaagttaacccaaaaataagcgcattccagaaagcacaggattgtcttctgcccatgggaattacgtctgaaaatgttgcccatcgatatggtgtaaccaggcaagagcaagatcaggccgccgctgagtctcataggagagctgctgcagccacggcctctggaaaattcaaggatgagatcgtcccggtgccaacaaagatcgttgatcctaaaactggagaggagaaggaagttgtgatatcagttgatgatgggattaggccagggaccacagcatctggattggcgaaactgaaaccagtttttaaaaaggatggaactacaactgcaggcaattccagtcaagtgagtgatggtgctggagctgtt

SEQ ID NO: 82393 - DNA, 432 bp, Zea mays
agcatcatcacgttcacgttcagggaggccgtggccgacgtggagtacaaagggttccttatccccaaggggtggaaggtgatgcctctcttcaggaacatccaccacagccctgactacttccaggatccacacaagttcgacccttctagattccaggtggcgccgcgtccgagcacgttcctgccgtttgggcacggcgtgcacgcgtgccccgggaacgagctggccaagctcgagatgctcgtcctcatccaccacctggtcaccggctacaggtgcgtccatctcctctcagatcctctccatatattccccgcttgtcctatagcttgtggaccaggatgacacatggctggctgctgccgctctccatggggctccggctctctctctccgtgaatgctccaaatctcctcctgtctgtatgta

SEQ ID NO: 82394 - DNA, 425 bp, Zea mays
ttcccgggcccgacacacgcgtccatgccactgctatcctgtgatctgccctgagtggctcctatcgtgttatgtttctgtcggttcttatctatctgtcgttgtgtggtttacaacttacgttgtaagactttattcccccgctttgctactgggttattaagtttggcgttattgttttcttgaaaaaaaaaaaaaaaaaaaaaaaaaaaaaaaaaaaaaaaaaaaaaaaaaaaaaaaaaaaaaaaaaaaaaaaaaaaaaaaaaaaaaaaaaaaaaaaaaaaaaaaaaaaaaaaaaaaaaaaaaaaaaaaaaaaaaaaaaaaaaaaaaaaaaggggggggccccccaaaggtttaaaactttatttccctgtgaaggaactttaaacccctcccaaaaggtccccaaaaattaatttcagggg

SEQ ID NO: 82395 - DNA, 368 bp, Zea mays
cggacgcgagggcggacgcgtgggcgctgatcgtgtacctggtgctccgccccacgcacccgcgcttctacctgcaggacgcggcgctgcggcagctggacctgagcaacggctcggccccgctgctgtccacggcggcgcaggtcaccgtggcgtcccgcaaccccaacggccgcgtcggcgtctactacgaccgcctcgacgtctacgccacgtacaagtaccagcaggtgacgctggcgtccaggctgcccgcggtgtaccagggccacggcgacgtcgacgtctggtcgcccgtgctggccggccccgccgtccccttcgcgcccttcctcgccgacgcgctcgccaaggacctcgccgcgggg

SEQ ID NO: 82396 - DNA, 388 bp, Zea mays
aaatcagatcactttggctcatatgctgaatcatcatgtgctgctcttgttgtggcctctatctcgtcttttggaatcaaccatgaatttactccgatggtgtaccctcttctcgtcagttctgttggtattatagcatgtctcataacaacgctgtttgcaactgatttcttcgagataaaggctgtggatgaaatagagcctgctctcaagaaacagctcataatttccacaattgtgatgaccattggcattgcactaatcagttggcttggtcttccatacactttcactattttcaactttggagtccagaagacagtgcaaagctggcaattgttcttgtgtgtggcggttggtctctgggctggcctagtcattggttttg

SEQ ID NO: 82397 - DNA, 379 bp, Zea mays
agaaactaaagcttcagaagggtaggcgttcatatcacatagagaatatatgcaatccttgacgtagaatgtttggtagtgatttaccccgatgaagtcaatttggttcttcaatagtttcttctctccttctgtaaattttggcaaatttggacctaagatttggcgcatctggtgaggatagtcaccaaagaaaaagggatccaagatcctgttttagcatatatcatcaagtgagcattcaatcgtgaagaccaaaagttagttccaatcgtaaaagttagcatatatgatggaaggttactgaatcaattgataccatggagcatcgaaagacagagctcggcttactgccaagtggtcctctgtgatattcctg

SEQ ID NO: 82398 - DNA, 428 bp, Zea mays
aagttgaatcatttgaggaagtaactaggttaggagctgaagcacctgttgaagcaaacatgcctctaccttccgatgttgcggtgataatgtacacaagtggtagcaccggattgcccaagggagttatgatgacccaccgcaacgtcctggctacactctcagcagtcatgaccattgtgcctgcacttggcagtaaagatatatacttggcctaccttccacttgcacacattcttgagttggcagcagaggcactaatggctgctgttggggcctcaataggatatggatcacctttgaccctgattgatacatccaataaaataaaaaagggaactctaggtgatgcttctgcactaaagccaacattgatgactggcgtacctgctaaaacttgttcgtatccgtgatggtgtcaggaaaaa

SEQ ID NO: 82399 - DNA, 438 bp, Zea mays
aggcggcgccacgctcccaatgtgccgctacggcccgtactggcgcaacctccgccgcgtcgccacggtgcagctcctgtccgcgcaccgcgtcagctgcatgctccccgtcatatccgccgaggtgcgcgcaatggcgcggaggatgtaccaatccgccgccgccgcccccgccggcgccgcgagggtcgagctgaagcggaggctgttcgagctctcccacagcgccctgatggagaccatcgcgcgaaccaagacgtcccgtgccgtggcggacgacgacacggacatgtctccggaggcccaggaattcatgaaggcgctggacgtgttccttccgcttctcagcggggccaacgcgtgggactacctgccggtgctacggtgggtcgacgtgttcggcgtgaggaacaagatcctgcgcgcggtgagcgcaag

SEQ ID NO: 82400 - DNA, 434 bp, Zea mays
agagctgcaggtgcccgacgacgtgtacatcctggaccaggccgaggaggacggcatcgacctgccctactcctgccgcgcggggtcctgctcctcctgcgccggcaaggtcgtctccggctccgtggaccagtccgaccagagctacctcgacgacggccagatcgccgccggctgggtgctcacctgccacgcctaccccacctctgacgtcgtcatcgagacgcacaaggaggaggagctcaccggcgcataatcattcatgcccatccatctctatctctgtgggtcgtcgttgtgtgtaatttgagtacgcgcgtacacgtactgcttttgtttcatttgagcactgttcgtgtaagcgtcgagttgccctgccatcgtctctctccccctcaatctcaacaatttcggtgtgtgcgcgcttctatttt

SEQ ID NO: 82401 - DNA, 438 bp, Zea mays
cacgcgtccgcggacgcgtgggcggacgcgtgggcggacgcgtggggcaacgggtgccgcgtgcttcgcaaggggtgcagcgacgcgtgcgtgctgcggccgtgcctgcagtggatcgacggcgccgaggcgcagggccacgccaccgtcttcgtcgccaagttcttcggccgcgccggcctcatgtccttcctcaccgccgtccccgagccgcagcgcccagcggtgttccagtcgttgatgtacgaggcggccgggcggacgatcaaccctgtgagcggcgccgtggggctgctcggcgcgggcagctggcagctgtgccaggcggcggtggagacggtgcttcggggcggcgccatcgggccgccgcccgagttcgacgggggccgcgacaacacgtttgctctggcggccacggcgaagcgggccgtggggtgc

SEQ ID NO: 82402 - DNA, 400 bp, Zea mays
acccacgcatccggagcgcggcagcgaggcaggtcacgttctccaagcgccgccgcggcctcttcaagaaggcccaggagctctccgtgctgtgcgatgccgacgtcgcgctcatcgtcttctcctccacggggaagctctcccagttcgccagctccagtatgaatgagataattgacaagtacaacacgcattctaaaaacctggggaaaacagaacagccttcgctggacttgaacttagagcatagcaaatatgcaaatttgaatgagcaacttgcggaagcaagccttcgactcaggcagatgagaggtgaagaacttgagggattgaatgttgaagaactccagcagttggagaagaacctggaatctggtctgcatagggtgcttcaaacaaa

SEQ ID NO: 82403 - DNA, 399 bp, Zea mays
acccacgcgtccggggcccgtaacatatgcccatctgtctcatcttatgaaaggagatttgccacaaggaactacatgacccagagccttttgggcccttcgatgtctgttagcggtggcatcaatgtcccagtgatgcggaccccgctctgtgctaatgctcctgctgagaaaggaggcaagaacttcatgatcgatttcatgatgggcggtgtttcagctgctgtttcgaagactgctgctgctcccatcgagcgtgtgaagctgcttattcagaaccaagatgagatgattaagtctggtaggctatcagagccgtacaagggtattgttgactgcttcaaacgtaccattaaggatgagggtttctcttccttgtggaggggtaacactgctaat

SEQ ID NO: 82404 - DNA, 403 bp, Zea mays
gacccacccgtccacccacgcatccgcccacgcgtccgcccacgcgtccgcccacgcgtccgcccacgcgtccgcccacgcgtccgcccacgcgtccgattgaatttcatattgtcacctgaggtgaggaatcaggacgcaatatttttgctaagaggggtgagttcaggggcacacgaggtagcatggcaatggctgaaggaaaactgggattacatattgggagcctactctggaactctgctcacctatttcgtcaacataactgtctcgccactggccaccgatgaacatggtgatgaggcggaggagtttttcaagagcagaaccaaggcgaacatcgcgaggactgtgaggcagagcatcgagagggtgaggatcaatgcccaatgggtcaagaaca

SEQ ID NO: 82405 - DNA, 433 bp, Zea mays
accaagctgctgggccgcatctactacacggacaccagcaaggacagccccgggtcgctgccgcccaacgtcgcggcggcggtcaacggcgtggccttctgcggcacgctggcggggcagctcttcttcggctggctgggcgacaagctggggcgcaagagcgtgtacgggatgacgctcatggtcatggtcatctgctccgtcgcgtcgggcctctcgttcggccacacccccacgggggtcatggccacgctctgcttcttccgcttctggctcggcttcggcatcggcggcgactaccctctgtcggccaccatcatgtccgagtacgccaacaagaggacccgcggcgccttcatcgccgccgtcttcgccatgcagggcttcggcatcctcgccggcggcatcgtcacgctcgtcatctccgccgcct

SEQ ID NO: 82406 - DNA, 396 bp, Zea mays
cccacgcgtccgcccacgcgtccgcggacgcgtgggcatcatgaaagaaggggtgaagaacttcaacccggtttatctctttgacgaaggatcgaccatcagctgggtgccttgtggaagaaagctcacatgctcttaccctggcatcaaattttcctatggcccggacacttacttcggaaacgaggtatctgttctggagatggatgggcaattcgacagactagatgagctcatctacgtggagagccatctaagcaacctttcaaccaagttctacggagaggtgacacaacaaatgctaaagcatgcagacttcccaggtagcaacaacgggacaggtctcttccagaccatcattggactgaagattagagacctctatgaacagattgt

SEQ ID NO: 82407 - DNA, 372 bp, Zea mays
aacccacgcgtccgcggacgcgtgggtgtgcagaaaagcaagattttcttcattgcctggtccccatcgacatcccgcatacgtgctaagatgctgtactccacgtcgaaggaccgcatcaagtacgagcttgacgggttccactacgaaatccaggcgaccgacccatcggaggtggacatcgaggttctccgggagcgggctcactgaagctggttctccttttgaagggacctgtggagggccgtgaaccttcagccagatgcaaattcaattatcaacgatgaagctcccgccgtggtgtttgttaataagttcctgtaagcatatcatttagtcgctatgcatgacactagctgaagcgctatctaa

SEQ ID NO: 82408 - DNA, 384 bp, Zea mays
acatagaaagtggaatacagtagcaacaatagagcaacaatggcggccaagatattttccatccttatgctccttgctctttctgcatgtgttgctaacgcgaccatttttcctcaatactcacaagctcctatagctgcccttcttcccccataccttccatcaatgaccgcttcagtatgtgaaaacccagcccttcaaccctacaggctccaacaagcaatcgcaacaagcaacttacctttatcacccctgttctttcaacaatcgccagccctatctttggtgcagtcattggtacaaaccatcagggcacaacagctgcagcaactcgtgctaccagtgatcagccaagtagctctggcaaacctttctccctactct

SEQ ID NO: 82409 - DNA, 424 bp, Zea mays
gaacaacaaatcaaaagcgtgatcagctcggtgccaacaaaacctcaacaaccaagtttcatgtctgatctcgacgtccagcttccatctgcctttgatccgtttgctgaggcaaatgctgaggactctggtgctggtcctggaacgaaggattatgtgcatgtgcgcatccagcagcgcaacggcagaaagagtctgactacagtccagggtctgaagaaagagttcagctataacaagatcctcaaggatctgaagaaggaattctgctgcaatggtactgtagttcaggacccagagctaggccaggtcattcagctccaaggtgaccagcgcaagaatgttgctactttcctagttcaggctgggattgccaagaaagagaacatcaagattcacgggttctaaaggacctgtaaatgct

SEQ ID NO: 82410 - DNA, 458 bp, Zea mays
attcaaaggccgaccgacccgtccacgaataaagagcagcagcgcaagaggtcggtagagcgagaagaaggcaatggcggccgagagcttccttttcacctcggagtccgtgaacgaggggcaccccgacaagctgtgcgaccaggtgtcggacgccgtgcttgacgcatgcctcgcgcaggaccccgacagcaaggtggcctgcgagacctgcaccaagaccaacatggtgatggtgttcggcgagatcacgaccaaggcgaccgtggactacgagaagatcgtgcgcgacacctgccgcgagatcgggttcacctccgacgacgtgggcctcgacgccgaccgctgcaaggtgctggtgaacatcgagcagcagtcccccgacatcgcgcaaggcgtgcacgggcacttcacgaagcggcccgaggagatcggcgcgggcgaacagggccacatgt

SEQ ID NO: 82411 - DNA, 409 bp, Zea mays
agcggacgcgtgggcggacgcgtgggcgagatgcgggagaggggcgtgacccccgacgcgttctcgtactccaccctcctcgccgcgctcacccgtgcgggccacctcgaccacgcgctcaccttcctgccgctcatggaggatgacgccgtggctccggacctgatcctcttctccaacctcattcacctcgccctccgcggtggcgacgcgcccaaggcgctggcgctgttctcccggctgcgtgccgcggggatcaggcccgacctcaaggcatacaacgcggccgtcgccgcctactgcaagtccgaccttctccgcgacgccaagcggatgctgctccacgacatgccggccgacggcgtcgcgcccgacgcggagacatactcccccatcctcgcggcgctgg

SEQ ID NO: 82412 - DNA, 355 bp, Zea mays
cgtacttctttattcactatatatttgcaagccaaactgcacatgttggagctttatactcagcatttcttgcgatgcatttagcagctggtgtgccagctctaatgtcggcacttgctttggcatacaatgcaaacctctttggagcactaacacactatagtagcgggcaatctgcagtatactttggagcggggtatgttgaccttccggatgtattcaagctgggttttataacagccgcaatcaatgctgtaatttggggagttgctggtgcattatggtggaaatttttgggtccttattgagtgtcggggcagtgtaagtacgtgaaaatcgtaccatattaacaaac

SEQ ID NO: 82413 - DNA, 400 bp, Zea mays
agggaaccgggcaattcgtcaaacaaaagaacagctggtaaaacggaggaccttggtcacaaggatagttcatctgaagtgtcctacgagtactgtgtaagggtggtcaggtggctggagtgcgagggctacatcgagacaaacttcagggtgaagtttctcacatggtttagcctgcgtgccaccccgcaggagagaaagatagtcggtgtctatgtggatacccttattgaggaccctgtcagcctttctggccagctcgttgacagcttctcggaggcggtatatagcaaaaagcggacgccttctggtttctgcatggacctgtggcattgaagcaccacaagcacctaccgtttgctttgtacggagcacacattcgggcccattcttttgttgc

SEQ ID NO: 82414 - DNA, 400 bp, Zea mays
acggacgcgtgggcgacgccggcggcaaggtcaccctcgcggcggtggagaggatggagctggccaagtcggtggtgtgggagtcgctgcgcctggacccgcccgtcaagttccagtacgggcacgccaagaaggacctgctggtggagagccacgacgcggtgttccaggtgaggaaaggcgagatgctgttcggctaccagccgtgcgccaccaaggacccccgcgtgttcggcgacacggccggggacttcgtgcccgaccgcttcctctgcgaggagggcagcaagctgctgcagtacgtgtactggtccaacggccgcgagaccgacaaccccagcgtcgacaacaagcagtgccccgggaagaacttcgtggtgctcgtcggcaggctcctcct

SEQ ID NO: 82415 - DNA, 361 bp, Zea mays
accgacccgtccacccacgcgtccgggagaacacggtggagagccttcctctgtggccttcttcgcgaaggctgggctggattacgtttcttgctcccctttcagggttccgattgctaggctagctgcagctcaggtgcttgtctgaggctgcctcctcattggcaaccggattgcctgctgctggtggatgtggtgatcaacagtattattacagagccatgctatgtgaacattactagtagcagtgctcataaaagctacaatcccatgtcctttttttccccagtcatgtaaaacttccaaactgctccatggttcaaaactctgttcttcaatacatcatcaattatcgattata

SEQ ID NO: 82416 - DNA, 424 bp, Zea mays
agcggacgcgtgggctgaaatctggtggtaatgcttatgtgattggagatccagcaagacctggacagaagtggcacgtcttctacgccactgagtacccagagcaaccaatggttaaccttgagatgtgcatgactggtctggacaagaagaaagcttgtgtctttttcaagactaatgctgatgggaacacaacatgtgccaaggaaatgacaaagctctctggcatctctgaaatcatccccgatatggagatctgcgattttgacttcgaaccctgtggctactccatgaatgcgatccatggctctgcattctccacaatccatgtgacgcccgaggacggtttcagctacgccagttacgaagttatgggcttggatgccactgctctgtcttatggtgaccttgtcaagagggtcct

SEQ ID NO: 82417 - DNA, 309 bp, Zea mays
acccacgcgtccgccctcttttagattgcttattagttgtaattcaataataaagttttttggatgatgtatgtggccaaccagaaataagaagttacatttccaaaaaaaaaaaaaaaaaaaaaaaaaaaaaaaaaaaaaaaaaaaaaaaaaaaaaaaaaaaaaaaaaaaaaaaaaaaaaaaaaaaaaaaaaaaaaaaaaaaaaaaaaaaaaaaaaaaaaaaaaaaaaaaaaaaggggggggcccccaaaaggattcaacccaaatttcccgttaaaggaaatttaaacccctccaaaagggccccca

SEQ ID NO: 82418 - DNA, 394 bp, Zea mays
agcggacgcgtgggcgctgttaccggaggccttcaagggaatcaaacagatcggcgtaatcggctggggctcgcagggtcctgcgcaagctcagaacttgagagactcacttgttgaggcaaagtcagatattgttgttaagattggtctccggaaaggttctaaatcttttgaagaagcccgagcagcaggattcaccgaagagagtgggacgctgggtgatatatgggagactgtatcaaacagtgatcttgttttgctactgatatctgattctgctcaggctgataactacgagaaaattttctcgcacatgaaaccaaacagtattcttggtttgtcacatggatttctccttggacatttgcaatctctgggttttgatttcccctaa

SEQ ID NO: 82419 - DNA, 390 bp, Zea mays
agcaaatcgacctgatgttctggacccggcgctcctgcgtcctggacgtttagataggaagattgaaattccgctacccaacgagcaatcaagaatggaagttctaaaaatccatgcagccggtatcgccaagcatggggagattgattatgaagcagtcgtgaaactagctgaaggtttcaatggggctgatcttcggaacgtgtgcaccgaagctggcatggctgcaattcgtgcagagagagattacgtagtccacgaagacttcatgaaggctgtgaggaaactaaatgatgcaaaaaagctggaatcgagtgcgcattacagtgcagattttggcaaagagtaatgatgctgatgccgatgcaacggacaaatgcatttggcatg

SEQ ID NO: 82420 - DNA, 415 bp, Zea mays
accaagatacaggacaaggagggcatccctccggaccagcagcggctcatttttgccggcaagcagctcgaggacgggcgcacgctggccgactacaacattcagaaggagagcaccctccacttggtgctgcgtctcagaggtggcatgcagatcttcgtgaagacacttactggcaagacgatcacccttgaggtggagtcctcagacaccattgacaacgtcaaggccaagatccaggacaaggagggcattccaccggaccagcagcggctgatcttcgccggcaagcagctggaggatggtcgcaccttggctgactacaacatccagaaggagagcaccctccacctggtgctccgcctcaggggtggtatgcagatttttgtgaagacattgactggcaagaccatca

SEQ ID NO: 82421 - DNA, 456 bp, Zea mays
  unsure (1)..(456): unsure at all n locations
attcaagggccgaccgacccgtccaaacccaaactcgcattctgaatgcactgctgaacaagcatatacatggagtcagggccgttcaatctttgccagtggcagtccatttgcccccgtggagtacgaaggaaagacttttgtgcctgggcagtcgaacaatgcctacattttccctggactcggcctcggtcttgtgatctctggagccgtccgtgtccacgaggacatgcttctcgccgcatcgaaagcgctagctgatcaggccacacaggacaacttcgagaagggctccatcttcccacccttcaccagcatcagaaagatctctgcgcacatcgctgcagccgtggctgcaaaagcctacgagctcggtctggcgacccgtctgcctcnccccagcgacctggtgaaatatgcagagaactgcatgtacactcccgtctaccgcaacta

SEQ ID NO: 82422 - DNA, 438 bp, Zea mays
  unsure (1)..(438): unsure at all n locations
gaccgacccgtccacggacgagtgggcggacgcgtgggcggacgcgtgggcttcccgtgtggctgggagtcggcgccgccttcaagttcgccatcgacaaggacgtcaggaacttccaggtcctcaaagagatgtacaacgagtggccattcttcagggtcaccctggacctgctggagatggttttcgccaagggagaccccggcattgccggcttgtatgacgagctgcttgtggcggaagaactcaagccctttgggaagcagctcagggacaaatacgtggagacacagcagcttctcctccagatcgctgggcacaaggatattcttgaaggcgatccattcctgaagcaagggctggtgctgcgcaacncctacnatcacaccctgaacgtgttccaggcctacacgctgaagcggataagggaccccaact

SEQ ID NO: 82423 - DNA, 428 bp, Zea mays
agcctccctctcctctgccgccgtcaccgccccttccttcgccgcacccgcaccagcccgcgccgtggtcagaaggaggtccttcaccgtgcgcgcctctctccgcaaggccaccggcaccgccgccgtggcaatggctgccagcgccctgcttgccggcggtgccatggcccaggaggtgctgctgggcgcaggcgacggcgggctcgtcttcgagcccagccagttcaccgtcaaggccggcgacaccatcacattcaagaacaacgccggcttcccgcacaacgtcgtcttcgacgaagacgaagtgccgagcggcgtcgacgccaccaagatctcgcaggaggagtacctcaacgcgccaggccagacctactccgtcaccctcaccgtgccgggaaactacggcttctactgcgagccgcatc

SEQ ID NO: 82424 - DNA, 371 bp, Zea mays
aacggacgcgtgggcggacgcgtgggatcgagtccgcccaagaccttgtagattccttaaccaacgccggcgagaggctcgtcgtcgtcgacttcttctcccctggctgcggcggctgccgtgctcttcacccgaagatttgccaatttgcggagcggaaccctgatgtgctgttcttgcaagtgaactacgaggagcacaagtctatgtgctacagccttcgtgtccatgtgctacccttcttcaggttctacagaggagcacagggacgactctgcagcttcagctgtacaaacgcaactattaagaagttcaaggatgcacttgcgaagcacaagccagatagatgtagccttgggccaacccggggg

SEQ ID NO: 82425 - DNA, 427 bp, Zea mays
agggcgcacagcacacgaacacacaccgcgcccagctccgaggtgatcttccggcggccggcgagatgagccgtggcacaggcgcgggctatgaccgccacatcaccatcttctcccccgagggacgcctgtaccaagtcgagtacgcgttcaaggcggtgaagtcggcgggtgtcacgtcgatcggcgtccgcggcgcggactccgtctgcgttgttacgcagaagaaagtcccggataagttgctggatcagacgagcgtgacacacctgttcccgatcaccaagtacgtcggattgcttgccactggccttacagctgatgctaggtcattggtttcccaagcaaggaatgaagcagctgagtttcgtttcaaatggggctacgagatgccagttgatgtgttaacaaaatggactgctgacaa

SEQ ID NO: 82426 - DNA, 384 bp, Zea mays
aaatggccactctaccttagcaccaaaaacacaatcctgaaaaaatatgatggcaggtttaaggacattttccaggaggtctatgaagctgactggaagtccaaatttgaggctgctggaatatggtatgagcatcgtcttattgatgacatggttgcgtacgcgcttaagagcgaaggaggctatgtgtgggcttgcaagaactacgatggagatgtgcagagtgatttcttagctcaaggttttggatctttgggtttgatgacatcagtgttggtgtgccctgatggaaaaaccatcgaagctgaagctgcccatggcacggttacccgtcatttccgtgtccaccagaaaggaggcgaaaccagcacgaacaacattgct

SEQ ID NO: 82427 - DNA, 414 bp, Zea mays
agcttggaagagaaagtgcctggccgagtttggtattgtcacacagtgtctagctccattaagagtcaatgatccgtacctgcttaatttgctgatgaagatcaatgcaaagcttggtggtctgaactcgttgctgcaagttgaagcatcttcgtcaataccacatgtgtcgcaagtacccaccatcatcttaggtatggatgtttcacatggtcatccaggacaagatagaccttcggttgcagcggtggttagttctcgtcaatggcctcttatctctagatatagagcatcagtgcacacccaatctgccagactagaaatgatgtcctcgttgtttaagccgcggggtactgatgatgatggcctcatccgggaatcactgatcgacttctacactagctctggaaagcg

SEQ ID NO: 82428 - DNA, 425 bp, Zea mays
agctcacgtgatcagggatccttggttgcttttgaagatggaagcactacttcttatgcacttcttaatgcacaagaaagaggtatgttgtttgtccaaccagggcaggatgtttacaaaggtcaaattgttggtatccatcagagacctggtgatttagcaattaatgtgtgcaagaaaaaggctgctacaaatgttcgttccaacaaagaaactacagtggttcttgatgaacctttaagctacagtttggatgactgcatagagtttatccaagaagatgagatagtggaggttactcctgcaagcatccgtatgtgcaagaacccaaaagtttcgaagaaaaagtaacataatcgcatccatttgtcgtcaatgcatcttctacacatagaagctgcatgctccgttgccaggtctcgtat

SEQ ID NO: 82429 - DNA, 419 bp, Zea mays
acccacgcgtccgcccacgcgtccgcctgcctcgagttcagcaaggtcggcttcgtgtaccgcgagaactccacctccccgtgctactacgacggccgctactggaccatgtggaagctgcccatgttcggctgcaacgacgccacccaggtgtacaaggagctgcaggaggccatcaaatcctacccggacgccttccaccgcgtcatcggcttcgacaacatcaagcagacgcagtgcgtcagcttcatcgcctacaagcccccgggcagcgactagaccgcgcccgccggccgccccccgccggctagctagctagctagctcctgcgtgagctagtagctagtgccatgcgtcgtctctgtcgttcggttttgcttcgggtcaccgtgtaccctttgcctgcctgggttcctcct

SEQ ID NO: 82430 - DNA, 381 bp, Zea mays
agcggacgcgtgggcgtgtccccaaaatccgatatgctgggatgcttcagtatgatggtgagttgaagcttccaagccgttaccttgtttccccaccagagatagatagaacatctggggagtacttggtgaagaatggcatccgcacctttgcttgcagtgagacagttaaatttggccatgtcacatttttctggaacggtaaccgttcgggatactttgatgcaactaaggaggagtatgtagaagtacctagtgacagtggtattacattcaatgttgcacccaatatgaaggcgcttgaaattgctgagaaagccagggatgctctcctaagtggaaagtttgaccaggtacgtgtcaacctgccaaatggtgaca

SEQ ID NO: 82431 - DNA, 427 bp, Zea mays
ctctcgctgcctttatttcctgttggcgacgctctcgccaggtcttcggcggcccgttcggcggcgactagcgcctccgtttgccaggtcttcgtcgtccgtttcgccgtcgactggtgcccagcaggtacatctggaagaatgggggtttaccttagcacaccgaaaactgacaaggtatccgaagatggggaaaacgataaacttaaattcggactttcatctatgcaagggtggcgtgcaactatggaagacgctcactcggctttgctagatcttgacaatgacactgcattctttggtgtttttgatggacatggaggaaaagtagttgccaaattccgtgcaaaatatctacacagagaagttctccataccgaagcctatgctgccggtgacctgggtgctgctgtccaaagagcttact

SEQ ID NO: 82432 - DNA, 423 bp, Zea mays
  unsure (1)..(423): unsure at all n locations
agcggacgcgtggggggaacatcgaggacattgtaagtgaattatgtgctgagacgggagccaaccaggaggatgccctcgcgcgaattgaaaagctttcagaagtaaacccgatgcttggcttccgtgggtgcaggcttggtatatcgtaccctgaattgacagagatgcaagcccgggccatttttgaagctgctatagcaatgaccaaccagggtgttcaagtgttcccagagataatggttcctcttgttggaacaccacaggaactggggcatcaagtgactcttatccgccaagttgctgagaaagtgttcgccaatgtgggcaagactatcgggtacaaagttggaacaatgattgagatcnccaaggcagctctggtggctgatgagatagcggagcaggctgaattcttctcct

SEQ ID NO: 82433 - DNA, 427 bp, Zea mays
acccacgcgtccggcgagtgagtgaacaccagccgtattgtcccgaccccgaccgatcctcgcctgctgcagccatggcgacctccgcggcgctctctaccgccgccaatcccacccagctctgccggtcccgcgcttcgctgggcaagccggtgaaggggcttggcctgagcatgggccgcgagcgcgcccagcggagcattgtgtgccaggcggcgagcagcatctccgccgaccgcgtccccgacatggagaagcggaagctgatgaacctcctcctcctcggcgccatctcgttgcccaccgtcggcatggtcgtcccctacggcgccttcttcgtccctgccggctccgggaacgccggcggcgggacctacgcgaaggacaagctgggcaacgacatcacggtggaggcgtggctcaacac

SEQ ID NO: 82434 - DNA, 427 bp, Zea mays
agcccgcagttcttcctcgtgggggcgggcgaggcgttcacgtacatcggccagctcgacttcttcctgcgcgagtgccccaaggggatgaagaccatgagcacggggctgttcctcagcaccctgtcgctgggattcttcgtcagctccgcgctcgtcgccgccgtgcacagggtcacgggcgaccgccacccctggatcgccaacgacctcaacaagggccgcctcgacaacttctactggctgctcgccgccgtctgcctcgccaacctactagtctacctcgtcgccgcccgctggtacaagtacaaggcgggccgccccggcgccgacggcagcgtcaacggcgtcgagatggccgacgagcccacgctccactgatccatccatgttcgatcgatcgacgaggcacgcgacggacgaccct

SEQ ID NO: 82435 - DNA, 371 bp, Zea mays
aacagagctcgtcgccaccggccaccgccaccctcgatcacgccgtccgtcgaggtaaggtcagcatggtgagggtcactgtgctcaacgatgcgctcaagtccatgtacaacgctgagaagatcgggaagaggcaggtcatgatcaggccgtcgtccaacgtcatcatcaagttcctgacggtcaagcagcgccacggctacattggagagttcgagtacgttgatgaccaccgatcgggcaagatcgtggtcgaactcaacgggaggctgaacaagtgcggcgtcatcagccctcgctttgatatcagcgtgaaagacattgagggatggactgcaacgctgctcccgtcgaggcaattcggatacatc

SEQ ID NO: 82436 - DNA, 426 bp, Zea mays
gtcagcggacgcgtgggcggacgcgtgggcgggccgccgccgccgccgcctccgcgaaaaaccctagcaggcttcgccgctatcactccaaggggcgcgaccatggtggccacaaagaagacgaagaaatccacggacaacatcaataacaagctgcagcttgttatgaagagtggcaagtacactctcggctacaagaccgtcctcaggactctcaggaactctaagtcgaagctagtgatcatcgctaacaactgcccgccccttcgtaagtctgaaattgagtactatgctatgctggccaaggtcactgtccaccacttccatggaaacaatgtcgaccttggaactgcctgtggtaaatactttcgggtctgctgcctcagcattattgattctggtgattctgatatcatcaagactaca

SEQ ID NO: 82437 - DNA, 419 bp, Zea mays
  unsure (1)..(419): unsure at all n locations
aaagagaattaaaaatcctaactacaagggtaaatggaagaccccatggatcgataatccaggtaagcaaataaaaatcctaactgctgattttgaatgaaaccacacttaagctttaaagatcaggcgctgtcaactgtattatttttgcagagtttgaggatgatccagatctttatgtgctgaagcctttgaagtatattggaattgaagtttggcaggtaaaagctggttcagttttcgacaacattctgatttgtgatgaccctgagtatgcaagaaaggttgttgaggaaacttggggtgcaaatanggaggctgaaaaggaagcttttgaagaagctgaaaaggagaagaaagctanggaagatanggaaggtcaaaaggcanaggacgatggtggccggcatcgaatacac

SEQ ID NO: 82438 - DNA, 419 bp, Zea mays
gggccgacccacgcgtcagcaaaacatcagggcacaacaactacaacaactcgtgctagcaaaccttgctgcctactctcagcaacagcagtttctgccattcaaccaactagctgcattgaactctgctgcttatttgcaacaacaacaactactaccattcagccagctagctgctgcctaccaccagcaatttcttccattcaaccaactggcagcattgaactctcctgcttatgtacaacaacaactactaccattcagccagctagctgctgtgagccctgctgccttcttgacacagcaacagttgttgccgttctacctgcacgctgcgcctaacgttggcaccctcttacaactgcaacaattgctgccattcaaccaacatgctttgacaaacccaacaacgttctacc

SEQ ID NO: 82439 - DNA, 410 bp, Zea mays
cgcacgcacgaacgcgctcccaccccctcccgccgccaccgccgccaaaaccccggcccgacttggcgtcctccgccaacctcctcctgggcagcgcgggcggggggatatggcatcggaggacgtggtgggcaagagcaggggcgacacggccgtcaccaccatcgtcaacctggcggaggaggccaagctcgcgcgcgagggcgtcaaggcgcccggccaccagatcctcaccatctgcaagtcgctcgtcgccggcggcgtagcaggcggagtgtctcgtactgctgttgctccacttgaacgattgaaaatattgcttcaggttcaaaatccgcacagcatcaagtacaatggtactgttcagggtctcaagtatatctggagaacagagggcctccgtggacttt

SEQ ID NO: 82440 - DNA, 426 bp, Zea mays
tcccgggccgactcacgcgtcagcgagaattgggacatgggctcggcctcagcgagggagggccgctgttcgggttcaccaagtcgaacgagctgttcgtggggcggatggcgcagctgggcgtggccttctccatcatcggcgagatcatcacggggaagggcgcgctggcgcagctcaacatcgagacgggggtgcccatcaacgagatagagccgctcgtcatcttcaacgtcctcttcttcttcatcgccgccatcaaccccggcaatggcaggttcatcatcggcgaggaagaggaataggctgctggcctcggacatgagtcgtgtgcgtttacttttacctgtgactgtgagtgatcgatcggtgcgtctcggtgcgcgcgcgtaagtgctttgctgtgtgtatcaattactcgtgatg

SEQ ID NO: 82441 - DNA, 305 bp, Zea mays
acatagaaagtggaatcagtagcaacaataaaagaacaaatggcgaccaaagatattttccctcctttaggcccttgctcttttcaaatgtgttgctaacgcgacaattttccctcaatgctcacaagctcctatagcttcccttcttcccccataccttccatcaattatagcttcaatatgtgaaaacccagctcttcaaccatataggcttcaacaagcaatcgcagcaagcaacatacctttatcgcccttgttgtttcaacaatcgccagccctatctttggtgcagtcattggtacaaa

SEQ ID NO: 82442 - DNA, 391 bp, Zea mays
attgtttaccatggaccagattttgttaggaagatctgatgttgcaggttggggtgcattcattaagaatcctgtaaataaaaatgattatcttggagaatatactggtgaattgatctctcacaaggaagcagacaaacgcggcaaaatttatgaccgggcaaactcatcttttctgttcgatttaaatgaccagtatgtgttggatgcttatcgcaagggggacaaattgaagttcgcaaatcactcatctaaccccaactgctatgcaaaggtgatgctggtggctggcgaccatcgggttggtatatatgcgaaggagcatattgaggctagcgaggaactcttttatgattatcgttatggacctgaccaggctccagcttgggct

SEQ ID NO: 82443 - DNA, 342 bp, Zea mays
  unsure (1)..(342): unsure at all n locations
acccacacgtccgcccacgcgtccgcccacgcgtccggtgccctgcaggagtcgctcgccaccaagctcgcggccgggatgaccgcaatgagcagggcaaccgacaacgcaatcgagctcggcaggaacccctccatcgcctacaaccgacagcgccaggccaagatcaccggggagatcctcgagatcgtcgccggtgccgacgccctcgctggctgagcctgagtcnccttggtggtgcggtgctcctgctatatataattctttttcctcattttctccactctgcctgtaattcctgataatagcacaaacgcaacggagttctgtgttccttgcgac

SEQ ID NO: 82444 - DNA, 415 bp, Zea mays
acggacgcgtgggcggacgcgtcgggtacatatctttgaggcagttcatgacaacgacaatcctatgcggaaaccgcacctacgcaagcgaccctaagaagcaactgggcatccaaagaacattatacccctcccattgggcttcctgcccttttttgtagtgcaacaaatggcgtcattattccacaatgctcacttgcacatagtgccattattcgacagttcctccctccagttacgtcaatgggcttcgaacatgcagctgtgcaagcctagaggctacaacaagcgcttgcggagagcgtcttagaacaaccaattgcccaattacaacaacaatccttgggacatctaaccatacataccatcgcaacgcagcagcaacaagcactgagccaactaaccgtggtgaacc

SEQ ID NO: 82445 - DNA, 308 bp, Zea mays
gggccgagccacgcgtccacggaaacgtgggaccaggcgttccgcgacgccccggcaaacaagctcacgggcacccccaagtccgccaacttccgccccttttcgttcaacttcagggcccccaacttctctccaacaatcaaaccctccccaacaagggccatggccaacaacatggtcaaggtcacctcctggtactacaaccattggggctacccccagagggtcgtcgacctcgctgacatctgccccaaccggtgaaagtgaaccgttgcattgtaatagcactttgtaactcctcaccctcc

SEQ ID NO: 82446 - DNA, 412 bp, Zea mays
agcccacgcgtccgcggacgcgtgggcggcatcgactacgccgccgtcaccgtgcagctcccggggggcgagcgcgtgccgttcctcttcaccgtcaagcagctcgtcgccaccggcaagcccgagagcttcggcgggcccttcctcgtgcccagctaccgtggctcctccttcctcgaccccaagggccgcggcggctccaccggctacgacaacgccgtcgcgctccccgccgggggcagaggtgacgaggaggagctccagaaggagaacatcaagaacgccgcctcctccaccggcaacatcacgttgagcgtcaccaagagcaacccggagaccggcgaggtcatcggcgtcttcgagagcgtgcagccgtccgacaccgacctcggggccaaggcgcccaaggatg

SEQ ID NO: 82447 - DNA, 415 bp, Zea mays
agcccacgcgtccgagaggtgtagatatttttaagaaagcgtacataattttgccgattaatgaatcgatgcactggagcttgatcattgtttgcatgcctacaaaagaggcagattctgggccaataatacttcacttggactctcttggtcttcactccagtcaaaagctttttgacatagttgcgagggaggatatggaggcgtctttcgaaaaatatcaatagggaaaagattgaggtgccacgtcagcgtaacgagtatgattgtggcctctttatgctttactatattgacaggtttattcaagatgcgccagagaggttgacaaaagagggccttggcatgtttggacgcagatggttcaaccatgaagaggcttcagcgtttcggggagggataccggcgctactga

SEQ ID NO: 82448 - DNA, 402 bp, Zea mays
cggacgcgtggggctactcggtcgcggtggtggtggtgatctgcctgttcgttctggcgttcgggtggtcgtggggcccgctgggatggacggtgccgagcgagatcgtcccgctggagacgcggtcggcggggcagagcatcacggtggccgtgaacctgctcttcaccttcgccatcgcgcaggcgttcctgtcgctgctgtgcgccttcaagttcggcatcttcctctttttcgcggggtggatcaccgtcatgaccgtgtttgtctacgtcttcctgccggagaccaagggcgtgcccatcgaagagatggtgctgctctggcggaagcactggttctggaagaaggtcatgccggacatgccgctcgaggatggctggggcgcggctgagggtcatg

SEQ ID NO: 82449 - DNA, 398 bp, Zea mays
acccacacgtccgggccgtgctgcagggcctgctgaaggtggtggcgggcatcgagatctccttcacgctgacgtccaagtcgggcggcgacgacgtggacgacgagttcgcggacctgtacatcgtcaagtggacgtcgctgatgatcccgcccatcgtgatcatgatggtgaacctgatcggcatcgcggtcgggttcagccgcaccatctacagcgagatcccgcagtggagcaagctgctgggcggcgtcttcttcagcttctgggtgctggcgcacctgtacccgttcgccaagggcctgatggggcggaggggccgcacgccgaccatcgtcttcgtctgggcgggcctcctctccatcaccatctcgctgctgtgggtggccatcaacccg

SEQ ID NO: 82450 - DNA, 404 bp, Zea mays
aggacaccatgaaggtgctgatcgttgcccttgctctcctggcgctcgctgcgagcgccgcctccagtacaagcggcggctgtggctgccagacaccaccgtttcatctaccgcctccgttctatatgccgcctccgttctatctgccgccgcagcagcagccgcagccatggcaataccccactcaaccaccgcagctaagcccgtgccagcagttcggatcctgcggcgtcggcagcgtcggcagcccgttcctgagccagtgcgtcgagttcctgaggcaccagtgcagcccggcggcgacgccctacggctcgccacagtgccaggcgctgcagcagcagtgctgccaccagattaggcaggtggagcccctgcaccggttacaggcgacatacggtgtg

SEQ ID NO: 82451 - DNA, 404 bp, Zea mays
agcccacgcgtccgcccacgcgtccgcccacgcgtccgcccacgcgtccgagaacctccgcgtccgcgtgtacaggccgacgacgccgccgggggcgaagaagaagctcccggtgctcgtccacttccacggcggcggcttctgcctggggtcgtgcacgtgggccaacgtccacgagttctgcctccgcctggccgcggaggccggcgccgtcgtgctctctgcgggctaccgcctggcccccgagcaccgcctccccgcggccttcgacgacggggccgggttcatgcgctggctccgggaccagtcagcgatcggcggcgccggcgcctcggacgcctggctcgcggaggccgctgatttcggccgcgtgctcgtcaccggcgactcggcgggcgccacga

SEQ ID NO: 82452 - DNA, 426 bp, Zea mays
agtgctcgcggccgacgtccacctcggcaccaagaactgcgatttccagatggagcggtatgtctttaagcgtcgcaccgacggcatctacatcatcaacctgggcaagacatgggataagctccagctcgcggcgagggttattgttgccattgagaacccacaagacatcatcgtccagtcggcccgcccctacggccagcgtgctgtcctcaagttcgcgcagtacactggcgcccatgccatcgctgggaggcacacccctggtaccttcaccaatcagctccagacctctttcagcgagcctcgcctgctcatccttactgacccaaggactgaccatcagccaatcaaggagtctgctctggggaacatcccgaccattgccttctgcgacactgactctcccatgcggtatgtcgatat

SEQ ID NO: 82453 - DNA, 403 bp, Zea mays
  unsure (1)..(403): unsure at all n locations
acgaatggggcgccaccaggcaggccgccgcgcccaggccgcccaccgtctccatggtcgtccgcgcctccgcctacgccgatgagctcgtgaagaccgcgaaaacgatcgcgtcgccggggcggggcatcctggcgatggacgagtcgaacgcgacgtgcgggaagcggctggcgtccatcgggctggagaacacggaggccaaccggcaggcgtaccgcacgctgctggtcacggcgccgggcctgggccagtacatctccggcgccatcctcttcgaggagacgctgtaccagtccgccgtcgacggccgcaagatcgtggacatcctggcggagcaaggcatcgtgccgggggataanggtggacaagggccttgtcncgctcgccggctccaacaacg

SEQ ID NO: 82454 - DNA, 413 bp, Zea mays
aacgtcagctgagaagaacctggatgttgtgttcctgaagctcgactgcaaccaggacaacaagccgcttgcgaaggagctgggcataaaggttgtgccaacgttcaagatcctcaagggtgggaaggtcgtgaaggaggtgaccggcgccaagatcgacgagctagcgcaagccatcgacacagtcaagtcagactgacaaagaaagcaggtgatgcaactagctagtgtagacgatgaatgaatgagtccccggccggccttttgtgggacagcaaggctgctagatacgtacgtacgtactcatcaacaattaatgatggatgatggcaatggcaaatatacagtcaatgattcatatatgcatgcatggactgctatgctagctagcagccctttgtaaatatagtgtt

SEQ ID NO: 82455 - DNA, 426 bp, Zea mays
  unsure (1)..(426): unsure at all n locations
aggcgcaagcacgtacgttgtcggaagctcaagttagaagaagcaccagtgcctgatcgatggcggcccaggctctcctctccggccggcagctgctgggccgccccgtgcagtcggccgtctctaggtcgtcggcgaggaaggcgcccttcgtcgtcagggccagctccagccctccaaccaagcaaggtgccgacaggcagctgtggttcgcgtccaagcagtccctctcctacctcgatggcacgctgcccggcgactatggcttcgacccgctgggcctctcggacccggagggcaccgggggcttcatcgagcccaagtggctggcctatggcgaggtgatcaacggccgctacgccatgctgggcgcggtgggcgccatcgccccggagatcttcggcangatgggcatcatcccccggg

SEQ ID NO: 82456 - DNA, 439 bp, Zea mays
ggtctagaataacgggccgagccacgcgtccacccacacgtccgcccacgcgtccgcccacgcgtccgcccacgcgtccgcccacgcgtccgccaagtttttgagcctttcagtattcttggactggaatctggggcatctgaatctgatatcaagaaatcatataggaggctttctattcagtaccatcctgataaaaatcctgatccagaggctcataagtactttgttgaatatatatccaaggcatatcaagcattaactgatcctatatctcgagagaattatgaaaaatatggtcaccctgatgggcggcaggggttgcaaatgggcattgctttgcccaagttcttactaaatattgatggtgcatctggtgggataatgcttcttggaatagtcggattttgtatattattgcctttgatgatagctgtta

SEQ ID NO: 82457 - DNA, 433 bp, Zea mays
  unsure (1)..(433): unsure at all n locations
aaagtgaaacaactggaagttgagatggggcaatctatggagatgggaaccattcacgcttcagattttctgagacgtttctgctcaactcttgggatgaacaatcaagctgttagggcagcccaggatgcagttaagcactcggaggagcttgatataaggaggagcccaatctcaattgcagccgctgtcatttatatgataacccaactctcagaggacaagaagccacttaaagatatatccttggctactggtgtggcagaaggcaccatcagaaattcttacaaggatctgtatccttatgcctcaaggctcatcccgaatacctacgccaaggaagaagacctgaagaatctctgcacaccttaggaagcttaccttttccccctttctgttantacataaatcggaattagatttgtcaaagagg

SEQ ID NO: 82458 - DNA, 410 bp, Zea mays
cccacgcgtccggcagattgtacctcgagctctggaggattcattccgcagcacggcttccttctcgcagtcgttccgtagcactgcctcattctccaagtccatcatggactcatccatggatttcaatagcgctcgcttctctgacatcgctggcagcagcgctcgcttcacgggcgttcctggtagcagctctcgcttcgcgggcgttcctggcagcagcgctcgcttctcgggcattgctggcgccagattggacaacgacgaggagagtgaaaccacggagaggccactggtgcttcgtaataaaccgcctaggtggcacgaacagctgcagtgttggtgcctcaacttccgtggccgtgtgacaattgcctcggtgaagaacttccagctgaatgccgccgcta

SEQ ID NO: 82459 - DNA, 414 bp, Zea mays
aggaccgcctccccttccccgcctccggtgcccaaggccaggccaacagttttgaggtggtaatggcggaccaggctaaccaacccactgtccttcataagctaggtggccagttccacctgagctccagcttctctgaaggtgtacgggcccgtaacatctgcccttctttctcaccttatgaaaggagatttgccacgaggaactacatgacccagagcctttggggcccttcaatgtctgttagcggtggcatcaatgttccagtgatgccgactccgctttttgccaatgctccagccgagaaaggtggcaaaaacttcatgattgatttcatgatgggcggtgtttcagctgctgtttcgaagactgcagctgctcccattgaacgagtgaagctgcttattcagaatc

SEQ ID NO: 82460 - DNA, 402 bp, Zea mays
ctcaggcatgaaagtcactattcgtcagctgggcccttccatgatacagcagatgcagcagccttgcaatgagtgcaaggggactggagagagcatcaatgagaaggaccgctgcccagggtgcaagggtgagaaggtcgttcaagagaagaaggttcttgaggttcatgttgagaaggggatgcaacacaaccagaagatcaccttccctggtgaagctgatgaagcgcctgatactgtcactggagacattgtattcgtcctccagcagaaggatcactccaaattcaaaagaaagggtgaagatctcttctatgagcacaccttgtctctgaccgaagcactatgtgggttccaatttgttcttacacatctggacaacaggcagcttctcatcaaatc

SEQ ID NO: 82461 - DNA, 378 bp, Zea mays
agcaaagatttgtgagagtgatccggcgctgagaagagatggctaagatcgccgcagccgccgcggcggcggcggcgctgtgcttcgcggccctggtggccgtggccgtctgccaaggcgaggtcgagcggcagaggctcagggacctgcagtgctggcaggaggtccaggagagcccgctcgacgcgtgccgccaggtcctcgaccggcagctaaccggcggcggcgtcggcggcccgttccggtggggcaccgggctccggatgcggtgctgccagcagctccaggacgtgagccgcgagtgccgctgcgccgccatccggagcatggtcaggggctacgaggaggccatgccgcctctggagaaaggctggtggc

SEQ ID NO: 82462 - DNA, 328 bp, Zea mays
agtgaaaggagagccttcctctgtggccttcttcgcgaaggctgggctggattacgtttcttgctcccctttcagggttccgattgctaggctagctgcagctcaggtgcttgtctgaggctgcctcctcattggcaaccggattgcctgctgctggtggatgtggtgatcaacagtattattacagagccatgctatgtgaacattactagtagcagtgctcataaaagctacaatcccatgtcctttttttccccagtcatgtaaaacttccaaactgctccatggttcaaaactctgttcttcaatacatcatcaattatcgatt

SEQ ID NO: 82463 - DNA, 397 bp, Zea mays
acccacgcgtccggagtcagggcgccatggcgacagagacggagaccttcgcctttcaggctgagatcaaccagctgctctcactcatcatcaacaccttctattccaacaaggagatcttcctccgggagctcatttccaactcttccgatgcgttggacaaaatcaggttcgagagcctcactgacaagagcaagctcgatgcgcagccggagctgttcatccacattgtaccagacaaggcttcgaacacgctctccatcatcgacagcggcatcggcatgaccaagtccgaccttgtcaacaacctcggtatcatcgccaggtccgggaccaaggagttcatggaagcccttgctgctggcgctgatgtgtctatgattgggcagttcggtgt

SEQ ID NO: 82464 - DNA, 410 bp, Zea mays
agcggacgcgtgggaaaagctcaatgagaggatagcaaagcttgctggtggtgttgctgtcattcaggtgggagcacaaacagaaactgaactaaaagagaagaagttaagagttgaggatgccctaaatgcaaccaaggctgctgttgaggaaggtattgttgttggtggaggatgcacccttttgcggcttgcagctaaagtcgatgccatcaaggatacactggagaacgatgagcagaaggttggagctgaaatagtaaggagggccctgagctacccacttaaattgattgctaaaaatgccggtgtcaatggcagcgtcgtcactgagaaggtcctttctaacgataacttcaagtatggttacaatgctgctactggacagtacgaggacttgatggctgctg

SEQ ID NO: 82465 - DNA, 427 bp, Zea mays
  unsure (1)..(427): unsure at all n locations
accaccgtcacggaacttgggaaaactcaataaaaggataccaaaccttcctggtggggttccggtaatccaggtggaaccacaaccagaacctgaactaaaagagaagaatttaagatttgaggatgccctaaatgcaaccaaggctgctgttgaggaaggtattgttgttggtggaggatgcacccttttgcggcttgcagctaaagtcgatgccatcaaggatacactggagaacgatgagcagaaggttggagctgaaatagtaaggagggccctgagctacccacttaaattgattgctaaaaatgccggtgtcaatggcagcgtcgtcactgagaangtcctttctaacgataacttcaagtatggttacaatgctgctactggacagtacgaggacttgatggctgctggtatcattgat

SEQ ID NO: 82466 - DNA, 401 bp, Zea mays
  unsure (1)..(401): unsure at all n locations
acctcgccccgccgcacccgaatgaaatccagaaatcatttcttcgttctaaattgaaagtctagaaataggtgtttatagattcatcgcgacacgatcttcaccagaaaaggttacaagagaaatgcagagatttattctatggagaaagcatcagggcattctgctttgcgtcacaaagtttcaaacccagcaaaacccccagtcgatatatcagataggatgattggtgataccaaaggaagcaaactcaaacacacaaagtttcagaagcacagctactgcttgctcnctcaggcgaccttgacctcgatggtcttgggcttcttgggctccggcggnggcagcttctcgacggtcaccgtgagcacgccgtcnctgcacacggtgtcgcatcgggc

SEQ ID NO: 82467 - DNA, 347 bp, Zea mays
acccacgcgtccgcccacgcgtccgcccacgcgtccgcccacgcgtccgcttgatgagtatggaactaatgtaacaaaattagcacaggagggaaaattacatcctgttgttggaaggcagccacacagtgagcgtgtggtacacattttaggcagacgaaccaagaacagaccctgcttgattggcgagcctgacgttggaaaaactgcaattgctgaaggacttgctcagcgcatttctacaggcgatgtacctgatacagtacaagggaaaaaggtcataacccttgacatgggacttcttgttgctggcacaaagtaccctggagaattcgaagaacgcttaa

SEQ ID NO: 82468 - DNA, 423 bp, Zea mays
agggcggggatgacgagcccaatggtggccaccccggtccagttccacacaaccggccgcctcagcttctgctccttttcctttcccagcgcatcagggaggcggcgattcgcggcggtgagggcgtccgcggagacgatggcgacggagaagctgggcatcaaggtggagcgcaacccgcccgagtcccgtctctccgagctcggcgtccgccagtggcccaagtgggggtgcgagaagagcaagttcccgtggacctactccgccaaggagacgtgctacctgctgcaggggaaggtgaaggtgtaccccgaaggccacggggaggagttcgtggagatcggcgcgggagaccttgtcgtcttccccaagggcatgagctgcacctgggacgtcgccgaggccgtcgaaaagcactacaac

SEQ ID NO: 82469 - DNA, 400 bp, Zea mays
aggggagccaaccaggaggatgccctcgcgcgaattgaaaagctttcagaagtaaacccgatgcttggcttccgtgggtgcaggcttggtatatcgtaccctgaattgacagagatgcaagcccgggccatttttgaagctgctatagcaatgaccaaccagggtgttcaagtgttcccagagataatggttcctcttgttggaacaccacaggaactggggcatcaagtgactcttatccgccaagttgctgagaaagtgttcgccaatgtgggcaagactatcgggtacaaagttggaacaatgattgagatccccagggcagctctggtggctgatgagatagcggagcaggctgaattcttctccttcggaacgaacgacctgacgcagatgacct

SEQ ID NO: 82470 - DNA, 346 bp, Zea mays
  unsure (1)..(346): unsure at all n locations
acccacgcgtccgggaagaaagaaagcaaccatggcggcaaccggaatgtcnccctccccctcggccgcaataactcgccacatccatgctcgtcgttcctgtgctgctgcttccttgtccctccgccgctcgggcttcctgnggcgcgtcgtgctggccgcggtgccagtggccgtggacgccacccggcgccgccgcgtctccgtgtcggtgcggatggcctgggacggtccgctctcgtcggtgcgcctcatcatgcagagcaggaacgcgaagctgagcgagaagctcaaggagcacatcgaggacaaggtgggtcgggcggtgtccangcactgccacctg

SEQ ID NO: 82471 - DNA, 423 bp, Zea mays
acccacgcgtccggctttatctactccagagcgcagaagaacccgatcgacaccatgagggtgttgctcgttgccctcgctctcctggctctcgctgcgagcgccacctccacgcatacaagcggcagctgcggctgccagccaccgccgccggttcatctaccgccgccggtgcatctgccacctccggttcacctgccacctcctgtgcatctcccaccgccggtccacctgccgccgccggtccacctgccaccgccggtccatgtgccgccgccggttcatctgccgccgccaccatgccactaccctactcaaccgccccggcctcagcctcatccccagccacacccatgcccgtgccaacagccgcatccaagcccgtgccagctgcagggaacctgcggcgttggcagcaccccg

SEQ ID NO: 82472 - DNA, 333 bp, Zea mays
caggtggtttccaaagccaactgtgtactagcagtctagcaaccagctacctcgggcggcagcatgcagccatcatgtctgacgacaagcaccaccacttcttcaaccaccacatgaaggacgacgagcagcccgccggcgagtacgggtactccgataccgaggtggtcatcgccaccggctagggcgagtacgagacgtacaagaaggacgagaaggagcacacgcacaatcagcacctcagcaaggccggcgccatcgccgccggcgccttcgcactctacgataagcacgaggctatcaaggaccccgagcacgcgcacaggcacaaga

SEQ ID NO: 82473 - DNA, 425 bp, Zea mays
agcggacaaggagaaactcggccggaatgtgccgcaggtttcgtcggcgttgttcttcagctacaacacatcattggggccgccgtatcgggtgattgtggataccaacttcatcaatttctcgatacagaataagctggatttggagaagggaatgatggattgcctttatgcaaaatgtaccccatgtatcacggactgtgttatggctgagcttgaaaagctggggcagaagtatcgtgtggccttgagaattgccaaggaccctaggttccaaagattagcatgcacacacaagggaacctatgctgatgactgcattgtggagagggtcactcaggtaaaagctctctcttcttgaacactctttgtttgtttggagcatgagtactgggagtattctattaagtgctaactctatagcg

SEQ ID NO: 82474 - DNA, 409 bp, Zea mays
gcctgctgcggattgcccccaggcggccccactcactccgctgttgatatttcgtttggttctcctttccgtcttgtccgtcgccgaggccttcttcccctcgctccccagctccagcaggcagatcagatccatccaaccacgaacaggaaggaaggtaggaggcctgaggggctgaagttgaaccatgagtgccgtcgcggtttcgtcgtcgctgaacccgaacgcgccgctcttcatcccggcggcgctgctgcaggtggaggacttctcgccgcagtggtgggacctcatcaccaccaccgcctggttccgcgaccactggtcccgcgagcacgcccacctggacgagatagccgagcagctcgagttggtcgccctccttgcctacgatgaggatgaggaactc

SEQ ID NO: 82475 - DNA, 277 bp, Zea mays
acccacgcgtccggaaggggaagaagaaggccaacaatagcgtggagacctacaaaatctacatcttcaaggtcctgaagcatgtgcaccccgacatcggcatctcctccaaggccatgtccatcatgaactccttcatcaacgacatattcgagaagctcgccggcgatgccgccaagctcgcgcggtacaacatgaatcccagcatcatctctcgcgagatccagacctccgtgcgcctcgtcctcccaggagagctcgccaaacatgccgtctc

SEQ ID NO: 82476 - DNA, 405 bp, Zea mays
aaaagcacaatagtgtaccaacaatggcagccaaaatattttgcttccttatgctccttggtctttctgcaagtgttgctaccgcaaccattttcccacaatgctcacaagctcctatagcttcccttcttcccccatacctctcaccagcggtgtcttcaatgtgtgaaaacccaattgttcaaccctacaggatccaacaggcaatcgcaacaggcatcttaccattatcacccttgttcctccaacaaccgtcagccctattacagcagttacctttggtccatttggtggcacaaaacatcagggcacaacaactacaacaacttgtgctagcaaaccttgctgcatactctcagcaacatcagtttcttccattcaaccaactggctgcattgaactccg

SEQ ID NO: 82477 - DNA, 322 bp, Zea mays
atatggagttaatgatccagttgcactgaaacttttgagcaaggcaggtgagatgccatccctgacaccaccagatgatgagactataaggaccctctacattggcggactcgatagcagaataaccgagcaggatttgagggatcagttttatgcccatggtgagatcgagtccataaggatggtacttcaacgtgcaatcgcatttgtgacgtatactacaagagaaggcgcagagaaggctgcagaagagcttgctaataagctagtcatcaagggcgtgcgcctgaagctgatgtggggcaagcctcaaggcccaaag

SEQ ID NO: 82478 - DNA, 399 bp, Zea mays
acacgtccgcccacgcgtccgcagctctcgccttctctctctcatcggcacacccgagcttgcgccctccttccacttcgaggtccgagtcctgctttgatggcgaccgacgtggctgagactcccgcgccgttggtggatgcggccccagaggcgcccgcggacgccccggcggcgcctgctgccgacgcgaagccggccaaggccaagaaggccaccgcaccgaagaagcgcgccagcccgacccaccctccgtacgccgagatggtctcggaggcgatcacgtcactcaaggagaggacggggtccagcagctatgcgattgccaagttcgtggaggacaagcacaaggacaagctcccggccaacttccgcaagcttctgaacgttcagctcaag

SEQ ID NO: 82479 - DNA, 372 bp, Zea mays
acatagaaagtggaatccagtagcaacaatagagcaacaatggcgaccaagatattttccctccttatgctccttgctctttctacatgtgttgctaacgcgacaattttccctcaatgctcacaagctcctatagcttcccttcttcccccataccttccatcaattatagcttcaatatgtgaaaacccagctcttcaaccatataggcttcaacaagcaatcgcagcaagcaacatacctttatcgcccttgttgtttcaacaatcgccagccctatctttggtgcagtcattggtacaaaccatcagggcacaacagctgcagcaactcgtgctacctctgattaaccaagtagctctgggaaacctt

SEQ ID NO: 82480 - DNA, 365 bp, Zea mays
acccacgcgtccgcccacgcgtccggttctgcgtcagcacattcctgaatctgaagccaaggataagttcatatctaaatggaataatgtggctcataacagaaatattacttctggcttgaactcgtatggtttttatgcttatgactcggtttgggctgttgctcgtgctgtcgataaatttctcagtaatgggcaacagatcaacttctcaacagaccccaggttagaagattcaaatggcagcacgttgcacctatcaagtctcaagatatttgacggtggtgagcagatgctgcatcaacttctcctcacaaactttacgggtgtaacaggtccagtccagtttgattcagagcacaatt

SEQ ID NO: 82481 - DNA, 405 bp, Zea mays
accatgacgctgaggagccactgatcaagcacgaggccgactgtgagggcacccaatctgctgctaagaagcctcgacgcaatataaacgtacacagcgcttaccttcatgtgcttggggactccatccagagcatcggggtgatgatcggcggggctatcatctggtacaagcccgagtggaaaatcatcgatctgatctgcaccctcatcttctcggtggtcgtgctgttcaccacgatcaggatgctgcgcaacatcctcgaggtcctgatggaaagcacgccccgtgagatcgacgccaccaggctggagagggggctctgcgagatggaaggcgtggttgccgtccacgagctgcatatctgggccatcacagtggggaaggtgctactggcttgccatg

SEQ ID NO: 82482 - DNA, 436 bp, Zea mays
gggtcccgggcacgcgtccacgtcagtgctagccatggatctaggcgctcccgctcgacggcgcttaccgatccgcctcttgctggtgtcgctcgccgtcctcatggtcctcaccgcgcgttccagtgccgaagtcatcaccctcaccgaagagaccttctccgacaagataaaggagaaggacacggtgtggtttgtgcagttctgcgtcccctggtgtaaacactgcaagaaccttggaacactatgggaggacctgggaaaggttatggaaggtgcggatgaaattgagattgggcaagttgactgtggtgtcagcaaaccagtatgctcaaaggtcgatatacactcctacccaacattcaaggtgttttatgaaggcgaagaagtagtaaaatataaaggacctaggaatgtggaatcgctgaagaacttc

SEQ ID NO: 82483 - DNA, 439 bp, Zea mays
  unsure (1)..(439): unsure at all n locations
gggccgggccacgcgtccacttcaccaagctgatttctgcttgttagctactcacgtcaacagaaaatctcgcgttcagctcctctccagtctctccgcctcccgcttacttctctgactctgtcctctttcgtttctttcttgtcggcgacggctggcggctggggtgctgcgccgctctcaccttcaccgccgacgagcattcacaagtagtggtctcttactggtggcggcgtagaggtgacgaaaaagccttgacaatgagcagcataggcacaggttatgatctgtctgtcaccaccttctctcccgatggccgcgtcttccaggtcgagtatggcacgaaggctgtcgacaacagcgggaccgttgttgggatcaagtgcanagatggcattgttctgggtgtcgagaagctggtaacctcaaagatgatgct

SEQ ID NO: 82484 - DNA, 419 bp, Zea mays
  unsure (1)..(419): unsure at all n locations
agcccacgcgtccgcccacgcgtccgcgagctggtgaagcttgctacagagaggggccgcaaagctaggcctaacttgaaggtgggcatttgtggagaacacggtggagagccttcctctgtggccttcttcgcgaaggctgggctggattacgtttcttgctcccctttcagggttccgattgctaggctagctgcagctcaggtgcttgtctgaggctgcctcctcattggcaaccggattgcctgctgctggtggatgtggtgatcaacagtattattacagagccatgctatgtgaacattactagtagcagtgctcataaaagctacaatcccatgtccttttttttccccagtcatgtaaaacttccaaactgctccatggttcaaaactctgttcntcaatacatcatcaat

SEQ ID NO: 82485 - DNA, 423 bp, Zea mays
aattctagatatgaagctgcagctcttcgtgctctccgcaagttatggagcatgagaagttcactgaatctagtaagcaccacacttgatgtttttactggcaagtggattcagtattcatccggaattggtgctggtgttgattcattttatgagtatctgattaaagcatatattcttttcggaagtgatgagtactgggatatgtttcattcagcttatcttgcggtgcagaagtacttccgacatggtccatggtatcatgaggctgatatgaggactggagaagcaacgcactggcagctaactagccttcaggctttctggccaggtcttcagacacttcttggagacgttactgctgcaaatctatcacaccgtgagttttacaatatatggcaaagatttggtgtgctacctgaa

SEQ ID NO: 82486 - DNA, 359 bp, Zea mays
gggccgacgcacgcgtccacacaacacgctagctctgcatcatccgttctggtgagcgagcgagcgagagacctagctagactgaccggtcgccggcagcgcaggccgagaacgaagcgtttgtgcattgaaggagcaagagccatggcggaacagcagcagccgcaggagatggacgttgaccgtaccggtggcctcgaactgcctccagggttccgcttccacccgagcgactttgagattgtcagccactacctcaagaataaggtgcacgacagggactacagctgcatcgccatcgcggacgccgacctaaacaagaccgagccatgggacctcccgaaagttgcaaagatggg

SEQ ID NO: 82487 - DNA, 424 bp, Zea mays
  unsure (1)..(424): unsure at all n locations
aggaggagcctcttgcttcggcttcggcttgactcagctgcagcccgccgccgttaggctccggttgccgcctgctcgcgccgcggacacttcgtcctcccagtcgccggcgcgcctgacggcggtgctggagcaagtggaccagttgctaagccaggggaacgacatggccgcgctctccctcgtgcgcagtacgcangggggtgacggcgggctccgggcctttggcgccgccaggcaggtacctcaacgactttataaattggatgagcttaaactgaatgggattgatacttctgctttcctatcacccgtagatctgacactangatcaattgagagaaatctccanatcgctgcagttctgggagggctttctgtatcagctgcattggaactttctcaactccaaatcctgtttctc

SEQ ID NO: 82488 - DNA, 434 bp, Zea mays
  unsure (1)..(434): unsure at all n locations
actgcggatagagcagcagaggcagcgacacgatcgcgagcgcacgcacgtaagcacgttgtcggaagctcaagttagaagaagcaccagtgactgatcgatggcggcccaggctctcctctccggccggcagctgctgggccgccccgtgcagtcggccgtctctaggtcgtcggcgaggaaggcgcccttcgtcgtcagggccagctccagccctccagccaagcaaggtgccgacaggcagctgtggttcgcgtccaagcagtccctctcctacctcgatggcacgctgcccggcgactatggcttcgacccgctgggcctctcggacccggagggcaccgggggcttcatcgagcccaagttgctggcctaccgcgangtgatcaacggccgctacgccatgctaggcgccgtgggcgccatcgccccgg

SEQ ID NO: 82489 - DNA, 433 bp, Zea mays
acccacgcgtccgcccacgcgtccgcggacgcgtgggggccgctcgacccaccatcaccgtctggtccgccgagggagagtcctctggctcgctccccctgccccaggtcttcaccgctcccatccgattggatgttgttcagcaggtccacaagtcgatggccaagaacaagagacagccatacgccgtcgccgagaacgctggtcaccaaacctctgccgagtcttggggtactggacgagctgttgcccgtatcccccgtgtgtcgggtggtggtacacagcgatctggacaggctgccttcggtaacatgtgccgaggtggtcgaatgttcgccccaaccaagacttggagacgatggcacgtaaaggtcaaccagaaccacgaagagatacgccgtcgcctccgccattgccgcttcgggccctccat

SEQ ID NO: 82490 - DNA, 403 bp, Zea mays
agggagagagacgaagagagcggaagcgaaagagcagcggcgcaaaggaaagggagccatgctcgcgtcgccggcgctcgccggcgcccactccttcgcggcgtccgtgtatggaagcctcctcgtcccctcgcctcccgtccccgcgccggcacgtcgcgcggcgctgtccgtcgtcgccaaggtcaaggtggccacgccccaggacgaccgcatcgcccgccacgtccgcctccgcaagaaggtaagtggcaccactgagaggccgaggttgagtgttttccgctcaaacaaacatctgtacgctcaagtcatcgacgacacaaagcaatgtactctggcttcagcttcaaccatgcacaaatctctctccaaggaatttgaatactcggctgggccaacg

SEQ ID NO: 82491 - DNA, 396 bp, Zea mays
gtggccaccaccacgaagatgcaggagcatgcgggcagcgacaagtcgtgtgtttggcacgctgctgactttgccgatggcgaacttaaggaggagatgtttgccatcaggtttggttcggtagaaaactgcaagaagttcaaggagttggttgaggagatagctgagtcgcttacaaagaacgagggcaaggaaaggtaagatggtggttccacggctggattgctggcgaaactcactgtgaaccaaggcaaatctgaaggaaattgcaagtccgagtccactgaatccggcaaagtgactgaaaccaaagccgacacagccccaactgagtagttggtgtggttgcacttgcacgcaaattcccctggtgctgaactagtttgtctgtccgcg

SEQ ID NO: 82492 - DNA, 413 bp, Zea mays
  unsure (1)..(413): unsure at all n locations
ataaatctgatggtgctctttctgcagaaatggtttatatgtttgcagaatggtacaaaccaggatgcttgcttgagtaccctctgggtggaactggagcaataatagatgcccttgtgagcggtattgaaaaatttggtggcagacttgctcttcgttctcatgttgaaaagatcttaatagagaatggtcgagcagttggtgtcaagctacaaagtggacaagttatccgtgcaaagaaagcggttgttagcaatgcatctatgtgggacactttggatctgttacacccgatgctgtcncaaaatcatatgaagatagagtgaaagcaactccacaatgtgaatcgtttatgcatctccaccttggttttgatgcanagaatgctanagaagaccttgggatccatcaca

SEQ ID NO: 82493 - DNA, 414 bp, Zea mays
acccacgcgtccgcgacacgatcgcgagcgcaagcacgtacgttgtcggaagctcaagttagaagaagcaccagtgcctgatcgatggcggcccaggctctcctctccggccggcagctgctgggccgccccgtgcagtcggccgtctctaggtcgtcggcgaggaaggcgcccttcgtcgtcagggccagctccagccctccagccaagcaaggtgccgacaagcagctgtggttcgcgtccaagcagtccctctcctacctcgatggcacgctgcccggggactatggcttcgacccgctgggcctctccgacccggaaggcaccgggggcttcatcgagcccaagttgctggcctatggccaagtgattaacgggcgctacgccatgctgggcccggttgggcgccatcgc

SEQ ID NO: 82494 - DNA, 428 bp, Zea mays
  unsure (1)..(428): unsure at all n locations
acccacgcgtccgcccacgcgtccgagattatgaatgccagccaacccaatgggcttgtcgttcctgatgcaacggtgcatcctgttaattcaacatccgatgttattgagttaatgagaataggacatgcaaacagagcagtgggttcgacaatgttgaatgaaagaagcagcagatctcacagtattgttacaatacacattcgaggtgtagatttganaacaggagctactctgtgtggtgcactacatcttgttgatcttgctgggagtgagagagtggaccgatcttctgttacaggcaatagacttaaagaagcacaacacataaacaaatctttgtccgctcttggagacgtcatattttctctaccgcagaagaatgctcatgtaccctaccggaacagcaaacttacacaagtcctaca

SEQ ID NO: 82495 - DNA, 447 bp, Zea mays
ggtctagaataccgggccgagccacgcgtccacccacgcgtccgcccacgcgtccggactagttctagcagcgatccgaagctcaatcaattcactcaaacctcttccccaaatcttcgattagattctcgttgacaagaagactagaaccgaacctgaccatgtcgctgatccgccgcagcaacgtgttcgatcccttctccctcgacctctgggacccctttgagggcttccccttcggctccggcaacagcagcagtctcttcccctcgttcccgcggaccagctcggagaccgcggccttcgctggcgcgcggatcgactggaaggagactccagaggcgcacgtgttcaaggccgacgtaccggggctgaagaaggaggaggtcaaggtggaagtcgaggacggcaacgtccttcagatcagcggcgagcgcaacaaggagc

SEQ ID NO: 82496 - DNA, 406 bp, Zea mays
agctcgactccaaggtcatcaccgaccgggagacggggaggtctcgcggcttcggcttcgttaccttctcctccgagaactccatgctcgacgctatcgagaacatgaacggcaaggagctcgacggccgtaacatcaccgttaaccaggcccagtcccgtggcggtggcggtggcggcggtggctacggcggcggtcgcggcggcggcggctatggtggcgggcgccgtgacggcggttatggcggcggtggcggctacggcggtcggcgcgagggtggtggcggcggctacggaggccgtggcggctacggcggtcggcgcgagggtggtggtggcggctacggcggcggcggcggcggctggagggactgatgtgtgggcccatcctggcttcggccgagtta

SEQ ID NO: 82497 - DNA, 430 bp, Zea mays
aggttacaattcaacaatgattggcgttggcatgtgcatggagggaatagagcacaatccagttgtttatgaacttatgtctgaaatggcatttcataataagaaggttgaggttgagtgagatcgggattaattgaagttttctgccttgagttaaatgttgacctgtgcatcagagaaggattgtccaaaacaccaaacatttgtaatttgtgtagtttcttggtagacatgctttctgcgaccttgtttacatgaggattggctaaaaacatactcctgtaggagatatggtcaagcaaatgctgacatagagaaagcttggagatatttgtatcatacaatatacaattgcactgatgggattgcggaccataataaagactatatagttgaatttccagacataagtcccagctcagttacttat

SEQ ID NO: 82498 - DNA, 379 bp, Zea mays
agggcctccccgggcaggcgctcttcgccgggcagcccacatggatcgcctctggcctctcctccgcgccgtgcgagcgcgcgcgtcaggcctacaacttcggcctccgcaccatggtatgcttccccgtcggcaccggggtgctcgagctcggctccaccgacgtcgtgttcaagaccgccgagagcatggctaagatccgctcgctctttgggggcggagcagggggtggctcgtggccgcccgtgcagcctcaggcgccgtcgtcgcagcagcccgccgccggagccgaccacgcggagacggacccgtccatgctatggctcgccgacgcgccggtcatggacatcaaggattccttgtcgcacccgtcggccga

SEQ ID NO: 82499 - DNA, 422 bp, Zea mays
accacggcggtggcgccttctccggcaaggaccccaccaaggtggaccgcagcggcgcctacgtggccaggcaggccgccaagagcatcgtggccagcggcctcgcccgccgctgcctcgtgcaggtgtcgtacgccatcggcgtgccggagcccctgtccgtgttcgtcaactcgtacggcaccggcacgatccccgacaaggagatcctcaagatcgttaaggaaaacttcgacttcagggccgggattattagcatcaaactcgacctgaaaaaaggccgcaacaagttcaacaagaacgccgcctaagggcacttcggccgttacgaagccgacttcacctgggaggtggtgaagcccctcaagttcgacaaggcatcggctttaagttgggagtgtcactgtggacatgaggactac

SEQ ID NO: 82500 - DNA, 400 bp, Zea mays
  unsure (1)..(400): unsure at all n locations
aactagttctagcccacgcgtccgcccacgcgtccgctgctccttgtgtcctcttctttgatgagcttgactcaattgctactcagagaggaagcagtgtgggtgatgctggaggtgcggctgatagagtgcttaatcagctactgacagaaatggatggcatgaatgccaagaaaactgtgtttattattggagctacaaacaggcctgacatcattgaccctgctctgctgaggccagggcgtcttgaccagctgatctacattccactgcctgatgagcagtctaggctccagatcttcaaggcctgccttangaagtcccctgtggcgaaggatgtggacttgaatgctcttgctaagtacactcaagggtcagtggagcagatatcacagaaatt

SEQ ID NO: 82501 - DNA, 411 bp, Zea mays
  unsure (1)..(411): unsure at all n locations
agccagagaacagggaggtagagaggaggaggaggtagaaggcgaaagaaggggaaccaaatcttggacgggaacacatagatttctttggtggaggaaggaggagggcaacaagaggaggttacaggtagcccaatagatctactgctgttgagggagttgatgcaaagctgagttgctgcgcgttggctttctttagagatggcttcagctggtgttgccccttctgggtacaagaacagcagcagcaccagcattggtgccgaaaagttgcaagatcacatgaacgagctaaagattagagatgataaggaagttgaagcaaccataattaatgggaaagggaccgaaactgggcacataatttgtcacactactggtggcaagaatggtcaaccanaacagacagtg

SEQ ID NO: 82502 - DNA, 317 bp, Zea mays
  unsure (1)..(317): unsure at all n locations
aaacgcaacagagtttgacacagccagttggttaatccattggcagtggctaacccattggtcgctaccttcctgcagcagcaacaacaattgctgccatacaaccagttctctttgatgaaccctgccttgcagcaacccatcgttggaggtgccatcttttagattacatatgagatgtactcgacaatggtgccctcataccgacatgtgtttcctagaaataatcaatatattgatttagatttatctcgatatatttctgaactatgttcatcatatatataattganaacatcanatcataattttaaaaa

SEQ ID NO: 82503 - DNA, 426 bp, Zea mays
  unsure (1)..(426): unsure at all n locations
cccacgcgtccgatggataattatggaatactgtggtggtggaagtgttgctgacttgataggcatcacagaggagcctcttgatgaatcccaaatagcttacatttgtagagaagcactaaagggccttgcttacctgcactccatttttaaagttcacagagatattaaggggggcaacatccttctaactgagcaaggcgaggtgaagttgggtgattttggtgtanctgcccagctgacaagaaccatgtcaaagcgcaacacgttcattggtactccacattggatggcaccagaggtcattcangaaagtcgttatgatggaaaggtanacgtttgggcattaggtgtatctgcaatcgagatggcagagggcatggccacaagatccactgtgcatccaatgagagttatcttcatgat

SEQ ID NO: 82504 - DNA, 423 bp, Zea mays
  unsure (1)..(423): unsure at all n locations
aggattgacagaggttctttgctcttgcgacgacaatggagaaattctcttctggacagttggtcagactacatctactcatgttttgcgggtgaagcagggtggaactggaagagtcaggtttgaacctcgaagtgggcagctcctcgctgtggcagctggaagcatggtgaacatttttgatgttgaaaagcaatccagcttaccctgccctccaaagggtcacaatagtgaggtaaactttgtgtcctgngatgaaaatggtgaatatctggcatctgtaagtcaggacactgtgaaagtgtggtcggtatcgtctggtgtgtgcattcatgagttacgatccaatggaaaccaatatcagtcatgcacattccatcctagatacccgaaagtgttgattgttggtggttatcagactct

SEQ ID NO: 82505 - DNA, 416 bp, Zea mays
agcacaggctgtcacaaagcttgaatttgaattcgagaggcggagagttacaaaggaagacataagggagcttatatatatagggaaattcttgagtatcatccaaagatgctgagggagtttcttgagggaactgagtcaagtggtttcatgtacccaagtgcagtagatcattttaaaaagcagtttgcataccttgaagaacattatgccaagggatctacaggaactccacctgagaggcaacataattcattgccgccggcgtccgttgtccaatccgacaaccgattacaaaccaaagccaacatcaccgaagatctttccaagtgtatgctcagagaaaatacacagaagacacatccatattctgcttctgttgcaagtaaattttcaccacatgttcctcaaagtga

SEQ ID NO: 82506 - DNA, 413 bp, Zea mays
acccacgcgtccgccccccacatcatgcagtgcaggtcctgctggtgaggacatgtttcattggcaagcaacaattatgggaccacctgacagtccctatgctggtggtgttttcttagtgaacattcatttcccgccagattaccccttcaaacctccaaaggtttctttcaagacaaaggtcttccatcctaatatcaacagcaatggaagtatatgccttgacattctcaaagagcagtggagccctgccttgacaatttccaaaggcctgctctccatctgctccctgctgaccgaccccaacccggacgaacctcttgtcccggagattgcccacatgtacaagacgggacggccgaagtacgagtcgacggcccgcagctggacgcagaagtacgcgatgggctgac

SEQ ID NO: 82507 - DNA, 416 bp, Zea mays
aaacagattcttgtttcaccgaggaaaagagagaagttctggataaattgacaatgtcaacttgaattgactaattcagttccgcctattccacattaatgggagtacatttatgtttctgctttacgaatatgatattttttggacatttctaataatagcaagccttattcctattttggtattttggatttcaggacttttagccccggttagtgaaggaccagagaagctttctagttatgaatcgggtatagaacccatggggggggcttggttacaattccgaatacgctattacatgtttgcgctagtttttgttgtttttgatgtggaaacagtctttctctacccttgggcaatgagtttcgacgtattgggtgtatccgtttttatcgaagctttcatttttgtgc

SEQ ID NO: 82508 - DNA, 371 bp, Zea mays
cccacgcgtccggtccgccgtcgacggccgcaagatcgtggacatcctggtggagcagggcatcgtgccggggatcaaggtggacaagggccttgtcccgctcgccggctccaacaacgagtcgtggtgccagggcctggacggcctggcgtcccgcgaggccgcctactaccagcagggcgcgcggttcgccaagtggcgcaccgtcgtcagcatccctaacggcccctccgagctcgccgtcaaggaggccgcgtgggggctcgcacgctacgccgccatctcacaggacaacgggcttgtgccgatcgtggagccggagatcctgctggacggcgagcacggcatcgagcgcacgttcgaggtggcgc

SEQ ID NO: 82509 - DNA, 430 bp, Zea mays
agcggacgcgtgggcggacgcgtggggtcgaagcgaggcaggggaggttcggcggggaacaagttccgcatgtcgctgggtctgccagtggccgcgacggtgaactgcgcggacaacaccggcgccaagaacctctacatcatctccgtcaagggcatcaagggccgcctcaatcgcctcccgtccgcctgcgttggcgacatggtcatggccaccgtcaagaaggggaagcccgacctcaggaagaaggtgatgcccgccgtcatcgtccgccagcgcaagccgtggcgccgcaaggacggggtctacatgtacttcgaagataatgctggagtgattgtgaatcccaagggtgagatgaaaggttccgctatcactggacctatcggcaaggagtgtgctgatctttggcctaggattgctagcgcag

SEQ ID NO: 82510 - DNA, 407 bp, Zea mays
agcgccgagtgctccggcgggaaaaagttcttcgccggcgacgcgcccgggtacctggacgtcgcgctgggaggcttcatcggctggctgcgcgcctgggacaaggtggggggcgtcaagctgctggacgccggccgggtcccgcgcctggccacgtgggcggagcgcttcgccgcgctcgacgtagccaaggaggtcatcccggaccccgaccacatcgccgagtttgccaaggtgctgcaggcacgctccgcggcagctgccaccagcaactgagctcgcaagtgaatgctgctgctctgccttcctgataaaatcatatcatggtacccggtttgttcgtttaatctggcgcggaaaaaacatggtttgttgtcgtaccaaactaagagtatgcatgcatgctt

SEQ ID NO: 82511 - DNA, 423 bp, Zea mays
  unsure (1)..(423): unsure at all n locations
acccacgcgtccgcccacgcgtccgcccacgcgtccggtgtgctgctgaccctcgtcatggccgctacctcacggcatctgctatgttccgtgggaagatgagcaccaaggaagtggatgaacagatgctgaacgtgcagaacaagaactcttcctacttcgtggagtggatccccaacaacgtgaagtcgagtgtgtgtgacattccaccaattggcctgaagatgtcctccacattcgttggcaactcaacctccatccaagagatgttcccccgccgtcagccaacagttcacgggcatgttcaggaagaaggctttcttgcactggtacacaagccaaggtatggatgaaatggagttcaccgaggcananagtaacatgaacgacctggtggccgagtatcagcagtaccaggatgcc

SEQ ID NO: 82512 - DNA, 390 bp, Zea mays
acagaatatagctatttgaagaaaaatttccgggatttattcatccgtgaaggttaccagcttgattacgtatttgattggactgtgtcaaggcaagctgtggacaataacagattgcgactgagcgggaagacaggtggcttggtgggaccatctgtggatagggctgaacgagctgcagcaagacaagatgttccagatagattcactggtcaagctggtgcttttgctagaagaaccggctctggttctggtcaatacggagaacacacaaagcacaggactctgttggattcacttatggcatccaagatggctgttgattcagataaaagaaagcattcatcatctcggaatggaagcacatcaaggaaggctcttctgtcaagc

SEQ ID NO: 82513 - DNA, 392 bp, Zea mays
acagaagactacccttcatgagaaacagcagcgggctgccattgtcgtcttcaatagtaggtctgccgcagctttcgcatctaagactctccatgctcaagtgtatgataaatggacagttatggaagctcctgaacaacgccagataatatggtccaaccttccaaggaaactatatgataggcaaatcagacaatgtgtggtttatggcattgtctttctcatagttgtgttctatatagttcctctcactgctatcgctgctgttacaaccctggaaaacctggaggcgaagctgcccttcctgaagccagtggtggagcaaccagcaatcaagacggtcttggagggctaccttccccagattgcactcaatgtgttcctcgcattgc

SEQ ID NO: 82514 - DNA, 414 bp, Zea mays
aagaatgtcttcaacggatcacactgccgctcccccacgctaaatttgggggctacagtgcacacgctagccgatcaacggctcacgctaccaggcgctctacgcggatgtgccccctagccagcttctctctccccctcgttctgtggtgcctctctcaccctctctaatattgttcacgtgggcccacttccaattattagtagatgaaaaattgataggaggtgaaaagtaggtatagaaaatgatattttatggttgtagtggggtataggggaaggatttagggggaaacgctgtacagagtggagatataggggggaagagaacgctgacgttgcaccttaattggaatttaggaaaagacatttgggcgtaaccgctgaagacagtctaaaggctcatctgtgtgta

SEQ ID NO: 82515 - DNA, 378 bp, Zea mays
agggcaaaagccaaaaggcatcaccgccgcgacgacgatggcagcctcgctccaagccgcggccaccctgatgcagccggccaagatcggcggccgggcgccctttgcctcgctgccgtcccgcccgtcgtcgcaactcgcctgcagggcgttcggcgtcgacgccggcgccgccaggatcacgtgctccctgcaggacgtcgccagcaggtgcgtcgacgccgcgaagctcgccggcttcgcgctcgccacctcggcgctcctcgtctcgggcgcgagcgcggagggcacgcccaagaggctgacctacgacgagatccagagcaaaacgtacatggaggtgaagggcacgggcacggggaaccagtgccccgacat

SEQ ID NO: 82516 - DNA, 388 bp, Zea mays
aggagtcttgatgatctcattcttgacataccatctgcaaagtctgaatttcagttgttggtatcaaaagccatttctgagggatggttagattcttcctatgtgaactcaggtgtcaacggaagcgttgaagacgatgaacatgagaagctggctaggtacaagagggaggctgtatccataatacacgaatactttttctctgatgatacaacagaggtcatccgtagtgtcaaagagcttggttatccggaatacaatccgatcttcgtcaagaagctcataacaattgctatggaccgcaagaacagggagaaagaaatggcatcggttcttctcccttcattaagcatggagctgttctcgtctgaagacatcgccaaaggga

SEQ ID NO: 82517 - DNA, 418 bp, Zea mays
  unsure (1)..(418): unsure at all n locations
aagaccaacaagcaacatagaaagtggaatccagtagcaacaatagagcaacaatggcgaacaagataatttcccctccttaaggcccttggctctttccgcaagtgttggcaaagcgacaattttccctcaatgctcacaagctcctatagcttcccttcttcccccataccttccatcaatgatagcttcagtatgtgaaaacccagctcttcaaccctataggctccaacaagcaatcgcagcaagcaacatacctttatcacccttgtttcaacaatcgccagccctatctttggtgcagtcattgggaaaaaccatcaaggcaaaagcagctggaacaactcgtgctacctgtgattcaacaagtagctctggcaanactttctccctactctcagcancaacaatttcttca

SEQ ID NO: 82518 - DNA, 431 bp, Zea mays
acccacagcgtccgcagggcagctctggtggctgatgagatagcggagcaggctgaattcttctccttcggaacgaacgacctgacgcagatgacctttgggtacagcagggatgatgtgggaaagttcattcccgtctatcttgctcagggcatcctccaacatgaccccttcgaggtcctggaccagaggggagtgggcgagctggtgaagtttgctacagagaggggccgcaaagctaggcctaacttgaaggtgggcatttgtggagaacacggtggagagccttcgtctgtggccttcttcgcgaaggctgggctggattacgtttcttgctcccctttcagggttccgattgctaggctagctgcagctcaagtgcttgtctgaggctgcctcctcgttggcaaccgggattgcctgctgctggt

SEQ ID NO: 82519 - DNA, 260 bp, Zea mays
acggtccacagctgcatcgagtggctggacgcgcagcggaccacgtcagtgctgtacgtgagcttctggagcctgtcggccatggactcctaccgagctccgggaggtggaatggggtctggctgagtgcggccaccccttcctatgggtcgtccggcgaaacatggtacgaggctgcgacgtctacaccgcacggcacctcccggatggtttccaggaccccgtcaagggcataggcgtggtggtccgctgggccccgc

SEQ ID NO: 82520 - DNA, 441 bp, Zea mays
acccacgcgtccggagaccagcaagcaacatagaaagtggaatccagtagcatcactagagcaacaatggcgaccatgatattttccctccttatgctccttgctctttctgcatgtgttgctaacgcgacaattttccgtcaatgctcataagctcctatagcttcccttcttcccgcataccttccatcaatgatagcttcagtatgtgaaatcccagctcttcagtcctataggctccaacatgcaatcgctagaagcaacatatctttatcacccttgtttcaacaatcgctagccctatctttggtgcagtcattggtagaaaccatcatggcacagcagctgcagcaactcgtgctacctgtgatcaaccaagtagctctggcaaaccgttctccctactctcagcaacaagaatttcatccaatcaaccaactg

SEQ ID NO: 82521 - DNA, 442 bp, Zea mays
ccgggccgacccacgacgtccagtcacttacactacactgatcagcatacactgcaaggatggcgacatggaggaggctagaaagctgttccgaaaaatggcacagaaaggggctacgcccactgttgtgacctacagtgttatgattcatgggtacgccacaaatgggaggatccatgaggctgaaaagttcatacagcacatggacaacaaagggtttgttccagatgtatacacctatgcatcgctatttcatgggcactgtgtcaatgggaacgtggatgtggcgctgaagctattcgaatagatgacgcacaggggaacggaacctaatgtcgtggcctatacagctctgatatcaggtctagccaacgaacggagatcagaggccgcattccaactgtatgatcatatgctgaaagctggattgagtccacatgac

SEQ ID NO: 82522 - DNA, 449 bp, Zea mays
actcatctaaccccattgaaaaatgaaattggattttcgggagaattttggaataaaagataaataaagaattgaatttgaaaaaaaaaaaaaaaaaaaaaaaaaaaaaaaaaaaaaaaaaaaaaaaaaaaaaaaaaaaaaaaaaaaaaaaaaaaaaaaaaaaaaaaaaaaaaaaaaaaaaaaaaaaaaaaaaaaaaaaaaaaaaaaaaaaaaaaaaaaaaaatttcttcaaaatgggggggggaaaaattttttttaaaaagggggggttccccccccttttggggaaaaattttacccccggggtcccccaggggaaaaagggggaaaaaaaaatttcccaaaccccccggggggccccccaaaaaggggaaaacccccaaaaaaaaaatttttttaaaaaattttaaaacttttttttccccccaaaaaaggggggccaaaatttt

SEQ ID NO: 82523 - DNA, 397 bp, Zea mays
atctctacctctacctaccggagcagggagcacgccacacgagccctttccgccgccgccaaaatggtgaacgttcctaagaccaagaagacctactgcaagaacaacgagtgcaagaagcacactctccacaaggttactcagtacaagaagggtaaggatatcctgtctgcccagggaaagcgccgttatgaccgcaagcattcaggatattgtggccagaccaagcctgtcttccacaagaatgccaagaccaccaagaaaatcgtgttgaagctgcagtgccagagctgcaagcactactcacagcacgcaattaagaggtgcaagcattttgagattggtggagacaagaagggcaagggaacatctctcttctaagtttctcatcgcccat

SEQ ID NO: 82524 - DNA, 392 bp, Zea mays
  unsure (1)..(392): unsure at all n locations
acaaccatctccaacgcagcaagcagacacagggacaggcaggcagcgagtgcaaccgcgagagcgatcagcgatgggctccttcttctcgaccttagtgacgccccctccgcccgccgccgacgacccgaactgcgccgtggtggccgcgcactccaaggccacctacgacgagcagtgggcggcccacaagagcagcagcaagctgatggtgatcgacttctcggcgtcctggtgcgggccctgccgcttcatcgagccggccttcaaggagctggcctcccgcttcaccgatgccatcttcatcaaggtcgacgtcgacgagctcgcggaggtcgcaaggacatggaaggtanaggcgatgccaacgttcgtgctggtcaaggatggga

SEQ ID NO: 82525 - DNA, 382 bp, Zea mays
acgcgtccaggcaagcaggtcggcgaggagggcaggaagaccgaagaccgagccgtgcgggggctcgggacgggaacgggacaggaccccacaatcccagatccttcctgcccgcccgcccgtgcccgtcgacgcgtcgttcttgccggccgcgccccacctccgccctctcctcctccagggggatcggatacgccacaggctgcgcgatggtgctgtgggtcttcggctacggctccctcatctggaaacccggcttcgacttcgacgacaaaatcctcggcttcatcaacggctacaagcgcacctttaatctcgcttgcattgaccacagacgcacaccggagcatccggcgaggagctgcacgcttgaaaccgacga

SEQ ID NO: 82526 - DNA, 431 bp, Zea mays
atcgacgacaaccccaccaacgtgcagctcccggggatgtacaacaaggaggacaacccccgcgtgcccatcatcgtcaccggcaacgacttctccacgctctacgcgccgctcatccgcgacggccgcatggagaagttctactgggcgcccacccgcgaggaccgcatcggcgtctgcaagggcatcttccgcaccgacggcgtcgacgaggagcacgtcgtccagctggtcgacaccttccctggccagtccatcgacttcttcggcgcgctgcgtgcccgggtctacgacgacgaggtccgacggtgggtgagcgagaccggcgtcgagaacatcgccaggaagctcgtcaactccaaggagggcccgcccacgttcgagcagcccaagataacgatcgagaagctcttggagtacggacacatgct

SEQ ID NO: 82527 - DNA, 426 bp, Zea mays
agcacccatctctattcttgagaatcatgagctggcgagcattgtgctggattacaaaagggagtgtggccgggatagtgtgctgcaatcacacacctctgtgcacacggattgcaacagtgagtctggagaaacaaccttgcactgtgagcatgtgctgagccttgaatcaggtccgaccatggtgaaggcccggaccatgtggaggcctaagagaaccaaggcccaagaaacagttgttccatcttcaatttgaattgtgtgagacgttcgggatggtgattttggcaacaaactactactatttggcaaaaagatcagaatggttactagcgtcctctattggaagcaagtcacacagggcgagacctaaactaatttaattatgaagtgtgaacaatagaggagatataaatagtgtgaaca

SEQ ID NO: 82528 - DNA, 404 bp, Zea mays
aaaaatatccccaaaccctagctcccgatctcgatggcgaaccctcgcgtctccttcaacatgaccgtcggcggcgccccggcgggccggatcgtgatggagctgtacgccaacgaggtgcccaagaccgcggagaacttccgcgcgctgtgcacgggcgagaagggcgtgggcaagtccgggaagccgctccactacaagggctccaccttccaccgcgtcatccccgagttcatgtgccagggcggcgacttcacccgcggcaacggcaccggcggcgagtccatctacggcgagaagttccccgacgagaagttcgtgcgcaagcacaccgcccccggtgtgctctccatggccaacgccgggcccaacaccaacggctcccagttcttcatctgcaccgt

SEQ ID NO: 82529 - DNA, 375 bp, Zea mays
aatcgacggtgccctcgtcgtcaacgtcggcgactttcttgagatcctgagtaatggaaaattcaccagcgttgagcacagggccgtggtacacccaaccagagagagaatgtcggcggcgctgttcctgtaccctcgccagaacatgagggttggtccattgccggagttcgtgaatggcggtaaagagcggtatggatcaacggattatgaggaatttatgaagcattactttgcaacgaagcttgacggaaggaagcacctagacagattgaagttggagcagtaggcagtagctatctctaccgtatctatctcgctggagggaccaataaataatttttctatgcgatatataataaatggcgaccacaa

SEQ ID NO: 82530 - DNA, 393 bp, Zea mays
accaagcgtccgcccacgcgtccgcaccctgggtgctgaggatgaactgaaggatgctgttggcctggttcgccaatttagtgttgccttcgaggtgatcactggtttcaggctgtacaagagcggagtttacactagcgaccattgtggaactacaccgatggatgtgaaccacgctgttctggctgttggctacggtgtcgaagatggtgtcccctactggctcatcaagaactcatggggcgctgactggggtgatgatggttacttcaagatggaaatgggcaagaacatgtgcggtgttgctacgtgtgcatcctaccctattgtcgcatgaaggccttacgaaatgttacatggtctgtttggcatcaataatgcatgtttaacctg

SEQ ID NO: 82531 - DNA, 440 bp, Zea mays
  unsure (1)..(440): unsure at all n locations
acgagaagatcctcgtcgaccacgaagaacggaggcgccttgctcaagcttccggcggcgagtttgtggcgactgacctcgtcgacgtgctgctgcagctcagcgaggagagcacgaagctggagtcggagtcggaggccaggctccctcgcgacggcgtcaaggccctcatccaggacatcatcgccggtggcacggagagctcggcggtgacgatcgagtgggccatggcggagcttctgcgacacccggaggccatggccaaggccaccgatgagctcgaccgcgtcgtaggcagtgggcgctgggtcgcggagcgcgacctgccggagctccactacatcgacgccgtcgtgaaggagaccctgcggtgcaccctgtcggcccgctcctcgtcncgcactacgcccgcgagcgcacggtggtggccggctacgacg

SEQ ID NO: 82532 - DNA, 427 bp, Zea mays
agcgttcgattcgcttgtgctgcagctagggtttagaggttttctgggcgcggagcgggaggcggcggcggctatggctgcggcggaggaggagatcgcggtgaaggagccgctggatctgatacgcctcagcctcgacgagcgcatctacgtcaagctccgatccgaccgcgagctgcgcggcaagctccatgcgtatgatcaacatttaaacatgatacttggagatgttgaagaggtcgtgacaactgttgagatagatgatgaaacatatgaagaaattgtgcgcaccacgaaacgcactatcccctttctttttgtccgaggtgatggtgtcatattggtttctccaccccttcgtacggcatgaagtttgaagttagatcatgctggttgttaattatgataactggtgtatttggccact

SEQ ID NO: 82533 - DNA, 430 bp, Zea mays
acccacgcgtccgcggacgcgtgggggctctggtcagattggcgtttcccgtgttcttcttcctcgcagcggcggagttcgcggcggggacgcggtcgccgtcggctttcgtacaaaacgccatctactccaaccgcatcaccatcttctccaagacttactgcccctactccatgcgtgctaagcacatatttcgagaccttaaggaagatccatatgttgttgaactagatacccgagtggatgggcgtgacattcaaagtgttctcctggacctagttgggcgtcgtactgtgccacaggtgtttgtcaatggacagcatattggtggctcagacgatacagtaaatgcgctttcaaatggacagctccagaaacttctcgggaagagtcagtcacaatgatgggtcgctggacaagcttgcactgt

SEQ ID NO: 82534 - DNA, 394 bp, Zea mays
gagccacgcgtcgaggggacccaacaacaaaaatcaaggacaagccggcaaccaaaaatcctgtggttgggaacccggcgaactttgccaatggcaaacttaaggaggaaatgttggccatcaggtttggttcggtagaaaactgcaagaagttcaaggagttggttgaggagatagctgagtcgcttacaaagaacgagggcaaggaaggtgaagatggtggttccacggctggattgctggcgaagctcactgtgagcgagggcaaatctgagggaagtggcaagtctgagtccactgattctggcaaagtgactgaaaccaaagccgacacagccccagctgagtagttggtgtggttgcacttgcacgcagattcgcctggtgctgaact

SEQ ID NO: 82535 - DNA, 408 bp, Zea mays
atctaatcgttggcttctgtacacggaacaagcaccttctgcatggctgaattttgcattgtgtggcttggtggggatcgtcacagcatatgcttttgtttggatttcgaagtattacacggattataaacacgagccagtccggcttttagctctttcgagttccacaggacatggaactaatattattgctggagtaagcttgggaatggaatcaacagcactaccagttctagtgataagtgttgccattatatcagcatattggctggggcagacctctggcttggtggacgagtctggcaacccaactggtggtctttttgggacagctgtagcaacaatggggatgcttagcactgcagggtatgttctcaccatggacatgtttggtcctatagctgacaa

SEQ ID NO: 82536 - DNA, 414 bp, Zea mays
aaatgaaggataaggacatgaagtgtataaagattgaagacatggaggctccagtattcaaggccttgctccatttcatgtattgggatgagttgccggatattgaagagcttactggtgtaaatacaacttgggtatccaccttgatggctcaacatttactagctgctgcagaccgttatgcattggagagattgaagttgctctgtgaacttaagctgtgtgaagatgttgcaataaatacagtggcaaatactttggcactggctgaacagcaccactgttatcagctaaaaactgtttgcttgaaatttgtagctttgcctgaaaatttgaaagctgtcatgcaaaccgatgggtttgattatttgcaacaaagctgcccatccctcctgaccgagcttctcgagtatg

SEQ ID NO: 82537 - DNA, 442 bp, Zea mays
aagcagccccgcgccaggaggaagtttgttcttttaacaatatgtcgagggaggagaatgtttacatggccaagttggctgagcaggctgaaaggtatgaggagatggttgagtatatggagaaggtggctaagactgtagatgtggaagagctcactgttgaggagcgtaaccttctgtctgttgcatacaagaatgtgattggggctcgccgcgcttcatggcgcattgtttcttccattgaacaaaaggaggagtcccgtaagaacgaagagcatgtgaaccttatcaaggaatatcgtggcaagatcgaggctgaactgagcaatatctgtgatggaatcttgaagctgcttgactcccacctagtgccttcatctactgctgctgaatcaaaggtcttctacctcaagatgaatggtgactatcacaggtatcttgc

SEQ ID NO: 82538 - DNA, 371 bp, Zea mays
agttccatttccccatctcccagatccaattcgcgagttctccctcctctgccgccatggcgctctctgtggagaagacctcgtctggacgggagtacaaggtcaaggatctctcgcaggcggacttcggccgcctcgagattgagctggccgaggtcgaaatgcccggcctcatggcgtgccgcgccgagttcggcccgtcgaagcccttcgctggcgctaggatctcggggtctctccacatgaccatccagaccgccgtcctcatcgagaccctcaccgcgctcggcgccgaggtccgctggtgctcctgcaacatcttctccacgcaggaccacgccgccgccgccatcgcgcgcgactcggccgcc

SEQ ID NO: 82539 - DNA, 402 bp, Zea mays
  unsure (1)..(402): unsure at all n locations
acttacacttcngcatctcccagatccaattcgcgagttctccctcctctgccgccatggcgctctctgtggagaagacctcgtctggacgggagtacaaggtcaaggatctctcgcaggcggacttcggccgcctcgagattgagctggccgaggtcgaaatgcccggcctcatggcgtgccgcgccgagttcggcccgtcgaagcccttcgctggcgctaggatctcggggtctctccacatgaccatccagaccgccgtcctcatcgagaccctcaccgcgctcggcgccgaggtccgctggtgctcctgcaacatcttctccacgcaggaccacgccgccgccgccatcgcgcgcgactcggccgccgtgttcgcctggaagggggagaccctccagg

SEQ ID NO: 82540 - DNA, 420 bp, Zea mays
agtttcgcgtccgcctcagcccgccgcaaggagaggtaagttcaggagacatcttcgagaagctgaaatggctcctaaagctgctcctgccaagaagggtgatgccaagacccaggccttgaaggttgccaaggctgtgaagtctggggcagccaagaagaagaccaagaagatccgcacgtctgtgacatttcaccgccccacgaccctgaagaaggctagggaccccaagtacccacgaatcagcactaccggaaggaacaagcttgatcagtaccaaattctcaagtacccccttaccacagaatcagcgatgaagaagattgaagataacaacactctggtcttcattgttgacctcaaggcagacaagaagaagataaggctgccgtcaagaagatgtatgacatccaggcaaag

SEQ ID NO: 82541 - DNA, 443 bp, Zea mays
actctctctaccgtccgataccccaagcaccagcgcggcggcggcgaccatggctgtcggaaagaacaagaggatctccaagggaaagaagggtggcaagaaaaagaccgtcgaccctttctctaagaaggattggtatgacatcaaggcaccgtcggtgttcagtgtgcgcaacatcgggaagactctcgtatccaggacacagggtaccaggattgcttctgagggtctgaagcacagagtctttgaggtttgcctagctgatcttcagggcgacgaggatcaagcttacaggaaaatcaggctccgtgctgaagatgtgcagggcaggaatgtgctcacaaacttttggggtatgaattttaccactgataaactgagatccctagtgaagaagtggcagacattaatcgaagcccatgttgatgtcaagacaaccgaca

SEQ ID NO: 82542 - DNA, 396 bp, Zea mays
agcagcagaggcagcgacacgatcgcgagcgcacgcacgtaagcacgttgtcggaagctcaagttagaagaaccaccattgactgatcaatggcggcccaggctctcctctccggccggaacctgctgggccgccccgtgcagtcggccgtctctaggtcgtcggcgaggaaggcgcccttcgtcgtcagggccagctccagccctccagccaagcaaggttccgacaggcagctgtggttcgcgtccaagcagtccctctcctacctcgatggcacgctgcccggcgactatggcttcgacccgctgggcctctcggacccggagggcaccgggggcttcatcgagcccaagtggctggcctacggcgaggtgatcaacggccgctacgccatgc

SEQ ID NO: 82543 - DNA, 447 bp, Zea mays
aggagaccaacaagcaacatagaaagtggaatccagtagcaacaatagagcaacaatggcgaccaagatattttccctccttatgctccttgctctttctgcatgtgttgctaacgcgacaattttccctcaatgctcacaagctcctatagcttcccttcttcccccataccttccatcaatgatagcttcagtatgtgaaaacccagctcttcaaccctataggctccaacaagcaatcgcagcaagcaacatacctttatcacccttgtttcaacaatcgccagccctatctttggtgcagtcattggtacaaaccatcagggcacagcagctgcagcaactcgtgctacctgtgatcaaccaagtagctctggcaaacctttctccctactctcagcaacaacaatttcttccattcaaccaactgtctacattgaaccgtgc

SEQ ID NO: 82544 - DNA, 434 bp, Zea mays
cccacgcgtccgcaccactccgcgctagctgaggacggtacagcggcacagaggtgcgacgtacgacgacgacgacgcaggcgccacacatggcatcccagctctccgccgccgtgccccggttccacggcctccggggctacgccgcgcccaggtccgcggtggcagcgctgccgtccgtgagggtgggcaggaagaggtcgtcgtcgcagggcatccgctgcgactacatcggctccgccaccaacctgatcatggtgacgacgacgacgctgatgctgttcgcggggcggttcgggctggcgccgtccgcgaaccgcaaggcgacggcggggctgaagctggaggcgcgcgactccggcctgcagacgggtgaccccgccgggttcaccctcgccgacacgctggcctgcggcgccgtcggccacatcctc

SEQ ID NO: 82545 - DNA, 444 bp, Zea mays
aaggcgggccggcgcagctgccccgggaagagcctcgccatggccaccgtggccttctggctcgcgacgctgctgcacgagttcgagctgctcccctcgcccgtcgacctgtcggaggtgctcaagctgtcgtgcgagatggccgtcccgctggcgctggccgtgacggcgaggccccggcaagcggttcagaagtcggttggggtatcagtctcactgtgagcaatagcatggcgggctggcgctactgtacatggaaagtgcttctgcttgcaggttgctactactcggtcgacatgggtatatgcttttcatgttactgtctttgatgtgtatcgatcaggtgccgaatgtgatactttggcttgtactgttagctcttttcctgggtgctcttttctttccttttcttagtactcgctgttagactcgtcaaatgtatat

SEQ ID NO: 82546 - DNA, 391 bp, Zea mays
acccacgcgtccgaaagaggccaaaagggaggggagagtgtcgtcatggcttccattgtcgcttccaggagggccgttcctctagttcgcgctctggagaagctcatcgcagcgtcctccgctcccgggactggctccgccctcaggccggtggcagtcgccggcggcctccgcggctacaacaccggcgctccgctccgacgctacgagggggccgagtcggaagacgatagcgtccgcgagtacgatgggcggcacggcggccgggactacgctgtgcccagcctgttctcagatattttccgtgatccgcttagtgcgccgcacagcattggccgcctgctgaaccttgtggacgacttggcggtggcggcgccaggtcgtgcggtgc

SEQ ID NO: 82547 - DNA, 429 bp, Zea mays
atgcaattgtatctttaattgagtcactgaggaatgataccgtttcggaggaagctgctggtgctctggctctgctgatgaagcagcctagcatcgtgcaccttgttggtagctctgaaacagtgatcactagccttgttgggttaatgaggcgtgggactccaaagggcaaggagaacgcagtgtcagctttgtatgagatatgccggagaggtggatcgacattggcacagcgcgtggcaaggatacccgggttgaacacggtaatgcagaacatcacgctcactggaacgaagcgtgccaagaagaaggcaagcctgatcgtcaagatgtgccaaaagaaagcaaatgccatcggcgctggcgctaggaagtaccttggcagtggtggatcattcgttggtagggaacagcagattgaggcgcgct

SEQ ID NO: 82548 - DNA, 424 bp, Zea mays
acccacgcgtccggaagattggggtcaaaacggtatccggcttgcacaagaattcagttcttgaaaattttggagtcaaaatccgtgcaattcaagattattctctacaattcaaagatattgtgcactgccgtgcggaaattagggattttgatgcttttgatttgcgattgaggcttcctgctgtggttagcaaattgcacaaacttatcaactgtaatggtggtgtaacatatatacattgtactgctggacttggaagagctcctgctgttgcattggcttatatgttctggattcttgggtacagtctcaatgaaggacatcggctgctacagagtaaaagggcttgctttccgaagttggaagccattaagttggcaactgctgacattctgacaggattatccaaaaacacaatcac

SEQ ID NO: 82549 - DNA, 429 bp, Zea mays
ggccgcactctcgcggactacaacatccagaaggagagcacccttcaccttgttctccgcctcaggggtggtatgcatatctttgtgaagaccctgactggaaaaaccataaccctggaggttgagagctcggacaccatcgacaatgtgaaggcgaagatccaggacaaggagggcatccccccggaccagcagcgtctgatcttcgccggcaaacagctggaggatggccgcaccctagcagactacaacatccaaaaggagagcaccctccaccttgtgctccgtctccgtggtggtcagtaagtcatgggtcgtttaagctgccgatgtgcctgcgtcgtctggtgccctctccatatggaggttgtcgaagtatctgctgttcgtgtcagtgttggtttaataatggaccggttgtgttgtgtg

SEQ ID NO: 82550 - DNA, 435 bp, Zea mays
  unsure (1)..(435): unsure at all n locations
acggacgcgtgggctggctaggcggcttctcttcactcacctgcagagtgcaccgcaataatcagcttccggatggtggcgttttgtcagttttggatggaaatgccgaactggcagcgtctgttttccctatgcatatgtaatttcctgcctctttatattcactcttgttgtcaagtccaagtagttcgccgacgagaacaagcccgccggactggtcaagctgaacccggcgagcgagtacccgcccggcctggaagacacgctcatcctcaccatgaagggcatcgccgccggcatgcagaacactggctacgcggcttctcttcactcacctgcagagtgcaccgcaataatcagcttccggatggtggcgtattgtcagttttggatggaaatgccgaactggcagcgtctgtnttccctatgcatatg

SEQ ID NO: 82551 - DNA, 331 bp, Zea mays
acggacgcgtgggcaacgtcgtgttcgacgaagacgaggtgccgagcggcgtcgacgcctccaagatctcgcaggaggagtacctcaacgcgccaggcgagacctactccgtcaccctcaccgtgccgggcacctacggcttctactgcgagccgcaccaaggagcaggaatggtcggcaagatcacagtcaactaaagctagctatccattccatgcatctcgatctgtatgtactccgcccgtcgatggatgatgcatccatctctacttgttttcctcacatgtacaacaattaatgcaacaaattaagtacgtaaaaaaaacaccaa

SEQ ID NO: 82552 - DNA, 427 bp, Zea mays
  unsure (1)..(427): unsure at all n locations
acagagatgcaagcccgggccatttttgaagctgctatagcaatgaccaaccaaggtgttcaagtgttcccagagataatggttcctcttgttggaacaccacaggaactggggcatcaagtgactcttatccgccaagttgctgagaaagtgttcgccaatgtgggcaagactatcgggtacaaagttggaacaatgattgagatccccagggcagctctggtggctgatgagatagcggagcaggctgaattcttctccttcggaacgaacgacctgacgcagatgacctttgggtacagcagggatgatgtgggaaagttcattcncgtctatcttgctcagggcattctccaacatgaccccttcgaggtcctggaccagaggggagtgggcgagctggtgaagcttgctacagagaagggcc

SEQ ID NO: 82553 - DNA, 405 bp, Zea mays
aatatccccaaaccctagctcccgatctcgatggcgaaccctcgcgtcttcttcgacatgaccgtcggcggcgccccggcgggccggatcgtgatggagctgtacgccaacgaggtgcccaagaccgcggagaacttccgcgcgctgtgcacgggcgagaagggcgtgggcaagtccgggaagccgctccactacaagggctccaccttccaccgcgtcatccccgagttcatgtgccagggcggcgacttcacccgcggcaacggcaccggcggcgagtccatctacggcgagaagttccccgacgagaagttcgtgcgcaagcacaccgcccccggtgtgctctccatggccaacgccgggcccaacaccaacggctcccagttcttcatctgcaccgtcgcg

SEQ ID NO: 82554 - DNA, 447 bp, Zea mays
gtacaggtctagaagtcccgggcccacgtccacgcccccaacacgcccacaacccgaagcagcgaaagctcccctaaccctctccgcgcatccgatcgcaaggaagaagagggagatgagctactacgggcagcagccccccgtcggcgtcccgccgcagcaaggctacccgggcaaggacggctacccgccagcggggtacccgccggccggctaccccccgccggggcagggctaccctccgcagggctacccgccgcagtacgcgcagccgcctccacagcagcagcagagcagcgggccttccttcatggagggatgcttggctgccctctgctgctgctgcctcctggacgcctgcttctgagagtgagaggggccgaccgacggattcgacacggcgacaagtgaaactactagctttctatgcgagggagatagatagag

SEQ ID NO: 82555 - DNA, 435 bp, Zea mays
acccacgcgtccggggtgatggagaaaaaagttgtgaagacattgatgaatgccaagagaaactttattgtcagtgcaagggttgcagctgcaagaatacgtggggaagctatgaatgcagctgtggtgatgacaatatgctatacatgagagagcatgacacttgcatcagcaaagagggaactgccactactgttggctggagcttcctctgggttattttctttggacttgtttttgccggggttggagcatacgctgtgtacaaatacaggctgcggagttacatggattcagagatccgtgccatcatggctcagtacatgcctctggataaccaagaaggagcaaaccagcatcaggtcgtgcacgccaatgatatctgaagctgcactccttttctgaagcagaaataaaaggggcgtgcaacatttc

SEQ ID NO: 82556 - DNA, 427 bp, Zea mays
agcacctctgttgttaccacttgcatccctattgttgaagctttgaaattttagctgtattttctttgcaaattctatttacaattaaatatcacaagcttaattgattagttttgcatgtcgggacatcttaaatcgaataagttgttgttttgttactacaatgcgaccttgatttttacaggtgagagcaagagctgcggacctcaatttgtcacctacttctgatatcaacttattggagagccgtgatatccacatacattttcctgctggtgctgtgccaaaggatggcccttctgcaggtgtgacattggtaacggcactagtgtcgctttttagtaacagaaaagtgagagcagatactgctatgactggcgagatgactctaaggggccttgtattgccagttggtggtgttaaagac

SEQ ID NO: 82557 - DNA, 430 bp, Zea mays
ggctgcagtatattctgtgagaatggcatggggtcaaggtgctaagaggtccatactagggcttctctttcgttctcagcaccaaactgctcgggcatactcttcttcagcattccagactcaccaattgagcactcatgttccccaagatggagtgtttattaggagattcggctctgaggtgtcttcttcagagcaaatgaaccttattaagcaactcagacaaagaacgagtgctccaatcaaagatgtcaaggcctctctagttacctgcaactgggatattgaggctgcacagaaggacctaaggaagagaggtgttgctcttgctgccaaaaagtcttcacgcactgctgctgaaggtttgctagctatcgcacaagatgacaaaagggctgctgtagttgagcttaactgtgaaactgatttc

SEQ ID NO: 82558 - DNA, 426 bp, Zea mays
ccgacccacgagtccgcagcaaacaacaaacaatggcaccgaggctagcgtgcctcctagctctggccatggcagccatcgtcgtggcgccgtgcacggcccagaactcgccgcaggactacgtggacccgcacaacgcggcgcgcgccgacgtgggcgtcgggcccgtgtcctgggacgacaccgtggccgcgtacgcgcagagctacgcggcgcagcgccagggcgactgcaagctgatccactccggcgggccctacggcgagaacctcttctggggctccgccggcgccgactggtcggcgtccgacgccgtgggctcctgggtgtccgagaagcagtactacgaccacgacaccaacagctgcgcggaggggcaagtgtgcggccactacacgcaggtggtgtggcgcgactcccacgcat

SEQ ID NO: 82559 - DNA, 428 bp, Zea mays
aattggaacaaaccatcagggcacaacagctgcagcaactcgtgctaccagtgatcagccaagtagctctggcaaacctttctccctactctcagcaacaacaatttcttccattcaaccaactgtctacactgaaccctgctgcttatttgcagcaacaacaactactaccattcagccagctagctactgcctactctcagcagcaacaatttcttccatttaaccaattcgccgcactgaacccctctgcttatttccagcagcaaatactactaccatttggccagctagctacaacaagccccgcttccttcttgacacaacaacaattgcttccgttctaccagcagtttgtggctaaccccgcaacccttttacaactgcaacagttgctgccctttgtccaacttgctttgacaaaccca

SEQ ID NO: 82560 - DNA, 410 bp, Zea mays
  unsure (1)..(410): unsure at all n locations
tccatcgatcgctagctagctgacgaccatggcgtccctctcctctgccgccatcaccgccccttccttcacgggcgcgcccgctcgcgcaatggtcaacaagaggtccttcaacgtgcgtggctccctccgcaagggcactggcaacggcgccgtgggcgttgccgccagcctcctgctttgcggccgccgccgcaatggccaagaggtgctgctgggcgcaagccacngcgggctcgtcttcgagcccagccagttcaccgtcaaagccggcgacaccatcaccttcangaacaacgccggcttcccgcacaacgtcgtgttcgacgaagacgaggtgccgagcggcgtcgacgcctccaagatctcgcangaggagtacctcaacgcgccaagcgagacctactccg

SEQ ID NO: 82561 - DNA, 397 bp, Zea mays
gtgaacctgaaacttgcggtgtcactggctggtatagcctgagtgtgagtgagtgatcgagctagctgagctccgatcctcgctagctagctaggataccgccataccacaagtcttcttcacaagtttaggagtgacagcaacaagagatctcgatggcctctgccaccgtgctcaagtcctccttccttcccaagaagtccgaatggggcgccaccaggcaggccgccgcgcccaggccgcccaccgtctccatggtcgtccgcgcctccgcctacgccgatgagctcgtgaagaccgcgaaaacgatcgcgtcgccggggcggggcatcctggcgatggacgagtcgaacgcgacgtgcgggaagcggctggcgtccatcgggctggagaacac

SEQ ID NO: 82562 - DNA, 417 bp, Zea mays
cggacgcgtgggcaaggagatctccaagagcaacgtggtggatgacatggtctcaagcaatgccattctctatgggcccggcgagcatcccgatcatgttgttgtcatcaagtacgtgccgtacgtgggagacagtaagagggctatggacgagtacacatcagagatcttcatgggcggcaagagcaccatcgtgctgcacaacacctgcgaggactcgctcctcgccgcgcctatcatccttgatctggtgctcctggctgagctcatcaccaggatccagctaaaacctgagggaacggacaagttccactcctttcacccggtggccaccatcctaagctacctcaccaaggcaccactggttccccctggcacaccggtggtgaacgctctggcaaagctagaggcgatgct

SEQ ID NO: 82563 - DNA, 429 bp, Zea mays
agtgcttatggattatggctagtatctgttatctgcgaggtctggtttgccttgtcttggcttctagatcagttcccaaaatggtatccaatcaaccgtgagacatatcttgacaggcttgcattgaggtatgatagagagggagagccatcacagctggctcccattgatgtcttcgtcagtacagtggatccattgaaggaacctccactgatcacagccaacactgttttgtccattctttctgtggattaccctgttgacaaagtgtcatgctatgtttctgatgatggttcagctatgctgacttttgagtctctctcagaaaccgcagaatttgctagaaagtgggttcccttttgtaagaagcacaatattgaaccaagagctccagaattttactttgctcaaaaaatagattacctgaag

SEQ ID NO: 82564 - DNA, 409 bp, Zea mays
agagcttcatacttggtctcttgttaaactattgacaatgtatcttgttttttgttgaaaagtttagtacttgagtgtcaatcatacgtattcgcttgctaaactattgacaatgtatcttgttctttgttgaaaagtttagtacttgagtgtcaatcatatttcagagtcattgtgatatactgagcttggaggttttggccattgatctgcagaagttcaatacaattggaagaataagttaaaaaaaacgtggtccaaagtaaccttcagcagtaatgtttgtgtgctaaatgctcttccggagaattgtggtgatgcaaaccttgtaccaatgaatatactgtcaatctgctatcttttccgtggcctctaactcttagagtgtgtttggtttgagttgaggaat

SEQ ID NO: 82565 - DNA, 429 bp, Zea mays
gacccacacgtccacgcttcatacttggtctcttgttaaactattgacaatgtatcttgttttttgttgaaaagtttagtacttgagtgtcaatcatacgtattcgcttgctaaactattgacaatgtatcttgttctttgttgaaaagtttagtacttgagtgtcaatcatatttcagagtcattgtgatatactgagcttggaggttttggccattgatctgcagaagttcaatacaattggaagaataagttaaaaaaaacgtggtccaaagtaaccttcagcagtaatgtttgtgtggcaaatgctcttccggagaattgtggtgatgcaaaccttgtaccactgaatatactgtcaatctgctatcttttccgtggcctctaactcttagagtgtgtttggtttgagttgaggaattacttcat

SEQ ID NO: 82566 - DNA, 426 bp, Zea mays
acccacagcgtccgcggggaactttccagcctgattgatcttgacttgcgtgcaaaccagctaaagtctcttcctacatcatttggaaatctcacgagcctcgccaatcttgacctgagctcgaatctgttgaaggtccttcctgattgtttaggaaagttgaaaaacttgagaaggttaattgctgagacgaatgagcttgaggagctaccctatactattggatcgtgcacctctctcgtggagcttagactggattttaatcagctcaaagccctcccagaagccattgggaagttggaaaacctggaaatcctgacgttacactacaacagaatcaaaggcctgcctacaacaattggccatcttaccaggttgagggagctggatgtcagtttcaacgaagttgagactatacctgagaac

SEQ ID NO: 82567 - DNA, 410 bp, Zea mays
atagcagcactcaagatggttggtgggaccctggcagagcagacttatttgttccttggtgctggggaagctggaactggtattgcagaacttattgctcttgagatttcgaaacagacgaatgctccaattgaagagtgccgcaagaaggtttggctggtggactcaaagggtttgattgttgactctcgtaaaggctctcttcagccattcaagaaaccttgggcgcatgagcacgagcccttgaaaaccttgtatgatgctgttcagtccatcaaacctacagttctgatcgggacatctggagttggaagaacattcacaaaagaaatcattgaggccatgtcttccttcaacgagaggcctatcatcttttcactgtcaaacccaacctcgcattctgaatgcac

SEQ ID NO: 82568 - DNA, 422 bp, Zea mays
tgtcaattaggtggtctttggacttttgtcgctctccatggagcttttgcactaataggtttcatgctacgtcaatttgaacttgctcggtctgttcaattgcggccttataatgcaatttcattctctggtccaatcgctgtttttgtttccgtattccttatttatccactgggacaatctggttggttctttgcgccgagttttggcgtagcagctatatttcggttcatccttttcttccaaggatttcataattggacgttgaacccatttcatatgatgggagttgccggagtattaggcgcagctctgctatgcgctatccacggggctaccgtagaaaacactctattcgaagatggcgatggtgcaaataccttccgtgcttttaacccaactcaagctgaagaaacttattc

SEQ ID NO: 82569 - DNA, 418 bp, Zea mays
gacccacgagtccgtgtcaattaggtggtctttggacttttgtcgctctccatggagcttttgcactaataggtttcatgctacgtcaatttgaacttgctcggtctgttcagttgcggccttataatgcaatttcattctctggtccaatcgctgtttttgtttccgtattccttatgtatccactgggacaatctggttggttctttgcgccgagttttggcgtagcagcgagatttcggttcatccttttcttccacggatttcataattggacgttgaacccatttcatatgatgggagttgccggagtattatgcgcagctctgctatgcgctatccacggggctaccgtagaaaacactctattcgaagatggcgatggtgcaaataccttccgtgcttttaacccaactca

SEQ ID NO: 82570 - DNA, 423 bp, Zea mays
aaaggacccaggggctgctatgatgcttgcggagctagcaatggaagctggtttgcctaagggtgttttgaacatcgttcatggcaccaatgatgttgtcaataatatttgtgatgatgaggatattaaggctgtatcttttgttggttccaatacagctggtatgcatatttattctagggcatctgcagcaggcaagcgtgttcagtgcaatatgggagcaaagaatcatgcaattatccttcccgatgctgatagagatgctacattgaatgcccttattgctgctggatttggtgcagcagggcaaaggtgcatggcattgagcactgctgtttttgttggcggttcagaatcatgggaggatgaattagtcaaacgtgcaagtggccttgttgttagttcaagaatggttaatgatgc

SEQ ID NO: 82571 - DNA, 420 bp, Zea mays
actcactcactcgggagtcgggtcctcctcgactcagctcctccacaaacaaagccaccaccatcccaacccaaacacatcggccgaccacgggcgccgccatgtccaccgctgacgcggcgagcccggccctggcgccggactgggacgcgccggcgggcgaaggcctggccctggcccagttcgccgcgggctgcttctggagcgtggagctggtgtaccagcgcctcccaggcgtggcgcgcacggaggtggggtactcgcagggccaccgccacgcccccacctaccgcgacgtctgcggcaacggcacgggccacgccgatgtggtccgcgtgcactacgaccccaacgcctgcccctacgacgtcctcctcgacgtcttctgggccaagcacaaccccaccactctcagcagac

SEQ ID NO: 82572 - DNA, 429 bp, Zea mays
agcacaccaaggagagtacgtggaggagcagccatggcttcatcggtggccgccgcggcgagcacattcctgggcacccgcctggcggacccggcgccacagaacgggcgcatcgtggcccggttcgggttcgggttgggcggcaaggcgaagcctgctccgaagaaggtggcgaagacatcgacctcctctgaccggccgctgtggttccccggcgccgtggcgcccgactacctggacggctcgctggtcggcgactacgggttcgacccgttcggtctcgggaagcccgtggagtacctgcagttcgagttggactcgctggaccagaacctggccaagaatgaggccggcggcatcatcggcaaccggttcgagtcctccgaagtcaagtccaccccgttgcagccctacagcgaggtgttcggc

SEQ ID NO: 82573 - DNA, 436 bp, Zea mays
acccacacgtcaggtcaaagggaagcagcacctatattggcaagctaagatcaaacttccttggaacatagttcactgtctatgatgctcatccaccatatgatggagctgcggtctcaaagagtcgctctgcacgtgtggttggtttgaagcaggtctcccctagagttccggctggaaattatcccgtttcacatatttcttacgagctgaatgttctgggctccagaggtccacgaaggatgaactgtgttatggattccatccctgcattaactgttaaggaatgagggaaaactcctacacagactgaatttccacttagcagccttgactctttcccatcatttccattcttcacatctaaatcagctcggatagacagttcaacgtcgaaatcatccagtcagagggaagataggttggtgctgaagaa

SEQ ID NO: 82574 - DNA, 363 bp, Zea mays
agattttcagcattcaaaaacacaccaagcgaagcgcactagcaacgacctaacaccaatggctaccaagatattagccctccttgcgcttcttgcccttttagtgagcgcaacaaatgcgttcattattccacagtgctcacttgctcctagtgccagtattccacagttcctcccaccagttacttcaatgggcttcgaacatccagccgtgcaagcctacaggctacaactagcgcttgcggcgagcgccttacaacaaccaattgcccaattgcaacaacaatccttggcacatctaaccctacaaaccattgcaacgcaacaacaacaacaacagtttctgccatcactgagccacct

SEQ ID NO: 82575 - DNA, 414 bp, Zea mays
ccgggcagacccacacgtcaacccacgcgtccgcccacgcgtccgcccacgcgtccgcgcctcgggtcaaaccctaagcagggagttgatttatccgctgcagccatgagtaagttgcagtctgagtctgtcaaggatgccatctcccagattgttggggatgccaaggagaagaataggaagttcactgagactgtggaacttcagattggtctgaagaattatgatccacagaaggacaagcgtttcagtggctctgttaagttgccccatatccctcgtcccaagatgaaggtgtgcatgcttggtgatgcccagcatgttgaggaggccgagaagatgggacttgactacatggatgttgaggctctcaagaaaatgaacaagaacaagaagcttgttaagaggcttgcc

SEQ ID NO: 82576 - DNA, 427 bp, Zea mays
acgtcagacctttcttccctggttaccgcccgcagttctacatgaggacaaccgatgtgacagggaatgtgactgtgattatgaatgacaaagatgaggaggcgaagatgtgcatgcctggtgaccgtatcaagatggttgttcagctcatccagcctgttgcttgtgagcagggtatgaggtttgctatccgtgagggtggtaagactgttggtgctggtgtcatcaacaaaatcattgagtaaactggatatatcacatccaccacgagaattttccttgtttactcaaagcgaaatgctctgtagttgttattatgtgttgagttttaggggttgttcatgtgaaattgtagtatgacactctttcgccaagtgaatttgcataatttatgacattcacgacaaagatacacttatctggttgc

SEQ ID NO: 82577 - DNA, 427 bp, Zea mays
aggcgtcgtcaccaacctatacaagcccaaggagccgtacgtcggcaggtgcctcctcaacaccaagatcaccggcgacgatgcgccgggggagacgtggcacatggtcttcagcaccgaaggcaagatcccgtacagagagggccagtccatcggcgtcatcgccgatggcgtcgacaagaacggcaagccgcacaaggtcaggctctactccatcgccagcagcgcgatcggcgacttcggcgactccaagacagtctcgctgtgtgtcaagaggctcatctacaccaacgatgccggagagatcgtcaaaggagtctgctccaacttcttatgtgatcttcagccaggtgataacgtccagataacaggaccagtcggcaaagaaatgctgatgcccaaagaccccaacgctaccattataatg

SEQ ID NO: 82578 - DNA, 326 bp, Zea mays
cccacgcgtccagtacaaggcaattgagggtttccttgctggaaaaaacccaggacaagatctatttgacaagattgatacatctaggctaaatgctcacttgaaggatctaatgcctgggctcactgcaaaagtgttccgtacatataatgcttccataacattggacggaatcttgcatgaagaaacagaagatggaactgttttagaaaaaatcgctgtctatcagcgggcaaacaaagaggttgccatcatctgtaaccatcagcgtagtgtctcgaaatcacatgagtcccagatgactagaatgaacgaaaagattgatg

SEQ ID NO: 82579 - DNA, 371 bp, Zea mays
aggaaaccgatcgacaccatgacggtgttgctcgttgccctcgctctcttggctctcgctgcgagcgccacctccacgcatataaccggtggctgcagctgccagccaccgccgccggttcatctaccgctgccggtgcatctgccacctccggttcacctgccacctccggtgcatctcccaccgccggtctatctgccgccgccggtctacctgccaccgccggtccatgtgccgccgccggttcatctgccgccgctaccatgccactaccctactcatccgccccggcctcagcctcatccccagccacacccattcccgtgccaacagccgcatccaagcccatgcctgctgcagggaacctgcgg

SEQ ID NO: 82580 - DNA, 398 bp, Zea mays
  unsure (1)..(398): unsure at all n locations
acgtcagggagtgtcgactctagtgatgctgaaaaccctgggaacaacctgtatgtgactggtttgtcggctcgtgtaacggatcgagatctggagaagcacttctccactgagggtgaggtgattgatgcaagcgttgtgtatgatccttggacaagggaatcacgggggtttggttttgttaccatggctgctgttaaagatgcagatcgctgcatcaaatatctggaccgttctgtgttgcaaggtcgggtcataactgttgagaagattttgttgacagcaacagggtagatgttggtagctgctctgcatcaaactgatacaacctaacaccaaaccatgccaacctcagccaaatggcacagacaagacgaggtanaaccccaacacctggg

SEQ ID NO: 82581 - DNA, 339 bp, Zea mays
acgtcagctcttgcgattcgctcgctcgatcctagcttctcttccaagatgcgcagcgcccatggccatggccacgcaagcctccgccgccacgcgccacctgctggccgccgcctgggcgccggcggcaattccgcggcagctgagctcgcagctcgcgctgccgtcgtcgtcctcccgcgggccggccccgctccgcgcgtccacctttgaggcggtggcggctcttaaggggttcgtggtcccgcaggtggactccatcacgctgtccccgatcttcggctgcagcacgggcgggctgctctcccaggtgcatgtgttggagttctacgtcatcac

SEQ ID NO: 82582 - DNA, 398 bp, Zea mays
ctccaacctggcgggcagccgcaacccgagcctggactacgggttcaagggcaccgagatcgccatggcgtcctactgctccgagctccagtacctggccaaccccatcaccaaccacgtccagagcgcggagcagcacaaccaggacgtgaactccctcggcctcgtctccgccaggaagaccgccgaggcggtggacatcctcaagctcatgtcgtccacgtacatggtcgcgctgtgccaggccgtggacctgcgccacctcgaggagaacctcaagagcgccgtcaagagctgcgtgatggcggtggccaggaaggtgctgaccaccagcctcggcggcgacctccacagcgcgcgcttcagcgagaaggtcctgctcaccgccatcgaccgcg

SEQ ID NO: 82583 - DNA, 413 bp, Zea mays
acccacgcgtccgcattaccataggctcattcatcgaaacgcaaatcagagagacaggaaaagaaaaaagaattttgatcaaatcaatagaaggaaggatcccttacctgatttgaatttcatcctcctttaaataggatatgctctaagtcttcccatactttcctataatgactgcaacgattttctccattttgcgaattcctattttatttgaagtatattactatcatatacattatctaaatcgatccactttaaataaaatagaaaaaatcgaaagaaaaaaaaaaaagaaagagtaaataataaaacaggatattctgtttcataattctgaaatagagttcttttttttagtattactcctcattaggatgtatatattaatcatcctattttaatatatatta

SEQ ID NO: 82584 - DNA, 390 bp, Zea mays
agcggacgcgtgggcccgttccatttccccatctcccagatccaattcgcgagttctccctcctctgccgccatggcgctctctgtggagaagacctcgtctggacgggagtacaaggtcaaggatctctcgcaggcggacttcggccgcctcgagattgagctggccgaggtcgaaatgcccggcctcatggcgtgccgcgccgagttcggcccgtccaagcccttcgccggcgctaggatctcggggtctctccacatgaccatccagaccgccgtcctcatcgagaccctcaccgcgctcggcgccgaggtccgctggtgctcctgcaacatcttctccacgcaggaccacgccgccgccgccatcgcgcgcgactcggccgccgtg

SEQ ID NO: 82585 - DNA, 409 bp, Zea mays
aaaaaatatccccaaaccctagctcccgatctcgatggcgaaccctcgcgtcttcttcaaaatgaccgtcgggggcgccccggcgggccggatcgtgatggagctgtacgccaacgaggtgcccaagaccgcggagaacttccgcgcgctgtgcacgggcgagaagggcgtgggcaagtccgggaagccgctccactacaagggctccaccttccaccgcgtcatccccgagttcatgtgccagggcggcgacttcacccgcggcaacggcaccggcggcgagtccatctacggcgagaagttccccgacgagaagttcgtgcgcaagcacaccgcccccggtttgctctccatggccaacgccgggcccaacaccaacggctcccagttcttcatctgcaccgtcgcg

SEQ ID NO: 82586 - DNA, 420 bp, Zea mays
actctatctttacctatggcggtgagacgtttcgtggaacaggacaacaccaagaaaccaatcttattagacgacctgacggaactcacatcacaaaactttgatttgtttagatcaaatgtcgactcggtgatcgatagaggtgcttgaaatggtgcgggccttgcaaagtgatggctccgaaattccaggagatgtctgagaagaacctggatgttgtgttcctgaagctcgactgcaaccaggacaacaagccgcttgcgaaggagctgggcataaaggttgtgccaacgttcaagatcctcaagggtgggaaggtcgtgaaggaggtgaccggcgccaagatcgacgagctagcgcaagccatcgacacagtcaagtcagactgacaaagaaagcaagtgatgcaactagctagtg

SEQ ID NO: 82587 - DNA, 417 bp, Zea mays
agaacgcggcgttccgcaaggccgccgccggcccgctgcagggcatcctggatgtctgcgacgtgccgctcgtgtccgtcgacttcaggtgctccgacgtgtcctgcaccatcgacgcgtcgctcagcatggtcatgggcgacgacatggtcaaggtcgtcgcctggtacgacaacgagtgggggtacagccaacgcgtggttgatctggcgcacctggtggcggccaagtggcccggcgccgcggcggccggcagcggcgaccctctggaggacttctgcaaggacaaccccgagaccgacgagtgcaaggtgtacgaagcatgaggccagggttctttccacgacgaaacgtacagcacgggcgcgagggttctttccatagagaattatatacagattattcgcccaaagagac

SEQ ID NO: 82588 - DNA, 422 bp, Zea mays
  unsure (1)..(422): unsure at all n locations
agcccacgcgtccgcccacgcgtccgccgaggcggggatgacgagcccaatggtggccaccccggtccagttccacacaaccggccgcctcagcttctgctccttttcctttcccagcgcatcagggaggcggcgattcgcggcggtgagggcgtccgcggagacgatggcgacggagaagctgggcatcaaggtggagcgcaacccgcccgagtcccgtctctccgagctcggcgtccgccagtggcccaagtgggggtgcgagaagagcaagttcccgtggacctactccgccaaggagacgtgctacctgctgcaggggaaggtgaaggtgtaccccgaaggccacggngaggagttcgtggagatcggcgcgggagaccttgtcgtcttccccaagggcatgagctgcacctgggacg

SEQ ID NO: 82589 - DNA, 416 bp, Zea mays
  unsure (1)..(416): unsure at all n locations
gacccacgcgtcaaaatccagatcagcaaagcggcagtgcgtanagaggatcgtcgaacagaacagcatgaagatggtcatcgttctcgtcgtgtgcctggctctgtcagctgccagcgcctctgcaatgcagatgccctgcccctgcgcggggctgcagggcttgtacggcgctggcgccggcctgacgacgatgatgggcgccggcgggctgtacccctacgcggagtacctgaggcagccgcagtgcagcccgctggcggcggcgccctactacgccgggtgtgggcagccgagcgccatgttccagccgctccggcaacagtgctgccagcagcagatgaggatgatggacgtgcagtccgtcgcgcagcagctgcagatgatgatgcaccttgagcgtgccgctgccgcca

SEQ ID NO: 82590 - DNA, 416 bp, Zea mays
acccacgcgtccgcccacgcgtccgcgatctctttgatcgcctgagccatgcatgccatggtccagttcttgatctttgtgtgtctgtgcgtgtgcatcgacgtgtggctgcagcacgagaagcacaaggccaagaaggacccagagaacgagcacgggcaccgggtcaaggaggaggtggccgccgtcgccgccgtgggctccgccggcttcgcttttcaagaacaacaacaaaaaaaaggaccccaagaaccacgccaacaactgatccgtcccggttgcggttcaaccggtccttcaagcctcgtcttcgtcaacggtgtgccggcaaggccttgatttgggctaccgatatttgcatggacgtaggaactgtgttggtcggtcctcggcgttcttgtatcaagatcaaatca

SEQ ID NO: 82591 - DNA, 396 bp, Zea mays
cccacgcgtccgtgaagaaaatgttaaataatgcgccagagtatttgcagaatgttgttgagctatgccaaaacagagtggttgtcttcgataacgtgactgaagaccgaaggctccaagcgcagcaacttgacaaattgctcgatgtagtggattcagtttgtgcaaaaaatggaggaaaaccattttcagatcaaatgttcactagcatcaaggaggtgcatgatagagaaaaagaggtgcatacctcgggatattcagatgagcagatatctgaattgaaaaaggagattcatagaactagggatgaacagcttgcgcacaataacaacatggtcgaggaaaagttaaactgcactgtggagaagttgcaacagcagctcatggaagaacaga

SEQ ID NO: 82592 - DNA, 424 bp, Zea mays
cccacgcgtccggccttttattccccccccctctctctctaggtatgattgggctgccaagaagaccttgcaatctggctactttttgtggtcaatggtggcatatggttccggtctcctaattacatacgttgccttgaaccttatggatggccatggccagccggctctcctttacatcgtgcctttcacaatcggcaccttcttatcactgggcatgaagagaggcgagctcagaaacctgtggacaaaaggacagcccgagagagtgtgcacgcacatgcacccatcccccaaggattcgcctgttgcggtcagctcgctgtcgtatacaaggctaacgaccttacctgatgttgcctggccccggagaatgttgctgatgaccaaaacaaagtttccagggttaatgaaggagtctact

SEQ ID NO: 82593 - DNA, 419 bp, Zea mays
cggacgcgtgggcggacgcgtgggcggacgcgtgggcaaagatttcaaatgttaagggaatggatgtggaattgtggacacatgatgggcttccttcagcacaactcctgaagctgatgagagatgtggttgctggccttgtgcatctgcatgacttgggaattattcatcgtgatttgaagcctcaaaatgtcttaataagcgcaggaggacctattagagcaaagctttctgatatgggtatcagtaagcacctgcaagatgacatgacttctgttagccatcatggtacaggatttggaagctctggctggcgggcacctgaacagcttcgtcatggtcgtcaaactcgtgcaatggatctttttagtttgggctgccttattttctattgtatcactaaaggcaagcatccgttt

SEQ ID NO: 82594 - DNA, 287 bp, Zea mays
cgggccgacccaagcgtcaggacttcttggtgagagcgatatgagtgtcccaggtcaatgctcatcccagccacaatttatcaccagcgttgggaggagtaaccgctccaatggccccggcactcctcttatcgaaagcatagatgttgatcaaattgttattccagagaaaaacagttggaagaacttattcccatacataaggcctggatttcccgtcccaattgcatatattgatcctggaaactttgagacggatttacaagctggagcacagttcaaatatg

SEQ ID NO: 82595 - DNA, 367 bp, Zea mays
gaatatacttgggatctttgatctgcgaggctttcgggttgaaaatggtgatctccagttcctaaagtttttgatggacgttttttactattactacccgaagcggcttggccaagttctttttgtcgatgctccatttgtttttcaaccaatgtggcaggttgttaaacctctattgaaatcatatgcctccctggtaagattttgtgatgccgagactgtgaggaaggaatacttcaaagaagaaaccgtgcctcctgatttccgcgattaggtgacatgattatttcttcagtaattgcaagtcagttctacctctgcctttgtgtaacgattgaaattctaaattgtgcagattatttttagt

SEQ ID NO: 82596 - DNA, 421 bp, Zea mays
acccacgcgtccgctgacatctcgtcccgtcctttcgtttcgaagcctcgcgagccccgacgatggccaccgccgcggtgtcggtcgacgagaagctcgacaagcttcgcgccgaggtcgccaagctcgaccagatcagcgagaacgagaagtccgggttcatcagcctcgtgtcacgctacctcagtggggaagcggagcagatcgagtggagcaagatccagacccctacggatgaggtggtggtgccctacgataccgtcgcgtcgcctcccgaagatctcgaggagacgaagaagctgctggataagctcgttgtgctcaagcttaacggagggctcgggacgaccatgggctgcactgggcccaagtctgtcattgaagtccgcaatgggttcacattccttgaccttattgtgat

SEQ ID NO: 82597 - DNA, 384 bp, Zea mays
gagccagaacctgttccagaaggacatcttcacaagcatcaactggttccccaaggccaacaccatgagcgcgctggaggaggtgtaccgcatctcccgcgcgcagaccctcatcgcgctctgcggcacagtcccgggctactggttcaccgtcgcgctcatcgacgtcgtcggccgcttcgccatacagctgctgggcttcttcatgatgaccgtcttcatgctcggcctcgccatcccctaccaccactggaccacgccgggcaaccacatcggcttcgtcgtcatgtacgccttcaccttcttcttcgccaacttcgggcccaacagcaccaccttcatcgtgcccgccgagatcttcccggcgcgcctgcgctccaactg

SEQ ID NO: 82598 - DNA, 387 bp, Zea mays
cccacgcgtccgcccacgcgtccgcccacgcgtccgcccacgcgtccgattcagaaacacaccaagcgaagcacattagcaacaacctaacaacaatggctaccaagatattatccctccttgcgcttcttgcgctttttgcgagcgcaacaaatgcgttcattattccacaatgctcacttgctccaagttccattattacacagttcctcccaccagttacttcaatgggcttcgaacacccagctgtgcaagcctataggctacaacaagcaattgcggcgagcgtcttacaacaaccaatttcccagttgcaacaacaatccttggcacatctaacaatacaaaccatcgcaacgcaacagcaacaacaattcctaccagcac

SEQ ID NO: 82599 - DNA, 396 bp, Zea mays
aagaggaacagttggatatgtgcctccagaatacggggagtgccgccaggtctcctcgtgcggagatgtcttcagctttggagtcacgctccttgagatgttcacagggaaggcccccaccgacgccatgtttgaggacggattgaccttacagggcttcgtggagatagcgtttccagagaagctgatggacatcgttgatccagtactgctgtccactgatgagaggttcgcaagaaagccgcgacacagaagcgttggaggggaagagattgagaacgccatagcttctgtcactaagctcgcgctgtcctgcaccaagctaacaccatcagagagaaagcccatgggtgatgccgcagccgagatgcgcatgataagggactgctatctcgc

SEQ ID NO: 82600 - DNA, 387 bp, Zea mays
  unsure (1)..(387): unsure at all n locations
gagatcttcatcangggaaattcgcatggtatgggagactacggcccgtatacctttgaaccctcgtaggaagtcttgagaacccttgcatgcattcgctgttgtatgcgtgccatgctgttgaatttagctgtactacaccagatagtgatacccgaactcacggagtttaatggaaccggatagaaagctgcccatgtagtttggtgtttgttgcttacgttgtggattttactgtagtgacttgtctaatgctccgtttctccgtttggttatcgaccatattggagggcatggaattaaaataagttcaataccaaatcaaatatagtattgaaatgagatgtaatttcaattctattgtttggatgtcgctgatttggaatt

SEQ ID NO: 82601 - DNA, 423 bp, Zea mays
ttcacgcgtcgagacaagcctccgaccaagccttcggcccacgcgtccggtgaaacgctgagaagtattcaacatcggaatcttcttcccatcataactgcatgctcgagtatagatacaacgggaaattcttttaaggctttaatttatgagcttatgcctaatgggaacttggataaatggatacatcacaaagacaatgaggcacttccaaagcgtctaagcttagctcaaagaattgcagttgtcgtcaatgtagctgatgcattggattatttacaccacgactgtggaaggcccaccatccattgtgacttgaagccaagcaacatccttctcggtgacgatatgaatgctgtcttggcagattttggcattgcacatctttattctgattctcagtcaacttggaaaagttcattt

SEQ ID NO: 82602 - DNA, 375 bp, Zea mays
ccgggaagccgctccactacaagggctccaccttccaccgcgtcatccccgagttcatgtgccagggcggcgacttcacccgcggcaacggcaccggcggcgagtccatctacggcgagaagttccccgacgagaagttcgtgcgcaagcacaccgcccccggtgtgctctccatggccaacgccgggcccaacaccaacggctcccagttcttcatctgcaccgtcgcgaccccttggctcgacggcaagcacgtcgtcttcggccaggtcgtcgagggcatggacgtcgtcaaggccatcgagaaggtgggcacccgcaacggctccacctccaaggtggtcaaggtcgctgactgcggacagctctcctaga

SEQ ID NO: 82603 - DNA, 304 bp, Zea mays
cccacgcgtccggaacacaaggatcaccgtgagcggctatgacaagagcgcgatcggtcagtttgctgctaccataaagaagtggaggccacctgagccatacaagggaaagggtatcagatatatggatgaagttgtccgaaggaaggaaggaaaagccgggaagaagaaatagaaagtgtttttttgccctctccttacttcatttcaattttcccactgtaatggtcttcgtctgctaaggctgaacctaagaaatatattgttctgtgctgaacgtggcatatagatgtacactttgagc

SEQ ID NO: 82604 - DNA, 386 bp, Zea mays
cctacgtggccttcttctccagcggcctcggccccatcacgtgggtgtacagctcggaggtattcccgctgcatgtgcgcgcgatgggctgcgcgctgggcgtgggctccaagcgcctgaccagcggcgtgatctccatgaccgtcagctcgctgtccaaggccatcaccatcggcggcgccttcttcctctacgccggcgtcacggtgctcgcgtgggtgttcttcttcaccttcgtcccggagacccgcggccggacgctggaggcgatgagcaagctgttcggcgccatcgacgacgagctgaaaccccaggacggggccacgacagacaagcataagctcgaactggccgcctacggcaccatctaacttcacattattaga

SEQ ID NO: 82605 - DNA, 425 bp, Zea mays
accacgcgtccgcagacccttgggcggacccttggttattgaaaatccataaccacccagtttgaattccccaaagtttaagttccgccaaaaaacccatttaggaaattggggttcacatttcggaatgctaataaaatacctttttgagaaatttccaaattggcaagagattggtagccaggccattggagaccttcagattttctataaagcatccaagcatagatttgacaatgatccagaatttaaagcaagggctcaacaaggagttgttcggctacagggaggagaagagagatatcgagaagcatggaaaaagatttgtgacattagcaggagtgaatttgacttggtctacaaacgcctaaatgtggtgcttgaagaaaagggggagagtttctataatccttatattcctcaag

SEQ ID NO: 82606 - DNA, 399 bp, Zea mays
cccacacttcggcgtaaattaaaagtatcccataatgaacagataccaccaacatagttaaagtttttaccgggattaaagcggccatttttcaaaacggggtcgggtgctgaaaaaactcaaattgttttggggtcccacgctcggtgacgtcagtttggtctgggcaagcgcaggacgataccgatccggccggtcagggcgcacgcgggggcgatccgatccagcgagtctaagggtatccgcaaccgttattcctaaatttttctccctatatcactttttccccctattttccccctatttttcatctctcgcagcggttccccctaaatactccccttataccccactaccactataaaatatcattttctaatacaactatcaatttttttt

SEQ ID NO: 82607 - DNA, 406 bp, Zea mays
cggcgcgtgggaaagaaaggagatccgaagaagaaaaaaccaaagaggaagcctctttttgtgaagaatggtgcaattgttgtttgccgcattcaggtgaataacttgatatgcatagagaagttctctgatttcccacagcttggaaggtttacacttagaactgaagggaagacggtagccgtaggcaaggttgttgatgttccgcctgctggcagcccaacattctgagcttaagccaattttgaacaggatggataatcatgaagcagtgcgttgtcttgagatacttttctttgggagaagtgagattagttgagcataggttttttccgagcccggcttgagaatggtctatgccttaatggtttaagcaacaagcctgtttagattggttccataaatg

SEQ ID NO: 82608 - DNA, 370 bp, Zea mays
acccacgcgtccgcccacgcgtccgcggacgcgtgggcccaaccaagcccgcacgacacgacaccaagtcgaggagctcgagagggcaccaataatggccggcgtgaactccagcgtcgtcgggctcaagcccgccgcggcagtgccgcaggccgccgccgcctcatcgccggcgaagcgggtgcagctggccgcgcccgagggccgccgcgccgctctgctcggcctggcggccgtcttcgccgtcacggccaccaccgggtcggccaaggccacgatcttcgatgagtacctcgagaagagcaaggccaacaaggagctgaacgacaagaagaggctggccaccagtggagccaactttgcgcgcgcc

SEQ ID NO: 82609 - DNA, 420 bp, Zea mays
acccacgcgtccgaccacgcgtcagctttcaattaactgggggtgagggatatatgctctgtgtagtttattattttttgtgtatgaccaaagcaatagcaaacctaaatggtccaattgatgttctgttttttggtgcatgcacactactgtataactttagggcctgtttgtttcagcttatagattatataatctgaattataatctaaattatataatccagattataatctagatatattataatatatatgtagttgtttggtagtttagattatacaaatgtagattattcacaaagacaacaatacccttattgcttatttaaggtgagaaaaaaaggatgtcatatattgtaatttctatttacattaccatgggtagtaggtcttttgccaaaataatctcaaataagct

SEQ ID NO: 82610 - DNA, 388 bp, Zea mays
aggacacgtgggctatagcaaccggtccagcactttcacgctcagctccagcaatggctgcctccaccatggcgatctcctccacggcgatggccggcacccccatcaaggtgggctccttcggcgaaggccgcatcaccatgcgcaagaccgtgggcaagcccaaggtggcggcgtccggcagcccctggtacggccccgaccgcgtcaagtacctcggccccttctccggcgagcccccgagctacctcaccggcgagttccccggcgactacggctgggacaccgccgggctgtccgccgaccccgagaccttcgccaagaaccgcgagctggaggtgatccactcccgctgggccatgctcggcgcgctcggctgcctcttccc

SEQ ID NO: 82611 - DNA, 405 bp, Zea mays
acggacgcgtgggctatagcaaccggtccagcactttcacgctcagctccagcaatggctgcctccaacatggcgatctcctccacggcgatggccggcacccccatcaaggtgggctccttcggcgagggccgcatcaccatgcgcaagaccgtgggcaagcccaaggtggcggcgtccggcagcccctggtacggccccgaccgcgtcaagtacctcggccccttctccggcgagcccccgagctacctcaccggcgagttccccggcgactacggctgggacaccgccgggctgtccgccgaccccgagaccttcgccaagaaccgcgagctggaggtgatccactcccgctgggccatgctcggcgcgctcggctgcgttctccccgagctgctctcccgc

SEQ ID NO: 82612 - DNA, 380 bp, Zea mays
acgcgctggccgccgaggtgggcgcggcgagccgggactggggcttcttcgtggtcgtgggccacggcgtgcccgcagagaccatggcgcgcgcgacggaggcgcagcgcgcgttcttcgcgctgccggcagagcggaaggccgccgtgcggaggaacgaggcggagccgctcgggtactacgagtcggagcacaccaagaacgtgagggactggaaggaggtgtacgagctcgtgctgcgcgagccgccgccgccggctgccgtggccgacggcgagctcgtgttcgagaacaagtggccccaggatctgccgggcttcagagaggcgctggaggagtacgccaaagcgatggaagagctggcgttcaagctgctggaa

SEQ ID NO: 82613 - DNA, 406 bp, Zea mays
accacgcgtcagcccacgcgtccgccccgttcccggccgccgcggtgccaacccagctctccggtgcgcccgcgacccctgctcccgtcgtcagggtggcggcgccgcgcggcgtcgcctcgccggccgctggcgccgcgtgcagggccgcgggcaaggggaaggaggtgctcagtggggtcgtgttccagcccttcgaggagatcaagggggagctcgccctcgtgccccagtcccctgacaagtcgctcgcgcgccacaagttcgtcgatgactgcgaggccgccctcaacgagcagatcaacgtggagtacaacgcctcgtatgcataccactccctcttcgcctacttcgaccgcgacaacgtggctctcaaaggatttgccaagttcttcaaggaatccag

SEQ ID NO: 82614 - DNA, 419 bp, Zea mays
atctcggcagccacaagaaaccacccccttccggcacacgggctcgaccacctgactccatcaccgtgcctgtctgtgttctagggacaagaagagcagagatatacaggagcgagcagaggcggggagaagaggatgagcaccacaacggcgtcgtcgctgaaccccaacgcgccgctcttcatcccggcggcgtaccggcaggtggaggacttctcgcccgagtggtgggagctcgtcaacaccaccgcctggttccgggaccactgcttccggcagcgccagctccacgaggccgcctgcgacgacgtcgccgcgctcctccccgacgacctcctcgacaccaacgacctcttctacgcgcccgacgtcgtccaccaccaaccagcgacggcgctgctgcccgggtacgatgtcct

SEQ ID NO: 82615 - DNA, 348 bp, Zea mays
tggtcaccgtcctcgtcgtgtgcctggctctgtcagctgcaaccgcctctgcaatgcagatgccctgcccctgcgcggggctgcagggcttgtacggcgctggcgccggcctgacgacgatgatgggcgccggcgggctgtacccctacgcggagtacctgaggcagccgcagtgcagcccgctggcggcggcgccctactacgccgggtgtgggcagccgagcgccatgttccagccgctccggcaacagtgctgccagcagcagatgaggatgatggacgtgcagtccgtcgcgcagcagctgcagatgatgatgcagcttgagcgtgccgctgccgccagcagca

SEQ ID NO: 82616 - DNA, 388 bp, Zea mays
acccaagcgtccggcaacaaaaatttctaccagcactgagccaactagctgtggtgaaccctgtcgcctacttgcaacagcagttgcttgcatccaacccacttgctctggcaaacatagttgcataccaacaacaacaacaattgcaacagtttctaccagcgctcagtcaactagccatggtgaaccctgccgcctacctacaacagcaacaactgatttcatctagccctctcgctgtggttaatgcacctacatacctgcaacaacagttgctgcaacagattgtaccagctctgactcagctagctgtggcaaaccctgctgcctacttgcaacagctgcttccattcaaccaactgactgtgtcgaaatctgctgcgtacct

SEQ ID NO: 82617 - DNA, 386 bp, Zea mays
  unsure (1)..(386): unsure at all n locations
caagaatactgagattgcaaagcacttgtcccttccaccagtaaagctccattgcagcatgcttgcggaggatgccattaaagctgctgtgaaagactacgaagccaagaaggcgaagatggggcaaaagagtgaagacagtccatcagagaaagctgctgaagcatgaaagtttctgccttttttaagtgtaattgagctgatatgtttctcagtccatgactccccgctgcttcagataaatgcttctgattgcgaggcgaggcgagggaccgcgtgtaatgttcacaaattctggtagtgcggcatgtgccttaactcttttgaggatggtgacaaccaatttcaaataaatttggtgccatcttagaattaanaaanaanna

SEQ ID NO: 82618 - DNA, 357 bp, Zea mays
cactaccaccgccgcctgacccggaccgcgtccgtggggccgtgccgggccgccccggtgggactggccgtgcggtgcgagaagagcgacaagcagaagaggcagccgctcgccgcgctcgtgccccgcgagcagcgcttcatgttcgagggagacgagctctgcggccccgacatatggaatacaacctggtatcctaaggctgcagatcatgtaactaccgagaagacatggtatgttgttgatgcaacagacaagatcctaggcaggctagcatccaccattgcagtacatatcaggggaaagaatgaacccacttacactcccagtgttgacatgggaacctttggtaatggg

SEQ ID NO: 82619 - DNA, 188 bp, Zea mays
ttcggacaagccttcggccaaggcttcggccaagccttcggccaagccgtccgcaaggataaaattctcacagatggggtattgattagagagatgatggaagattctcttcttaacaagtatagtgtaattatggtggatgaagctcaagaaaggtccatctcaaccgacatgttgctgggtcccct

SEQ ID NO: 82620 - DNA, 387 bp, Zea mays
acagaaggagagcaccctccacctggtgctccgtctcaagggtggtatgcagatctttgtgaagacactcactggcaagacaatcacccttgaggtggagtcttcggataccattgacaatgtcaaggccaagatccaggacaaggagggcatcccacccgaccagcagcgcctcatcttcgccggcaagcagctggaggatggccgcaccctggcggattacaacatccagaaggagagcactctccacctggtgctccgcctcaagggtggcatgcacatttttgtgaagacattgactggcaagaccatcaccttggaggtggagagctctgacaccattgacaatgtgaaggccaagatccaggacaaggaaggcattccccc

SEQ ID NO: 82621 - DNA, 438 bp, Zea mays
agcacgaccacaaccggttcaacaacggcaaggcaaaggaggaggaaggcgcctccggcaaggtcaactacgagaagaaggagaagcaccacaggcacatggagcagctcggccagctcggcgccatcgccgccggcgcgtacgctctgcacgagaagcacaaggccaagaaggacccggagaacgagcacggccaccgggtcaaggaggaggtggccgccgtcgccgccgtgggctccgccgggttcgccttccacgagcatcacgagaagaaggacgccaagaagcacgcccacaactgatccgtcgcaggctgcctcagccgaagcagcagcacatcgtcgcggttgctgtttcatctgttcccccaacctcgtcgtcgtctacggtttgccgggcaggccttgatttgaggctttgagctaccgatatttgcac

SEQ ID NO: 82622 - DNA, 394 bp, Zea mays
accggcattgccggcttgtatgacgagctgcttgtggcggaagaactcaagccctttgggaagcagctcagggacaaatacgtggagacacagcagcttctcctccagatcgctgggcacaaggatattcttgaaggcgatccattcctgaagcaggggctggtgctgcgcaacccctacatcaccaccctgaacgtgttccaggcctacacgctgaagcggataagggaccccaacttcaaggtgacgccccagccgccgctgtccaaggagttcgccgacgagaacaagcccgccggactggtcaagctgaacccggcgagcgagtacccgcccggcctggaagacacgctcatcctcaccatgaaaggcatccccgccggcatgcagaaca

SEQ ID NO: 82623 - DNA, 442 bp, Zea mays
ttccggagtcacccacgcgtccgaagacgcgtgagcgctagtctcataccacaaccctagagatcaagagagagaaagataagtagagatggtggggctgcagtacgatctcgtcgggaatccattgggcgcggtgcgcgccaccttcgagaggacggccgccgccgctgctgcggagtctggaggagccgaccctgtggcggcgttccgtggcaaagactggggcgccggcgacctcttccgctccttcctcttcgagcaagacggtcttggcaaggttccggtgttggattcgtcaaatcttggattgatcaaaccgaacaccctggtccggtatcggggaatggttcaggatatgcttgggaatgagtactacattggtgctttcaaggatgggtcaacttggaggacaaacaagtagcctgacttctcaccgtactca

SEQ ID NO: 82624 - DNA, 404 bp, Zea mays
cgggccgagccacgcgtccgcggaagcgtgggctactacacacaaacacagctagccggcgctgccaggttggctttggcgagcaacgacgacgacgacggcgctcaggactcaggtgctttcggttcaggcggaggagggcatggagcgcggcgactgccagttcacggtggtgccgccgcggcagtacgacgaggcccagttcatgcaccagctgatggtggccggcgaccagcaggaccccgcgggcgcggggcggggagctgccgccgccggcggggagaggaagcggcggttcacggaggagcaggtgcggtcgctggagacgacgttccacgcgcggcgcgccaagctggagccccgggagaaggcggagctggctcgggagcttggcctgcagccgc

SEQ ID NO: 82625 - DNA, 433 bp, Zea mays
aggccaggaagctgtccctgactagggccatcttctacattatcatgcaatgcctgggtgccatctgtggagctggagtggtgaagggcttccagcaggggctttacatgggcaacggcggtggcgccaatgttgtcgcccccgggtacaccaagggggatggccttggcgctgagattgttggcaccttcatcctggtgtacaccgtcttctcggccaccgatgccaagaggaacgccagggactcccatgtccccatccttgccccactgccaattgggttcgcggtgttcctggtccaccttgccaccatccccatcaccggcaccggcatcaacccggctaggagccttggcgccgccatcatctacaaccgggatcatgcctggagcgaccattggatcttctgggtcggccccttcatcggcgccgc

SEQ ID NO: 82626 - DNA, 396 bp, Zea mays
acccacgcgtccggactagttctagatcgcgaggggccgccctttttttttttttttttaaagcaattagtagcacttagcagcactgctcgtttttctaacctaccgatacctacacccgatcatggcggtggatcagcgctagctcagtcctcgaatccggtcttcttccagacggcgtcccggacccggctgaggtcgcgccccttgagcgtcctgccgatcccctcgtgcaccgacagcgacgccgcccggctgcgccacgccagctcgtgcggcggcaccatctccgccccgccgcgcgccctgccgtagctgctgccgtcgtcgtcgtcgtcgtcgtccgcgccaggctcccactcgcccgcgcggtggtggtcccggtactccaccccg

SEQ ID NO: 82627 - DNA, 434 bp, Zea mays
acggacgcgtggggggacagcaaccgcaacgtcctgctggtaggcgtgctgggtctggtggaatgcagcagcccatgccaatgggtagtcagcaacagatattccctagaggtggtcgtggctaccgctatgctactggacgtggaatgcctgatcctggcatgcataatgttggtgctgtgatgccatctccatatgagatgggagggatggcaatgagagatgctggtgtctcacaacctgttccaattggggcactagccactgcgcttgctaacgcctcaccagattagcaaagactgatgcttggtgagaacctgtatcctcttgttgaacagctggagcgtgagcaggctgccaaggtcactggcatgcttttggagatgggacagacggaggtctctcactgctggagtcgccagatgctctcaagg

SEQ ID NO: 82628 - DNA, 441 bp, Zea mays
acaaaccatctcgactcgtggggaagattcgctctcgccggcgtcgacggcctagggttcgaggaacgtccgtccgtccgtccggtgaaggagcggtagggaggcggagatgatcgaggtggtgctcaacgaccgcctggggaagaaggtgcgggtcaagtgcaacgaggacgacaccatcggcgacctcaagaagctggtggcggcgcagacggggacgcgccccgagaagatccgcatccagaagtggtacaacatctacaaggaccacatcaccctcaaggactacgaggtccacgacggcatgggcctcgagctctactacaactgagccgccgcccctctctccctctcgtcaggttggtctgaattctgaagtcatgggtgcaattcgcttcgcggtgatctcttaagctcatcacatatataaaagcaacctca

SEQ ID NO: 82629 - DNA, 367 bp, Zea mays
gtcgacggccccggcgccggcaagcacatccaggccggcgcgaagaaggtgatcatcacggctcccgccaagggcgccgacatcccgacctatgtcgtcggcgtcaacgagggcgactacgaccacagcgtcgccgacatcatcagcaacgcgtcctgcacgaccaactgcctcgcgccattcgtcaagatcttggacgaggagttcggaatcgtgaaggggaccatgacgacgacgcactcgtacaccggcgaccagaggctgctggacgcgtcccaccgcgacctccggcgggcccgcgcggcggcgctgaacatcgtgccgacgagcacgggcgccgccaaggccgtggcgctggtgctgccgc

SEQ ID NO: 82630 - DNA, 406 bp, Zea mays
caagcactccacactgctgtgcagaacgagagccacaccatcagtagttagagcgaccaatagatgagttcctccccgtcctttggtctcctggctgtagcagcattactcctagcactgagcttagcacaacatggctccctcgccgcaaccgtcggccccagggtcatcgtcgtcggcgccggcatgtctgggatctcggcggcgaagaggctgtcggaggccgggataaccgacctgctgattctggaagcgacggaccacatcggcgggcggatgcacaagacgaacttcgccggcatcaacgtcgagttaggcgccaactgggtggagggcgtgaacggcggcaagatgaaccccatctggcccatcgtcaactccaccctcaagctccgcaacttccgct

SEQ ID NO: 82631 - DNA, 431 bp, Zea mays
  unsure (1)..(431): unsure at all n locations
ccacgcttcggaagggcaattaatacccctttgaattacattcaaaaaaagtttaagggaacctcaacaaaactcccggtacaatcaaggccaaaacggggcattaacttggtcccttgccggccaatccccaatggtttttgactaaccaaaatgtctttgctttcgactacacaactcaagttctgtttttcatcatgctgtcgtgcctgatttcagtctcggtgaacttcagcacttttctcgtgatcgggaagacgtctcctgtaacctacaaagtacttggccatctgaaaacatgcttggtcctcacctttggctatgtcctgcttcacgacctatttagctggagaaacatacttgggatcctaatcgtggtaattgggatggttctgtacttgtacttctgcactanagagactcancaaata

SEQ ID NO: 82632 - DNA, 364 bp, Zea mays
gagccactgtcaagtgcgcgcgtcaagcttgcttagctagccgccatggcctccctcgccgccgtctccgtgaagcccgtggccatcaagggtctcgccggcagctccatctccggaaggaagctcgccgtcgccaggccgtcggcccgctccatccgcaggccccgcgcagccgccgtggtggccaagtacggcgacaagagcgtctactttgacctcgacgacatcggcaacaccaccggacagtgggacctctacggctctgacgcgcccgcgccctacaacccggctacagagcaagttcttcgagacgttcgcggctccgtttcacaagagaggtctgctgctcaagttcctgctgctg

SEQ ID NO: 82633 - DNA, 245 bp, Zea mays
accacgcgtccgaatcgccagccctatctttggtgcagtcattggtcgaaaccatcagggtacagcagctgcagcaactcgtgctagctgtgatcacccacgtagcactggcacacctttctccctactctcagcgacaacaatttcttcaagtcaagcacatgtccacttttagccgtgtctgcgtacttgcagcatcacttatgaccatacaaccagctaactactgcctaatcttagcaaca

SEQ ID NO: 82634 - DNA, 440 bp, Zea mays
ttcacgggtcagcacacgcgtccactgatattaacgggacaccaggaaaatgcagaatttgcgcttgccatgtgtccagcagaaccatatgtcctgtcaggaggaaaggacaaatttgttgtcttgtggagcatccaagaccacatatctgcccttggggattcctcgtcttctcccggagcatctggcagcaagcagtctggcaaaattgcaaatgaaaaggagagtcctaaagttgatcctagaggtatattccatggccatgacagtactgttgaagatgttcagttctgcccttccagtgcgcaggagttttgtactgtgggtgatgatgcttgtcttattctgtgggatgctcgaactggcactgacccagctgttaaaggttgagacagctcacagtggagatgttcattgtgtggattgggatccccttgatg

SEQ ID NO: 82635 - DNA, 442 bp, Zea mays
cacacgcgtcagcccacgcttccgcactgccaccgccgccttggccgttgccgcaaccgtcctgcttgccggcggcggcgccatggcccaggaggtgctgctgggcgcaggcgacggcgggctcgtcttcgagcccagccagttcaccgtcaaggccggcgacaccatcaccttcaagaacaacgccggcttcccgcacaacgtcgtgttcgacgaagacgaggtgccgagcggcgtcgacgcctccaagatctcgcaggaggagtacctcaacgcgccaggcgagaacctagtccgtcaccctcaccgtgccgggcacctacggcttctactgcgagccgcaccaaggagcaggaatggtcggcaagatcacagtcaactaaagctagctatcgattccatgcatctcgatctgtatgtaccccgcccgtccatggatgat

SEQ ID NO: 82636 - DNA, 268 bp, Zea mays
cccacgcgtccgcggacgcgtggggcaaccggtccagcactttcacgctcagctccagcaatggctgcctccaccatggcgatctcctccacggcgatggccggcacccccatcaaggtgggctccttcggcaagggccgcatcatcatgcgcaagaccgtgggcaagaccaaggtggccgccttcggcagcccctggtacggccccgaccgcgtcaagtacctcggccccttctccggcgagcccccgagctacctcaccggcgagt

SEQ ID NO: 82637 - DNA, 421 bp, Zea mays
accacgcgtccgcgtcaatctgctccttgtgtcctcttctttgatgagcttgactcaattgctactcagagaggaagcagtgtgggtgatgctggaggtgcggctgatagagtgcttaatcagctactgacagaaatggatggcatgaatgccaagaaaactgtgtttattattggagctacaaacaggcctgacatcattgaccctgctctgctgaggccagggcgtcttgaccagctgatctacattccactgcctgatgagcagtctaggctccagatcttcaaggcctgccttaggaagtcccctgtggcgaaggatgtggacttgaatgctcttgctaagtacactcaagggttcagtggagcagatatcacagaaatttgccagcgtgcgtgcaaatatgcaatcagagagaaca

SEQ ID NO: 82638 - DNA, 409 bp, Zea mays
caagttagaagaagcaccagtgcctgatcgatggcggcccaggctctcctctccggccggcagctgctgggccgccccgtgcagtcggccgtctctaggtcgtcggcgaggaaggcgcccttcgtcgtcagggccagctccagccctccagccaagcaaggtgccgacaggcagctgtggttcgcgtccaagcagtccctctcctacctcgatggcacgctgcccggcgactatggcttcgacccgctgggcctctcggacccggagggcaccgggggcttcatcgagcccaagtggctggcctatggcgaggtgatcaacggccgctacgccatgctgggcgcggtgggcgccatcgccccggagatcttcggcaagatgggcatcatccccccggagaccgcgctgc

SEQ ID NO: 82639 - DNA, 383 bp, Zea mays
acgctttctgtgaagttgacaccagatgagatggccgaactcgagtcctgtgctgctgcaggtgaaatcttgggtgaccgttatcctcaaatggccaacacctggaaggactctgagaccccgccattgtcttcttggaaatctgagtagccaatctggtgtctcttcaattctgccaccgtcacattggtgtatctccaaattgtcggactgcagaagatactcaggtgcactttgcaaaagcgtccatatgatgtgcttgccttttgcaagccatgatgtttggtacttggtgtgtattgcatgcctcaatttgtatcaagagtatttacccatgagtatagcttgaagggttaaaacactggttcgacgaataaccatat

SEQ ID NO: 82640 - DNA, 236 bp, Zea mays
cggacgcgtgggctgtcgttgtgagaattcttaattcatgagttgtacggagggacttatgtcaccacaaacagaaactaaagcaagtgttggatttaaagctggtgttaaggattataaattgacttactacaccccggagtacgaaaccaaggatactgatatcttggcagcattccgagtaactcctcagctcggggttccgcctgaagaaacaggagctgcagtagctgcgg

SEQ ID NO: 82641 - DNA, 434 bp, Zea mays
accacgcgtccgcgatctacacacatacatagtttcttctactacacgacgacaaacatggggaagcctgcgaagatcggagagtggggtggatacgccggcgatcgtcgggatctgagggctactccggaccggctgatcgaggtgaaggtcacggcggacaacagcagctgcatccgctccatctccttcatctacatcggagccgatggcaaaccgtacgaggaggggccatggggtttcggccatgctggcacggagtacaagattgatctgtgcaggttcgacgagagcttgacggagatctccgggaccacgggcccagcctacaacattgacaatctggtcaagtctctcaaattcgtcaccaacaaacgcgcttacggaccgtacggcagggacgagggcaccccgttccgtgtcaaggtgatgaa

SEQ ID NO: 82642 - DNA, 414 bp, Zea mays
attcactccactcatcttttctcgtttagaacctctaaaatttcccccattcgccagtcgcagcagcacctgtagcagtcatggacgccagcggagccggtagcaaggggaagaagggggcggccgggcgcaaggcaggcggccccaggaagaagtcggtgacgcggtccgtcaaggccgggctgcagttccccgtcggccggatcgggcgctacctcaagaagggccggtacgcgcagcgcgtgggcactggcgcccccgtctacctcgccgccgtcctggagtacctcgccgccgaggttctggagttggcagggaacgcggcgaaagacaacaagaagacgcgcatcatcccgcgccacgtgctcctggcgatccgcaacgacgaggagctcgggaagctgctggccggcg

SEQ ID NO: 82643 - DNA, 429 bp, Zea mays
ttccgggaccacccacgcgtccgcaggacgcgtgggggcccgtgtccccgccacaaggaggagcgtccgtgtagctgccgtcgtcgcgaccgaggccgcgcagatcgactacagctcaagcgtctcgtacgtgttccctggccttgatcaacaaacaaccagtcggtgtagagctaagttctggatggtatggttagaatttgggtcggtgacactgacacgcatgttggtgacgctgcagggtgttcccgatggaggcctgcgacctgcttggtggcgacgcgtgcaacgggcccatgtgcccggagggcaagcccgcctcgggggcggcggcggcgagcaggagtgtggtcggggtggacagggactacctgtcctacgacgagccaaagacgtaagcagcagctagcaactaccataggataaccc

SEQ ID NO: 82644 - DNA, 265 bp, Zea mays
gccctacagaggaaaccagaacctccccacaaaggcaaacggcgaggtcgagactgaaccttccggcccactcgctgtgctcaagggcttcaagaacttgcccacggggatgccgtccgtgctcctcgtaactggactcacctggctctccttggttcccgttcatcctctacgacaccgactgaatggcccttaaattcaacaacggcaaccccaaggttacaaacccccaattcccggctttcaacaaaggcttcaaatttgg

SEQ ID NO: 82645 - DNA, 447 bp, Zea mays
  unsure (1)..(447): unsure at all n locations
cccacgcgtccgcccacgcgtccgcaccactccgcgctagctgaggacggtacagcggcacagaggtgcgacgtacgacgacgacgacgcaggcgccacacatggcatcccagctctccgccgccgtgccccggttccacggcctccggggctacgccgcgcccaggtccgcggtggcagcgctgccgtccgtgagggtgggcaggaagaggtcgtcgtcgcagggcatccgctgcgactacatcggctccgccaccaacctgatcatggtgacgacgacgacgctgatgctgttcgcggggcggttcgggctggcgccgtccgcgaaccgcaaggcgacggccgggctgaagctggaggcgcgcgactccggcctgcagacgggtgaccccgccgggttcnacctcgccgacacgctggcctgccgcgccgtcggccacatcctcg

SEQ ID NO: 82646 - DNA, 430 bp, Zea mays
gctactttggttatgtcaactgtggttaagaatggtggacttgcacctggtggcttcaactttgacgccaaattgcggagggaaagcactgatgttgaggacttgtttcttgctcatatctccggaatggacaccctggcccgtggcctccgcaacgccgccaagctgatcgaggatggttccctagatgctctcgtccgcaagcggtaccggagctttgatagtgagatgggtgccttgatcgaggctgggaaaggagactttgaggcgctggagaagaaggtccttgagtggggtgagcccactgttccgtccggcaagcaggaactggcggagattctgttccactctgctctatagatggcgccatgtccgtagcggtagctcctggaataagcaagcactgagcctgcgcccctcctaacgcgcg

SEQ ID NO: 82647 - DNA, 401 bp, Zea mays
  unsure (1)..(401): unsure at all n locations
gaactcgtcagatatgttagcatgtggagaggaccttggccttatccctgcttgtgttcaccctgttatgcaagaactggggttgattggattgcgtatccaaagaatgcctagtgagccaaacttggaatttggtattccttctcagtatagctatatgacggtttgtgctccctcatgtcatgactgctctacattacgtgcttggtgggaagaagatgaaggaagaagaagtcgtttctacaagactgtagttggcagtgatgaggaggccccatctcgttgcaccccggaagtagtgcacttcattgttcagcagcattttgacgctccatcaatgtgggcaatctttccacttcaggacctccttgcactgaaagacaagtacnacacaagaccag

SEQ ID NO: 82648 - DNA, 416 bp, Zea mays
  unsure (1)..(416): unsure at all n locations
ccgggatcaccacgcgtccggacgcgctggcacagctcaacatcaaaacgggggtgcccatcaacgaaataaacccgctccgtcatccttcaacgtcctcttcttcttcatcgccgccatcaaccccggcaatggcaggttcatcatcggcgaggaagaggaataggctgctggcctcggacatgagtcgtgtgcgtttacttttacctgtgactgtgagtgatcgatcgattgctgtgtatcaattactcgtgatgagacctcgaaggtanggtgtcgcgttgggcggatggcgcagctgggcgtggccttctccatcatcggcgagatcatcacggngaagggcgcgctggcgcagctcaacatcgagacgggggtgcccatcaacgagatagagccgctcgtcatcttcaacg

SEQ ID NO: 82649 - DNA, 432 bp, Zea mays
gtggggctggtgagaaacgtggagacgatggttcagattatactatatttgttggggacttggcctcggatgttacagatttcattctacaagatacgttcaagagtcgttatccatcagttaagggtgcaaaagttgtctttgacagaactactggccgttcgaaaggctatggttttgtaaagtttgcagattcggatgaacagacacgggcaatgactgaaatgaatggacaatactgttctagcagggccatgcgccttggaccagcatcgagcaggaagaatactggtggaccacaaccatcgagtgctatttaccagaacacccaaggaactgattctgatagcgatccgaacaatactactgtatttgttggcggccttgacccgagtgtgactgacgagcttctgaagcaaactttcagtccat

SEQ ID NO: 82650 - DNA, 434 bp, Zea mays
cccacgcgtccgagcgccggttcgagaactacggcaagttcgggctgctgtgcggcgccgacggcctgccgcacctcatcgtcagcggcgaccagcggcactggggcgagttcgtcaccccgggcctgctcttcctctacatcgccggctggatcgggtgggtcggcaggagctacctcatcgccatcagcggcgagaagaagcccgccatgagggagatcatcatcgacgtcgagctcgccacccgcctcctccccagggggttcatctggcccgtcgccgcctaccgcgagctcatcaacggggacctcgtcgtcgacgacaaggacatcggctactactagctgcgcttgttcacctgcttgcactgtgcatatatattgctgctgccgagctgggcgcttggatagtacgtggggaaacatggatggctt

SEQ ID NO: 82651 - DNA, 394 bp, Zea mays
gccaaacacacgcgaagaaaaggagatagagtacaggttacagacaggcagagagcaaagatgtgtggtggtgcgatcctcgccgagctcatcccgaccacgccggcgcgccgcggcggcgcggcgtggcccgccggcaagtgcaagcggcggaaggcgaacgacttcgaggccgcgttccgggagttcgacgaggactccgaggaggaggaggaggacgacgagggggtggtggagagcaagcccgccttcgtcgtcgtcgcctcgtccgcggcgacgcagcccagggcgcgccaggagcagcggagccggcgccgggcgcccgaccagcagcagtacaggggcgtccggcgccgcccgtggggcaagtgggccgccgagatccgcgaccccg

SEQ ID NO: 82652 - DNA, 425 bp, Zea mays
  unsure (1)..(425): unsure at all n locations
cccacgcgtccgcccacgcgtccgctcaggctggtggctccttcactgtcgcacgtgatacctctggggagcaacttggcaggggtacaaagatgaccctctacctcaaggatgatcagttggagtaccttgaggagcgccgcctcaaggatctgatcaagaagcactccgagttcatcagctacccaatctctctctggattgagaagaccactgagaaggagatctctgatgatgaagatgaggaggataagaaggatgaggagggtaaggttgaggatgttgatgatgaaaaggaagaaaaggaaaagaagaagaagaagatcaaggaggtttctcatgagtggcaattggtaaacaagcagaagccaatctggatgangaagcctgaagagattaccanagaagagtatgctgctttctac

SEQ ID NO: 82653 - DNA, 405 bp, Zea mays
  unsure (1)..(405): unsure at all n locations
cccacgcgtcagacctcctctgctctcccccacctcccggtccggcagcagagagcgggggtgcagagagatcgagatccggaggccgcgagtgggagcgccaccaccagcgtctgcggcaatggcgggcacggtgacggtcccggggtcgtcgaccccctccacgccgctgctcaaggacgagctcgacatcgtgatcccgacgatccgcaacctcgacttcctggagatgtggcggcccttcttccagccctaccacctcatcatcgtgcacgacggcgacccgacaagaccatcaacgtgcccganggcttcgactacgagctctacaaccgcaacgacatcaaccgcatcctcgggcccaaagcctcctgcatctccttcaaggactccgcctgccgctgc

SEQ ID NO: 82654 - DNA, 274 bp, Zea mays
cccacgcgtccgcacacgcgtccacggacgcgtgggggctatcagaggaagatatttcttactatgcagaaaaatttgcaaaatcaggctttactggaggacttaactactacaggtgcatagacaggagttgggagctttctgcggcatggactggagctccgataaaagttccgtcgaaattcattgttggggaccttgacattacatacaacgccccgggggtaccggactacattcacaagggtggcttcaaggcaagcgtgccaaatct

SEQ ID NO: 82655 - DNA, 396 bp, Zea mays
  unsure (1)..(396): unsure at all n locations
caccacgcgtcagcccacgcgtccgcgccgccgaggtcctgggcgccgtcgacaaaccacctccctcccccgtctctcgtcgtctcggaaggaacggccgcccgtcgcgccaaggattcaagggtgtgggagctgagttgggaggaggactgctgctgcagccatgaaggccctcattctcgtcggaggcttcggcactcgcctgcgcccgctcacgctcagcgtcnccaagccgctcgtggatttcggcaacaagcccatgatcctgcaccatatcgaggctctgaaggaagttggtgttacagaggttgtcctggccatcaatttacagcctgaggtcatgctcaactttctcaaggacttcgagagcaagcttggcatcaagattcactgctc

SEQ ID NO: 82656 - DNA, 394 bp, Zea mays
  unsure (1)..(394): unsure at all n locations
accacgcgtccgcagacgcgtggacgcgtgccatcctagggtttctttccccgtcggcgcctcnccagatttggccgccgccgccgctgacccaggttgtcttgatggcgcccgctgtagaagccgtgaaggagacaggcaccttccagaaagttcctgccttgaacgaaaggatactgtcatccatgtccaggaggtctgttgctgcacacccttggcatgatctggagataggtcctggtgctccaaccatattcaactgcgtcattgagataccaaggggcagcaagggtataatatgaacttggaggggaagactggactgattcaagtggaccgtgtgctgtattcaacagttgtttaccctcacaacaatggattcattcctcgcacg

SEQ ID NO: 82657 - DNA, 255 bp, Zea mays
tccgacacggttctgttactaacatgtttacttccattgtgggtaacgtatttggattctaagccttacgcgctctacatttggaggatatacgacttccccctgcgtagtcacgaactttctaaggtcctcctcacggtatccaagttgacagggataagttgaacaagtacggtcgtcctttactatgatatactactaaaccataaataggattatccgcatcacacttactgtacagcgtattatcattgt

SEQ ID NO: 82658 - DNA, 416 bp, Zea mays
aggacgcgtgggtccgaattcccaggcaggcaggtcggcgaggagggcaggaagaccgaagaccgagccgtgcgggggctcgggacgggaacgggacaggaccccaaaatctcagatccttcctgcccgcccgcccgtgcccgtcgacgcgtcgttcttgccggccgcgccccacctccgccctctcctcctccaggggaatcggatacgccacaggctgcgcgatggtgctgtgggtcttcggctacggctccctcatctggaaccccggcttcgacttcgacgacaaaatcctcggcttcatcaagggctacaagcgcacctttaatctcgcttgcattgaccacagaggcacaccggagcatccggcgaggacctgcacgcttgaaaccgacgacgaggccatatgccgggga

SEQ ID NO: 82659 - DNA, 311 bp, Zea mays
  unsure (1)..(311): unsure at all n locations
cccacgcgtccaggccgggaccgtcgggtacgtggcccccgagtacgggcagacgtggcgcgccacgaccaagggcgacgtgtacagctacggcgtgctgctgatggagctcgccacgggccggcgcgccgtggacggcgccgaggacgagtgcctggtggagtgggcccggcggatggccagagaagggtggagttcggcgggcgccgtcgtcggcaccgtgtcctgngagctcctgatgctcggcatgcggtgcacggcggacgcgccgcaggagcgccccgacatgccggacgtgctcgccgcgctgc

SEQ ID NO: 82660 - DNA, 377 bp, Zea mays
  unsure (1)..(377): unsure at all n locations
aacacctcgcttcactagaggaataatcctagcagcttcggttgccctcaaaattgtccggaaaaaggatttgaagcattgtgagagggccctgagacgatggcgaacctgttcctcaagcaggcaaagcagtacgtggcgacgcggccggtctacccgccggagctcttcgacttcatcgcctccaagacccctcgccgcgacatggcctgngatgtcggcaccggcaacggccaggccgcagcgtcggtcagtcgaccatgcatcctcgctctcgcctacacggaacgctgcagacgcactgtccgtgcattatctttataaagtgaaggctggctgggtgaactttcattcaacttgcagctggcgaaactgta

SEQ ID NO: 82661 - DNA, 466 bp, Zea mays
cgcgtccgatggagtagtggtaggaaaagctcgtcgccgagtcgccgtacgggggctccggtccggttaaccaaccggcggccggcggttactgaggcctgagggcgaggcgatgggccgcctccgtgacgggcgagccttcctccaccgcgcgcttgtcctctcgtcgctgctccttctcgcctccggcgaaatcttcttcgaggaacggttcgatgatgggtgggatagccgctgggtgaaatctgattggaagaagagccaaggacaagctggaaccttccgacacacagcgggaacctactctggagaccctgacgataaaggtatacaaacaactggggatgccaaacattttgctatatcagcaaaattcccacaatttagtaacaaggatcggacattggttatccagtactctctaaagatgaacaagatattgaatgccgtggtgcttacatcaaac

SEQ ID NO: 82662 - DNA, 421 bp, Zea mays
aaccagattttgatgcctttattgatccgcacaagcagtatgctgatgctgtgattgaagttctgccgacccagttgattcccgacgacaacgaaggaaaggtgctgcgtgttaagctcatcatgaaagaaggggtgaagaacttcaacccggtttatctctttgacgaaggatcgaccatcagctgggtgccttgtggaagaaagctcacatgctcttaccctggcatcaaattttcctatggcccggacacttacttcggaaacgaggtatctgttctggagatggatgggcaattcgacagactagatgagctcatctacgtggagagccatctaagcaacctttcaaccaagttctacggagaggtgacacaacaaatgctaaagcatgcagacttcccaggtagcaacaacgggac

SEQ ID NO: 82663 - DNA, 276 bp, Zea mays
cccacgcgtccggcgaactttgacaccctggcaatggtgtttaacaggtcgagcagatttggaaggctgcagggagtgaagtgtgcgattgcagggaggaacctttacatgaggttcagctgcagcacaggggatgccatggggatgaacatggtctccaaaggtgtacagaacgtgctggactacctccaggctgacttccctgatatggatgtcatcagcatatcaggtaacttctgttctgacaagaagtcagctgctgtgaactggatcgat

SEQ ID NO: 82664 - DNA, 373 bp, Zea mays
ttcgagatttgaattccaccggcatttggtccaaaatttggcaaggtttttaaccaggtttcccctttccaaatgcagggtttatgaccaaattaaagtacttcattgttgtagatccattacaaatgacatactaaatatctgaaaaattggacgctggacagcagggaccactttttatggtgactgtacaaaactgtcctggtgaaattttcataaacatctctcctaccaagtgctggaacatggttcgtgaaaggctcaatatggaaataaggaggcagctcaatatgggaagagctaaccttcctacactacagcctccaggatcagttgatggccatgaaatgtttgggttgttaacaccagcaat

SEQ ID NO: 82665 - DNA, 384 bp, Zea mays
acccaagcgtcaagaggcggggatgacgagcccaatggtggccaccccggtccagttccacacaaccggccgcctcagcttctgctccttttcctttcccagcgcatcagggaggcggcgattcgcggcggtgagggcgtccgcggagacgatggcgacggagaagctgggcatcaaggtggagcgcaacccgcccgagtcccgcctctccgagctcggcgtccgccagtggcccaagtgggggtgcgagaagagcaagttcccgtggacctactccgccaaggagacgtgctacctgctgcaggggaaggtgaaggtgtaccccgaaggccacggggaggagttcgtggagatcggcgcgggagaccttgtcgtcttccccaa

SEQ ID NO: 82666 - DNA, 369 bp, Zea mays
ccggcttcttcggcctccagtcgaacacgctgcagagctaccccgcggagctgacgctggcgacgctgatctgcttcctgggctcggtgctgaccggcggggtggcgctggtggcggagcgccacgacatgagcgcctgggtcattggcttcgacacccgcctcttcaccgccgtctactccgggatcgtgtgctccggcgtggccttctacgtgcaggggatcgtgacgcaggcgcgcgggccggtgttcgtgacggcgttccagcccctgtgcatgatcatcaccacggtcctcggctccaccatactcaaagaggagaccaccttgggaagcgtgatcggcgcggcgatcatagtggtggggctct

SEQ ID NO: 82667 - DNA, 353 bp, Zea mays
cccacgcgtccgcgagttcagatcgagcgcgcgccaagcaagtcttccggccggccgcgaagagagcaatcaagcaagacaagatggtgaagctcgccttcggaagcgtcggcgactccttcagcgtcacctccatcaaggcctacgtggccgagttcatcgccaccctcctcttcgtcttcgccggcgtcggttccgccatcgcctacgggcaactgacgaatggcggcgcgctggacccggcgggcctggtggcgatcgcgatcgcgcacgcgctggcgctgttcgtgggcgtgtccgtcgcggcgaacatctcgggcggccacctgaacccggccgtgacgttcgggctg

SEQ ID NO: 82668 - DNA, 380 bp, Zea mays
acgttcaccaaaagctgctactcatcccacctttgccacttccgtgaaaaagcccattggcgcaaagaaggttggaggcaaaactggagggcttggtgttcgtaaactcacaacaaagccaaatgaaagcctgtatgagcagaaaccagaagagccaaaacctgctatacctgccttgactgctccaactgcaaaaggtggtccatccttgcattcacgttttgaatatgtggataacgaacaatcatctgtttcaagaaccgggggatctggatctcgtgtaaccggtcatgtagcaccaccaaaatcatctgacttcttccaagagtatgggatgggtaatggattccaaaagaaatcaagcaacgcctcaaaagctc

SEQ ID NO: 82669 - DNA, 372 bp, Zea mays
agcaaccggtccagcactttcacgctcagctccagcaatggctgcctccaccatggcgatctcctccacggcgatggccggcacccccatcaaggtgggctccttcggcgagggccgcatcaccatgcgcaagaccgtgggcaagcccaaggtggcggcgtccggcagcccctggtacggccccgaccgcgtcaagtacctcggccccttctccggcgagcccccgagctacctcaccggcgagttccccggcgactacggctgggacaccgccgggctgtccgccgaccccgagaccttcgccaagaaccgcgagctggaggtgatccactcccgctgggccatgctcggcgcgctcggctgcgtcttccc

SEQ ID NO: 82670 - DNA, 376 bp, Zea mays
acccacacgtccggggaacacgagtggttccagacacgcgcaagggtcttgtccgcgttggtaggggtgaagagggattagtccattttcagtggcttgaccgtggacagaacatagttgaagatgatcaaatcatctttcctgatgaggcggtctttgagaaggtgacagaatctcctggaagggtttacatcttgaagtttaagcaagacagcagaaaattcttcttctggatgcaggaaccaaatgctgatggggactcccagacttgcatgcaagttaatgcctacataaatcgatcattagatgctgaggctgatcttcgagtacctattgaagcagaaatgtctgaagatacggctgatgatgatatctc

SEQ ID NO: 82671 - DNA, 378 bp, Zea mays
cacagatattttggtttggagcctaatcaagtgacatttttccaacagggtactattccatgtgtatctcatgatggaagatttattatggagacaccatataaggtagcaaaggctcccgatggcaatggcggagtatatgctgctctaaaatctaaaaggttgctcgatgatatggctgcaaaaggtgttaagtatgtagattgctatggagttgataatgtattggtccgtgttgcagatccaacattcctaggatacttcattgacagaggtgtatctgctgctgctaaggttgtcaggaaggcatatccacaagagaaagttggagtatttgttcagcgtggaaagggtggacccctctctgtagttgaatac

SEQ ID NO: 82672 - DNA, 387 bp, Zea mays
acccacgcgtccgcacctccaaccatgggtaaagagaagtcccacatcaacattgtggttattggccacgttgactctggcaagtcgaccaccacaggacacctgatctacaagcttggaggcattgacaagcgtgtgatcgagaggtttgagaaggaggctgctgaaatgaacaagcggtccttcaagtacgcatgggtgctcgacaagctcaaggctgagcgtgagagaggtatcaccattgatatcgctctgtggaagtttgagaccaccaagtactactgcacggtcattgatgcccctggacaccgtgacttcatcaagaacatgatcactggtacctcccaggctgactgtgctgtccttatcattgactccaccactggt

SEQ ID NO: 82673 - DNA, 394 bp, Zea mays
  unsure (1)..(394): unsure at all n locations
aaactgaaaaaaggccatacaacctcaaggaggcaaggtgataatacgggaaaccttggttggaccaggatcttcgccttgcaaccggaaaaccttgaaaacgcaatgctggtttgttcccaaaaccatgacaatcaacggtgtcaaccgaaatgaccaaaattggaaaaagataacctttgaacccgggttaacatcttacaagatcatacctgtcctgggcactcgatccataattgaagtctgcccatagaaaccaatataattaaggatggcaacagcctcccatcgcccttgcgagtataattccaaaccagcacttcaatacttgaatccgtgaggttttgaggtcacttacgtgtnttactcattgtacgcttttaaacaataacta

SEQ ID NO: 82674 - DNA, 376 bp, Zea mays
acctccctctccgcctcccgtccccaaggccaatagttttcaagtggcaatggcggaccaggctaaccaacccactgtccttcataagctcggtggccagttccacctgcgctcgatcatctctgaaggtgtacgggcccgtaacatatgcccatctgtctcatcttatgaaaggagatttgccacaaggaactacatgacccagagcctttggggcccttcaatgtctgttagcggtggcatcaatgtcccagtgatgcagaccccgctctgtgctaatgctcctgctgagaaaggaggcaagaacttcatgattgatttcatgatgggcggtgtttcagctgctgtttcaaagactgctgctgctcccatcgag

SEQ ID NO: 82675 - DNA, 382 bp, Zea mays
cggacgcgtgggcggacgcgtgggctcgtgcgcctcgtggattcgtgggtcgcgactcgcgaccagacgacaaacgtcgagaggggccgatcgtgatcgagcagcgatgtcgacgtcgcggaggcggacactgctcaaggtcatcgtccttggcgacagcggggtcgggaagacgtcgctgatgaaccaatatgtccacaaaaagttcagtcagcagtacaaagctacaatcggtgcagatttcgtcacaaaggaggttctgatcgaagacaggctagtcacgttgcagatatgggacaccgcggggcaggagagattccagagtcttggggttgcattctacagaggggccgattgctgtgtgctcgtctatgatgttaac

SEQ ID NO: 82676 - DNA, 249 bp, Zea mays
  unsure (1)..(249): unsure at all n locations
cggacgcgtgggcgctcaaggccctgggcaggcccaacgccgtggacgggaccatgtcgccgccgttgcgcgaggagttgatgattgcgtacaaggacgacgaggtcgtggacgcctgagtgcggcaagcagagaggaggatcgacgccagcagcgtcttatcttaattgccttgttgttcaatgatgaatcgatcgaattcccttgggttagctttattattgttgttgttattattaacaannanna

SEQ ID NO: 82677 - DNA, 415 bp, Zea mays
cggacgcatgggcggacgcgtgggcggacgcgtgggcattgctactggactctcgaattatatttcttggaatgcctattgttccagcagtaactgagcttattgctgctcaatttctatggctagactatgacgaccgcacaaaacccatttatctgtatataaactccactggaactatggacgaaaataacgagcttgttgcatctgaaactgatgcttatgcaattgctgattttatcaatcgaagtaaatccaaggtttacacaatcaatcttagcatggcatatggtcaggctgcgatgcttctttcccttggtgtcaagggcaaaagaggagtgctgccgaattcaatcactaaattgcacctgcctaaggtgcacaaatctggtggagctgccattgatatgtggat

SEQ ID NO: 82678 - DNA, 400 bp, Zea mays
  unsure (1)..(400): unsure at all n locations
cacacgcatccgggtatatcgtaccctgaattgacagagatgcaagcccgggccatttttgaagctgctatagcaatgaccaaccagggtgttcaagtgttcccagagataatggttcctcttgttggaacaccacaggaactggggcatcaagtgactcttatccgccaagttgctgagaaagtgttcgccaatgtgggcaagactatcgggtacaaagttggaacaatgattgagatccccagggcagctctggtggctgatgagatagcggagcaggctgaattcttctccttcggaacgaacgacctgacgcagatgacctttgggtacagcagggatgatgtgggaaagttcattcncgtctatcttgctcagggcatcctcnaacatgacccct

SEQ ID NO: 82679 - DNA, 243 bp, Zea mays
gacgcgtccgcactccagcgcctctaccctcctcgctgcctcactccctctgaaggtcccagatccttccggttacacaaacccgccggcaccaatggcttctggtcagctcgcttgcacctacgccgccctcatcctcagcgactacggcatcgccatcaccgccgagacgatcgccaccatcgtgaatgcggctaatatcaaggtcgagtcctactggccggcgctcttcgctaagctcct

SEQ ID NO: 82680 - DNA, 389 bp, Zea mays
aacatcgagtacagtcggctaggtaatctggtggtacgacgacatggcggccaccagcagcaagtcgtcgtcgtcctcgagctcggcgcagcgggcagctgccgcactgctcgtggccgccgccgtggcggtgtccgtcctggtggtgggcgcggcggcggtgtgcgacatgagcaacgagcagttcatgtcgtgccagcccgcggcggccaagacgacggacccgccggccgcgccgtcgcaggcgtgctgcgacgcgctggcgggggcggacctcaagtgcctgtgcggctacaagaactcgccgtggatgggcgtctacaacatcgaccccaagcgcgccatggagcttccggccaagtgcggcctcgccacgccgcccgaatggt

SEQ ID NO: 82681 - DNA, 432 bp, Zea mays
gacccaggcgtcgggaagaagacaagtgtcaagtgaacctgaaacttgcggtgtcactggctggtataccctgattgtgagtgagtgatcaagctagctgagctccgatcctcgctagctagctaggataccgccataccacaagtcttcttcacaagtttaggagtgacagcaacatgagatctcgatggcctctgccaccgtgctcaagtcctccttccttcccaagaagtccgaatggggcgccaccaggcaggccgccgcgcccaggccgcccaccgtctccatggtcgtccgcgcctccgcctacgccgatgagctcgtgaagaccgcgaaaacgatcgcgtcgccggggcggggcatcctggcgatggacgagtcgaacgcgacgtgcgggaagcggctggcgtcatcgggctggagaacacggag

SEQ ID NO: 82682 - DNA, 371 bp, Zea mays
actgcacgtggtctggaacatcggcggtacgctgacaatgctcggttgcgtcagtagcatcgattggctctgcacggtgcgcgtctacgaagataggaagacgtatgggctgctgatcgctgctgccctcctgcaaggcgcttcggtcggatgcctcgtcaagctcgccgtggaatttgatccaagcatcctggtgacggcattcgtggcgactgccatcgcgttcgcgtgcttcaccggcgcggccaatttggccagccgcagggattacctctacctgggtgggctgctctcgtcggggctctccatcctgctctggctgcagatagccggctccatcttcggccactccgcatccagcttcatgttcg

SEQ ID NO: 82683 - DNA, 378 bp, Zea mays
cacacagaagcggcggcggcggagcaaacgcaggcgaaggcgagggtgtgagggaaggagcaccagccatggtgcacgtcaacttctaccgcaactatggtaagacgttcaagaaaccaaggcgtccttatgagaaggagcgtcttgatgctgaactgaagctggtcggtgagtatgggctgaggtgcaagcgtgagctttggagggtccagtatgcactgagcaggatccgtaatgctgcaaggcacttgctcacccttgacgagaagaacccccgtcgtatctttgagggtgaggcgcttcttcgccgcatgaaccgctatgggctgcttgctgagggtcagaacaagcttgattatgttcttgccctcaccgctg

SEQ ID NO: 82684 - DNA, 388 bp, Zea mays
ggtccacgacgcgtccggaatttatacaaaagaaaatacttatgaatggtgaatccgtcaaaggccttgatgggttcaacatcaaaaaaaattacctctgcaaggtaccaaactttgatttttaaatgataaagctgagaccgggtggttgacttgcacgagaagggagtctcggtgtagtgtctccgtttgagtcgaattaaggacatgtcgatgtaggcttgatgattgaggaccttttaactggtcacatgcctcatcatggataagctttgcctcgggcagactaataccagaaaggccaacacacaatgggagtggagagatggcgagagtagcgtgtaccctccatggtaagaagctggacggtggtgtatctgtgctctcg

SEQ ID NO: 82685 - DNA, 345 bp, Zea mays
atgggcatttgtggagaacacggtggagagccttcctctgtggccttcttcgcgaaggctgggctggattacgtttcttgctcccctttcagggttccgattgctaggctagctgcagctcaggtgcttgtctgaggctgcctcctcattggcaaccggattgcctgctgctggtggatgtggtgatcaacagtattattacagagccatgctatgtgaacattactagtagcagtgctcataaaagctacaatcccatgtcctttttttccccagtcatgtaaaacttccaaactgctccatggttcaaaactctgttcttcaatacatcatcaattatcgatt

SEQ ID NO: 82686 - DNA, 373 bp, Zea mays
acggacgcgtgggtattattaagaccaactagcaacatagaaagcacaatagtgtaccaacaatggcagccaaaatattttgcttccttatgctccttggtctttctgcaagtgctgctaccgcaaccattttcccacaatgctcacaagctcctatagcttcctttcttcccccatacctctcaccagcggtgtcttcagtatgtgaaaacccaattcttcaaccctacaggatccaacaggcaatcgcagcaggcatcttacctttatcacccttgttcctccaacaaccgtcagccctattacagcagttacctttggtgcatttgttggcacaaaacatcaaggcacaacaactacaacaacttgtgct

SEQ ID NO: 82687 - DNA, 404 bp, Zea mays
cccacgcgtccgcccacgcgtccgcggacgcgtgggggctgtgtccgtggctccattcctaaaccccgttgtggacgatggccggtgatgatggccatcgctaagatcatcttatgtcaagcactcaagccacagattgttttcttggagatccacctttaaaggccccattatttaggttgaatgtggatgacagatttatgttgttgactggatgagatgtcctagggtttcctcacgttgtagaatacaactctcacaagtataagaatctaggaacatattccttcgatgtaacatacctcttttgtttaatctgttttgtaagagaaaccagaagaacaccttgtatttcggttgatattttgaaacccacagccaattgaatgccgggttttttaggc

SEQ ID NO: 82688 - DNA, 376 bp, Zea mays
cccacgcgtccgcccacgcgtccgggattatttacaagcggtattcaagctcttatttttgcaacgttagccgcagcctatataggtgaatccatggaaggtcatcattgaattaactagtttttgaaatagtctttctttttttagcttagcccaattcatgcatgattccggataatcctcttagttggaaaactaaatagttcgaaaggcgtatgaatatacaacctagagttgtaggagagagaatagactatattatggaagaggtaaagtatatatgcattcaggggggccaagtcaggttagatctatatctttaatgcctataagacagtcatcttttgtgtggctttctaaagaatgattttagaat

SEQ ID NO: 82689 - DNA, 421 bp, Zea mays
agctagcgcttatagcttgtcagccatggccaccgccgccgcgtctagcctcctcaagtcctccttcgcgggctcccggctcccggccgccacgcggaccacaccggcgtccctcgtggtggccaccggcccgcgcggcgccggcgcggggcccatctgcgcgtccatgtccatgtcctcctccaacccgccctacgacctgacgtccttccggttcagccccatcaaggagtccatcgtgtcccgcgagatgacccgtcgctacatgacggacatgatcacctacgccgacaccgacgtcgtcatcgtgggcgccggctccgcggggctgtcctgcgcgtacgagctctccaaggaccccgccgtgagcatcgccatccgtggacagtcggtgtcgccgggcggcggcgcgtggctgggc

SEQ ID NO: 82690 - DNA, 291 bp, Zea mays
agggagtggccaaccggtgataatctagctagccagcctcgccatgcctcgccagaggaccctcgcctccgcggcggcgggcgggcggctgctgctcgtggtggcggcggtcctgctgtgcctgtccgtgcctccggggcgcgcggcgcctccaggcgcggaggtcgcggagttccctgggttcacgggcaaactcccctccaagcactacgccgggtacgtaacagttggtcgccatgagcaacgaaagagacacctgtactactaccttgccgtctctgaaaggaaccc

SEQ ID NO: 82691 - DNA, 413 bp, Zea mays
ggtccacgacgcgtccgcaccacgagtccgattccagataagcacgatccgatgatggccccaccgatatccgccgatgccttggtggaggctgcctcggccgtcgccgcgtacccagccatcgcgccgaacagaatgctttgcaaggacgcgccggcgccggccatctctgtcgtctcgaagcagacggtccggcccgccggcgcgtcggcggcggtcggcagtggagacctcaggctctcggtgtcggacatgccgatgctatcgtgccactacatccagaaggggctgttcttcccgccgcctcctcacggcgtgctggcggcctcgctggtgtcgtcgctcgtggcggcgctctcccgcgcgctcggcgtcttctccgcgctcgccggccgcctcgtcacgctccacga

SEQ ID NO: 82692 - DNA, 423 bp, Zea mays
  unsure (1)..(423): unsure at all n locations
gagaccaacaagcaacatagaaagtggaatccagtagcaacaatagagcaacaatggcgaccaagatattttccctccttatgctccttgctctttcggcatgtgttgctaacgcgacaattttccctcaatgctcacaagctcctatagcttcccttcttcccccataccttccatcaatgatagcttcagtatgtgaaaacccagctcttcaaccctataggctccaacaagcaatcgcagcaagcaacatacctttatcacccttgtttcaacaatcgccagccctatctttggtgcagtcattggtacaaaccatcagggcacagcagctgcagcaactcgtgctacctgtgattcaacaagtagctcctggcaaactttctcnctactctcagcaacaacaatttcttccattcaaac

SEQ ID NO: 82693 - DNA, 386 bp, Zea mays
ccacacgtccggcctcagaggagctggcaaacgactgtgataataaaaggctaaatccaggaaatgacaattatccactttcaacagcaggtgcaaataatttgtttttgggtattgagcaaggagctggaagcagcaatggccaggctgctttttcgaaatttgactatgggagctcaatgtcattaccatctgggcagggaatgtctggtcttatcgtaaaaggggcaaaatggcgcgacggggactggttgtgcaacaactgcaacaaccacaactacgcatctcgtgcgttttgcaacaggtgcaaaactcagaaagaatctgcagttcaccctggtgtgctatagcttgcttttgctggttcatattgttggactcctttg

SEQ ID NO: 82694 - DNA, 417 bp, Zea mays
gggtccagtcagactccgatttagcagttttctgctccagctggcttccttgaccatcctcacaggggatttgagaacgttacctatatgctcgaggctgctttcagggcggcatcagttaccacgacttttcaggccacaagggaaccatcaacccaggagacgttcagtggctgacggcggggcgcggcgtcgtgcacgcggagatgcccgccgccggccagggagtacagaggggcatcaacatctggatcaacctctctgccgccgacaagatggtggagccgacgtaccacgacctgccgagccacgacatccccgccgccgcggcggacgccgcttgcagcgtctccgtcaaggtcatcgcgggcgagtgcctcggcacgcgctccccgctccggccccgcaccccgggct

SEQ ID NO: 82695 - DNA, 286 bp, Zea mays
  unsure (1)..(286): unsure at all n locations
cggacgcgtgnggtccctcnaccgcaacggggattgagaaactgctgcgcctggaagaaacggcgccgagccgtggctcgtggtgctgtacgcgccctggtgcccgttctgccaggccatggaggcctcctacgtggagctggccgagaagctggcggggtccggggtgaaggtggccaagttccgcgcggacggcgagcagaagccgttcgcgcaggccgagctgcaactgcagagctttcccaccgtgcgcctgttcccgggccgcaccgccaggcccatcaag

SEQ ID NO: 82696 - DNA, 421 bp, Zea mays
  unsure (1)..(421): unsure at all n locations
caaaggaaattccttgaagaacaaccaaggcttcaaccgttgccccccccggcaacaaaatcctggggaacccccttgccgaacccggcccaaaaaaacgggcccaccttggcccggtccgggtccggtttgggcggcaaggcaaaccctgctccaaaaaaggtggcgaaaacatcgacctcctctgaccggcccctgtggttccccggcgccgtggcgcccgactacctggacggctcgctggtcggcgactacnggttcgacccgttcggtctcgggaagcccgtggagtacctgcagttcgagttggactcgctggaccagaacctggccaagaatgaagccggcggcatcatcggcacccggttcgagtcctccgaagtcaagtccaccccgttgcagccctacagcgaggtgttcg

SEQ ID NO: 82697 - DNA, 399 bp, Zea mays
gtcgacgcacgcgtccacggacacgtgggagctcggacaccatcgacaatgtgaaggcgaaaatccagaacaaggagggcatccccccggacaagcagcgtctgatcttcgccggcaaacagctggaggatggccgcaccctagcagactacaacatccaaaaggagagcaccctccaccttgtgctccgtctccgtggtggtcagtaagtcatgggtcgtttaagctgccgatgtgcctgcgtcgtctggtgccctctccatatggaggttgtcgaagtatctgctgttcgtgtcagtgttggtttaataatggaccggttgtgttgtgtgtgcgtactacccagaactatgacaaatcatgaataagtttgttgtttgaaattaaagcctgtgctca

SEQ ID NO: 82698 - DNA, 399 bp, Zea mays
agatggcacaagccatggcgtccatgaccggcctctcgcagggcgttctgcccagcaggcgcgccgccaacagggccaggacggccgccgtcgtcagggcgtccgccgaggcgcaggcgcaggcgggccgccgcgccgtgctcgggctggtggccactggcatcgtcggcggcgccttgtcccaggcggtgcacgccgagaccgtcaagaccatcaagatcggagccccgccggcgccctccggtggactccccgggactctgaactctgaccaggccagggacttcgacctccccttgaaggagcggttctacctgcagccgctgccgccggcggaggcagttgccacggtgaagacgtctgcgcatgacatcatcaacctcaagccactcatcgaca

SEQ ID NO: 82699 - DNA, 296 bp, Zea mays
acagtccgagcggatcatcgtgttcaccaccaaccacgtcaagaagctggacccggcgctcatccgcagagggcgcatggacaaacacatcgagatgtcctactgcggcttcgaggcgttcaagttcctggccaagacgtacctcgacgtggactcgcaccctctgttcgacgccgtcggcgagctactccgggaggtggacatgacgccggccgacgtcgccgagaacctcacgcccaagagcctcgacgacgggccggactcgtgcctcgcggacttggtgaaggcgctggaag

SEQ ID NO: 82700 - DNA, 310 bp, Zea mays
agaggtggtggtgctcctgctgctgagtccaagaaagaagagaagaaagaagagaaagaagaatccgatgatgacatgggtttcagtttgttcgagtaatgcggtatacttggcatttggttttgctgtaccctttcgaaatctttatgtcgttgtttagtttgttgtattcgactatcttcttagactttgctgaaattctcaagagatttttttactcaaacatcagtccacttgtgattggcatttatatttcaaaaaaaaggatatgagtgaaagcgctggaaaaggccaaaaaagataacaaaaa

SEQ ID NO: 82701 - DNA, 378 bp, Zea mays
gtcgagggacgcgtccggctaaatgccggtgggctcgaccttctatataagtatatcccgtctttatcttctggatgaggattatcactcaagctagcatgtatttcaaacttaggaaaattttacatcattcaaaatgtaatccttctaattcacttttgtaaccactccgatcatgtacaatgtaaacttgttgtaaactgataaaattttgtaataaaaaaattccgctgtaaattatggtgtgtgttttgtgtttacttaatcctgcgatcttggcggtaagtggtttatccggggtccttgggacactcggacatatcctgttaagttgtttggtgcacatgcatagccgtttgaggtccttgggacaaagat

SEQ ID NO: 82702 - DNA, 380 bp, Zea mays
cccacgcgtccgtatctagatcgagagctgccttgtctgcacatgcaaaaccgccaaaagcgagcgcctcatgtctttatattgctctcaaaccctccgtttctcgctccaacccactgccactgtacttgtgttgtgttgtgttgtgtgctgcaagaagaagaggaggaggaatagcatgtgctgagaagcctgccagcgcgctttacgacaagcatatatgggggagatcaccaagcctttgcgaagcagaagcttccgaagatggcctacgactactacgcgtccggcgccgaggatgagtggacgctgcaggagaacatggacgccttctccaggatcttgagcagcggttgatgagataagattgccaagaaacg

SEQ ID NO: 82703 - DNA, 397 bp, Zea mays
aggccaaaacccgcgcacaccggcgacggcaggagaacctcccgccggccgccgccatgccgccgcctctacaggcccaccgcctactcatctcccaccgccgcctacccactccagctcgccgccggttcaccgccgcctcttccgtccaatccgctcccgccacaaccttggccccgggccccgccacatcctccatcctctccatccgcgagtcgctcctctcaggcgagaggaccgcggcggacatcacctccgagtacctctcccgcctccgccgtaccgagccgaccttgcgcagcttcatccacgtcgcggacgccgccgccgagcgggaggcggaggaactcgaccggaggattgcctccggggagaatgatgctgtgggtccgctcgc

SEQ ID NO: 82704 - DNA, 331 bp, Zea mays
cccacgcgtccgggatgaaggacgccaaacccgcaaagactccgatgggaaccgacggacacaccgacctcaacaaaggaggtaagtccgttgatcaaaaagcataccggtcaatgatagggtcattactttacttatgtgctagtataccggatattatgcttagcgtatgcatgtgtgctagatttcaatccgatcctaaggagtgtcacttagtggcagtgaaacgaatccttagatatttggttgctacgccttgcttcggactctggtatccaaaggggtctacctttgacctgattggatattcagactccgattatgctggatg

SEQ ID NO: 82705 - DNA, 383 bp, Zea mays
atgccgtgcagttcttgttaaggatgatttgaggagggaacttgaattggatcctgagcttcctgcagtactgctcatgggaggtggagagggcatgggtcctgtcaaaaagactgccagagccctaggagaatcattgtttgacaaagagcttggaaaaccaattgggcagcttattgtcatttgtggccggaacaaaacgctaagctcctcactgcaggcagttgaatggaaaataccagtaaaggttaggggatttgaaacccaaatggagaagtggatgggagcttgtgattgcattataacaaaggctggaccaggtaccattgctgaagccttgataaggggtcttcctataatccttaatgacttcatacctggac

SEQ ID NO: 82706 - DNA, 418 bp, Zea mays
acccacgcgtccgaatgaatttgctgattaccataataggatgcttcaggaggatttggaaaaactcaggaatcttcaccctgatgtaaccatcatttatgctgattattacggtgctgcattgaacatattccgtgccccactcaagtttggcttcacagtcccactgaatgcgtgctgcggaagtgacgctccgtacaactgttccccttcaatactgtgcgggcgtcctggatctacagtgtgccctgacccatcaaaatacatctcatgggatggtctacacttcaccgaggcgagttacaaagttgtcatccaaggagtactaagggggtacgccaaacctcctctttcagaagcctgcaaaggtgcggagttcaaagtttctcaactttcacaatgtacagataatccaaca

SEQ ID NO: 82707 - DNA, 377 bp, Zea mays
aaaatggtccagtgttttataaagaaggaataagtcaaaatccacttacgggcctctacttgtgccttaccaatgttgttacttcagaaagtgggaaattcctcttatcagctatgcgacaccgcttaaccacatggaccgagtatacaatatcaatggattctggcaacatctcaggatcaaaattaacctacattggaaaaataacgtctaacttcctaggcacaagatttttaattgatgatacacaatccccctataatggggctgtaattcctcctgccggaaggaccaccacgaggttcaactccacaaaagtctctccaaagctgccttcagtcagttataacatcgcacatgtatcgtatgagctaaat

SEQ ID NO: 82708 - DNA, 399 bp, Zea mays
cccacgcgtccggaattcttaattcatgagttgtagggagggacttatgtcaccacaaacagaaactaaagcaagtgttggatttaaagctggtgttaaggattataaattgacttactacaccccggagtacgaaaccaaggatactgatatcttggcagcattccgagtaactcctcagctcggggttccgcctgaagaagcaggagctgcagtagctgcggaatcttctactggtacatggacaactgtttggactgatggacttaccagtcttgatcgttacaaaggacgatgctatcacatcgagcccgttcctggggacccagatcaatatatctgttatgtagcttatccattagacctatttgaagagggttctgttactaacatgtttac

SEQ ID NO: 82709 - DNA, 397 bp, Zea mays
  unsure (1)..(397): unsure at all n locations
atctcctctgccgccgtcaccgccccttccttcgccgcaccagcgccagcccgcgccgtggtcagaaggaggtccttcaccgtgcgcgcctctctccgcaaggccaccggcaccgccgccgtggcaatggctgccagcgccctgcttgccggcggtgccatggcccaggaggtgctgctgggcgcaggcgacggcgggctcgtcttcgagcccagccagttcaccgtcaaggccggcgacaccatcacattcaagaacaacgccggcttcccgcacaacgtcgtcttcgacgaagacgaggtgccgagcggcgtcgacgccaccaagatctcgcaggangagtacctcaacgcgccaggcgagacctactccgttcacctcaccgtgccgggaacct

SEQ ID NO: 82710 - DNA, 389 bp, Zea mays
gtcacctgacagagcatctgtttttggaagttctgcagaagatggtttcttaaacgtgtgggatcatgagaaggtggggaagaagaaaaattctaatgtcccagccgggcttttctttcagcacgctggtcatagggataagattgtagacttccactggaattcgtcagatccttggacaattgtcagtgtctctgatgatggcgagagcactggtggaggtggaacactgcagatttggcgcatgagtgatttgatctaccgcccagaggatgaagttcttgcagagctggagaatttcaaggctcatttggccagctgtgcaccgaagaattgagtcatgtgggttacctgcggaatgcaatcctgtggaaactgagtaggtgatg

SEQ ID NO: 82711 - DNA, 418 bp, Zea mays
accacgcgtccgcccacgcgtccggcagagcagacgtatttgttccttggtgctggggaggctggaactggtattgcagaacttattgctcttgagatttcgaaacagacgaatgctccaattgaagagtgccgcaagaaggtttggctggtggactcaaagggtttgattgttgactctcgtaaaggctcccttcagccattcaagaaaccttgggcgcatgagcacgagcccttgaaaaccttgtatgatgctgttcagtccatcaaacctacagttctgatcgggacatctggagttggaagaacattcacaaaagaaatcattgaggccatgtcttccttcaacgagaggcctatcatcttttcactgtcaaacccaacctcgcattctgaatgcactgctgaacaagcatata

SEQ ID NO: 82712 - DNA, 355 bp, Zea mays
cccacgagtccgaacacgcgtccgcccatgcgtccggcagagcacacgtatttgttccttggtgctggggaggctggaactggtagtgcagaacttattgctcttgacatttcgaaacagacgagtgctccaattgaagagtgccgcaaaaaggtttggctggtggactcaaagggtttgattgttgactctcgtaaaggctcccttcaatcattcaagaaaccttgggcgcatgagcacaagcccttgaaaaccttgtatgatgctgttcagtccatcacacgtacagttctgatcgggacatctggagttggaagaacattcacaaaagaaatcattgagggcatgtcttcct

SEQ ID NO: 82713 - DNA, 396 bp, Zea mays
agcaacaccgcaatcagactctgccatgtttttcttcataacaaataagctcgggtttactccaaaatttctaggacgcgttacgcttgtcaaatctgttgcatccttactgggaatcggagtgtataatttgtttctgaaggaagttccattgaggaaaatctttcttgtgacaacagtcttaggttctgctctcggaatgacacaggttcttcttgtcactgggctcaaccggaagcttggcataagcgacgaatggttctccattggggattctttgattatcacagtcctcggccaggcttcctttatgcctgtcctggtgttggctgcaaagttgtgccctgtgggagcggaagcaactttatttgccactttgatgtccatctctaacgc

SEQ ID NO: 82714 - DNA, 398 bp, Zea mays
acggacgcgtgggtttagcataacacggggtgcatgcacatgtatccgattccctgcatcactcacacctcactttttctgctaaattgtggcagtggtgataattgatatgcatagactgtacttatttaatgactatgaaataccatttaacatagctattgtgcctgacagggtaaatctaccaaggacacacatagttaagccttgctcagctgacgactgctaaggaatttctgttaagtgcagtttggggggtcttctcaaccattgcttgacttaaggcaacacattagaggatattcatcagcatcagaggcaattcttcccaatctgatttgagaaaaaaatttgttggcaacgaaaaattagtgttttcttgctgaatcttggggggc

SEQ ID NO: 82715 - DNA, 422 bp, Zea mays
acggacgcgtgggagcggatctgaggcgacgatagatggaggcggcgggatctctcggtctgcagtcctgctccacctcgatggatgatgtctctgcgctgataattattggatcaatttcgataattattagtagatctatgagatatgccgcctggaagaggcgaggtaagctgcagcatgtaaaaaagagaaaaaagatgtgacatcctagaggaggaggcctttgccatgatgggtgcgctcgcatggcaggccaggcaataataaaaagatgattattgcgtgccgggggaggagatcgcacgggggttgatgtttttggccccgggttctcctccctcatcttgttccgtgttcctgtatgcgttgcttccgctcctgttggtccgctacgcacgccggatttttgcatcgagcac

SEQ ID NO: 82716 - DNA, 406 bp, Zea mays
cccacgcgtccgccccaggtggcggcagcggcggcggggtagcatttgtgctacgagggcttttgcaatggcggcttcggggttcggcggcggcgaggcgttccggctctcggccgcgccgggggccggcttactgaagctgcacaagggcgacatcaccctctggtccgtcgactgcgccaccgacgccatcgttaatgctgctaatgagcgaatgttaggtggcggaggtgttgatggagctatacatcaagctgctggaccagagctagtgcaagcatgccggaaagttccagaggtcaaaccaggagtccgttgtcctactggagaagctaggattactcctgcttttgagcttcctgcctctcgggtgattcacactgttggccctatatatgatttggac

SEQ ID NO: 82717 - DNA, 421 bp, Zea mays
acacttgggcggacccttgggcaattgctttcctgaacaattacttgccggcggtaaggcccataacttgcacggtgctgcacctaatggcgcaggggctgggcctcgacgacagggacgtgttcagccggctggtgctggaccgggacagcgactccatgctgagggtgaaccactacccgccagcggcggagacgaggcggctgacggggttcggcgagcacaccgacccgcagatcatctccgtcctccgctccaacgacgcgtccggcctcgagatcacgctgcgggacggcacctgggtgtccgtgccctccgacacggaatccttcttcgtcaatgtcggcgacgcgttgcaggtactccatagtcccatctaacattacattgctactttattattacatacacacatgacctg

SEQ ID NO: 82718 - DNA, 371 bp, Zea mays
  unsure (1)..(371): unsure at all n locations
cccacgcgtccgcccacgcgtccgcccacgcttccgcaagcaggaggcggacaaggtaagcagcaatcccaggaaccctaccgccgccgaacccgcaggaatgggtatcgacctcgtccccggtgggaggaataagaagaccaagcgcactgcgcccaagtctgacgatgtctacctcaagctcctcgtcaagctctaccgtttcttggtcangaggaacaatagcaatttcaacgctgtcattctcaagaggcttttcatgagtaaaaccaaccgaccaccaatctccatgcgccgccttgtcaagtttatggaaggaaaggagaagaacattgctgtcattgttggcacagtcacagatgacaaaagga

SEQ ID NO: 82719 - DNA, 408 bp, Zea mays
  unsure (1)..(408): unsure at all n locations
cccacgcgtccgcccacgcgtccggttcctgctccacgccctcggcttcgccgccgacgccgaccgcgacgacgtcttccccatctacgtcggcgacgaccgcaccgacgaggacgccttcagggtgctgcgcgcgcgcgggcacggcgccgggatcctcgtgtccaggttccccaagggacacagcgcgtccttcacgctacgcgaccccgccgaggtcaaggagttcctgcgcaagctcgtcggcgccaacgacgacagctgatgatccggcccgcgattcgtttccctttcccgccgtgnacagctccgatccgcctgtgtcaagccgctaactcaacctcggctacctacctgctgcaccggcagagggcttccttgttgttgcaactgcatctccatcgagca

SEQ ID NO: 82720 - DNA, 370 bp, Zea mays
gcggcgatgtctgggacaccccgtggccagaaccctttcagctcaagggagggcttcacagtcaacctccgcacctttgccatggaccacgaacagtattccaagaagagagctttcgtccacgtcctactgaagagaaagaagaccttcgtgacggtgacagactccagcgggaacaaaaagacgggtgcctccgccggctgcttggaggacaggaaaggacggtcccgtctctcccgatacgcttccgaagcggtcgcggagcaggtcggacggtccgccaggaagatggggttgagctccatcgtcatgaaggtgaaaggggcttcgttcttcaagaagaagaagaaggtgatcctgagcttcagag

SEQ ID NO: 82721 - DNA, 370 bp, Zea mays
accacgcgtccgcaaagctctctggcatctctgaaatcatccccgagatggagatctgcgattttgacttcgaaccctgtggctactccatgaatgcgatccatggctctgcattctccacaatccatgtgacgcccgaggacggtttcagctacgccagttacgaggttatgggcttggatgccactgctctgtcttatggtgaccttgtcaagagggtcctccggtgctttggcccctcagagttttccgttgccgtgaccatcttcggcgggcgtggccatgccgggacatggggaaaggcacttggtgcagaggtctatgactgcaacaacatggtggagcaggagctgcctggaggcgggctcct

SEQ ID NO: 82722 - DNA, 421 bp, Zea mays
acggacgcgtgggcggacgcgtgggctgttaaccgatggatttggtcgtcgaaagcgtcgttcatgggcgcttccccgtcaggccatcaaggtttcctcttctgcccggctcgttgccctccactaccgtggcactgagtgctgccttttccggatgtccatgcccacccattgttcgtcggaatgccccagcggtggtgccatttgccaagaagaagaggaatgaatatatcgaagatccgccagatgaggaggtcgcagatgatttcaccgacgagttggaggaggacttcgacgacgccaaagaagacgaaggcgatgtaatggatgatgacgaagagtatgaggacgactatgactttgaagatgattttgagagtgatgatgaacaggatctttatgctggagatggaagtgctgg

SEQ ID NO: 82723 - DNA, 361 bp, Zea mays
aactctcctcctccagagctcgtcgccaccggccaccgccaccctcgatcacgccgtccgtcgaggtaaggtcagcatggtgagggtcagtgtgctcaacgatgcgctcaagtccatgtacaacgctgagaagatcggcaagaggcaggtcatgatcaggccgtcgtccaaggtcatcatcaagttcctgacggtcatgcagcgccacggctacattggagagttcgagtacgttgatgaccaccgatcgggcaagatcgtggtcgaactcaacgggaggctgaacaagtgcggcgtcatcagccctcgctttgatatcggcgtgaaagacattgagggatggactgcaaggctgctcccg

SEQ ID NO: 82724 - DNA, 380 bp, Zea mays
tctctgctagcacccatcttgcagcaggcggagccgcccgacccgatccgtgcgtgtgtgttggtagagatggctacagcagcttacgctcccatggcgagccaggtgatgaagagcatcccggtgcactcgaggccgaggggcctgtcaggcgctgcgctcacgcggccccggccccggttcagcgtcgtcaaggccgccatccatcccgagaatgcaacgtaccagctggtgcagcccatcaacggcgacccgttcatcggcagcctggagacgcccgtcacctccagcccgctcatcgcgtggtacctctccaacctgccggcctaccgcaccgccgtgagcccgctgctgcggggcgtccaggtcagcctcgccca

SEQ ID NO: 82725 - DNA, 429 bp, Zea mays
  unsure (1)..(429): unsure at all n locations
aggctgcagtatattctgtgagaatggcatggggtcaaggtgctaagaggtccatactagggcttctctttcgttctcagcaccaaactgctcgggcatactcttcttcagcattccagactcaccaattgagcactcatgttccccaagatggagtgtttattaggagattcggctctgaggtgtcttcttcagagcaaatgaaccttattaagcaactcagacaaagaacgagtgctccaatcaaagatgtcaaggcctctctagttacctgcaactgggatattgaggctgcacagaaggacctaaggaagagaggtgttgctcttgctgccaaaaagtcttcacgcactgctgctgaaggtttgctagctatcgcacaagatgacaanaaggctgctgtagttgagcttaactgtgaaactgatt

SEQ ID NO: 82726 - DNA, 383 bp, Zea mays
cggcccacgcgtcagcggacgcttgggcccaggattatcatggggacacttatcatttgattctcaagaactgcagtcatttcacaccagatgtctgcgagcgtttgaccgggaagccagtacctgaatgggtgaagcgactcgccagattaggttccttctgcaattgtgtattgcctgacagcatcaaggtttcaccagtcagagatgtaaatgcacatccagatttttctgatgatggcatggggtccaatgcctcgatccttgagggaagtgatgacgatgatttagaccaactcctgagaacacctaacagcgacattgtgtcttcaatggacaaggcattaactcctggcaaggatagtcgcaaactggtcaccctt

SEQ ID NO: 82727 - DNA, 394 bp, Zea mays
aacaaaaagggcccaaccttcaacggcttcacccccaagtccatgtgccagggcggcgacttcacccgcggcaacggcaccggcggcgagtccatctacggcgagaagttccccgacgagaagttcgtgcgcaagcacaccgcccccggtgtgctctccatggccaacgccgggcccaacaccaacggctcccagttcttcatctgcaccgtcgcgaccccttggctcgacggcaagcacgtcgtcttcggccaggtcgtcgagggcatggacgtcgtcaaggccatcgagaaggtgggcacccgcaacggctccacctccaaggtggtcaaggtcgctgactgcggacagctctcctagatctctctgatctggtccgttcggccgccctcct

SEQ ID NO: 82728 - DNA, 411 bp, Zea mays
cccacgcgtccgcagcaggccattcttctcgccttactccctcacagaacccagtaaaatattgctagtcccgccgtcgagatggccccacgccgcctgctcgtcctcgccgtcgtcgccctcgcggccaccgccgccgcggccaactccggcttcgcggactccaacccgatccgccccgtcaccgaccgcgcggcctccgcgctcgagtccacggtcttcgccgcgctcggccgcacccgcgacgcgctccgcttcgcacgctttgctgtgaggtacggcaagagctacgagagcgcggcggaggtccacaagcggtttaggatcttctccgagagtctccagctcgtccgctccaccaatcggaaaggcctctcctaccgcctcggcatcaaccgcttcgcggacatg

SEQ ID NO: 82729 - DNA, 375 bp, Zea mays
acccacgcgtccggcacacctggtggtgagcttcagtttcaaacagaggttgagatgattagcatggcagtgcacaggaaccttctccgacttcgtggtttctgcatgacacctactgaacggttgctggtctacccatacatggctaatggcagtgtggcatcacgtttacgagagcgccaggcatctgaaccacctcttaaatgggaaacaagaagacggattgcactgggatctgcaagaggtctttcttacttgcatgatcactgcgatcctaagatcatccatcgggatgtcaaagctgcaaatattcttttggatgaggagtttgaggcagtcgtaggtgatttcgggcttgccaagcttatggactac

SEQ ID NO: 82730 - DNA, 431 bp, Zea mays
accacgcgtccgattttctttctagttaatacgtgtgcttgggagtccttgcaatttgaataaaccaagatcttaccatgactgcaattttagagagacgcgaaagtacaagcctgtggggtcgcttctgcaactggataactagcaccgaaaaccgtctttacattggatggttcggtgttttgatgatccctaccttattgaccgcaacttccgtatttattatcgccttcatcgctgctcctccagtagatattgatggtattcgtgagcctgtttctggttctttactttatggaaacaatattatctctggtgctattattcctacttctgcggcgatcggattgcatttttacccaatttgggaagctgcatctgttgatgaatggttatacaatggcggtccttatgagctaattgttctacac

SEQ ID NO: 82731 - DNA, 408 bp, Zea mays
gaagatctacaactacttcccatatccatactttgtgtccttgatccatctagtagtgggtgtcgtatactgcctcatcagctggagtgtcggtctccccaagcgagcgcctatcaatggcacgctcctcaagcttctctttccagtcgccctgtgccatggtattggtcacatcactagcaatgtgtccttcgctgctgttgcagtctcatttgctcacactatcaaagctctggagcccttcttcagcgcagcggctactcagtttatccttggacagcaagttcccttctctctgtggctttctcttgcccctgtggtcaatggtgtttcaatggcatcccttactgagctttcattcaactggactggcttcatcaatgccatgatatcaaacatctcattcac

SEQ ID NO: 82732 - DNA, 360 bp, Zea mays
aggactagttctagatctgagttagccggcggatccgatccgtgcgcgtgcagtgtgtgtgtgtgtgtgtcggtggagatggccacagcttacgctcccatggcgagccaggtgatgaagagcagcctcgtcgtgcactcgaggccgaggggcctgtcaggcgctgctgcgctcacgaggcggcccggccggttcaccgtcaaggccatccagcccgagaaggcaacgtaccaagtggtgcagcccatcaacggcgaccccttcatcggcagcctggagacgccggtcacctcgagcccgctcgtggcgtggtacctctccaacctcccggcctaccgcaccgccgtgagcccgctgctg

SEQ ID NO: 82733 - DNA, 331 bp, Zea mays
aggggcaagggcaagggcgtgtaccagttcgtcgacaagtacggcgcgaacgtcgacggatacagcccaatctacaacgaggatgactggtctcccaccggcgacgtcgacgtcggtggaaccactgggcttctgatctgggccgtcaccctcgctgggatcctcggcggcggcgccctcctcgtctacaacaccagcgccctctccggctaaggatatccaatgcatgcgcttcttgcgattcgtcgtgtaaaatcagggtgtctgtctataatctagcctccatggatgctcaaccttcgtcatgtaacaataatcagtgctactcttc

SEQ ID NO: 82734 - DNA, 375 bp, Zea mays
cttcaggttgccacttacatactgtggaagaatgtaccccagggagctgcaactacttgctacgtaggactgagccctcaactcaagggagtgacaggaaagtagtttgctgactgcaacgtggagaagacgagcaaactggcgaggagcgaggagttggcgaagcagctctgggacttcagcgaggagctgatcaagtctgcgaaatgagagccgaaaatgttgtggtcctgcttggcatctagtggtacaagtgatgactgattagtatatagcacggaggaacctgggcgatggctggacctcatggtgttcaggaataaaatctgcttgctttcgtacattaattagtccggtgtggcaaacatcaatttg

SEQ ID NO: 82735 - DNA, 359 bp, Zea mays
aggaggtgggttggcttctcctccccctccggttcgggttcgggttcgtgaggttctccggggttcggtttcgtgggtgagcggatcgagatggcggcgtcggatgttgagtaccgctgcttcgtcggcggcctcgcctgggccacggacgaccactccctccacaacgccttcagcacctacggcgaggtcctcgagtccaagatcatcctcgatcgggagacgcagaggtcccgcggcttcggcttcgtcaccttctccacggaggaggcgatgcggaacgccatcgagggcatgaacggcaaggagctggacggccgcaacatcaccgtcaacgaggcccagtcgcgcggcggccg

SEQ ID NO: 82736 - DNA, 366 bp, Zea mays
tcatcacgccgccactgatctgctctgttgctggtgactaggagcagtagcgagagggattctggatggccaagtcgaagaaccacacggcgcataaccagtcgttcaaggcgcacaagaacggcatcaagaagcccaagcgccaccgccagacctccaccaaggggatggacccgaagtttctgaggaacttgaggtactcaaggaagggcaacaagaagagtggcgaggctgagtccgaggagtaagatgatggtgattgagtttgtggcgacaaatgcatctcttgtatcgctaagagtcttagctgtgaacttagttctcacttctgtgtgactgtgatcaaaggacttgtgtatgatcaaa

SEQ ID NO: 82737 - DNA, 343 bp, Zea mays
  unsure (1)..(343): unsure at all n locations
acacccacccacccactcgcttcagccgcctccgccgcgcgtacaagcaggtggagacaggatgccggctggccacggcctgcgctcgcggacgcgcgacctcttcgcgcgccccttccgcaagaagggctacatcccgctcaacacctacctccgcacctacaagatcggcgattacgtcgatgtcaaggtgaacggcgccgtccacaangggatgccgcacaagttctaccacggncgcaccggtcgcgtctggaacgtcaccaagcgcgccatcggcgtcgaggtcaacaagcaggtcaatgggcgcatcatcaggaagcgtatccatgtccgtgtggag

SEQ ID NO: 82738 - DNA, 374 bp, Zea mays
  unsure (1)..(374): unsure at all n locations
gctccgtgagcgctgccgcgcgggaggcgtccttctccgacgtccttggcgcgcagctcgtcgccaaggccaccggggagaacgccgtgagggcgcccgcagaggcgaagctgaaggtggcgatcaacggcttcggccgcatcggccggaacttcctccggtgctggcacggccgcgaggactcgccgatcgacgtcgtcgtcgtgaacgacagcggaagcgtcaggaacgcgtcncacctcctcaagtacgactcgatgctcggcaccttcaaggccgacgtcaagatcgtggacgacacgaccatcagcgtcgacggcaagcccatcacggtcgtctccagcagggacccgctcaagctcccatggggtgag

SEQ ID NO: 82739 - DNA, 393 bp, Zea mays
  unsure (1)..(393): unsure at all n locations
cccacgcgtccggggctcgcaggaggatgctgcttcaaccaagttacttgttgatatcctccttagtgagtgggaggacaggatgactcgaggcttattccgctacgatgtcactgcctgtgagaccaaggtcattcctggcaaccttgggtttgttgcacaactcaatgaagggcgccaccttaagaagcgccctactgagtttcgtgtggaccgtgtgctccagccgtttgaccctgccaagttcaatttcacaaaagttggccaggaagaggttctcttccaatttgagaatagtggtggtgatgacagctatttcctgaacaacgctccaatcattgctgttgatcgggctccaaatgttantgctatcaatgtaagcccaattgaata

SEQ ID NO: 82740 - DNA, 381 bp, Zea mays
agcggacgcgtggggtcacagtggtttcttgtttcacaccttaagcatgtacagcaaggagtgccatccaaccataagagacgaagttagcaagcactttgcaaactgcgagctacggtcgatggtgttggttgacagaagcatgcttgggtcatattcgtcaagattcaactatgctggcaagaatccaaccgggctagatgtgcctagtgatattgcagataagaagcaggttgatgaagctcagaagaactgaggcaaccttgaaagcataccgtagatgacttggattatcaaaaagccactctgacctttgcgaagcttgcttgcttgctttgaagagggcatctactacagatagagtttacacataccattgcg

SEQ ID NO: 82741 - DNA, 419 bp, Zea mays
agcggacgcgtggggatctgtgacttcgacttcgagccctgtggctactccatgaatgctgttcatggccctgctttgtcgaccattcatgtgaccccagaggacggcttcagctatgcaagctacgaggtcatgggcttcaacccgggctctttctcttatggtgacctggttaagagggtgctgaggtgctttggtccaactgagttctctgtcaccgtgaccatcttcggtgatcgggacaatgcgaagacctgggggacgaaactggatgctgaggcctatgcttgcagcaacatggttgagcaggtgctgccgtttggtggcttgctcatctatcagagcttcactgttacggccgaaacgacccatgggttcgccgaggtcagtcctgcatgacttcgctggtgacattgtca

SEQ ID NO: 82742 - DNA, 377 bp, Zea mays
  unsure (1)..(377): unsure at all n locations
ctctccatgggcgaagacgagaccccgcaggtccagcctccgccgccgcctacccaagggcgcttcgaaatcgttatcaacaacgacaacatccgaacgctcgacctatcgccagtcgaagcagcactcggcgacttgagctccttgacaccagctgcttcaagaaccctgctggaccagaccgtcgggttcaccatcagctacgagagggaggacgagtacgacacgcgggagctgtcggagttccccgacatacggctgtggttcgtgaggctcgacgccgcgtacccttggttcccggtcgtgctcgactggagagccggcgagcttgccagatacgccgcgatgctcgtcnctcaccagatgagcatgccgat

SEQ ID NO: 82743 - DNA, 272 bp, Zea mays
cttccagtcataatttttgagccaatgacaatgcttcagaaaatggctgagttgatggaatactgtgagttgttagacaaagcagatgaatgtgaggatccatacatgcgtatggtttatgcttctacatgggctgtttcggtatacttcgcgtatcagcgcacatggaagccttttaatccgatccttggagagacttatgagatggttaaccaccagggcattacatttcttgccgagcaggtaagccatcatcccccaatgggtgctgc

SEQ ID NO: 82744 - DNA, 368 bp, Zea mays
gcagcagaggcagcgacacgatcgcgagcgcacgcacgtaagcacgttgtcggaagctcaagttagaagaagcaccagtgactgatcgatggcggcccaggctctcctctccggccggcagctgctgggccgccccgtgcagtcggccgtctctaggtcgtcggcgaggaaggcgcccttcgtcgtcagggccagctccagccctccagccaagcaaggtgccgacaggcagctgtggttcgcgtccaagcagtccctctcctacctcgatggcacgctgcccggcgactatggcttcgacccgctgggcctctcggacccggagggcaccgggggcttcatcgagcccaagtggctggcctacggcg

SEQ ID NO: 82745 - DNA, 385 bp, Zea mays
agcggacgcgtggggtgctcagttaggaactgcgccaagttgccaacgtcgctcggtccaccccctagttccagcatagatgagattggaggatgggggacagtaccaacactggagtcactaggccccagtgttacgaagtctgagaaaggaatgcatttcataggaggagagagcgcagctcttggtagggtacatgagtacttctggaagaaggatcagctgaaagattacaaggtgaccaggaacggcatgttaggtccagactactccacaaagttctctccttggcttgcttctggcagcctttcgccgcgttatatttgcgaagaggtgaagagatatgagaagcaaagagtggcaaatgattcaacatattgggttt

SEQ ID NO: 82746 - DNA, 388 bp, Zea mays
agctcactgcagtcacacatcacacatcccatcttctgacatccccccatctctctgcaaaactcgcacaaccggtcgccaaactgcggtatccacatctctccggctccaacatggacttctccgacatctttcgcatggtgaacttcgccgtcgccgccttcattgttctcggcggtgttgcgaaattgttccctttcaacgatttctcgcacatcattcttggtgtctacctgatcatcttcggcgctggcactgctcttctcgaattccagatccctccacagatcgctcgttatgcctcgttcatgttctctttcctcggccgcggtatcttttacgtttttatcggttgcgtaactgtcggctctggctggtatcgctacat

SEQ ID NO: 82747 - DNA, 399 bp, Zea mays
ggtccagaaatccgggccgaccacgcgtcagagagcgtgtgttcgtttcgaggacgcacacacagacgccatggaggttacacaaaaccacaccctgaccgtgaccggttgggcggccatgaacgagtccgcccgcaaggtggagcccttcgtcttcaagagaagggagaacggccctgacgacgtgacgatcaaggtgcagtactgcggcatgtgccacacggacctgcacttcatcaacaacgactggggcatcaccacgtacccgctggtcccggggcacgagatcacgggcgtggtcaccaaggccgggcgcaacgtgacgggcttccgcgtcggcgaccgcgtcggcgtgggctgcatcgccgcctcctgcctggactgcgaccgctgccgccg

SEQ ID NO: 82748 - DNA, 383 bp, Zea mays
cccacgcgtccgggtcactgtgtgacctgtacgagacccttgccatcacccagagtgtcatctttgtcaacacccgccgcaaggtggactggctcactgacaagatgaggagcagggaccacactgtttctgccactcatggtgacatggaccagaacactagagacatcatcatgagggagttccggtctggctcctcccgtgtgctcatcaccaccgacctgcttgctcgtggtattgatgttcagcaggtgtccctggtcatcaactatgatctccccacccagccagagaattacctgcatcgcattggtcgtagtggtcgtttcggtaggaagggtgttgccatcaactttgtgacccgcgacgacgagcggatgctg

SEQ ID NO: 82749 - DNA, 376 bp, Zea mays
aggaacctcaatccggaagcgaaaaggaccagaagaaaccagaggcgactccaggttcgtgggcgatgctgcgcgcgggagctaggcagctccttgccccggggctccggcggctcggtctgggcaccggcgccgccggtcaggtgggcccggccgccgcggcggcggggatgagggcgtaccacgagcgggtggtggaccactacaacaacccgcggaacgtcggttccttcgacaaggaggaccccaacgtcggtactgggctggtcggcgcgccggcctgcggcgacgtcatgaagttgcagatccgcgtcgacgaggactccggtaaaatcgtcgacgcctgcttcaagacctttggctgccgctccgccat

SEQ ID NO: 82750 - DNA, 373 bp, Zea mays
agcgatctgcaagtctcgctacgtagcagtgcaataaaaaaagcagccgcaatggcgagcagcaccatggccctctcctccacggccttcgccggcaaggccgtgaacgtgccgtcgtcgtccgccttcggcgaggcccgcgtgacgatgcgcaagacggcggcgaaggccaagccagcggcggcgtccgggagcccgtggtacggccccgaccgcgtgctgtacctgggcccactgtccggcgagccgccgagctacctgacgggcgagttcccgggcgactacggctgggacaccgcggggctgtcggcggacccggagacgttcgccaagaaccgggagctggaggtgatccactcccgctgggccatgc

SEQ ID NO: 82751 - DNA, 373 bp, Zea mays
accagttaccactcaccagtcaccagtctccactctggagtctggaactcccctcatcctccacatctccaccgcatcggaactaggaaggcgaagccgaaggcgcggcgcggcgcggcacggatcgagcgatggcggtggcccctcctacggcggcggcgctggagcagctaagcagcagcaagatgttcgacggcttcaatctccgcttccgccaccagagcgccacccttggctgcgccatgactttctccatctacctgcccccgtccccggcgtccaaccttcccgtgctgtactggctctcgggtctcacctgcaccgacgagaatttcatcataaagtccggcgcccagcgcgccgccgctgccca

SEQ ID NO: 82752 - DNA, 446 bp, Zea mays
acggacgcgtgggcgcgctagctgaggacggtacagcggcacagaggtgcgacgtacgacgacgacgacgcaggcgccacacatggcatcccagctctccgccgccgtgccccggttccacggcctccggggctacgccgcgcccaggtccgcggtggcagcgctgccgtccgtgagggtgggcaggaagaggtcgtcgtcgcagggcatccgctgcgactacatcggctccgccaccaacctgatcatggtgacgacgacgacgctgatgctgttcgcggggcggttcgggctggcgccgtccgcgaaccgcaaggcgacggcggggctgaagctggaggcgcgcgactccggcctgcagacgggtgaccccgcccgggtcaacctcgcccaaaagcctggcctgcgggcgccttcggccacatcctcggcgtcggcatcgtgct

SEQ ID NO: 82753 - DNA, 389 bp, Zea mays
  unsure (1)..(389): unsure at all n locations
cggtctagatatccgggtcgaccagcgtcagccgcaacagccaacttaagtgggcatttgtgaaaacgtgaaaccttctctgtggcctcttcgcgaaagctgggctggattacttntcttgctcccctttcagggttcgattgctaggctanctgcagctcaagtgcttgtctgaggctgcctcctcattggcaaccggattgcctgctgctggtggatgtggtgatcaacagtattattacagagccatgctatgtgaacattactagtagcagtgctcataaaagctacaatcccatgtccttttttttccccagtcatgtaaaacttccaaactgctccatggttcaaaactctgttcttcaatacatcatcaattatcgattaaa

SEQ ID NO: 82754 - DNA, 378 bp, Zea mays
agcctgacagagtgctcatcggtggccgggagacccccgagggcaggaaagccgtccaggttctcaaggatgtgtatgctcactgggttcccgaggacaggatcctcaccaccaacctgtggtccgctgagctctccaagctcgccgccaatgcgttcttggcacagaggatctcctctgtcaatgccatctccgctctctgcgaggcaaccggagccaatgtctctgaggtggcttacgccgtgggcaaggacacgagaattggccccaagttcctgaacgccagtgttgggttcggtggctcatgcttccagaaggacatcctgaacctggtgtacatctgcgagtgcaacggcctgcccgaggtggccaactact

SEQ ID NO: 82755 - DNA, 367 bp, Zea mays
acccacgcgtccgcccacgcgtccgatgtcaccaacatttggcacattcctttgttgctcagagatcagaaggcccatgaagctattttgaaggtgttagaccttcagtgcgcgaataaagttgctcgagaaccccaattgtctgaatggactgaaagagtcagcagatgtgacagattgaaatctccggttaggattgcaatggttggaaagtatactggcctgtcagactcctacctatctgttataaaggctcttttgcatgcgtccgttgctttggacaggaaacttgtggtggactgggttccttcccgtgatcttgaagattctacagcaaaagagactcctgacgcctatgaaaaggcat

SEQ ID NO: 82756 - DNA, 376 bp, Zea mays
cggacgcgtgggcggacgcgtgggtccaactcccaagcccagccgcctgcctagggttaaggtcgcccctccgccccctcgctccgctcgtgaccggcagggttcgtcgccgccgttggatatgtcgcggacgctggtgcagccggtggggcagaagcgcctcaccaacgtggccgtggtgcggctgcgcaagcacggccagcgcttcgagatcgcctgcttcccaaaaaaaggtgctctcgtggcgctcccgcgtcgagaaagacatcgacgaggtgctccagtcccacaccgtctactccaacgtctccaaaggcatcctcgccaactccaaggaactcgccaatgccttcgggcacgacgaccttacccaaat

SEQ ID NO: 82757 - DNA, 312 bp, Zea mays
gccaagttgctgagaaagtgttcgccaatgtgggcaagactatcgggtacaaagttggaacaatgattgagatccccagggcagctctggtggctgatgagatagcggagcaggctgaattcttctccttcggaacgaacgacctgacgcagatgacctttgggtacagcagggatgatgtgggaaagttcattcccgtctatcttgctcagggcattctccaacatgaccccttcgaggtcctggaccagaggggagtgggcgagctggtgaagcttgctacagagaggggccgcaaagctaggcctaact

SEQ ID NO: 82758 - DNA, 334 bp, Zea mays
acggacgcgtgggtgcgcctctacatttcttctctctctgctcctccccctccgcctgattcatccaagacaaggattgccaagtccgactcggaggaacaacacttcgaatccaaagcccaagcctgggcgtccaagacctacccgcagcaggctggcaccgtccgtaagaacggcttcatcgtcatcaagaaacgtccctgcaaggttgtggaggtttctacctccaagactggtaagcatggccacgccaaatgccactttgtcgccatagacatattcaatgggaaaaagcttgaagatattgttccttcatcacacaactgtgacattc

SEQ ID NO: 82759 - DNA, 328 bp, Zea mays
aggagccgccgacaactctctctaccgtccgataccccaagcaccagcgcggcggcggcgaccatggctgtcggaaagaacaagaggatctccaagggaaagaagggtggcaagaaaaagaccgtcgaccctttctctaagaaggattggtatgacatcaaggcaccgtcggtgttcagtgtgcgcaacatcgggaagactctcgtatccaggacacagggtaccaggattgcttctgagggtctgaagcacagagtctttgaggtttgcctagctgatcttcaaggcgacgaagatcaagcttacaggaaaatcaggctccgtgctg

SEQ ID NO: 82760 - DNA, 332 bp, Zea mays
agaggccaaaacccgcgcacaccggcgacggcaggagaacctcccgccggccgccgccatgccgccgcctctacaggcccaccgcctactcatctcccaccgccgcctacccactccagctcgccgccggttcaccgccgcctcttccgtccaatccgctcccgccacaaccttggccccgggccccgccacatcctccatcctctccatccgcgagtcgctcctctcaggcgagaggaccgcggcggacatcacctccgagtacctctcccgcctccgccgtaccgagccgaccttgcgcagcttcatccacgtcgcggacgccgccgccg

SEQ ID NO: 82761 - DNA, 303 bp, Zea mays
cacgcgtccgaccacgcgtccggtcacaactgaagaagtgtctcaggtacctgaagagcagctaccaatagaggatcttagtgttcaagatgacctgacttatgctgagtatcccataaagattcttgatacactgactcctgtcacgagaaataaggttataaagatgtgcaaagtgcaattgcgtcactatggcgaagaagaagatacttggaagagagaagaagagcttcgcatagactttccccatcttttccctagatcttcttaaatctcgaggacgagattatttttaaggggggt

SEQ ID NO: 82762 - DNA, 415 bp, Zea mays
ggacgcgtccgattaaaactggtgttaaggattataaattgacttactacaccccggagtacgaaaccaaggatactgatatcttggcagcattccgagtaactcctcagctcggggttccgcctgaagaagcaggagctgcagtagcggcggaatcttctactggtacatggacaactgtttggactgatggacttaccagtcttgatcgttacaaaggacgatgctatcacatcgagcccgttcctggggacccagatcaatatatctgttatgtagcttatccattagacctatttgaagagggttctgttactaacatgtttacttccattgtgggtaacgtatttggtttcaaagccttacgcgctctacgtttggaggatcaacgaattccccctgcttattcaaaaac

SEQ ID NO: 82763 - DNA, 412 bp, Zea mays
gcagccagctacactgtgccaaaccgtgctctctggcaggcatcatttgatgctttctttgggcttctaacaaaatactgtgtcagtaagtttgaaagtatccaacagatgtttgtcacacagacaccgagctcaggaatcggacctgaggcttccaaagctactagtaaggagatgcctgttgagctacttcgtgcaagccttcctcatacaaacgagcagcagcgccagcggcttcttgattttgctcagagatccatgccagtaacaggtttcaatccctcaggtgctagaggtgggcacatcacttcagaatctgttcctggatgatgtaactgaaggagacacacaagggcaaagagtcaatgcttttaaacattgatgagatgggtctcagctgataattgttgta

SEQ ID NO: 82764 - DNA, 214 bp, Zea mays
attgggtcctgcctaggccccatagatatagctcttttttgagaaggaagagagattaattcagcagcagcttttataaattctttgttgtcatgaagcaggtggttcttttgtagttgatgaaagggatttgtcgtcgctatcgtttacataattcagacaataattttatattgtgtaattctgagaatcaaagcactgtttgtgttatagc

SEQ ID NO: 82765 - DNA, 404 bp, Zea mays
  unsure (1)..(404): unsure at all n locations
acaacttcagagtggcaggtttgcagatgtcgaagaagtggtatatctgaaatggataaatgcctgcctacggtatgagctgagaaacaaggatgccccatcagggaagactgttgcacgagatcttagcaagagcctgagccccaagtctgaattgaaggccaaacagctgataatggaatatgccaatgtgggtgcggaggacagtcacttggggcatgtcgaattcggttcagagtgctcttcctcacgggcttcgtcaggtgaaccggatgatgtgtccattgaaantgcttcaatgacaaaacatactaataaaaaacccaaaaagaaaaagttcttctctaagcttcggaaactggtgctgggaaaagggaaagagaancgtgaaatttctactctgg

SEQ ID NO: 82766 - DNA, 377 bp, Zea mays
accacgcgtccgcccacgcgtccgcccacgcgtccgcacacatgcatagtttcttctactacacgacgacaaacatggggaagcctgcgaagatcggagagtggggtggatacgccggcgatcgtcgggatctgagggctactccggaccggctgatcgaggtgaaggtcacggcggacaacagcagctgcatccgctccatctccttcatctacatcggagccgatggcaaaccgtacgaagaggggccatggggtttcggccacgctggcacggagtacaagattgatctgtgcaggttcgacgagagcttgacggagatctccgggaccacgggcccagcctacaacattgacaatctggtcaagtctcccaaa

SEQ ID NO: 82767 - DNA, 282 bp, Zea mays
aaccataccagaccagaccagaccaatggccctgcgcctaccaatctcatcgtcccacgggctggcctccacgccggcgccaatctccacgacgacgtgccggccggccgtcttggcgacagccgcggcccagaagaggagcctgctgccggcgactgcctccgagacgaggggagtcgcgccggtgaggtccagcgggatcgagacgagcacggtgggtctgggatgtgaggccgtcaccgggcaggtcacggaggtcaacaaggacaccttctggcccat

SEQ ID NO: 82768 - DNA, 434 bp, Zea mays
accacgcgtccgaatattttgagcattcagaaacacaccaagcgaagcacattagcaacaacctaacaacaatggctaccaagatattatccctccttgcgcttcttgcgctttttgcgagcgcaacaaatgcgttcagtattccacaatgctcacttgctccaagttccattattacacagttcctcccaccagttacttcaatgggcttcgaacacccagctgtgcaagcctataggctacaacaagcaattgcggcgagcgtcttacaacaaccaatttcccagttgcaacaacaatccttggcacatctaacaatacaaaccatcgcaacgcaacagcaacaacaattcctaccagcactgagccacctagccatggtgaaccctgccgcctacttgcaacagcagttgcttgcatcaaacccacttgct

SEQ ID NO: 82769 - DNA, 374 bp, Zea mays
accacgcgtccgcggacgcgtgggtggatgcagaaacaacggtggtatgttgctgacaacggcatctactccaagttaatatctgtgatgggaaggaaagggcagatacggatggcaatgtggctgttctctcagatgcggaacagcgggtgcaagcctgacacttctgtatataactcccttatcggcgcacatctgcattcacgagacaagagtaaggctttggccaaagctctcggctattttgagaagatgaagtgtatagagagatgccagccgactattgtgacatacaacattctgctaagggcttttgcacaggctggtgacacaaagcaggtagacatgttgttcaaggatctggatgaaagtgt

SEQ ID NO: 82770 - DNA, 404 bp, Zea mays
aggacgcgtgggcggacgcgtgggcggacgcgtgggcggacgcgtggggcacaaccccggcggcaaggagcggtacgagcgcgagttccgcgagctcgcaaagggcgccggcttctccgggttcaaggccagggacatctacgccaacgcctgggccatcgagttcatcaagtgaaccaccgtcgccgcgatgagatggcatggctgccacatgctttgcttgcttggtcctcgtatcgtacgtcgccgtcgtcgtcttcttctggttattgcgctgctacctcgctgctctcgcgtatgcatgtacttttgcctaactttctttcttcataacatgcactctggctggcctagactgcccccgattcatggtggccggtacgtcttgtcgagctcttgcatgt

SEQ ID NO: 82771 - DNA, 318 bp, Zea mays
aaactcaagccctttgggaagcagctcagggacaaatacgtggagacacagcagcttctcctccagatcgctgggcacaaggatattcttgaaggcgatccattcctgaagcaggggctggtgctgcgcaacccctacatcaccaccctgaacgtgttccaggcctacacgctgaagcggataagggaccccaacttcaaggtgacgccccagccgccgctgtccaaggagttcgccgacgagaacaagcccgccggactggtcaagctgaacccggcgagcgagtacccgcccggcctggaagacacgctcatcctc

SEQ ID NO: 82772 - DNA, 366 bp, Zea mays
ttccaagttaacgtctgagaatgcatctttgctgaagcgactggctgatatgactcagaaatacaaggacgcttccgttgacaataaaaatctaacagttgatgttgagactatgaggagaaaggttcgttcgtcttgaatgcatcacagacctttttcttctttttgttgtacgagagctcttaactgcatccatttatcgatcataacatttttactgggctctgcgtatactcaccgtaatcaacgtttacatctctctagatggctgcaaagggcagtgaaagtaatatgattgctcatagttcttattttagaacctgcaagtacagttttagtttccaatggtttttaactgcacccaaa

SEQ ID NO: 82773 - DNA, 123 bp, Zea mays
aaccacgcgtccgatgcagacacggtgcaacacccagcgatccctgcacttgtgtttgacatagcaaaagcccctactgtttagtattaattatcaataaatttgtttgggacggttgaattg

SEQ ID NO: 82774 - DNA, 420 bp, Zea mays
ggtgatagacattcctggaacaactggagccagctttggtcaggagctcatgttttacgagaggccagagccgaggtccggcatacaccgcatggtgttcgtgctgttccggcagctcggcagggggacggtgtttgcaccagacatgcggcacaacttcaactgcaagagcttcgcccgtcagtaccacctggacgtcgtggctgccacgtatttcaactgccaaagggaggcaggatccgggggcagaaggttcaggccggagagctcgtaaggaatgaagcatgcacagaagaagactgcagcgctttcgtatgcatatgatctatcgtcgtcctgcggaatatatatatagtaaccgttgttatatggaataatgtgcatgaaattggtatcagatgcaccgacccgtacgtacgt

SEQ ID NO: 82775 - DNA, 400 bp, Zea mays
  unsure (1)..(400): unsure at all n locations
tacaggttcctggttcaaccacatacagcttagctttgtattatatgatggatacaccattataaaaggtccctctgcttgaaagatttgtaaatggagatgatgcattcagaaattcaaggttcaagctcattccttacatctcaaagggatcttggattgttaaacagagtgtgggcaagaaagcttgcttggttggacaagcattagaaatcaattattttcgtggaagaaactatttggagcttggagttgatattggttcatcaaccgtggcacgaggtgtggtgagcctagtgcttggctacttgaacaatcttgtgatcgaaatggcctttcttgtacanggaaacacatataaagaactccggaattcctcctaagtacctgccgactgaat

SEQ ID NO: 82776 - DNA, 386 bp, Zea mays
accacgcgtccgagcctctagtcggccagtcgggacgaagcctctcgaacgagcgaggccacgaggtgcccgccgcgcccagccggcctcgccgaccgggcccgccggcccctatataggcaggcgccacttcctccgcgcaaccaccagacgccagtccaccaccgcttcccgtgcagcgccctccctctacgttcccccatttcctgtgttggcggcgatggcgcggcacttcgtgctcaacaccggcgccaagatcccctccgtggggctcggcacctggcagtctgaccccggcgtcgttggcaacgctgtctacgccgccgtcaaagcgggttaccgacatatcgattgtgccagagtttacggcaacgaaaaagagattg

SEQ ID NO: 82777 - DNA, 365 bp, Zea mays
aggacgcgtgggctgagttaatgtcatccgcgcattgggagaagctagctgaggagctcacccatcaattctgtagccttctgggccagtcgagggagagcccgctgagtgttgcagtgtcagctggttttcaaggactaccaactctgctgaagctgacgcaagtcatggctgcgaagaagcaggagtggcaagttatgaagcagcttcctgtccccatagacatcgggccagaattccagtatcattctgtctttgtgtgcccggtgctcaaggagcagtccagtgacgagaatccccaatgcggatgccttgtggacatgttgtctccaagcagtccatcatgaagctgtcgaaaagcagct

SEQ ID NO: 82778 - DNA, 413 bp, Zea mays
accacgcgtccgcaactagcaacatagaaagcacaagagtgtaccaacaatggcagccaaaatattttgcctccttatgctccttggtctttctgcaagtgctgctacggcgaccattttcccacaatgctcagaagctcctatagcttcccttcttcccccgtacctctcaccagcggtgtcttcggtatgtgaaaacccaattcttcaaccctataggatccaacaggcaatcgcagctggcatcttacctttatcacccttgttcctccaacaatcatcagccctattacagcagttacctttggtgcatttattggcacaaaacatcagggcacaacaactacaacaacttgtgctagcataccttgctgcctactctcagcaacaacagtttcttccattcaaccaac

SEQ ID NO: 82779 - DNA, 363 bp, Zea mays
acacatacatagtttcttctactacacgacgacaaacatggggaagcctgcgaagatcggagagtggggtggatacgccggcgatcgtcgggatctgagggctactccggaccggctgatcgaggtgaaggtcacgggggacaacagcagctgcatccgctccatctccttcatctacatcggagccgatggcaaaccgtacgatgaggggccatggggtttcggccacgctggcacggagtacaagattgatctgtgcacgttcgacgagagcttgacggagatctccgggaccacgggcccagcctacaacattgacaatctggtcaaatctctcacaatcgtcaccaacaaacgcgctta

SEQ ID NO: 82780 - DNA, 423 bp, Zea mays
cggacgcgtgggctctatcgagccgtgaaaaagattcaacaaaagacagaaacaaatccactattggttttacgtcaagcaatacgtagagtaactcccaatataggagtaaaaacaagacgtaataaaaaaggatcgacgcggaaagctccgattgaaataggatctaaacaaggaagagcacttgccattcgttggttattagaagcatcccaaaagcgtccgggtcgaaatatggctttcaaattaagttccgaattagtagatgctgccaaagggagtgggggtgccatacgcaaaaaggaagcgactcatagaatggcagaggcaaatagagctcttgcacattttcgttaatccatgaacagaatctaggtatgtagacacatggatccatacatctcgatcggaaaagaatcaata

SEQ ID NO: 82781 - DNA, 440 bp, Zea mays
accatagatgtgtatcttgctggaacggtcatgttgatatttgggatgggtctctacggtcccttcgtcagcaacccttccgtgggtgttcgtcctgaatccgaccgtgcactgagcggatcgttgctgttcgggatgttcgctttgaaggaacgccccaagtggatgaagatcacctccctcgacgagctgaagacaatagtggggcacgtcatcgtgatgatcctgctggtgaagatgttcgagaggagcaagatggtgacaatcgccacggggctggacctcctcagctactcgatctgcatcttcttgtcgtctgcctctctctacatcctgcataacctccacaagggcgacgaccatgaggagtgaggagagtgcaataatataatgcccaatctgtaactctatgacagaagagataatggtaaggcttgggt

SEQ ID NO: 82782 - DNA, 348 bp, Zea mays
aaacgacttgtttcattgattcttgaagagatcgagcttcttttgcaccacaaggtcgaggatgtcttgcaactgcggatcaagctgcggctgcggctcaagctgcaagtgcgggtaatatatatgataatatataagtgcaccgtgcatgattaatttctccagccttcttcttgtctagttaatttccatttatttattttttccattgcaaaacaaacaaacaaacagacaagaacaaagttaatttggatcgagtagttcaatccatttgcgcgctgtccttttcagcaagaagtaccctgacctggaggagacgagcaccgccgcgcaggccaccgtcgtcct

SEQ ID NO: 82783 - DNA, 404 bp, Zea mays
atcctatggaaaaagaagagcagccaagtaaaccgtgggaatgttttttttgttgttgtcttgtgttcgatggcaacacccaggtcgtgaaggcaatcgagaacgcgatccccgtgcggcacgcgctgcccgccgccgccgccgcggagatcgaccccgcgtgggaggaggagctgagggccatggaggcggagaaggcggagatcgaccgggcggccgcggcgcgggtgcggcgggagctgtggtgcgggctgacgtacctggtgatccagacggccgggttcatgcggctcaccttctgggagctgtcgtgggacgtgatggagcccatctgcttctacgtcacgtccatgtacttcatggccggctaccccttcttcctccgcaccaagaaggagccgtcg

SEQ ID NO: 82784 - DNA, 360 bp, Zea mays
  unsure (1)..(360): unsure at all n locations
accacgagtccgcagctccccccgcaaaaaccctagctttacctccccacaagcgcctccaagatgaagctcgtcaggttcttgatgaagctgaacaacgaaacggtgaccatcgagcttaagaacggcaccgtcgtacagngaaccattaccggtgttgacatcagcatgaatactcatctgaagactgtgaagctgacactaaaagggaaaaatcctgttacccttgatcaccttagtgtgaggggaaacaacatccgctattatatccttcctgacagcctaaacctggagactttgctggttgaggaaacaccaagggtcaagcctaagaagcctacttctgggaagcccttgggc

SEQ ID NO: 82785 - DNA, 342 bp, Zea mays
aagaattacactcaagggcaaggtgacaattatcgccaagcctggagtgaagttggagattccagatggagacgtacttgagaacaaggatgtcaatggccctgaggatctttaagcaatgtttgtcatcaccagtttttcccaaggacatgtcacaggaactgccaagcctagtcactcctactgagctctatattttgtaattttcatgtgcattccgattccgctgtgagggtcatgttaaccccgctagaaaataattgtaatcttctttgctgcgtctgtacttctgtttttggtcgccaggacgtatatttttactgaaatgatactccgaagagc

SEQ ID NO: 82786 - DNA, 411 bp, Zea mays
cggacgcgtgggggaagtcgccggctcagatccagccgggctgcggcgctggccggatggccgagcagggcggcgcagccggggaggccgctggcagcgacccccctgcgcctgcgcctgcgactgccccggcgcgagccccagcgcttgctgcggacgcggccgggcagaggtccctgccgacgccgttcctgaccaagacgtaccagctggtggacgacccggcggtggacgacgtgatctcgtggaacgaggacggctcgacgttcgtggtgtggcggccggcggagtttgcgcgcgacctcctccccaagtatttcaagcacaataacttctccagctttgtgcggcagctcaacacctacggatttaggaagatggtgcccgaccggtgggagttcgccaacgact

SEQ ID NO: 82787 - DNA, 337 bp, Zea mays
agcatacacaacatcatcatcatcatcttctcgctagtcgagcgagcccttgtagttaattaagctagtcgatcgatccaagagaagaagaagcagcagacaggaatggcgtcgctctcgatgacgacgagcgcagcggcccgcgcgcagtggacgcctaggcagaacaagctgttcgagcaggcgctggcggtgtacgacaaggacacgcccgaccgctggcacaacatcgcctgcgccgtcggcggcgggaagtccgcggacgacgtcaggcgctactacgagctgctggaggaggacgtcggccacatcgagtccggcaaggtgcccttccccg

SEQ ID NO: 82788 - DNA, 375 bp, Zea mays
acccacgcgtccgcacccattgggcatgtttgacagcattgcatcacttgctgttgctcaaaacatgcgtgagctttatagattggttctagtcgatacaccactggccccttacttctcagagtgcattacatctgaggatttggatgacatgaatattgagattatgaggaacactctctacaaagcatatcttgaggacttctacaaattttgccagaaactaggtggtgcaacagctgagatcatgtgtgatctcctttcatttgaagctgacagaagagctgttaacattacaataaatagtattggtactgagttgacaagagatgaccgcaggaagctgtactccaactttggtttattgtatccata

SEQ ID NO: 82789 - DNA, 214 bp, Zea mays
ctgggctcgattacgtttcatgctcccctttcaaggttccgattgctaagctagctgcagctcaggtgcttgtctgaggctgcctcctccttggcaaccggattgcctgctgctgatggatgtggtgatcaacagtattattacaaagccatgctatgtgaacattactagtagcagtgctcataaaagctacaatcccatctccctttttttt

SEQ ID NO: 82790 - DNA, 280 bp, Zea mays
cccacgcgtccgcccacgcgtccgagccctgctaccttcttgatacaaccacagttgttgccgttctaccagcacgctgcgcctaacgctggcaccctcttacaactgcaacaattgctgccattcaaccaacttgctttgacaaacccagcagcgttctaccaacaacccatcattggtggtgccctcttttagatttcttatgagttatagttcaataataaagttttttgtctgatgtttgtggcttcccagaaataagaaagtacatttctagatt

SEQ ID NO: 82791 - DNA, 351 bp, Zea mays
gaggaaagcaaacgcctccttgagatgggttataaaaaccctgttcttctgctccatccactgggaggattcacaaaagcagatgatgtgcctcttagttggagaatgaagcaacatgagaaggttcttgaggaaggtgtcctcaacccagaatcaactgttgttgcgatcttcccctctcctatgcattatgctgggccaactgaggttcaatggcatgctaaggctcgtattaatgctggcgcaaatttctatatcgttggaagggatcctgctggtatgagccaccccacagagaaaagggacctctatgatgctgatcacggaaagaaggttttgagcatggctcct

SEQ ID NO: 82792 - DNA, 382 bp, Zea mays
gacttcgtgcacctcttgctgtcgctgcagaaagactacggtctcaccacggataacatcaagggcatacttgtgaacatgttcgaagcagccatcgagacatcattcctggtgctggagtactccatgagcgagctgatgaacaaccgccacgtcctggccaagctccagaaggaggtgaggacggcgacgcccgacggccgcatggtgatggaggaggacctgagccggatgccatacctgaaggccaccatcaaggagtccatgcgcatccacccgccggcgccgttccctcctgccgcacttctccacccacgactgcgagatcaacggctacaccatccccgccggcacgcgcgtcatcgtcaacgcgtgggcgctc

SEQ ID NO: 82793 - DNA, 377 bp, Zea mays
  unsure (1)..(377): unsure at all n locations
acccacgcgtccggccgacttcttcgtcggcgacgccgactcgcccaacaactaccccaacggcggcctcctctacgtccgctcctcgcccgccacggtgggcttctaccgccactggcaggcgtcgcgcgcgcggttcccgggccaccacgagcagtacgtcttcgacaggatcgtcaaggaagggtacgccggcgcccgggtgcagttcctggacacggccgtcttcgggggcttctgccagcacggcgacgacctgngcagggtggccaccatgcacgccaactgctgcgtggggctggacaacaagctcttcgacctcaagaacgtgctacaggactggaagacctacagagcgcgcgccgccgctggcaacg

SEQ ID NO: 82794 - DNA, 429 bp, Zea mays
  unsure (1)..(429): unsure at all n locations
ggtcctagatacccggggccgaccaacgcttcgacggacccttgggcaccggtttcccggctcgcccaattccccgctgccggcaccaatctgaaatcaaccgaacctaacctttttcaccaaaatggtgcttgtacggcatgcaaacattggtaacaaaaatgcattcaaaacactaattgccgcaaaatacaccggtgtcaaggttgagttggtgaaggactttcanatgggtgtctccaacanaactccagagttcctcaagatgaaccctattgggaagattcctgtcctggagactcctgatggtcctgtttttgagagcaatgcaattgcaagatatgttactcgcttgaaggctgataacccactttatggatcttcactgattgattatgcccatattgagcaatggattgactttgctgc

SEQ ID NO: 82795 - DNA, 375 bp, Zea mays
aatttacaacagtcgggaatgatttgacgtttcaaccgaatcctaattctgtatatcaaactgagcacctctcatactttaaatttgctggacgagtggttggcaaagctctcttcgatggtcagcttttagatgctcattttactagatctttctacaaacacatacttggtgtcagggttacgtaccatgacattgaagctatcgatcctgcatactacaagaatttgaaatggatgctcgagaatgacataagtgatgttttggatctcaccttcagcatggatgcagacgaagagaaactgatattgtacgagaaggcagaggtcactgattgtgagttgattcctgaagggcgtaacatcagggttactg

SEQ ID NO: 82796 - DNA, 364 bp, Zea mays
gaaggagcataagcacaaggagcgcctcggcgaggtgggcgccctcgcgggcggcgcctttgctctgtacgaggggcaccgtgcgaagaaggacccggcgaacgcgcagaggcacaagatcgaggccggcgtggcaacggcggcggcgctgggcgccggcggctacgcgtaccacgagcaccgcgagcagaaggaggcccactacgagagcaggcagcaggagcacagggtgccgcacgggcacgggcacgggcacggctactcctactactgcgactgaaacgactgatcatcccatcgatcgagatatgcatgcagaactcgatatatatacggcccctagcgccgtacacgtgcgtgcgtg

SEQ ID NO: 82797 - DNA, 350 bp, Zea mays
aagggcgcgggagctggtggctctgggtacgggtccgggcaaggatctggctacggagctggcagcggtgctgccggtggatatgggagtggcggaggtggtggaggtggaggtggcggtggccagggtggtggttccggatatggccatggaggtggtgaaggatacggctctgggtctggctttggtggtggtgctgctggcggcggcggtggacatggtggcggtggtggcggcggccaaggtgggtctggctatggctctggctctggctctggctcgggatatggatcaggtgaaggatacggacaaggtggtgctcatggaggaggctatggaagcggtggtgg

SEQ ID NO: 82798 - DNA, 353 bp, Zea mays
cggacgcgtgggcggacgcgtggggatcccacccggcagcggcgctgcgcaatggccacccacgcagctctcgccgcctcccgcatccccgccggcgcccggctgcacagcagggcgccggcgtcgtccaggcacggcgtgcagaggctggacttcgccgacttctccgggctcaggccggggtcgtgctccgtgagcgctgccgcgcgggaggcgtccttctccgacgtccttggcgcgcagctcgtcgccaaggccaccggggagaacgccgtgagggcgcccgcagaggcgaagctgaaggtggcgatcaacggcttcggccgcatcggccggaacttcctccggtgctg

SEQ ID NO: 82799 - DNA, 375 bp, Zea mays
cggacgcgtgggccaccttggtccatcagcagcgagcgaacaggcaaaaaggaaaggccgagaagcgctttatccggccgtacgtagcgataagagtggtgcacccgtagcggcacggcatggcggccacggcgtactccgtggcgctcctcggcggcgcacgcctgccggccgccttcctccctcgacgcagcagcgtgtgccaccaccagcttcgcctccaagacgcaccgaggctgatctccctgcaccgtgccagggccgcttccgaggacacgtcggcctccggcggcgacgagctcatcgaagacctcaaggcaaagtgggacgccgttgaggacaagcccaccgtcctcctgtacggcggcggcgccg

SEQ ID NO: 82800 - DNA, 370 bp, Zea mays
ccgaggtgaagtctgttgagatgcaccacgaggcacttcaggaggctcttccgggtgacaatgttggcttcaacgtgaagaatgttgctgtcaaggacctcaagcgtgggtttgtggcctccaactccaaggatgaccctgccaaggaggctgccagcttcacctcccaggtcatcatcatgaaccaccctgggcagattggcaacggctatgcccctgtgctggactgccacacctcccacatcgctgtcaagtttgctgagctcattaccaagatcgacaggcgctctggcaaggagcttgagaaggagccaaagttcctgaagaacggtgatgctggtatggtgaagatgatacccaccaagcccat

SEQ ID NO: 82801 - DNA, 378 bp, Zea mays
  unsure (1)..(378): unsure at all n locations
cggatatggacaaggcttgatcaccaagaagggttttaagggctcattcagcaatgcagggtcctctgccaagacttttgcaattctctctggcgttcagagtttggttttgtgcttgttgcgaaggctacgtggcaaggatgacattgtcaatgctggtatagctggttgttgtactggcctcgctttgggctttccaggggcgccacaggcattgctccaaagctgtgccaccttcgcagcattctcatgcatcatggaggggctcaataagcagcaggctgcaatggctcgcacgcttggagggactgncgccatggccgtgcatgagaaatgtggtgttctgcccccgttcacgcttccacctattcttgatgc

SEQ ID NO: 82802 - DNA, 376 bp, Zea mays
gagattgacaaatcagcgagcaaattcttctcttactgggatcctgacaagaaggaatacctgctgcaattgtacttcaagccaaggccgccagaaggtagtaaaccaccaccagctcctcctggaactttgcctaatgggactggggctcctggtgctccaccaaggccaccggggcaagctcccccaccacccccgccacaaattccaccgccccctcctgcacctatgggaatgccccctaggattcctccaccacctattggggctgttcaacctccgccacctccagcacgagtggcaaatggtctgcggccaatgattccaccgccacctaacttcactcccggagcaaccccaccgcgccctccaatgc

SEQ ID NO: 82803 - DNA, 203 bp, Zea mays
acccacgcgtccgcccacgcgtccgtgggttatctagtgtctctgccattgcccatggatggtactgtctttcaaagtatttgtatggtttgtgtcgtgagtcgtgactgagctggtttcatggaccagttgtgttctcgttacccaaaactatcgtgcgaccgcatatggcttaatcatgaataaatgttgtgtttgaattt

SEQ ID NO: 82804 - DNA, 350 bp, Zea mays
cccacgcgtccgcccacgcgtccgcccacgcgtccgcccacgcgtccgcgaggcggggatgacgagcccaatggtggccaccccggtccagttccacacaaccggccgcctcagcttctgctccttttcctttcccagcgcatcagggaggcggcgattcgcggcggtgagggcgtccgcggagacgatggcgacggagaagctgggcatcaaggtggagcgcaacccgcccgagtcccgcctctccgagctcggcgtccgccagtggcccaagtgggggtgcgagaagagcaagttcccgtggacctactccgccaaggagacgtgctacctgctgcaggggaaggtga

SEQ ID NO: 82805 - DNA, 362 bp, Zea mays
ggcttctcctcccccaccggttcgtgttcaggttctggttcgtgggcgagagggaagagatggcggcgtcggacgttgagtaccgttgcttcgttggcggcctcgcctgggccaccgacgaccactccctcaacaacgccttcagcacctacggcgaggtcctcgagtcgaagatcatcctggatcgggagacgcagaggtcccgcggcttcggcttcgtcaccttctccacggaggacgcgatgcgcagcgccatcgagggcatgaacggcaaggagctcgacggccgcaacatcaccgttaacgaggcccagtcccgcggcggccgtggaggcggcggtggcggatacggtggcgggcgc

SEQ ID NO: 82806 - DNA, 380 bp, Zea mays
cccacgcgtccggattcatcgcgattttaaggcaagcaacattcttctggagcatgattacacaccaaaagtgtcagactttggacttgccaggactgcaaggggagaggggaaccagcacatctctacgcgtgtcatgggaacattcggctatgttgcgccagagtacgccatgacgggtcatcttcttgtaaagagtgatgtgtacagttacggagttgtattgcttgagctcctcactggtaggaaacctgtggatatgtcacggcccgctgggcaagaaaacctagttgcatgggctcgaccgcttctaacaaatgttctgagtctacgccaagctgtcgatccacttcttggacctaacgttccactggacaatg

SEQ ID NO: 82807 - DNA, 366 bp, Zea mays
ctctaccgtggtttcatgccctccgttgctggtatcgttgtctaccgtggtctgtacttcggtatgtacgactcgatcaagcctgtcctcctcaccggttccctcgagggtaacttcttggcctctttcgctcttggttgggccgtcaccactggtgccggtatcgcctcttacccccttgacaccatccgtcgccgcatgatgatgacctccggtgaggccgtcaagtacaagggtaccatggacgccgcccgccagatcgtcgccgctgagggtgtcaagtctctcttcaagggtgctggtgccaacattctccgtggtgttgccggtgccggtgtcctgtccatctacgaccaggcccagctc

SEQ ID NO: 82808 - DNA, 366 bp, Zea mays
ccctcctcctgtccctggctctccagctcgccgtcgcgctcgtctcagtgtcggcgcagcacaagttcgggatcaactacgggcagatcgcgaacgacctcccggagccggcgcaggtggcgacgctcctgcagtcgatgggcgtgaacaaggtgaagctgtacgacgcggacccccgggtgctgacggcgttcgccagcacgggcgtcggcttcaccatcgccgtgggcaacgaggacctgcaggcgatggcggccagcccggacgcggcgcgccgttgggtggcggcgaacgtgcagccctacgtcccggccacgcgcatcacctgcgtcaccgtcggcaacgaggttctctcgggcaacgaca

SEQ ID NO: 82809 - DNA, 358 bp, Zea mays
gtatggcgagtgtgaacttatcggcacatgcatactggaccccagatccaactttcagaagctatttaaactacggagctggcattagtgaggtggaaattgatgtgctgacaggagcaacaacaattctaaggagtgaccttgtctacgattgcgggcaaagcttgaaccctgctgtcgacttgggccaggtggaaggcgcattcatccaaggagtaggcttctttacaaacgaggagtacacaacaaactctgaggggttggtcatccacgatggcacatggacgtacaagatccccacagtcgacaccatcccaaagcagttgaacgttgagctgattaacagcgcccgtgacca

SEQ ID NO: 82810 - DNA, 381 bp, Zea mays
acccacgcgtccgcccacgcgtccggtcatgctgcatttctgtcgaagaacacatttcacatgccgacaggtttttatgatactatcccagaaccagtgttttggcctgtctttgtggtggccacacttgctgctgttgttggtagccaagctgttatttcagcaacattctccattgtgaaacaatgccatgctttgggatgtttcccgcgagtgaaggttgtccacacatcgaggtggatctatgggcagatatatattccagaaataaattggattcttatggttctttgcgtcgctgtcactattgcatttcgtgatactactcttattggcaatgcctacggtattgcatgcatgactgttatgcttgttactaca

SEQ ID NO: 82811 - DNA, 380 bp, Zea mays
aattctagatcgcgaatcttccacagagaggcagacggcaggactcgcttcaagctcctcatctcgcgcagggggggtcgcctgagatcacagcgacaatggtgaaggcagttgctgtcctcgccggcactgatgtcaagggcaccatcttcttttcacaggagggggatggtccgaccaccgtgactggaagtatctctggcctcaagccagggctccatgggttccatgtgcacgcgcttggcgacaccaccaacggctgcatgtcgactgggccacacttcaatcctgttggcaaggagcatggcgcaccggaagatgaggaccgccatgccggtgatcttgggaatgtgacagcgggagaagatggtgttgttaat

SEQ ID NO: 82812 - DNA, 361 bp, Zea mays
catgcagaatgggcagaagatcacattccctggtgaagctgatgaagcgcctgacactgtcactggagatatcatttttgttctccagcagaaggagcatcccaagttcaagagaaagggcgatgacctcttctacgagcacaccctgaccttgactgaatctctgtgtggcttccagtttgttgtgactcacttggataacaggcagctgctgatcaaatcaaatccgggcgaagttgtgaagcctgattctttcaaggcgatcaacgacgaaggcatgcccatgtaccagaggccgttcatgaagggcaagctgtacatccacttctcggtggagttcccagactcgctaagcccggag

SEQ ID NO: 82813 - DNA, 367 bp, Zea mays
cccacgcgtccgcccacgcgtccggagcaagcagcgagacgtcggcgacgacgctgaagtgggcaatggccgagctgatgcggaacctggcggtgatgcggaaggcgcaagatgaggtcaggggagcactcgccggccacgacgaggtggcggaggacagcctggtcaatctgcggtacctgcagctagtcataaaggagacgctgcggctgcacccgccggcgccattgctgctgccgcgggagtgccgcagcccgtgccaggtgctcggctacgacgtgcctcgtggcaccatggtgctggtgaacgcgtgggcaataggcagggactcagcgctgtgggacgcgccggaagatttcgtgccgga

SEQ ID NO: 82814 - DNA, 372 bp, Zea mays
ggcggagaaagcaacggtgctggtgcctgcgccagagcggcgcgaagagttcgacggcgggcggatcgtggacatcagccactactaccgcgaggacatgccggagtgggagtcatcagagggctccggcgagttcctgcagctggcgcggtccatgcgcaacggctccgacatcgctaacttctcggagctccggctcactgcgcactccggcacccatgtcgacgcgccgggacacgtcttcgagcactactacgacaccggcttcgacgtcgacaccctcgacctcgctgtcctcaacgagttgaaacggtgtgcaggaccagcgctgttggttgacgttcctagagataagaacatcacagctgatgt

SEQ ID NO: 82815 - DNA, 372 bp, Zea mays
cccacgcgtccgcccacgcgtccgccgagttcctcactgccatgatgaacaggcataaactggagaaggaggaggatttgttccttgcttttcaacacttcgacaaagacgatagcgggtacataacaagagacgaactggaacaagccatggcggagtatggggtgggtgatgaagcaagcattaaggaagtgctggacgaagttgataaagacaaggatgggagaatcgactacgaagagtttgtagaaatgatgaggaagggaagttatacctgaggaagctctgttctcatggtgggagaggttgtgtatatatgtttcagcaaatgtgtcaagtacaagcaacgaagcaagtttaacttagaacaag

SEQ ID NO: 82816 - DNA, 373 bp, Zea mays
acggacgcgtgggtggcgaagcacaaccgtgccgcaaagcttttcaacttacagctgcacgcactttgcacgaagctgagggcagaattcgatggagccagcatcacttacgtggacatccacacgatcaaatacagcctgatcgccaactactctcgatacgggttcgagcacgccactcaggcgtgctgtggatacggaggcccacccctgaactacgatggtaacgtaccatgtggacacacggtgtctctggatggtaagatggtcaccgcaaaagggtgcagcgacactactgaattcgtcaactgggatgggatacattacacggaagctgcgaatttccatatcgcctcgcagatcctgaccggga

SEQ ID NO: 82817 - DNA, 379 bp, Zea mays
cccacgcgtccgaaatgaaataaataaagaataaagccaaaaaaataagtcgaagatagaagagcccagattcaaaatgaagaaatggaaactcgaaaaggatccttctgattctcaaagaatgaggggcaaggggattgataccgagaaagatttcttcttattataagacgtgatttgatccgcatatgtttggtaaaagaacaatcttctcctttaatcataaatggaaagtgttcaattagaacatgaaaacgtgactcaattggtcttagttagtcttcgggacggagtggaagaagggcggagactctcgaacgaggaaaaggatcccttcgaaagaattgaacgaggagccgtatgaggtgaaaatctcatg

SEQ ID NO: 82818 - DNA, 375 bp, Zea mays
aacccacgcgtccgggggaactcaagtgtggagccatatatagcagctcataacatgctactggcacatgcatcagctaccagactgtacagagaaaaataccaagctgtgcaaaaaggagttgttggtataaatatatatacaatgtggtcatacccactaacaaactccactgccgatttagaagcaactcaaagatttctggacttctattccggctggatactagaaccattggtgtttggagattatccaagcgtaatgaagaagaatgttggttctcgccttccgtcattcagtaaagttcaatctgaagccattcgtggcactctagatttcattggaataaaccactattattctttctatgtgaac

SEQ ID NO: 82819 - DNA, 388 bp, Zea mays
acatgattttggcgatggtgtctcctgtcactcattctgtgggcaactgtgttaaacgtgttgtggtcattgtaacatcagtgctgttcttcaggacacctgtttctcctatcaactctctcggtaagcatgtttcttaacctgtttctctgtctttgttctatttcatccttctgttgtatcaccattacatgctttcatctgtgtgtataggtactgcgattgcacttgccggagttttcctgtactcacagctcaagcgacttaagcccaagccgaagacggcttaaatagggattgtattttccatctctttgtgttaatggagttaaacacttctatgtttcaggtgactgcattttaaaagatttgtgcttataacaacaac

SEQ ID NO: 82820 - DNA, 375 bp, Zea mays
agagagccagagaggtgggcagatggcgacaccgtcgtcgtcgctttgctccagcttcgcctccctgcggaccgcctccatcggccacccccgcggcatcgcgtcatctacgcccaggaaggcgttccaagtgagggcatcagctcgggttgacaagttctcaaagagtgatatcattgtgtccccttcgattctgtctgcaaacttcgccaagcttggtgatcaggtaaaagccgtggaggtggcaggatgtgactggattcatgtcgatgtcatggacgggcgctttgtgccaaatatcacaattggacctttggttgttgatgctctgcgtcctgtgactgatcttccattggatgtacatctgatgattgt

SEQ ID NO: 82821 - DNA, 424 bp, Zea mays
acggacgcgtgggttaccataggctcattcatcgaaacgcaaatcagagagacaggaaaagaaaaaagaattttgatcaaatcaatagaaggaaggatcccttacctgatttgaatttcatcctcctttaaataggatatgctctaagtcttcccatactttcctataatgactgcaacgattttctccattttgcgaattcctattttatttgaagtatattactatcatatacattatctaaatcgatccactttaaataaaatagaaaaaatcgaaagaaaaaaaaaaaaagaaagagtaaataataaaacaggatattctgtttcataattctgaaatagagttcttttttttagtattactcctcattaggatgtatatattaatcatcctaatttaataaaaaataaatcacccaatt

SEQ ID NO: 82822 - DNA, 396 bp, Zea mays
acaacaagcaacatagaaagtggaatccagtagcaacaatagagcaacaatggagaccaagatattttccctccttatgctccttgctctttctacatgtgttgctaacgcgacaattttccctcaatgctcacaagctcctatagcttccctttttcccccataccttccatcaattatagcttcagtatgtgaaaacccagctcttcaaccatataggcttcaacaagcaatcgcagcaagcaacatacctttatcgcccttgttgtgtcaacaatcgccatccctatctttggtgcagtcattggtacaaaccatcagggcacaacagctgcagcaactcgtgctacctgtgatcaaccaagtagctctggcaaacctttctccctactctcc

SEQ ID NO: 82823 - DNA, 375 bp, Zea mays
  unsure (1)..(375): unsure at all n locations
acggacgcgtgggcggacgcgtgggcggacgcgtgggccaagtcggcgtcccaggacgatctcaagaaggcctaccgcaaggctgctatcaagaaccaccccgacaagggcggtgaccccgagaagttcaaggagctcgcacaagcctatgaggttttgagtgatccagagaaacgtgagatttatgatcagtatggtgaagatgcccttaaggaangaatgggcggtggaggatcccatgttgatccatttgacatcttctcatcattttttggaccctcttttggacgaagtggtggaagcagcaggggaagaaggcaaangaggggagaagatgtagttcacccacttaaagtttctctggaagatctttac

SEQ ID NO: 82824 - DNA, 371 bp, Zea mays
agtcctcgatccgatccgccgagtgcacaccacctttccccactccgatcgaatcgatggccgccgagggcgagaagaagatgataaccctcaaaagctccgatggcgaggagttcgaggtggaagaggcggtggcgatggagtcgcagaccatccgccacatgatcgaggatgactgcgccgacaacggcatccctcttcctaacgttaactccaagatcctatccaaggtaatcgagtactgcaacaagcacgtacatgccgccgccgccgccgccgccgcctcgaaggccggttccgacgacgtgggtgccgcctccgccaacagcaccgccgcctccggtgagggactcaagaactgggatgcggac

SEQ ID NO: 82825 - DNA, 451 bp, Zea mays
cccacacatccacccacgcgtccgcccacgcgtccgcccacgcgtccgattacagtatttcacccttgcccttgacctctactccaagtataacgttacggaaatgctgtcaagtggagggatacaggtttcaaatggtaaggaatatgcactgagcgatgtcatcgataccatcaaacatgcttttgggggatcgccacaaattgtttgcaagaggggttcaatcgaagaacttaggttatgcttcgacaaagaattgaagcctcgtgattgccttaccacttctttggcgaatggaagtgtatcaaaaagcaagcactgcccgcggtacatcaccttgccaacatatgatccccttgtgcttgccaattcaactgtagagatcatgacacagttccaagaaatttgatttgcctgaagctctttatacagcttaaaatgcaattgttgc

SEQ ID NO: 82826 - DNA, 403 bp, Zea mays
ttcccgggacgcgtccgatttgtctgctacagatgcaagaaatttggggaactctattgggccctggaactgtgaactttgtgaagatcaagacatttcatcagaaccgtccgcgactctgcgcgagaagcgagagtatggacacccaagtgaagcttgctgttgtggtgaaggtgatgggaaggaccggctccaggggtcaggttacccaggtcagagtgaagttcttggatgaccagaaccgtctcatcatgaggaacgtcaagggaccggttcgcgagggagacatcctcacactgctcgagtctgagagggaggctaggaggctgcgttgaggcgggatactgtcttggtagttttcgtatggagttggatgtcatctaattgtgctatgtttgtcaaa

SEQ ID NO: 82827 - DNA, 379 bp, Zea mays
  unsure (1)..(379): unsure at all n locations
acccacgcgtccgggcaacctccaggacaatttctttgccagtttcgctctgggttggctgatcactaatggtgctggtcttgcatcttaccccattgataccgtccgcagaaggatgatgatgacatctggtgaggctgtcaagtacaagagctccttggatgcgttccagcagattcttaagaaggaagggcccaagtccctgttcaagggtgctggtgctaacattcttcgtgccattgctggtgctggtgtgctttctggctnatgacagctccagattctcttcttccgaaaaaaagtacggttccggcggtgctttaaatggagaaatatgatgacgaacaagagcagtgtgtgttcccggtcctttccaatc

SEQ ID NO: 82828 - DNA, 265 bp, Zea mays
aggactagttctagatcgcgagcgcccgtcgcctccctttccccttccctccctccctctccccgcgggccgccagaggcaatttcgccctcgattcgaccccgattcgtccgcccgcgaccgggattccctccgccaagcgcggatctgaacgctgcgctccgtgtcgccgctcgaatccgccatgaagggggccaaatccaagggcgccgccaaggccgatgccaagctggcggtgaagagcaagggggcggagaagcccgcc

SEQ ID NO: 82829 - DNA, 368 bp, Zea mays
acaatttcttccattcaaccaactgtctacactgaaccctgctgcttatttgcagcaacaactattaccatttagccagctagctactgcctactctcagcaacaacaacttcttccatttaaccaattggccgcactgaaccccgctgcttatttgcagcagcaaatactactaccatttagccagctagctgcagcaaaccgtgcttccttcttgacacagcaacagttgctgcctttctaccagcagtttgcggctaaccccgcaaccctcttacaactacaacaattgttgccctttgtccaacttgctttgacagacccagcggcctcctaccaacaacacatcattggtggtgccctctttt

SEQ ID NO: 82830 - DNA, 333 bp, Zea mays
agctcatccctctcttaccaagtcatcctcgggttagggttccttacggttttgtgaacgggccatgcgagctgttgttgtggagtaccgttgcttcatctgtcggcttacccgcgccaccagcaactactcccaggcaaatgccttcgcatcctaaagccagatgctcaactccaacgtcatcaacgaccattaaaccgggaagtcactcggtatccgcaacatcaacatctcctccgatataaccaattgcgacgcattgaaccacgactgcttatatgcagcatcaaatacgattaccatttatccagccagctacatcaagccgtgctt

SEQ ID NO: 82831 - DNA, 376 bp, Zea mays
gggccgagcacgcgtccacggacacgtgggcggacgcgtgggcataattctttatacagccaagcaaaggacagcagatgcagtttctacagtggagtcccttcctcgccccaccagcacaaggttcctttcatacgaagaactgaaagtggcaacaaataacttcgagccttcaagtgtgcttggagaaggtggttttggccgtgtcttcaagggggtactgggtgatggcactgctgtcgctataaagaagcttactaacggagggcaccaaggagataaggagtttttagttgaagtggaaatgctgagcaggttgcaccaccggaatcttgtgaaactgattggttattacagcagccgtgaatcatcacag

SEQ ID NO: 82832 - DNA, 358 bp, Zea mays
agcccacgcgtccgaacaatccccaaacgcctccgcctccgcctccctagggttttgctctcggctcgtcggatccagttcgggggatcctccatggcgtcgcgtccgtcgctgaagtcgaagcccaagggcaagggcgggaagaaggccaccgccgacgacgaggacgccaccgcggcggcgaccacggtgcggctcatgaaggagtggaccacgtggacgatgaagaaggcgaaggtggtggcgcactacggcttcatccccctcgtcatcgtcatcggcatgaactccgagcccaagccctccgtgttccagctcctctcccccgtctgatcggatctccccgtcagggcccgga

SEQ ID NO: 82833 - DNA, 384 bp, Zea mays
acccacgcgtccgcaatcgaccaccaaactttacatacaagatgaaactcgtcagattcctcatgaaattgaacaatgaatcggtaacgatcgagttgaagaatggtacaacagtttctggaacgattactggtgtcgacccttcaatgaatacgcatctcaaaaccgtcaagatgactgtacgaaaccgggaaccgacgacacttgaaactctagcgattcgcggcaacaacgttcgatactttatcttgcccgacagtctaccgttagatactctcttgatcgatgatgcacctaaacctaaaaagaagaaggctgacggtgctgcacgaggaggagctgccggtcgaggagcgagaggtatggatcgtggtggaagaaggg

SEQ ID NO: 82834 - DNA, 360 bp, Zea mays
cttgcttgagtagcgaagcgcgagagcaatggcgtcgctgtcgtgcgcctccacgctgccctggacccccgcctcctccccgcggccctcggcggaccgccgcctcacggcctctcgccgggctccgtcgctggtcatcgtcgcccaggggaaggtgaagaaacaccctcaggtcatattgacagatgacatagaagaggtggggaagaaaggggatacaatgaaggtgcgagctggattctaccgcaactccttgcttcccaagggcaaggctgcgcttctaaccccagcagtccacaagcaaaatacaatagtggcatctgagaatgaaaatccacctttaatgccggcaatcatgac

SEQ ID NO: 82835 - DNA, 376 bp, Zea mays
ccacaggggtggtggccaggtcattccaactgccaggagggtcatttatgcttctcagctcacagccaagccgaggctgctggaaccagtttacctggtggagatccaggccccagaaaatgcacttggtggcatatacggtgttctgaaccagaagagaggacatgtattcgaggagatgcaaaggcctggtaccccgctctacaacatcaaggctttcctccctgtcatcgagtcctttgggttctcaagccagctgagggctgcaacctctggtcaggcgttcccccagtgtgtgtttgaccactgggacatgatgggctcggatcctttggaggctggctcccaggctgcccagctggtgctggatatccgc

SEQ ID NO: 82836 - DNA, 391 bp, Zea mays
cggacagcgtgggctggaattcttggaaacatttttgacggtatccagcgacctctaaaaaccatcgctattaagtcaggagatgtgtatattcctcgtggtgtttcagttcctgcccttgacaaagatgtattgtgggaatttcagccaacgaagctaggtgttggagatgtcatcacaggtggagatctatacgctactgtttttgagaacacattgatgcagcaccatgttgctcttccaccgggttctatggggaaaataagttacattgcaccagctggccagtacaacctgcaggacacagtgctagaattggaatttcagggcataaaaaagaaatttaccatgcttcagacatggcctgtgcgttcaccaaggcctgttgcat

SEQ ID NO: 82837 - DNA, 348 bp, Zea mays
gacccacaacgtcagcccacgcgtccgtagccatgggcagcgcatctatcatcatcacctgtcaccgtcctccgccgtcatcgtcacacgctcgaacgctcctccatccatggcgcccaagaacgctctccccgccgccagcggtatgactctggagccgaggtaccgcggcgtccggaagcgcccctggggacggtacgcggaggagatccgggatccggccaggaaggcccgcgtgtggatcggcaccttctacaccgccgaggccgcggcgcgcgcctatgacaccgccgcgctccatttccgcgggaccaaggcgacgaccaacttccccgtcgccttcgacca

SEQ ID NO: 82838 - DNA, 376 bp, Zea mays
agcggacgcgtgggctccttcccggtctcctccgcccgttgccttcgtcccctccatctccggctgcgtcgccggcgagcccgacaccgcgaatcggatccgccgacaaggcgagagggaagagatggggctcacgttcaccaagctgttcagccggctgttcgccaagaaggagatgcggatcctgatggtgggactcgacgccgccggaaagaccaccatcctctacaagctgaagctcggcgagatcgtcaccaccatccccaccatcggattcaatgttgaaactgtggagtacaagaacatcagcttcactgtctgggatgtcgggggccaggacaagatcaggccactgtggaggcattacttccagaac

SEQ ID NO: 82839 - DNA, 378 bp, Zea mays
agagtgcatccaaacaggagggctaatagttgtactccctccgtttctttttattagtcgctggatagtgcaattttgtactatctagcgactaataaaaagaaacggagggagtactattttttagctaaaccttgaactagttattagccaactagctagccaacaccagctactttgagctccacatcccaactagtaactagccttagctcatccaaacaagccctaaaacatgaaattgatgcttactatgggcatttggtgagaattttaggcctgatgggattgcagaaatttgagtgcaaacagcaaagtgtttatctctctgttcagctagcttattggtttcattttcatagtcttcttacgagaact

SEQ ID NO: 82840 - DNA, 379 bp, Zea mays
  unsure (1)..(379): unsure at all n locations
cccacgcgtccgcccacgcgtccggtaactcctaccccagaaggtgactggttttctacaggggtttatacgactggaaatccttatggcatagcagaggatatcgtgttcagcatgccatgcagatcgaagggtgatggtgattacgaactggctagtgatgtgttgatggacgattttctctgggaacggattaaaaagagcgaagctgaattgcttgctgagaagaaatgcgttgcccatcttacaggagaggggaatgcattttgtgatcttccggaagataccatgctaccaggagaagtgtagtttagttacagaagcaacagcagtggaatgcattttgccaatacattagctgagacttganacatctgct

SEQ ID NO: 82841 - DNA, 350 bp, Zea mays
cccacgcgtccgcccacgcgtccggagcatggtagcccattaaggttacctggccacccagtgaatggtcagccgatggatctggagggctggtcagggattcaaacagaggcttctcagcatatgggggttctacaagcatcatcaatgggctggaatggtgctcctgtacttgctgccactcctgttgtcaagaaagtcatgaggctggatgttccagtagacaagtatcctaactacaactttgttggtcgtttattggggccgcgaggtaactccctgaaaagggttgaagcttcaacccaatgtagagtttacattcgaggacggggttctgtgaaagactctgt

SEQ ID NO: 82842 - DNA, 291 bp, Zea mays
aggtgggttggcttctcctccccctccggttcgggttcgggttcgtgaggttctccggggttcggtttcgtgggtgagcggatcgagatggcggcgtcggatgttgagtaccgctgcttcgtcggcggcctcgcctgggccacggacgaccactccctccacaacgccttcagcacctacggcgaggtcctcgagtccaagatcatcctcgatcgggagacgcagaggtcccgctgcttcggcttcgtcaccttctccacggaggacgcgatgcggaacgccatccagggc

SEQ ID NO: 82843 - DNA, 393 bp, Zea mays
ggacaaggggaaggtcctagaagttctaaggaactggccacataggaacattcaagttatctgtgttactgatggtgagcgaatcttgggacttggagatttgggttgtcagggaatgggaattcctgtaggcaaacttgctctatacactgctctaggaggagttgacccatcagtttgcttgcctatcacaattgatgttggtacaaataacgagaaactgcttaatgatgagttctacattggactccggcaaaaacgtgcgactggcgaggagtatgatgagcttattgaagagttcatgtctgctgttaagcaattctatggtgagaaagtcctcattcagtttgaggactttgccaatcacaatgcctttgatttgcttgaaaaata

SEQ ID NO: 82844 - DNA, 374 bp, Zea mays
aatccaaatcagcagagcggcagtgcgtagagaggatcgtccaacagaacagcatgaaaatggtcaacgttcacgtcgtgtgcctggctctgtcagctgccaacgcctctgcaatgcaaatgctctgcccctgcgcggagctgcaaggcttgtacggagctggcgccagtctgacgaccattattggcgccctgggcctgtaacccgaagctgagtaactgaggcaccctcagtgcaccccgctggcagaggtgccctactacgcagggtgtgtggcatcctagcgcaatgttccatccgctccggcaacagtgctgccagcagcagatgaggatcacggacgtatagtccgtcacgtagcagttgcagataat

SEQ ID NO: 82845 - DNA, 363 bp, Zea mays
agggaacattttatgccaggtataatgacattgccaagcatgcattggatgttgtgaaaagtaagagcctagttttgactcaatcactggatgctcacaacataactgaaacaaaagagcagcctgaaggatttgacagtgattggttacataccttactttggcaaggcaatgaacttcctgctcctgtcattgatgtatgcctactactgctttgagtacaagtggaacttctttgcagtgagtctgcatgagaggcttgatttctttgaatcaaactgggcgttctttgctggatttggtgcaccatgcgtccttcgaattttcttcttctctcctcttataagctatgggtttctggct

SEQ ID NO: 82846 - DNA, 391 bp, Zea mays
caaatccacggtttaataacgaaccgtgttaacttaccataacaacaactcaattcctatcgaattccttcctatcgaattcctatagtaaaattcctataggatagaacgtacacagggtgtacacattatatatgaatgaaacatattcattaacttaagcatactcctttttttatttaatgagttgatattaattaaatatcttttttttttagatttttgcaaaggtttcatttacgcctaatccatatcgagtagaccctgtcgttgtgagaattcttaattcatgagttgtagggagggacttatgtcaccacaaacagaaactaaagcaagtgttggatttaaagctggtgttaaggattataaattgacttactaaaccccg

SEQ ID NO: 82847 - DNA, 341 bp, Zea mays
acccacgcgtccgcccacgcgtccggtatcctctcagttgctgccattgataagggcactggaaagaaacagaatcacaacatggtgcaatacccaccaaggtaagtttaaaaatggaaaaaaccataattttccagggggacaaagagaagagagatgcaatcgacaccaaaaaccaggcggactcagtggtctaccagactgagaagcaactgaaggagcttggcgacaaagtccccgctcctgtgaaagagaaggtggatgtgaagctccaggagctcaaagacgccatttctggtggatcaacacagagtatgaaagatgccatggctgctctgaac

SEQ ID NO: 82848 - DNA, 396 bp, Zea mays
cccacgcgtccgcttcaattctttgaaaaaccaaagggtgctgatttgaattctatgagagttgagaccaacttcctgagctatgctatagatgatgcacagaaatatccataccttgcatcaatgggcatttatgtcttcaagaaagatgcacttttagaccttctcaagtcaaaatatactcaattacatgactttggatctgaaatcctcccaagagctgtactagatcatagtgtgcaggcatgcatttttacgggctattgggaggatgttggaacaatcaaatcattctttgatgcaaacttggccctcactgagcagccttccaagtttgatttttacgatccaaaaacacctttcttcactgcaccccgatgcttgcctccgacgcaa

SEQ ID NO: 82849 - DNA, 393 bp, Zea mays
agtgaagaagctcaacaagaacaagaagctcatcaagaagcttgctcgcaagtacgatgccttcgtcgcttccgactccctcatcaagcagatcccccgtctcttgggtcctggtctctccaaggccggcaagttccctacccccgtctcccacaacgaggacctttccgccaagatcaccgacgtcaagtccaccatcaagttccagctcaagaaggttctctgcatgggtgtcgccgtcggccacgtcgacatgaccgatgaggagctcgtcggtaacgtcatgttgtccatcaactacctcgtctccctcctcaagaagggctggcagaacgttggctccctcaccctcaaggcttccatgagcccccccaagcgtctctactagacgtt

SEQ ID NO: 82850 - DNA, 401 bp, Zea mays
aagaaaaaaaacacgagaaaaatcaaatcaggagacggggattccagagagcccctgtcgggtagggaagggaaggagaggcgaagcggaggcgagatgggggcggccgaatccgtgccggagacctccatacacgaattcaccgtcaaggattgcaacggcaaggaagtgagcctggaaacctacaaggggaaggtcctccttgttgttaacgtcgcctccaaatgtgggttcacggagaccaattacacgcagctgacggagctttatcagaagtacagggacaaagacttcgagatattggcattcccttgcaatcagttcttgcgacaggagccaggtactgatcagcagatacaagactttgcttgcaccagatttaaagctgaatacccagtttt

SEQ ID NO: 82851 - DNA, 390 bp, Zea mays
agcggacgcgtgggaaaaggggtactctttctacaactacattagtattagtctcgaaatgctttaaacgggaaatagctagtgtagaatttatctgatatagaacactcatatcgataaaatagtttgaactatttactagaagggcacgcagccctttttccaatgccaaatcgacgacctatgtataaaaaaaagagaaattttttggatttgaagaaaaaataaaaggaattctatcaatttttattttccatttatttagttagtttttcttaatgaaattgaaattattaactaacagagcaaacacaaataaagaaacaactttgctgaccatgatagatttttatctagttggaagagtcctcttaatattcatctagtcct

SEQ ID NO: 82852 - DNA, 398 bp, Zea mays
agaatgtaagtgctcttattgatatgaaactggagaaatacaaaaacatacgcgaagaatcagctttcttctatggagagatttctgaaggaaccctcaaatttgatagaaaagaagcagaggttgctgcactgagggagctcaagaaggaagagttggtaggcttcttcaatgatcatgtcaaggtcaatgcaccacaaaagaagattcttagtatacaagtgtacggtggtctccattctgccgagtacgaaaccatagtgcaaaatgctccgccaccgccgtcgtgtgagataactgatatttatggcttcaggaggtcgaggcctttatatggattattcaggggaggcgttggtcagatgaagctatagttcaacattttctcatcattctgt

SEQ ID NO: 82853 - DNA, 397 bp, Zea mays
gatgctctgcgtccagtgactgatcttccgttggatgtacatctgatgattgtggaacctgagcagcgagtccctgattttatcaaggcaggtgctgatattgttagtgtccactgtgaacagacatcgaccatccatttgcaccgaacagtcaatcagattaaaagtctaggagcaaaggcaggagttgttttgaatccagcgactccactcactgcaattgattacgttcttgatgttgttgacctggtgctgattatgtctgtgaatcctgggtttggtggccagagctttatcgagagtcaagtaaagaaaattgcagaactgagaaggttatgtgcagagaagggagtgaacccctggattgaggttgatggtggtgttggtccgaaaaatg

SEQ ID NO: 82854 - DNA, 384 bp, Zea mays
agaaattacttcatgcaaggtgatgcgtgatcaaaatggtcttagcaaaggctctggatttgttgctttctcaactcgtgaggaagcatctcaggctttaactgaaatgaatggcaaaatgatatctggaaaaccattgtatgttgcatttgcgcagcgcaaagaagatagaaaagcgatgttgcaggcacagttttctcagatgcgccctgctgtaccaatgacacccactctagccccgcgccttccaatgtaccctcctatggctcctcagcaactcttctatggacaagcgccacctgctatgataccccctcagccaggatttggtttccagcaacaacttgttccaggcatgaggcctgggggtcctcatatgccaaa

SEQ ID NO: 82855 - DNA, 388 bp, Zea mays
agcacgatcatgttctggacggtgtacgcgcagatgaccaccttctcggtgtcgcaggccaccaccatggaccgccgcgtcgggggctcgttccagatccccgcgggctccctcaccgtcttcttcgtcggctccatcctgctcaccgtgcccgtctacgaccgcctcgtggtgcccgtcgcgcgccgcgtcagcggcaacccgcacggcctcaccccgctgcagcggatcgccgtcggcctcgcgctctccgtcgtcgccatggctggcgccgcgctcacggaggtccgccgcctccgcgtctcgcgcgagtcctccgagtccgcctccggaggcgtcgtgcccaggtccgtgttctgggtcatcccgcatttcttccccccttggg

SEQ ID NO: 82856 - DNA, 347 bp, Zea mays
agggaactggtattgcagaacttattgctcttgagatttcgaaacagacgaatgctccaattgaagagtgccgcaagaaggtttggctggtggactcaaagggtttgattgttgactctcgtaaaggctcccttcagccattcaagaaaccttgggcgcatgagcacgagcccttgaaaaccttgtatgatgctgttcagtccatcaaacctacagttctgatcgggacatctggagttggaagaacattcacaaaagaaatcattgaggccatgtcttccttcaacgagaggcctatcatcttttcactgtcaaacccaacctcgcattctgaatgcactgctgaa

SEQ ID NO: 82857 - DNA, 385 bp, Zea mays
acccacgcgtccgcccacgcgtccggcggaatcaactaccagcctcccagcgtcgtccccggcggtgacctggccaaggtgcagcgtgccgtgtgcatgatctccaactccaccagtgttgtggaggtcttctcccgcattgaccacaagttcgacctcatgtacgccaagcgcgccttcgtgcactggtacgtcggtgagggtatggaggagggcgagttctccgaggctcgtgaggatctggctgcgctcgagaaggactacgaggaggtcggtgctgagtttgacgagggtgaggacggcgacgagggtgacgagtactagacgctctactggcgcggcgtcgtcgggcctgtgtgccactgctatcctgtgatctgccctg

SEQ ID NO: 82858 - DNA, 403 bp, Zea mays
cccacgcgtccgcgacaaagtatattccattctatggaggagcagaataccatgactatcatcattatgtaggaggccagagccaaagcaattttgcttctgttttcacttactgtgattacttagatggcactgacaaaggttacagattccacaaaacatacctagcaaagctgaaggatctggggcataatgatggccataaaggagacggcagcggacccagctatgtgaaactggattagattgcaagatatagtgcatcttgagtgtttctatggtcatcgacttcactgtggcatttcgaaatgggatattgctgagttgggctggtcacgtgtgttctcatttctgtagcaagcatacagctttcagctctgccttcctccttcctttttttttt

SEQ ID NO: 82859 - DNA, 349 bp, Zea mays
cccacgcgtccgagggtttccttcctcctccagtgctgtcatcgccgccgccaccccggtttccttcgtaagcccgtcgtcctccgtccgcgactctgcgcgagaagcgagagtatggacacccaagtgaagcttgctgttgtggtgaaggtgatgggaaggaccggctccaggggtcaggttacccaggtcagagtgaagttcttggatgaccagaaccgtctcatcatgaggaacgtcaagggaccggttcgcgagggagacatcctcacactgcacgagtctgaaagggaggctaggaggctgcgttgaggcgggatactgtcttggtagttttcgtatggagttg

SEQ ID NO: 82860 - DNA, 362 bp, Zea mays
acgcgtccgggggaatgttggtgaggaaaggagattgttggaggaaggtttgaagctattccctgcattcttcaaattgtggttaatgcatggacagatggaagaccggcttggtaatggagcgaaggccaaggaggtttttgagaatggcctgaagcagtgccctagttgcatccctctttggctctctctagctaccctagaggagaagattagtggcttgagtaaatcacgtgctgttctcacaatggctagaaagaagaaccctgctacacctgaactctggctagcggcaattcgagctgaattgaggaatgggaacaaaaaggaagccgatgctctactggccaaggcattgcaag

SEQ ID NO: 82861 - DNA, 315 bp, Zea mays
aggtaggatgttttcttatgaagaactgaagcttgcgacgtccaactactcacctgatatgttaattgggaagggtggaaccagccaggttttcaaggcacaacttgatggcggaacatttgctgccataaagattctgaaaccctcggttgatgcaatacacgagtttgttacggaggttgagaccgtaaccagcttgcagcatgagaacattgtagcactaaggggattcagcttcgagaactacaaccttgtgttggcatatgattacatgccccgagggagcttggacaaagctcttcatgggaagaatga

SEQ ID NO: 82862 - DNA, 431 bp, Zea mays
cccacgcgtccgagcctctccttcccggtctcctccgcccgttgccttcgtcccctccatctccggctgcgtcgccggcgagcccgacaccgcgaatcggatccgccgacaaggcgagagggaagagatggggctcacgttcaccaagctgttcagccggctgttcgccaagaaggagatgcggatcctgatggtgggactcgacgccgccggaaagaccaccatcctctacaagctgaagctcggcgagatcgtcaccaccatccccaccatcggattcaatgttgaaactgtggagtacaagaacatcagcttcactgtctgggatgtcgggggccaggacaagatcaggccactgtggaggcattacttccagaacacccagggtctcatctttgttgtggacaacaatgatacggaccgtgttgttg

SEQ ID NO: 82863 - DNA, 465 bp, Zea mays
gggtcgagcacgcgtccgcccacacgtcagcccacgcgtcagcccacgcgtccgcggacgcatggggttcgagggtattgcggacgaatttcagaacaacaacaatgtcaggctgcttttgaagtatgatgatgctctggcacatatgatctttgcagcatcagacatgttcattgttccttctatgtttgaaccatgtggcctcactcagatggtatctatgcgatatggttctgtgccagttgttcggagaaccggcggtttgaatgacagtgtcttcgatttggacgatgaaacgatacccatggaggtgcgaaatggcttcacctttttgaaggctgatgagcaggattttggtaatgcactggaaagagctttcaactactaccacagaaaacctgaagtttggaaacagttggtgcagaaagacatgaagatagatttcagctgggatacttcagtttc

SEQ ID NO: 82864 - DNA, 407 bp, Zea mays
gcgacatgcacccggcgacgtggggcgcggcctacggcaacagctggaggaccaccaacgacatcgccgacacctgggacaggtcagtctgtttgttccttgcgttgcggcctcgccgctgtcctgtccagactccagaccgtttgctagcttcactgagacggtacctgccgccgttccagcatgatcgccacggcggaccagaacgaggtgtggtcggagtacgcgcgtcccggcggatggaacggtctgtactgtactgtacacatgatcagttgaacggcctgtacatatgatcagatggattcgcgccttaacgctccggtccggtggtctggcgtgtgcagatccggacatgctggaggtgggcaacgggggcatgaccaacagcgagtacgtcgtgcact

SEQ ID NO: 82865 - DNA, 445 bp, Zea mays
accacgcgtccgcccacgcgtccgaccaaggagagtacgtggaggagcagccatggcttcatcggtggccgccgcggcgagcacattcctgggcacccgcctggcggacccggcgccacagaacgggcgcatcgtggcccggttcgggttcgggttgggcggcaaggcgaagcctgctccgaagaaggtggcgaagacatcgacctcctctgaccggccgctgtggttccccggcgccgtggcgcccgactacctggacggctcgctggtcggcgactacgggttcgacccgttcggtctcgggaagcccgtggagtacctgcagttcgagttggactcgctggaccagaacctggccaagaatgaggccggcggcatcatcggcacccggttcgagtcctccgaagtcaagtccaccccgttgcagccctacagcgaggtgttc

SEQ ID NO: 82866 - DNA, 254 bp, Zea mays
aacgagaagcacgtccccgtcaacatcgctggaaccaggatttgtgacggcgagtggctctacgccgaccctgatggcattcttgtctccaggacggaactcaccgtgtagacagacacctggttgtatgtgtgtgtgtgtataaggaatcgggcgctcttgctgttaagcccgactgcccgagcttgcaataatggattcttgcttgatcacacatttatacttagaataatcgaatgcttgcttccatggtt

SEQ ID NO: 82867 - DNA, 404 bp, Zea mays
acggacgcgtgggcgatctcgtttcaaatccatccatcctcgtttcctccgtcccgcagcatctcaaccccatggccaagatcaagatcgggatcaatgggttcggcaggatcggaaggctggtggccagggtggccctgcagagtgacgatgtcgagctcgtcgccgtgaacgaccccttcatcagcaccgactacatgacctacatgttcaagtacgacactgtgcacggacagtggaagcaccatgaagtcaaggtgaaggactccaaaacccttctctttggtgagaaggaggttgctgtgtttggctgcaggaaccctgaggagatcccgtggggttcggttggtgctgaatatgttgttgagtcaactggtgttttcactgaccaggagaaggctgca

SEQ ID NO: 82868 - DNA, 442 bp, Zea mays
  unsure (1)..(442): unsure at all n locations
gcaggcggaggcgcggtgcgcgcgctgtcccagaaggagcaggacatacagatgatgctcgcggccgacgtccacctcggcaccaagaactgcgatttccagatggagcggtatgtctttaagcgtcgcaccgacggcatctacatcatcaacctgggcaagacatgggataagctccagctcgcggcgagggttattgttgccattgagaacccacaagacatcatcgtccagtcggcccgcccctacggccagcgtgctgtcctcaagttcgcgcagtacactggcgcccatgccatcgctgggaggcacacccctggtaccttcaccaatcagctccagacctctttcagcgagcctcgcctgctcatccttactgacccaaggactgaccatcagccaatcaaggagtctgctctggggaacantcccgacattgcct

SEQ ID NO: 82869 - DNA, 362 bp, Zea mays
agcggacgcgtgggcgtcggcgaaccgcaaggcgacggcggggctgaagctggaggcgcgcgactccggcctgcagacgggtgaccccgccgggttcaccctcgccgacacgctggcctgcggcgccgtcggccacatcctcggcgtcggcatcgtgctcgggctcaaagaacaccggcgccctcgaccagatcatcggctagatccctacgtcgtcgttgttaagatcagactcagcagcctcgatcgcgccgccggccggcaggtgcctgcaggtggtgactttgtaacgtgtgtgcgtgcgtacgtgtacattgcatccatcttggttccaatggacatatagctcctgttgctcctct

SEQ ID NO: 82870 - DNA, 387 bp, Zea mays
aggtgacacataaggtggtaccacataccctggctataccgatgataagacagtgcccaaggatactgtgactccaacgtttgctgctgccgcgccttttcataaataatgccagatgggatggagttccctttcatatgaaagctgggaaagctttgcacacactcacgagctgagattacggtacagttccgacatgttcctgtaaatctctacaaggggagttttggcacacatcttgatacggtcactaatgagcttgtgagacgtgtgcagtcggatcaatcaatttacctatagattaacacctatattcctggtcccggtatgctactagatacgagtaacttgagtcgccattatgccgcaaggtactcaaaggagata

SEQ ID NO: 82871 - DNA, 392 bp, Zea mays
agcagacgcgtgggcaggacttcaaaactgatttgcgtttccagagccatgcggtgcttgccctccaggaggctgctgaggcataccttgttggcctgtttgaggacaccaacctgtgcgccatccatgctaagcgtgtgaccatcatgccaaaggacattcagctggcaaggaggatccgcggcgagagggcctaatcgccacctcaaacatcgtgacaaaaacatgaagtcctggggttattgttaatctggtgccattgtaaggacatatgactacggtttgttttgtggatcgcaagtttctcttctgccactgttgctgctacctttgctggtgttattgctagggtcgaatacttaagttaactatgcgctgacagtctggactag

SEQ ID NO: 82872 - DNA, 438 bp, Zea mays
accacgcgtccgcggacgcgtgggcaaaaagcagacagaggaccaaggaaggaagcagggatccggctttgctctgcaaccatgagctccctgtacgacgtctcctgcttcgccgctggccttgctggcaacgtcttcgccctcgccctcttcctgtcgccggtgccgacgttcaagagggtcctcaaggccaagtcgacggagcagttcgatgggctgccctacctgctgtccctgctcaactgctgcatctgcctctggtacggcctcccgtgggtctccgacggcggcagggccctcgtcgccaccgtcaactgcaccggcgccctgttccagctcgcctacatctcgctcttcatcttctacgccgacagcaggaccactcggctcaaagtcgcggggcttctggtgctattggtcttcgcgttcgcgctcatc

SEQ ID NO: 82873 - DNA, 441 bp, Zea mays
acggacgcgtggggttctttgaaacccacagatattttggtttggagcctaatcaagtgacatttttccaacagggtactattccatgtgtatctcatgatggaagatttattatggagacaccatataaggtagcaaaggctcccgatggcaatggcggagtatatgctgctctaaaatctaaaaggttgctcgatgatatggctgcaaaaggtgttaagtatgtagattgctatggagttgataatgtattggtccgtgttgcagatccaacattcctaggatacttcattgacagaggtgtatctgctgctgctaaggttgtcaggaaggcatatccacaagagaaagttggagtatttgttcagcgtggaaaggggtggaccctctctgtagttgaatacagtgaaatggatgcagctatgacaactgaaatcaatc

SEQ ID NO: 82874 - DNA, 406 bp, Zea mays
acctggcctacgacatctcggacgaccagcaggacatcaccaggggcaagggcctcgtcgacaacctcttccaggcgcctatgggggacggcacccacgtcgccgtgctcagctcctacgactacatcagccagggccaaaagtcttacaacttcgacaacatgatggatggcttctacatagccaagggcttcatggacaagctcgtcgtccacctctccaagaacttcatgcacctgccaaacatcaaggttcccctcatcctgggttacctgggaaggcaaaggccagggaaaatcgttcaaatgcgagctggtcttcgccaagatgggcatcacccccatcatgatgagcgccggcaatctggaaagcggcaacgccggaaagcccgccaagctcatcaggc

SEQ ID NO: 82875 - DNA, 407 bp, Zea mays
agcatttcagtctgtctccaaaggatactatggagagtgtggtaaaagaggaggttacatggagattactggcttcagtgctccggtaagagagcagatctacaaggtagcttcagtgaacctgtgctccaatatcactggtcaaatccttgcgagcctcgtcatgaatccaccaaaggttggggacgaatcatatgcttcctacaaggcagagaaagatggaatccttcagtctttagctcgccgtgcaaaggcactggaagatgcattcaacacgcttgagggattttcatgtaacaaggctgaaggagcaatgtaccttttccctcagatccatctgccacataaggcaattgaggctgctaaagctgccaagaaagcacctgatgcattctatgcgctccgtc

SEQ ID NO: 82876 - DNA, 443 bp, Zea mays
accacgacgtccggtgctggtggtggtggcgctgctggcttcgtccgcgtcggcggcgatcacctgcgggcaggtggggtcgtcgctggcgccgtgcatcccgtacgcgacggggagggccagcgcgctccccgcgtcgtgctgcagcggcgtcaagagcctcaacagcgcggcgcggaccagcgcggaccgccaggcggcgtgccgctgcctcaagagcctcgccaacagcgtcaagagcgtcaacatgggcaccgtcgccaccatccccggcaagtgcggcgtctccgtcggattccccatcagcatgtccaccgactgcaacaagatcagctaagttacgacgaccaagctaataagcctaccgaacgtacacgtacgtcccgcgcgctgcacgagtgatgaagccaggggagaaataaaataaagccgctgtattgcca

SEQ ID NO: 82877 - DNA, 257 bp, Zea mays
gacagacatctggtctctaggatgcactctttttgctatcatgtacaatgtttcaccatttgagtatgctcttggtgaatctggaggaagtctgcaacttgccattgtaaacgggcagttgaaatggccaccaggacccaaacctccttatcctgatgagcttcgccattttgttaactggatgcttcaacctgaagctgcaatgcgccctcaaaattctgatgtgggtcctcaagttgacaagctcaatgccaaat

SEQ ID NO: 82878 - DNA, 430 bp, Zea mays
  unsure (1)..(430): unsure at all n locations
cggacgcgtgggcggacgcgtgggaccgcctttcacctgaaaccgaaagagagaagcagctatttggagaaagtgaagcacgcgataagatgagaaaaaggaagagagaagaacagaagggaggactcgaaaatgggatacataggctccgtgccgaggccgagaggctggacgtgttgctcgcggagggccgtgttttctctgacctgcctgctttggccgatagagatagcatcttgctgaaggatacccgcctggagaattctcttgtctgccagccccaacaacggaacttgcatggtcgaattttcggtggtttcctgnatgcacgagcatttgagcttgccttctcgactgcgtatgcttttgttgggcagagaccttgtttccttgaagtcgatcatgttgacttcttgaaaccagtggacgt

SEQ ID NO: 82879 - DNA, 369 bp, Zea mays
agcggcggggaacggcacgttcatcgactgccccgcgccgcagcagtacacctgctccaaggagatcctcttccaccccttcaagaagtggatgctcaagcagcagctcaaccaggacgacgaccctttccagctgcctggcgtcgccatggacaactgatacaccgtaccgtcgtctctgtttgcgtttctgtcaagtgtgcatggaataatactgtaactgtgtttcctgccgggcaatgcactgtgatatgatgcccaacgaataaatgtcgcttttatttttaaaagaaatgcaaaggacaaattttcagtggattccagaagcaacgaaacaatttgagcttgccttcacgaaatgaaataaag

SEQ ID NO: 82880 - DNA, 383 bp, Zea mays
agcccacgcgtccgcgtctcgctcgtggctgccctactcgtgctgcttgccctcgccgccgtttcctccacgcgcagcgcacaaaaggagtccgtggctgacaacgccgggatgttggcaggcggcatcaaggacgtgccggcgaacgagaacgacctccagctccaggagctcgcgcgcttcgccgtcaatgagcacaaccaaaaggccaatgctcttctggggttcgagaagcttgtgaaggccaagacacaagttgttgctggcacgatgtactatctcactattgaagtgaaggatggcgtagtcaagaagctttatgaagctaaggtctgggagaagccatgggagaacttcaagcagctgcaggaattcaagcctgt

SEQ ID NO: 82881 - DNA, 84 bp, Zea mays
tcaaaggcggctcccaaattttcaacgaaggcgggctggactaactccggaaacccaacctgattctagcccaaaacaacctcg

SEQ ID NO: 82882 - DNA, 462 bp, Zea mays
gggtcgagccccgcgtccgcccacgacgtccgcccacgcgtccgcccacgcgtccgatcgtgaacggcagcgacgccgtcatggagccggttgttgctggcagcaacacggtagtagctgttgcccaagttgagttgcaaacaatgaacgtgcagcagcccgctgatgttgccggacccagcgagggggtggcggcgatctccaaaggggggaaggtagggccgaaccggtgcagcgcctgcaggaagagggttggacttacgggattcaactgccggtgtgggaacttgtactgcgcactccaccgctactccgacaagcacgactgcaagttcgactaccggactggcggcaaggaaccccattgccaggctaatccggtggtgaaggcagacaagctcgacaagatctaaggggggttccctacggttgggtatcaggaagattgtaaaccgcggtaac

SEQ ID NO: 82883 - DNA, 442 bp, Zea mays
agggttggcttctcctccccctccggttcgggttcgggttcgtgaggttctccggggttcggtttcgtgggtgagcggatcgagatggcggcgtcggatgttgagtaccgctgcttcgtcggcggcctcgcctgggccacggacgaccactccctccacaacgccttcagcacctacggcgaggtcctcgagtccaagatcatcctcgatcgggagacgcagaggtcccgcggcttcggcttcgtcaccttctccacggaggaggcgatgcggaacgccatcgagggcatgaacggcaaggagctggacggccgcaacatcaccgtcaacgaggcccagtcccgcggcggccgtggaggcggcggcggtgggtacggtggtggccgtggaggcggcggctacggcggtggcgggcgccgtgatggcggcggcggctacggcg

SEQ ID NO: 82884 - DNA, 136 bp, Zea mays
agcccacgcgtccgcccacgcgtccgcccacgcgtccggtttctcttgatgtcatagcaatgagaacacctgggttcagcggagcagacttggcaaaccttctgaatgaaccaccattctggtgggaaaacgggaa

SEQ ID NO: 82885 - DNA, 452 bp, Zea mays
gggtcgaggcacgcgtccgaaccgcaccaccgcaccgcggccaaggccaatagcctcgcctagcgctcactcgctcgccccactaccaccgcaccacgcgctcccgtttccgccgatccgagcggcgcagatcgcggaagcccagcggctcagagtccagggggagggagctcccggcggctgaggaaggcgttcaccagcgtcgcggattttattgaggaagagatggggctctcctttgggaagctgttcagccgtctcttcgccaagaaggagatgaggattctcatggtcgggctcgatgccgccggtaagaccaccatcctctacaagctcaagctcggcgagatcgtcaccaccatccccaccattggattcaatgttgaaactgttgagtacaagaacattagccttcacgtttgggatgtgggtggcaggacaagggaactatt

SEQ ID NO: 82886 - DNA, 439 bp, Zea mays
  unsure (1)..(439): unsure at all n locations
accttcaacaagagttgctcttcggaatgacagttatatgctccatctgatcctaccaagcaaagttgatccattggtcaatctcatgaaagttgagaaggttccggattctacctatgatatgattggaggccttgaccagcaaattaaagagatcaaagaggtcattgagcttccaatcaaacatccggaactgtttgagagccttggaattgcacaaccaaagggtgtccttctttatggacctccgggcacaggaaagacattgttggcacgtgcggttgctcatcacactgactgcaccttcatcagggtgtctggttctgagttggttcagaagtatattggtgagggctcccggatggttagggaactctttgttatggccanggaacatgcaccatccattatatttatggatgaaattgactctatcgga

SEQ ID NO: 82887 - DNA, 439 bp, Zea mays
  unsure (1)..(439): unsure at all n locations
cggacacgtgggcggacgcgtgggcgaggggcaccgtgcgaagaaggacccggcgaacgcgcagaggcacaagatcgaggccggcgtggcaacggcggcggcgctgggcgccggcggctacgcgtaccacgagcaccgcgagcagaaggaggcccactacgagagcaggcagcaggagcacagggtgccgcacgggcacgggcacgggcacggctactcctactactgcgactgaaacgactgatcatcccatcgatcgagatatgcatgcagaactcgatatatatacggcccctagcgccgtacacgtgcgtgcgtgtaagtaaataagagcaaacgtcgtcacgtgtgtgttgctcgatcactactccatcgatctacttantatcgtctgcaaataacgactaagcgcatgcttctgcagccgtgtacgaatcag

SEQ ID NO: 82888 - DNA, 390 bp, Zea mays
cccacgcgtccggtagaagaggagtggcagagcagggtgtggaaggtgtgcgtgtacgtcatcaccctgggcatgctggtggcgctgctgctgggcctcaacatgtcgtggagcgccatcaccgccgccctggcgctcatcgtgctggacttcaaggacgcccgcccctgcctggagaaggtgtcgtacccgctgctgctcttcttctgcggcatgttcatcaccgtggacggcttcaacaagacgggcatccccagcgcgttctgggacttcatggagccgtactcgcggatcgacacgcccacggggactgccgtgctcgcgctcgtcatcctcctgctctccaacgtcgcgtccaacgtgccgacggtcctgctgctgggcgcgcgc

SEQ ID NO: 82889 - DNA, 361 bp, Zea mays
agccaacgcgttcgaccagacgcagatggacaagctgacgctcatgctcgacccccaggacgagttcgcctggaccgacgaggcctgccagatggtcttcaacgagttccaggacctcgtcgatcactacgagggggctgagctgtcggagtacacacttcggttgatcgggtcagaccttgagcactacatccgcaaactgctgtacgacggggtgatcaagtacaacatgaggtccagagtcctcaatttcagcatgggcaagcctcgcatcaagttcaacagcaaccagataccagaaaagatatagaatgtacttatccaacgcccttaaaagaatggtttctctccattcgattaa

SEQ ID NO: 82890 - DNA, 390 bp, Zea mays
agcggacgcgtgggcggacgcgtggggggaagaagacaaacgccggcacgcgcacgcagacacgatggcgatctgcagcgcgcacactaccacctccctgcgctccccatgcacgaccgtctcgaacgcaggtctgaggcagaagcaagtcatcttcgtcaccagcaacaggaggagcggcggcggcaggaggcacggaggggcaaggagcttccaggtctcgtgctccgtcgacaagccggtggtgattggcctggcggcagactcagggtgcggcaagagcaccttcatgcgccggctcaccagcgtcttcggtggcgccgcggagccgcccaagggcgggaacccggactccaacacgctcatcagtgacaccacgacagtgatatg

SEQ ID NO: 82891 - DNA, 260 bp, Zea mays
cccacgcgtccggtacgacccttcgacagtgatgttcttcttccggaacaagcacatcatgattgatctcgggactggaaacaacaacaagatcaactgggccctgaaggacaagcaagagttcatcgacattgtggagaccgtaaacaggggcccccgaaaaggccttgtccggttaatgccccaaaagaataatccaacaagttccgttaccaagaaagcaagcaatccccctaagcaatccaatggggaagtttaaa

SEQ ID NO: 82892 - DNA, 375 bp, Zea mays
cacgcgtcagcccacgcgtccgcggacgcgtgggtgaattcacccctatgttgtacccactcctcattagctctgtgggtatcatagcttgcttgataaccactctttttgcaactgatttctttgagatcaaggctgtagatgaaattgagccggctctcaagaagcagcttataatttccactgctgtgatgactgttggcattgcacttgtcagttggttagggcttccatatacattcacaatcttcaactttggtgtgcagaagacggtgtataactggcaattattcctatgcgtggcagttggtctgtgggcaggactagttattggatttgttacggagtattacacaagcaatgcatacagtcctg

SEQ ID NO: 82893 - DNA, 337 bp, Zea mays
cacgcgtcagaacaaatggaggcaattatggagctggcaactcaggggaaggaaaaggaagggatcaagaagaagggcagcaaggtgacacctctcaaggctcctatcattgaggctgctgagatgctctgagttctattatgagatgtgtgggtagttctagtgcatcatgttatgtcgccggtgtacttgcctatgagtcgcccaggatcttttgttggctgctttgtgtagcatgttgttgtccgggcagtggtgtttgtttctttggctggcaatgtctgtgtttcggtctatctcaatctcggttgtaagttgtttgttggtccccttctgg

SEQ ID NO: 82894 - DNA, 333 bp, Zea mays
gaccacgcgtcaggcagcctccagctcccggcggtcggcggcagcggccatgtcgtcacgcgcatgcgcgggttcgacgggccacttccgttctacctcgaaaccgggtacgtggaggtggacgagcagcaaggtgtgcagctcttctactacgtcgtgcgctcggagcgcgacccctacgaggacccgctgctgctgtggctgtccggcggcccaggctgctccggcatctccggccttgcctacgagataggacccttaaaatttgatgcccgagggcaaggtgaatttcccattcttctctaccgaccggagacatggaccaaggtgagc

SEQ ID NO: 82895 - DNA, 359 bp, Zea mays
ggcaccgacgatgtctacaggaccgcggaggcggcgaagctgtccggaggccaggtggtgcgggagccggggcccttgccagggatcaacaccaacatcacagccatcctggaccctgatggctggaaattggtcttcttcgacaacatggacttcgccaaggaactggagtacccacgccaacgacctcggacgccctgcaacatgattaactcgcactgctgttggtccgtaattaagatgaaagctatcctagtgaaatcccaaattttcatcatgcatagaacacaggaccaccattatatttgcgacagaccctgaatcaacgatcccaatcgaataacaccagggcggccgct

SEQ ID NO: 82896 - DNA, 407 bp, Zea mays
cccacgcgtccgatttctggtgaggaacctgatgcggaagttgtggagaacctgctccaaagcattgagaagcacacgctcgccagccatctagtatggggcctctggggaataatttcggaccatgttaacgacattgacttcgactacaaggagtatgcgaggcagagattcgagcagtactggcacaagtctgcgatcttaacatcttgaacatgtgtataaacacccgtacgtggtctcaggaactccctgagggcctgtggctgcacacacgaaattgtgcagtgccactgacacatagataagctgtgaaagaagaaatactgacgacgacgacgaataatcccgttttgggctcgggaggttatttctccgcaactcgatgagcttcaggcttcagcttc

SEQ ID NO: 82897 - DNA, 424 bp, Zea mays
cccacgcgtccgcggacgcgtgggcagcccaatgctaatgaccaatacttgcccccatttgtgatagttgatgacagcggcaaagctgttgggcctgtattagatggtgatgcagttgtcactatcaacttccgggctgatcgcatggttatgcttgctaaagcactagagtatgcagattttaacaattttgaccgtgtacgtgtccccaaaattcgatatgctgggatgcttcagtatgatggtgagttgaagcttccaagtcgctaccttgtttccccaccagagatagatagaacatctggggagtacttggtgaagaatggcatccgcacctttgcttgcagtgagacagtgaaatttggccatgtcacatttttctggaatggtaaccgctcgggatactttgatgaaactaaggaag

SEQ ID NO: 82898 - DNA, 424 bp, Zea mays
acgcaagaatccttgagcttgctgaagagctgtctatgccacttgctgctgtgaagtactcccgtgggacgttcatctttcctggcgcacagccagccccccacaggagcttctctgaggaagttgctgcacttaaccgctactttggcggcctgaaatctggtggtaatgcttatgtgattggagatccagcaagacctggacagaagtggcacgtcttctacgccactgagtacccagagcaaccaatggttaaccttgaaatgtgcatgactggtctggacaagaagaaagcttccgtccttttcaagactaatgctgatgggaacacaacatgtgccaaggaaatgacaaagctctctggcatctctgaaatcatccccgagatggagatctgcgattttgactttgaaccctgtggcta

SEQ ID NO: 82899 - DNA, 393 bp, Zea mays
agctaccagcgactcagcgagcgagagcagcacacactgcacgcagctagctaggagcagcagcagcggcggcgatggcggcctccatgatctcctcgtcagctctggcggtggcgcctcagggcctgccgcccctcggccgccgcgcctcctccttcgccgtcgtctgctccaagaagaagatcaagaccgacaagccctacgggattgggggtggcctgaccgtcgacgtcgacgccaacgggagaaagggcaagggcaagggcgtgtaccagttcgtcgacaagtacggcgcgaacgtcgacggatacagcccaatctacaacgaggatgactggtctcccaccggcgacgtctacgtcggtggaaccactgggcttctgatctgggccg

SEQ ID NO: 82900 - DNA, 413 bp, Zea mays
  unsure (1)..(413): unsure at all n locations
agcccacgcgtccgcggacgcgtgggatctggatacctcgtggactttatggtgatgaggatacaaacggccacgttgacaacatgtgctgcttcatcaaacccggtgtgatcctgctgtcgtggaccgacgacgagaaggaccatcagtacgaacggtcggtcgaggcactgtctgttctctcccagtccgtcgacgcgaaagggcggcagctccaagtggtgaagatccacgtccccgggcctctgtacatgacagaggaagaggcacaaggcgttgtttcatcgggacattctgtgccgaggccagcgggcacgagattggccgcctcgtacgtcaacttctacatcgccaatggcgggatcatagcgccttccttcggcgacaggtgggacgangaggcgtacgcggtt

SEQ ID NO: 82901 - DNA, 383 bp, Zea mays
cggagatcgccggtgtggtggtgacgttcgacccgaagccgatcccgggcgactggaacggcgccggcgcgcacaccaactacagcacggagtcgatgaggaaggagggcgggtacgaggtgatcaaggcggccatcgagaagctgaagctgcggcacagggagcacatcgcggcctacggcgagggcaacgagcgccggctcaccggcaggcacgagaccgccgacatcaacacgttcagctggggcgtggccaaccgcggcgcgtcggtgcgcgtgggccgggagacggagcagaacggcaagggctacttcgaggaccgccgcccggcgtccaacatggaaccctacgtggtcacctccatgatcgccgagaccaccatc

SEQ ID NO: 82902 - DNA, 369 bp, Zea mays
ccaacgcgtccgcggacgcgtgggcggacgcgtgggctagtctcctcttcgcacgagcgcaacaccatccacccaccagttcgaagcggaggcgaccggcaacctgcggcggagatgtcaggcacgggcaatggcggcaaggggctcgggaagggcggcgcgaagcgtcaccggaaggtgctgctcgacaacatccaggggatcacgaagccggcgattcggaggctggcgaggaagggtggcgtgaagcgcatctccgggctgatctacgacgagatccgcggcgtgctcaagatctttctccagaatgtcatccgcgacgctgtgacctacacggagcacgcccgtcgcataaccctcaccgcctat

SEQ ID NO: 82903 - DNA, 394 bp, Zea mays
agtccaacatgaccccttcgaggtcctggaccagaggggagtgggcgagctggtgaagtttgctacagagaggggccgcaaagctaggcctaacttgaaggtgggcatttgtggagaacacggtggagagccttcgtctgtggccttcttcgcgaaggctgggctggattacgtttcttgctcccctttcagggttccgattgctaggctagctgcagctcaggtgcttgtctgaggctgcctcctcgttggcaaccggattgcctgctgctggtggatgtggtgatcaacagtattattacagagccatgctatgtgaacattactagtagcagtgcccataaaagctacaatcccatctcccttttttttcagtcatgtaaaacttccaaac

SEQ ID NO: 82904 - DNA, 351 bp, Zea mays
agaagaagacgagtgtcaagtgaacctgaaacttgcggtgtcactggctggtatagcctgagtgtgagtgagtgatcgagctagctgagctccgatcctcgctagctagctaggataccgccataccacaagtcttcttcacaagtttaggagtgacagcaacaagagatctcgatggcctctgccaccgtgctcaagtcctccttccttcccaagaagtccgaatggggcgccaccaggcaggccgccgcgcccaggccgcccaccgtctccatggtcgtccgcgcctcggcctacgccgatgagctcgtgaagaccgcgaaaacgatcgcgtcgccggggcggggcatc

SEQ ID NO: 82905 - DNA, 398 bp, Zea mays
aggaacgaacgacctgacgcagatgacctttgggtacagcagggatgatgtgggaaagttcattcccgtctatcttgctcagggcatcctccaacatgaccccttcgaggtcctggaccagaggggagtgggcgagctggtgaagtttgctacagagaggggccgcaaagctaggcctaacttgaaggtgggcatttgtggagaacacggtggagagccttcgtctgtggccttcttcgcgaaggctgggctggattacgtttcttgctcccctttcagggttccgattgctaggctagctgcagctcaggtgcttgtctgaggctgcctcctcgttggcaaccggattgcctgctgctggtggatgtggtgatcaacagtattattacagagccatg

SEQ ID NO: 82906 - DNA, 329 bp, Zea mays
gccatttgaaccccccacgtctcctcgcctcgttccccatttgctgcgtctccttgcccgcgccgccgctcgccgtttgcccctcgtctccgcaccgcgcgctgttgtccatccttgtgcagcaaaaatgacggctggctacattgttggctcactggtcggatcctttgccattgcatacctgtgtgacacatttatctctgacaagaaggcatttggaggtagcacccccaagactgtttctgagaaggagtggtggcaagccacagacaccaagttccaggcctggcctcgcactggtgggccaccggttgtcatgaaccccatca

SEQ ID NO: 82907 - DNA, 417 bp, Zea mays
  unsure (1)..(417): unsure at all n locations
agcgcctgggcaggtgcagccagcgacgtcgccgaaggcgctgttggaggttgccgtagaggtgcccgatctggagttgaagagatcttctaatgctgggagtagtgtatctgcagaacaactgcagtttgtccctatcattcgatctggtagctttgctgatattggacctaggcggttcatggaagatgagcatattagaattgatgatctttctggtcatcttggctcactgttgatggtctctgcgcctagcgcgttctacggggtgtttgacggtcatgggggttcagatgcagcagcctacatgaaaacacatgcaatgaggttgttctttgaagatgctgacttccctcaagcatcacaagaggataaaatatttgctgaatctgttgaggattcggtccgcanagcttt

SEQ ID NO: 82908 - DNA, 356 bp, Zea mays
cggacgcgtgggcgaggtgaaggcccggctccccgccgtggagtacggccagctcctggccgagcacgacgagcagcagcagtccggcgaccacgactgcgacggggacgccgcgtcgtcggattgcatcgtgtgcctcgagacgctggaggcggcggacgaggtgcggcggctgggcaactgcgcgcacgccttccaccgcgcctgcatcgaccgctggatcgacctcggccgcgcgacctgcccgctctgccgctccgacctcctgccgcgcgcgccgggctgggccagccggctcggcctgggccggctcacgcgcgttcggtgaggaggaccgtcttccagggcagttttgt

SEQ ID NO: 82909 - DNA, 332 bp, Zea mays
acggttgctgggagggttatcatgggtgttactgatgaagagctccagcttcttgacgcgtttgaagacgtggagtacacgaggacaagagttgagatatcattggctgactcttccgagaacatgctggctgacacttacgtgtggagtgatgcagaggatctcaatctttatggagaatgggactttgaggagtggaagaaactgcacatgaaggatttccttgcgatgacgaacggtttcatgcacgagctcgagcagcctgaatcgaagacccgggtggagacctaccaggaattcatgcaacaacaggaacagcctgcgccggggac

SEQ ID NO: 82910 - DNA, 337 bp, Zea mays
aagggtccgggcctgtcggttgtcgaggccaccagcttcgtctccccaaagtgggtgccgcagctagccgacgcagaggaggtgctgaagggtataaagcaggagccaggcgtgcggtacccggtgctaacacctaacctcagagggttcgaggctgccatcgcagccggcgcgaaggaaatcgcggtcttcgcgtccgcgtctgaatccttctccaggtccaacatcaactgcaccatcgaggagagccttgctcggtaccgcggcgtcacagcggctgccaagaaacacgggctaagcatccgggggtacgtgtcatgtgtgattgcttgccccg

SEQ ID NO: 82911 - DNA, 431 bp, Zea mays
aggacgcgtggggttcgatctatccatcgatcgctagctagctgacgaccatggcgtccctctcctctgccgccatcaccgccccttccttcacggccgcgcccgctcgcgcagtggtcagcaggaggtccttcaccgtgcgtgcctctctccgcaaggccactgccaccgccgccgtggccgttgccgccagcgtcctgcttgccggcggcggcgccatggcccaggaggtgctgctgggcgcaggcgacggcgggctcgtcttcgagcccagccagttcaccgtcaaggccggcgacaccatcaccttcaagaacaacgccggcttcccgcacaacgtcgtgttcgacgaagacgaggtgccgagcggcgtcgacgcctccaacatttcgcaggaggagtaactcaacgcgccaggcgagacctactcc

SEQ ID NO: 82912 - DNA, 351 bp, Zea mays
  unsure (1)..(351): unsure at all n locations
aatcctcacctgctgcagccatggcgacctccgcggcgctctctaccgccgccaatcccacccagctctgccggtcccgcgcttcgctgggcaagccggtgaaggggcttggcctgagcatgggccgcgagcgcgcccagcggagcattgtgtgccaggcggcgagcagcatctccgccgaccgcgtccccgacatggagaagcggaagctgatgaacctcctcctcctcggcgccatctcgttgcccaccgtcggcatggtcgtcccctacggcgccttcttcgtcnctgccggctccgggaacgccggcggcgggacctacgcgaaggacaagctgggcaacgacatca

SEQ ID NO: 82913 - DNA, 441 bp, Zea mays
atggcacacagcttgcagaatacacacagccttatattgagtcagggcttgtgatagtagcgccggtgaaacatgtaacttcaagtgcatgggctttccttgaacctttcacattggagatgtggtgtgtcacagttgctctttttattttggtgggcatagtagtgtggcttcttgaacatcgtactaatgaggaatttcgagggtctccaaggcgacaagtcataacaatgttatggtttagcttctcaacaatgttcttttcacacagagagaacactgtaagcacacttgggcggttcgtgctgataatatggttgttcgttgtgctgatcatcacttcaagttacacagctagcttgacgtcaatcctcacagtccaacagctctcaactggaattacagggattgatagtttggtttcaagttctttacctattg

SEQ ID NO: 82914 - DNA, 344 bp, Zea mays
aatggcacacagcttgcagaatacacacagccttatattgagtcagggcttgtgatagtagcgccggtgaaacatgtaacttcaagtgcatgggctttccttgaacctttcagattggagatgtggtgtgtcacagttgctctttttattttggtgggcatagtagtgtggcttcttgaacatcgtactaatgaggaatttcgagggtctccaaggcgacaagtcataacaatgttatggtttagcttctcagcaatgttcttttcacacagagagaacactgtaagcacacttgggcggttcgtgctgaaaatatggttgttcgttgtgctgattatcacttc

SEQ ID NO: 82915 - DNA, 403 bp, Zea mays
cacacgcgtccgacatgttgtgctccaatacaactgtaccaatacaattcctgaacaattgcttgaacaggttattgtttttgttgatgcttctgaggctgatgaatttttagaagttgcttcgaagcctttagaatcattaccatatgattctcctgggcagacctttgtcgcttttgagaagccagaaggtgtcattgctactggcaagttctcaaatatcctgaaattcattgttaaggaggttgatccatccacgggtgaaactgaagatgatggtgttgaggatgagtaccagcttgaagatcttgaaatagtttctgctgattatatgttgaaggtgggagtatctaacttccgaaatgcctgggaaaacatggattcagagactgagcgagttgat

SEQ ID NO: 82916 - DNA, 442 bp, Zea mays
aagaggaatccttggacaaccttaatctcttctctatcattacagtgatgtcatttttccttttggcccctgttaccttctttacagaaggtgtcaaaattactcctacatttttgcaatctgctggtctgaatgtaaaccaagtccttacaaggtgtcttttcgctggactgtgtttccatgcataccaacaggtgtcttacatgattttggcgatggtgtctcctgtcactcattctgtgggcaactgtgttaaacgtgttgtggtcattgtaacatcagtgctgttcttcaggacacctgtttctcctatcaactctctcggtactgcgattgcacttgccggagttttcctgtactcacagctcaagcgacttaagcccaagccgaagacggcttaaatagggattgtattttccatctctttgtgttaatggagtta

SEQ ID NO: 82917 - DNA, 363 bp, Zea mays
  unsure (1)..(363): unsure at all n locations
acggacagccactgccagtcaccaaacactgcacatcagggttcaccaagctgcggcggtagcagcagcagcagcagcacggggtctctagtcacggtggcattccagatcctggtgaacaacctgcccaccgcgaagctcaccgtggagtcggtggagaccgtcagcaacctgctctcctgcaccatccagaagatcaagtctgcgctccaggccagcatcgtcacgccctagctattagcgggcatttgacatggattccggccgccggttctcagaaaaaaggacggagtantcggatgccatgtcaaatgcttagctagaggacgacatgctgtgacggcgcagatgctaaacaagggt

SEQ ID NO: 82918 - DNA, 437 bp, Zea mays
accacgcagtccgagcatacatcaatgagccgatcactccaaggtttgtctatctgctagttttcaggttcgttcatgtgagttctgcgggagttacaagacctgaaagaccggggttagatttaagcaagcagccacctgctgttcgattgaacaaagagcttggctccattttaacttttaagttgaagggagaggatttaattcgggaaagcggtattccgtacactattgtaaggccatgtgcattaactgaggaaccagctggagccgatctcatgtttgaccagggggacaacatcacaggaaagatatcaagggaagaagttgcccgtatttgtgtagcagctctggcaagcccagatgctgtgggcaaaactttcgaagtcaagagcactgttccattcagcgaaccgtatgtgattgaccctgcaaat

SEQ ID NO: 82919 - DNA, 285 bp, Zea mays
aattggagaatgtacttatttgcaaagacgccaatgctaagtttaattttggagataaaggttatttggcatttgaacatataacatgggctccataccagaccaagctgatagacaccgagcttctgacccctgttgagatcgactgggtgaacacgtaccactcagactgccggaagatcttggagcctcatctgaacgagcaggagaagcaatggctgatgaaagctactgagcccgtagctgcaagaggctgagccttttcgtcaacgttgcaatgcaccg

SEQ ID NO: 82920 - DNA, 340 bp, Zea mays
aaatcagcaaagcggcagtgcgtagagaggatcgtcgaacagaacagcatgaagatggtcatcgttctcgtcgtgtgcctggctctgtcagctgccagcgcctctgcaatgcagatgccctgcccctgcgcggggctgcagggcttgtacggcgctggcgccggcctgacgacgatgatgggcgccggcgggctgtacccctacgcggagtacctgaggcagccgcagtgcagcccgctggcggcggcgccctactacgccgggtgtgggcagacgagcgccatgtaccagccgctccggcaacagtgcctgcagcagcagatgaggatgatggacgtgc

SEQ ID NO: 82921 - DNA, 340 bp, Zea mays
caaacgcgtccgcccacgcgtccggaaagtacaagaaaggatactaaatctcgtcgttaattgaattcagaatagaaagattcagaataaacaaaatttataggattcaaataatcaaataaagtaaaggtaggcgggtaataaccttatttatgacaagtttcaaattggtaaagtatacccctaggataaagaagaagaaggggctgagaaaactcgcaagaaaagttccaaccgatcgtctacttaaattcgaacgggttttcaaagcacaaaaacgcatacatatgtctgttttcaaagcacaaagagttctagatgagattcgctggcgttacta

SEQ ID NO: 82922 - DNA, 396 bp, Zea mays
  unsure (1)..(396): unsure at all n locations
acgggcacaagccatggcgtccatgaccggcctctcgcagggcgttctgcccagcaggcgcgccgccaacagggccaggacggccgccgtcgtcagggcgtccgccgaggcgcaggcgcaggcgcaggcgggccgccgcgccgtgctcgggctggtggccactggcatcgtcggcggcgccttgtcgcaggcggtgcacgccgagaccgtcaagaccatcaagatcggagccccgccgccgccctccggtggactccccgggactctgaactctgaccaggcgagggacttcgacctccccttgaaagagcggttctacctgcagccgctgccgccggcggaagcggtgtcganggtgaagacgtcggcgcatgacatcatcaacctcaagccact

SEQ ID NO: 82923 - DNA, 406 bp, Zea mays
accacgcatccgcggacgcgtggggccccctgtaccacaccactccgcgctagctgaggacggtacagcggcacagaggtgcgacgtacgacgacgacgacgcaggcgccacacatggcatcccagctctccgccgccgtgccccggttccacggcctccggggctacgccgcgcccaggtccgcggtggcagcgctgccgtccgtgagggtgggcaagaagaggtcgtcgtcgcagggcatccgctgcgactacatcggctccgccaccaacctgatcatggtgacgacgacgacgctgatgctgttcgcggggcggttcgggctggcgccgtccgcgaaccgcaaggcgacggcggggctgaagctggaggcgcgcgactccggcctgcaaacgggtgaccccg

SEQ ID NO: 82924 - DNA, 380 bp, Zea mays
  unsure (1)..(380): unsure at all n locations
aaataatcgccaccgctctccgcaccgaatcgaagaaagcggcgatggcggcggagaagccggctccggtgcgcgtgctgtactgcggcgtctgcggcctcccggccgagtactgcgagttcggccccgacttccagcgctgcaagccctggctgcgggcgcacgcgcccggcgtctacnccgacgacctcgtcgccggtccctcctcgtcgggcggtgcgggtggcacaaggaacttgacagggtcgggaacccctccaaggcctccggaatcccgaacggtccagcagccccccaggggaagcttccgcctccaagcccgaagaggtcaaacgcctgcctggtggtaagctcaagaaaaaggaaaagcaagaggttgt

SEQ ID NO: 82925 - DNA, 316 bp, Zea mays
aagacgcgtgggtatctctgcagaatgaacaggagtgggcaatatgtatgggaagatcaccgaccgcgatctggtgtctggaaaggcactagtggtggggaagctatttcctttaatggttgtgatgatgatcagacctctgcagatacctctgctttatcaaagatcacttcgactggtgcaatgacattctgcttcatccaagctattgaacgtggacagggcaccacctacggtagtatcctgaactctatgcgttccacaatacgcaacacaggtgactcagcgggtgtatgtggccgtgctgttacatcac

SEQ ID NO: 82926 - DNA, 428 bp, Zea mays
cagacgcgtgggccgcgatcgaagctcctcacaaaccgttatcgtcgccatggcagccgccgcgcctgcaagctccgtgaaggaagtgctgccatctcccctgacctccgcctccgagccccctcccctcttcgatggcaccaccaggctgtacgttgcctatcattgcccgtacgcgcagcgcgcttggattgccaggaactacaagggtttgcaggacaagattaagatagtcgccatcgatcttgctgacaggccaacatggtacaaggagaaggtttatccagaaaacaaggtgccttctctggagcacaacaaccaggtgaaaggtgagagtttggatctggtcaagtacattgacagcaactttgaaggcccatcgttgctcccagaggatccttcaaaaaagcagttcgctgaggagctgc

SEQ ID NO: 82927 - DNA, 411 bp, Zea mays
cccacgcgtccgcacacgcgtccgcggacgcgtgggcggacgcgtgggcggacgcgtgggcaaggctatggaggaagctgatgtgaagactaagtgggagaacagctcatggggcaagaagctgattgtccagaagaggagggctgcactcagtgactttgacaggttcaaggtcatgctggcaaggatcaagatgggtggtgctatcaggcacgagctctccaagctgaacaaggcgtccactgcttaagtcccttttggtggatgacatgttagtttttggtttcatgttggatcagcaatttgttttgagtgttgtcaaagccagaattagtaatatgtttcctgtgtaccagtttcaaactgtcatcaaaatgggtgtgctctggatattttgtccggaatgatatg

SEQ ID NO: 82928 - DNA, 347 bp, Zea mays
atggctactccgccccctcttaccaagtcctcctcgggttagggttccttacggttttgtggaggggcgatggcggcggctgatgtggagtaccgttgcttcgtcggcgggcttgcctgcgccaccagcaacgagtcgctggagaatgccttcgcctcctacggcgagatcctcgactccaaggtcatcaccgaccgggagactgggaggtcacgcggcttcggcttcgttaccttctcctccgagaactccatgctcgacgctatcgagaacatgaacggcaaggagctcgacggccgtaacatcaccgtttaccaggcccagtcccgtggcggtggcggtggcgg

SEQ ID NO: 82929 - DNA, 292 bp, Zea mays
attgcgattcgctcgctcgatcctagcttctcttccaagaagcgcagcgcccatggccatggccacgcaagcctccgccgccacgcgccacctgctggccgccgcctgggcgccggcggcgaagccgcggcagctgagctcgcagctcgcgctgccgtcgtcgtcctcccgcgggccggccccgctccgcgcgtcaaccgaggaggcggtggaggcgcctaaggggttcgtggccccgcagctggaccccagcacgccgtccccgatcttcggcggcagcacgggcgggctg

SEQ ID NO: 82930 - DNA, 298 bp, Zea mays
aggacgcgtgggcggacgcgtgggcaagctcgtaacgaagggcgcgatcttgctcgtgaaggtaatgaaattatcaaagcagcttgcaaatggagtgctgaactagccgcagcttgtgaaatatggaaggagatcaaatttgatggtttcaaagcgatggataccatataaaaaaaaaaaaccaaaaaaaaaaaaacaaaaaacaaaaacaacccacaaaaacaacacaaacacaagaaaaagaaaaccaaaacaaaaaaaaaaaagggggggccccccaaagggttcaaacctaagt

SEQ ID NO: 82931 - DNA, 443 bp, Zea mays
accacgcgtccggtctgctagtgttggagagaagagaatacactacactacgcatggcgaagcagcagcagggccagggcatggcggcagtggcgctggtgctgctggtgctggcggcggcggcggccgagacggcgtcggcggcttcgtgcaacgccgggcagctggcggcgtgcgcgccggcgatcactgccggcgcgacgccctccgcgtcgtgctgctccaacctcaaggcgcagcaggggtgcttctgccagttcgtgaagaaccccacctacgggcgctacatcaacagccccaacgcgcgcaaggtcgtcgcctcctgcggcgtctccgtgccgcgctgctagtactagtacgtgtgctgtgcatgcatgcatgtacgtgcgcacgtgggctgatcttcctgcttgtttcgtgtcttgccgcgcgccatcaggtgt

SEQ ID NO: 82932 - DNA, 362 bp, Zea mays
accacgcgtccgctctcctcttgcgattcgctcgctcgatcctaacttcccttccaagaagcgcagcgcccatggccatggccacgcaagcctccgccgccacgcgccatctgctggccgccgcctgtgcgccggcggcgaagccgccgcagctgacctcgcagctcgcgctgccgtcgtcgtcctcccgcgggccggccccgctccgcgcgtccaccgaggaggcggtggacgcgcccaaggggttcgtggccccgcagctggaccccagcacgccgtccccgatcttctgcggcagcacgggtgggctgctccgcaaggcgcacgtggacgagttctacgtcatcacgtggacgtccccc

SEQ ID NO: 82933 - DNA, 375 bp, Zea mays
cacacgcgtccgcccacgcgtccggatcgtgcccatcttttgtttgatcttcatcaagttgttgatggtcttagggaggcagagcttgggaattcctttataggaacaacaaagagaggaattggaccatgctattcgaacaaggttacaaggaatggacttagagttggtgacctgcgacatatggatatctttggtgcaaaactcaacaccctattaagagatgcagctctacgcttcaaagattttgaatatgataacaagattctgaaagaggaagttgagaagtataaaaagtttgctgaacgattggaacctttcatcaccgataccgtgcatttcgtgaatcagtcgattttgcagaagaagaaaata

SEQ ID NO: 82934 - DNA, 427 bp, Zea mays
ctccgcggggcggcgaactgctactcatcgccaaaaccctagccccgatccggtcgaggagcactacttcttggcatggcgggcacccctagccaggcaagcctcctgctccagaagcagctcaaggatcttgcgaagaaccccgtggatgggttctccgcagggcttgtagacgatagcaacgtcttcgagtggcaggtcaccatcatcggcccgcccgacaccctatatgatggaggctacttcaatgcaataatgacctttccccagaactatcccaacagcccgccatcagtaagatttacttctgggatgtggcatccgaatgtttatccggatgggcgtgtttgcatttctattcttcatccacctggtgaagattccagtggttatgagcttgcaagcgaacggtggacaccagtgcaca

SEQ ID NO: 82935 - DNA, 423 bp, Zea mays
caccattcgaagcactgtatggacggaaatgccagacccctctcatgtggtccaacgtgggcgaaaaagcactagaaggacctgcctttgtcaaagaggcggaagagaaggttgcactgatccgcagaaggttactcgaagctcagagtcggcagaagagttatgcaggcaacaggcggagggaactccgatttgaggaaggagacttcgtctacctcaaggtttctccaatgcttggtgtcaggaggttccaggtaaaagggaagctagccccgcgtttcgtagattcctatcccatcattggcagggtaggacccgcagcataccgtctggaattaccggaatccatgtccgacatccacaatgtgtttcacgtatcccagctccgcaaatgcctgcaagcaccagaaagtcacatcgaag

SEQ ID NO: 82936 - DNA, 361 bp, Zea mays
ggtccacgacgcgtccgaccacgagtccgcccacgcgtccgaatcgtctctctcccgtcctcccctccaccgccgcagccgccgccgtacctcctcctcccgcgcagcagccaccgccaccgccggaaatgaagaccatcctggccacggagacgatggacatccccgagggagtcacggtcacggtggcggccaagctggtgacggtggaggggccgcccggtaagctcacccgcaacttcaagcacctcaacctcgacttccagctgcaggacgggggtcccaagcccaaggtcaacccctggtttggaacccgccgaaccatggccgcaatccgaacggccattccccagttcaaaaa

SEQ ID NO: 82937 - DNA, 363 bp, Zea mays
aaaagggtgaaagaaactgtgaaggaggttggtgctgggctagagtgtggtattggggtagatgacttcgatgaatgggaggaaggtgacatcatagaggcattcaataccgtgaataaggcaagaaccctcgaggaggcctctgctaccgtgactgccgcactcaaggatgcaggggtccagctgtagaattggcaacacgctgatactcttttttattaatggtatgaaatgttaatttatatatactttgaagctgaatggtgagctgaagctattgtgctgaagctgttgtgagctggaccggtggaccgtttccctgattccttcggtggtggctgaagctgaatggtgagctgctgg

SEQ ID NO: 82938 - DNA, 404 bp, Zea mays
aggacgcagtggggcgcccagcaggccattcttctcgccttactccctcacagaacccagtaaaatattgctagtcccgccgtcgagatggccccacgccgcctgctcgtcctcgccgtcgtcgccctcgcggccaccgccgccgcggccaactccggcttcgcggactccaaccccgatccgccccgtcacggaacgccccggcttcggccctccagtccaagggcctccccgcgctcgggcggaaccgcgaagcgctccgcttcgcaagccttgctgttaggttcgggaagagctacgaaagcgcggcggaggtccacaagcggtttaggatcttccccgagagtctccagctcgtccgctccaccaatcggaaaggcctctcctaccgcctcggcatcaac

SEQ ID NO: 82939 - DNA, 232 bp, Zea mays
cgcgtccgaccacgcatccgcccacgcgtccgcccacgcgtccggactagttctagatggcggtggcgctttctccggcaaggacccaaccaaggttgaccgcagcggagcctatgtcgcgaggcaggctgccaagagcatcgtcgccagcggccttgctcgccgcgccatcgtccaggtgtcctacgccatcggcgtgcccgagcctctctcggtgtttgtcgacacgtac

SEQ ID NO: 82940 - DNA, 383 bp, Zea mays
  unsure (1)..(383): unsure at all n locations
aatccttcacaacctctgccgagcgagaaattgtgagggacatcaaggagaagcttgcatatatagctcttgactatgagcaagagttggagactgccaagaacagctcctcagttgaaaagagctatgagctgcctgatggccaagtaatcaccatcggcgcagagagattcaggtgccccgaggtcctcttccagccatccatgattggtatggaggctgctggaatccatgagacaacatacaattcantcatgaagtgtgatgtggatatcaggaaggacctctacggcaacattgtgctcagtggaggttcgactatgttcccggtatcgctgatcggatgagcaaggagatcacttcccttgcaccaagcaacatga

SEQ ID NO: 82941 - DNA, 426 bp, Zea mays
cccacgcgtccggatcgttgctgttcgagcggggtaagcttagccagcctctagcaagagcaagagcaagggcaaagggcatggcggcggctgtctccttctcccgggtgcgagctctcccgacgtggtccagctcggtttccggcgacgaccaccacgcctactccgtgttggcgacgtcgtcggtgtcagccagacctcggtctggcgcgcgaccgctgcggtcgccggcgcagatgatgggcaacgtgaacgatggcaaggggctgttcgcaccgctcgtcgtggtggcgcgcaacatcattggccgcaaacgcttcaaccagctgagggggaacgcaatcgcgctgcactcccaggtcatcaacgagttctgcaagaccatcggcgcccactctaatcagcggcagggcctcatccgcctcg

SEQ ID NO: 82942 - DNA, 448 bp, Zea mays
accacgcgtccgggacaaggagggcatcccacccgaccagcagcgcctcatcttcgccggcaagcagctggaggatggccgcaccctggcggattacaacatccagaaggagagcactctccacctggtgctccgcctcaggggtggcatgcagatttttgtgaagacattgactggcaagaccatcaccttggaggtggagagctctgacaccattgacaatgtgaaggccaagatccaggacaaggagggcattcccccagaccagcagcgtctgatctttgcgggcaagcagctggaggatggccgcactctcgcggactacaacatccagaaggagagcacccttcaccttgttctccgcctcagaggtggtatgcagattcttgtaaagaccctgactggaaaaaccataaccctggaggtttagagctcgggacacatcgac

SEQ ID NO: 82943 - DNA, 362 bp, Zea mays
gggtccgaggacgcgtccgaccacgagtccgggtgctcaggatgcacccgccgggcccgctgctgtcgtgggcgcgcctggccacgtcagacgtgcacgtcgacgggcacctcatccccgccgggaccaccgcgatggtgaacatgtgggccattacgcacgacccagacgtgtgggccgagccgacggagttccagccggagaggttcatggggtccaccgagttcccgatcatgggggtcggcctcaaggcccccccgttccgggccggccggcccaactggcccgggaaaaacctccccatgggcaccgtggccttctgggtcgcgaccctgctgcacgaattccagctgctcccctcg

SEQ ID NO: 82944 - DNA, 451 bp, Zea mays
accacgcgtccgcccacgcgtccgggcgacccagtgaccgagatgctgttcatcatccgcggcaagctggaaagctccacgacagacggtggccggacgggtttctttaactcgatcaccctgaagcccggcgacttctgtggcgaggagctcctcggatgggcgctcgtccccaagcccaccgtcaacctgccactgtccacccggacggtgaaggcggttctcgaggtcgaggcgttcgctctccaggccgacgacctgaggttcgtcgccagccagttcaggcgcctccacagtaggaagctgcagcacacgttccggtactactcccaccactggaggacctgggccgcgtgcttcatccagcacgcctggcgccgcctgaggaggaggaagatggccaaggacctgagtctgagggagtccgtctcgtccacgggaccgtacgaag

SEQ ID NO: 82945 - DNA, 426 bp, Zea mays
accgagcgagttcttggttgacctcttcctcttcggaccacctccaaggctcttggtgtagcttgccactctcaccaatcaagttttcatgtctgatctcgacattcagatcccaactgccttcgatcccttcgctgaggccaatgctggggactctggtgcggcagcagggtcaaaggactacgtacacgtgcgcatccagcagcgtaatggtcgcaagagcctgaccaccgtccagggattgaagaaggagttcagctacagcaagatcctcaaagatctcaagaaagagttctgctgcaatggtacagtggtccaggacccagaacttggacaggtcattcagctccagggtgatcagaggaagaacgtctcgaatttcctcgtccaggccggcattgtgaagaaggagcacatcaagattca

SEQ ID NO: 82946 - DNA, 425 bp, Zea mays
agctgtgctcactgcctactttttcattctaggcattgttgctctctctgcaacactgcttccttctataaaacgttttcttccaaaagagtggaatgataatctcattgtctggcgtgctccacttttccactcactctcggtggagttcacaaagtcccagattgttgcttcaatacctggatttttcttctgcttgtggtatgcgtcaaagaagcattggcttgcaaataatgttctgggattggctttctgtattcaggggattgagatgctgtcattgggatcatttaaaaccggagccattctcttgggtggactttttgtgtatgacattttctgggtgttcttcactccagttatggtcagtgtggctaaatcttttgatgctcctataaagcttctgttcctactgcggatgatgc

SEQ ID NO: 82947 - DNA, 426 bp, Zea mays
accacgagtccggttttcctggcagcaagcagctcactgaaggggcaaagtgacaaagagaagtatgagaagtccagaaaattgaagggtcatatacaaagaattcgtgagaattatacaaaagatttcaaaaacaaagatgtgacgaggaggcaaatagctgtggcaacataccttatcgataaactagcccttagggctggcaatgaaaaggacgacgatgaagctgatactgttggttgctgtacgctgaaggttgataatgttacatgtatgcctccaaatcagattcagtttgactttctgggtaaagattcaataagatactttaacaccgtagaggttgaagagcttgtgtacaacgcaattgacggtttccgtgctggaaagaagccaggacaagatcatttgacaagattgatacat

SEQ ID NO: 82948 - DNA, 333 bp, Zea mays
aacggtgacttcgccagggcctctggggactacgccattgtgatcagccacaaccctgacaacggcacatcgaggattaagctgccctctggcgccaagaagattgtccccagcagctgccgtgccatgattgggcaggttgctggtggaggcaggactgagaagccgatgctcaaggctggtaacgcgtaccacaagtaccgtgtgaagaggaacagctggcccaaggtgcgtggtttggccatgaaccctgtggagcatcccaacggaggaggtacccaccacaaaatgggtcagcctccaacggtcgcccaaaaccttcccctggccaaa

SEQ ID NO: 82949 - DNA, 342 bp, Zea mays
aggacgcgtgggcggacgcgtgggcgatggccggcacccccatcaaggtgggctccttcggcgagggccgcatcaccatgcgcaagaccgtgggcaagcccaaggtggcggcgtccggcagcccctggtacggccccgaccgcgtcaagtacctcggccccttctccggcgagcccccgagctacctcaccggcgagttccccggcgactacggctgggacaccgccgggctgtccgccgaccccgagaccttcgccaagaaccgcgagctggaggtgatccactcccgctgggccatgctcggcgcgctcggctgcgtcttccccgagctgctctcccgca

SEQ ID NO: 82950 - DNA, 429 bp, Zea mays
cggacgcgtgggcggacgcgtgggccggctcccctttcccattggcctccacgatggcgctccgcctcaacgacgtcgcgctctgcctctccccgccgctcgccgcccgccgctgccgcagccgcagccgcagcagcggcaggttcgtcgccgtcgcctccatgacgtgcgccgtctccaccaaggtcgagaataagaagccatttgctcctccaagggaggtacatgtccaggttacacattcaatgccacctcacaagattgaaattttcaagtcacttgatgattgggctagaaataatatcttgacacatctcaagccagtcgagaagtgttggcagccacaggatttcctccctgaaccagcatctgaaggatttcatgatgaagttaacgagctcagagaacgtgccaaggaaatccctgatg

SEQ ID NO: 82951 - DNA, 367 bp, Zea mays
cacacgcgtccgcccacgcgtccgcccacgcgtccggccaacaactaaaggcaggcgcggcacaccgcgacaccgtaccggcctagacacttggagaaaggagaagcagcgcagcggcatgggcaccagtcccgtcatccctgcgacgatgctcgtcgtcgctctccttgtcgctagtagtactgtctgcttcggcgccaccgccaccgacaccgacaccgacggcgccattcgtctccccagcagctctggtgctgttggtcgaccgtgggagtgctgtgactatgtcaccaaggagccgtttatcaagccgccccggtggcgctgcaacgacgtggtggacaagtgctccgccgactgccaagag

SEQ ID NO: 82952 - DNA, 292 bp, Zea mays
aagcggacgcgtgggtgcgtgcccgttttggaactcctgcctacgagctaggttgcggagtgtggtttgctcgttagagcttattttcggacatccaaaaaacatgcttcctatgtgggatgatggttatctttatatttgtatgttaattagtctctttgctgttaaatttcgtgtaagttggtcctgccgatggagaatcgagcagccccctttttttgttctatcaactatgctgtaatgctggctatgtttcggcaaaaaaaaaaaaacaaaaaaaagggggggcgct

SEQ ID NO: 82953 - DNA, 424 bp, Zea mays
  unsure (1)..(424): unsure at all n locations
agcacacgcgtccgatccgtttggatgatgcgcaacattattcacttcaacacattggcaaatcaggctgtggagcgggcagctggtactgacggccataagataacatacagtgtcataaagcatcggttgggggatctattttatcgcctagtatcccaaaagttcgaggatcctgcagaaggcgaagaagctttggtcggcaagtttaagaaactgtacgacgaccttaccactgggttccgcaacctagaagatgaggcacggtgaactgctgtagattttgtgtaagacaataatggctgccaaatggtttataaggtacggaagttgtanattgagaccatgtttgagaattttccccaacggtaatcaattccttggcaacaacaattttagccatcattgctggatgggcaccctg

SEQ ID NO: 82954 - DNA, 428 bp, Zea mays
acgcccacgcgtccgcccacgcgtccgctctgtcactgacgatggttgaacgtcggatcgtttttttgagaagaacctatttggagctggaacagagacgacctcgaccaccgtcgaatgggccatgtcgctgctgctgaacaatccagggacactcgagaaggcacgagaagagatcgacgccgccgtggggcactcccgcttgctcaacgcgggcgacctgccgcgtctcggctacctcaggtgcatcatcgccgagacgctgcgcctgtaccccgccgcgccgctgctgctcccgcacgagtcgtcggcagactgcaaggtcggcggctacgacgtccccgccggcacggcgctgctggtgaacgtgtacgcgattcacaaggaacccggctgtttggaaggagccgggcaggttcgtgccggag

SEQ ID NO: 82955 - DNA, 446 bp, Zea mays
gagtctgcgtcgtccacggagatcagggatcggcggcggggtatggcgagggagcgacgggagataaagaggatagagagcgcggcggcgcggcaggtcacgttctccaagcgccgccgcggcctcttcaagaaggctgaggagctctccgtgctgtgcgatgccgacgtcgcgctcatcgtcttctcctccacgggaaagctctcccagttcgccagctccagtatgaatgagatcattgacaagtacagcacacattctaaaaacctggggaaagcagaacagccttcacttgacttgaacttagaacatagcaaatatgcaaatttgaatgagcaacttgtggaagcaagccttcgactcaggcagatgagaggtgaagaacttgagggattgagtgttgaagaactccagcaattggggaagaatctggaatctggtctgca

SEQ ID NO: 82956 - DNA, 423 bp, Zea mays
ggggccagccacgcgtccgaaaaaacacactagtgtaccaacaatggcagccaaaatattttgcctccttatgctccttggtctttctgcaagtgctgctacggcgaccattttcccacaatgctcacaagctcctagagcttcccttcttccctcgtacctctcaccagcggtgtcttcggtatgtgaaaacccaattcttcaaccctacaggatccaacaggcaattgcagctggcatcttacctttatcacccttgttcctccaacaatcatcagccctattacagcagttacctttggtgcatttattggcacaaaacatcaggggacaacaactacaacaacttgtgccagcataccttgctggctactctcagcaacatcagtttcttccattcaaccaactagctgcagtgaactc

SEQ ID NO: 82957 - DNA, 447 bp, Zea mays
ggggccagccacgcgtccgcaaacgacgtccgcggacgcgtgggcgcaatggcactcgtgtccgcctcctcgtcctccaccaccgccgtcgcggcgctccccaggaatgggcagcagcgggcgtcgtcgtcgttgttctcctcctcctcctcttcctccttcctcgtcggcaagacgctgctgaggcaggccgaggcagcccggccgtcgttcgccgtgcgcgccgcggcggattccgacaggccgatctggttccccggcagcagccctccgccgtggctcgacggcagccttcccggcgacttcggctttgattcctggggcctcggatctgacccggagagcctgcggtggaacgtgcaggcggagctggtgcactgccggtgggcgatgctcggcgcggcgggtatcttcatcccggagttcctgaccaagatcggggtcctc

SEQ ID NO: 82958 - DNA, 331 bp, Zea mays
cccacgcgtccgggcgcgggttgccgagacgcgtacgcggcattctccttgggtgcgggggttcctctcgagtctcggcaacgacgaaaacgaaaataccgagtcgagtcagcgatgaatcccttcgccaaaaaaccaacaccgcgagaggtgatgcggagcagcaagcgggacctgacgaatgctacgcgagggatcgagagggacattgcgtcattacagcaggaggagaagaaactcgttgctgaaattaaaaggacagcaaaaactggcaatgaggcagcaacgaaaattctagcccgtcagctgatcaggttaaggcagcagattt

SEQ ID NO: 82959 - DNA, 302 bp, Zea mays
cacgcgtcagcaaacgcgtccgtaaacaaatggaaagacgtggcaaatgattcacgcaaacaattgcatgacaaagaacaggatgttctagacctgcggcaagaagttattgggttaaaacattctctaaaagaggctaacgaccagtgcatacttctgttcaatgaagttcaaaaagcctggacagtttcatcttcactccaagctgatctcaagtctgaaaatttaatgcttgcccagaagcacaatactgagaaagagcagaatagacagctaagggatcagatttctcatcttttgaa

SEQ ID NO: 82960 - DNA, 347 bp, Zea mays
acgggctcgccatgctcgccatcctcggttacttcatccaggggctcgtcaccggcgttggcccgttccagaacctgctcgaccacctcgccgaccccgtcaacaacaacgtgctcaccagcctcaagttccactagaacgttggtgcatcagcatacctgctgccgccgccgccagttgtttgctgtggaaagctagatgcatgcgtgttgtaaaggaacctgaagcgttgcatcggtcatgattcatgcatggccagcctgctgcctgtaacaacaaactagtattgatcttattgagaccggaaactgtattgcacatggtaaatcaatgtacaattcctccct

SEQ ID NO: 82961 - DNA, 339 bp, Zea mays
acgcaaagaaagctacaaggatatttgttccttgtgatttcatttcttcctttggagtagctatcttcacttctaatgtacggctcccaaggaagaaatgaaatcacaaggaacaaagaaagctacaaggatatttgttgctcgaattccacagtcagtggacgagtcgatgtttcgtaggcattttgaagcttttggagaaattcttgatctttacatgccaaagagtctgtggacagcatcatgcaagagtcacatgagcttgatggcacaacagtagttgttgatcgcgcgactccgaatgaggaagatgtaagataccccccgagtagaccatct

SEQ ID NO: 82962 - DNA, 339 bp, Zea mays
acggatcacacattggccttgcagttgcactggtgcttgctcataattagttcatcagcaaacaccacacattggcaccgaggctagcgtgcctcctagctctggccatggcagccatcgtcgtcgcgccgtgcacggcccagaactcgccgcaggactacgtggacccgcataacgcggcgcgcgccgacgtcggcgtcgggccggtgtcctgggacgacaccgtggccgcgtacgcgcagaactacgcggcgcagcgccagggcgactgcaagctgatccactccggcgggccctacggcgagaagctcttctggggctccgccggcgccgactggt

SEQ ID NO: 82963 - DNA, 409 bp, Zea mays
acgcgtccgcagacgagtgggcggacgcgtgggcaacaacgacgggaactggaggaactgagcggtggggtccgctgaggcctagttatcttgttcgcttctgctaccgtgttcaccctagtctagagggggtttatcttcgtctgtggtcgtctcgtgtccgtttgtttcgtttcgtgttcattgttgttgttgcccatctgtgtttttgaccgcaagctcgctcctctgatgttgttagtgatgtctacaatcgtccaatcccgagcctgcattgagctccaccgattatcttatctggctatacctgcagttgtgcatttgattccgacgggcctaaacctgaacacgccaatattaaacattgtacaaactacaagtgctccaataaagaacacaaagattcagg

SEQ ID NO: 82964 - DNA, 372 bp, Zea mays
cattgatatcgctctgtggaagtttgagaccaccaagtactactgcacggtcattgatgcccctggacaccgtgacttcatcaagaacatgatcactggtacctcccaggctgactgtgctgtccttatcattgactccaccactggtggttttgaggctggtatctccaaggatggccagacccgtgaacatgctctccttgcgttcacccttggagtgaagcagatgatttgctgctgcaacaagatggatgcaaccactccgaaatactccaaggcacgttatgatgagattgtgaaggaagtctcatcctaactcaagaaaattgggtaaaacccctataagaatgcctttgttcccatttccggttt

SEQ ID NO: 82965 - DNA, 464 bp, Zea mays
ggggccagcccgcgtccggacgcagcgagcacattcctgggcacccgcctggcggacccggcgccacagaacgggcgcatcgtggcccggttcgggttcgggttgggcggcaaggcgaagcctgctccgaagaaggtggcgaagacatcgacctcctctgaccggccgctgtggttccccggcgccgtggcgcccgactacctggacggctcgctggtcggcgactacgggttcgacccgttcggtctcgggaagcccgtggagtacctgcagttcgagttggactcgctggaccagaacctggccaagaatgaggccggcggcatcatcggcacccggttcgagtcctccgaagtcaagtccaccccgttgcagccctacagcgaggtgttcggcctccagccgttccgcgagtgcgagctcatccacggccgctgggccatgctcgccaccctcggggccct

SEQ ID NO: 82966 - DNA, 336 bp, Zea mays
acgtacgctagcaacatagaaagcacaatagtgtaccaacaatggcagccaaaatattttgcctccttatgctccttggtctttctgcaagtgctgctaccgcgaccattttcccgcaatgctcacaagctcctatagcttcccttcttcccccgtacctctcaccagcggtgtcttcggtatgtgaaaacccaattcttcaaccctataggatccaacaggcaatcgcagctggcatcttacctttatcacccttgttcctccaacaatcatcagccctattacagcagttacctttggtgcatttattggcacaaaacatcagggcacaacaac

SEQ ID NO: 82967 - DNA, 428 bp, Zea mays
acgagccgaagaagatgcaaacttgaataggcaatcaaaaccagccattaacaaacttatgaagcttcctctgctcatagatgttctctccaagaagaatcttcagcaggaatttcttgaccacggagttctcactcttctaaaaaattggcttgagccattacctgatggaagcatgccaaacatgaatattcgatctgctgtactgaaattattaactgattttccaattgacttggaacagtatgaccgaagagagcagcttaagaaaagtggtctgggaaaggtcattatgtttttgtccaaatctgacgaggagactactgcaaataggaaattggctaaggagctggttgaataattgaatccaacaattattcaacaggagcacgagatttgaggacatgaagagatatgatgatgaaaga

SEQ ID NO: 82968 - DNA, 399 bp, Zea mays
  unsure (1)..(399): unsure at all n locations
ggcttatcctccccctcttaccaagtcctcctcgggttagggttccttagggttttgtggaggggcgatggcggcggctgatgtggagtaccgttgcttcgtcggcgggcttgcctgggccaccagcaacgagtcgctggagaatgccttcgcctcctacggcgagatcctcgactccaaggtcatcaccgaccgggagacggggaggtctcgcggcttcggcttcgttaccttctcctccgagaactccatgctcgacgctatcgagaacatgaacggcaaggagctcgacggccgtaacatcaccgttaaccaggcccagtcncgtggcggtggcggtggcggcggtggctacggcggcggtcgcggcggcggcggctatggtggcgggcgccgtga

SEQ ID NO: 82969 - DNA, 402 bp, Zea mays
agcacacgcgtccggcgcgatgtccaccatcagcagcggcgtgaactccgccgtggcgcagcaggctcgtgtgggggcgtcgctgctccggctccacttccacgactgcttcgtccaaggctgcgacgcgtccattctgctgaacgacacgtccggggagcagacccagccgccgaacctaactctgaacccgagggccttcgacgtcgtcaacagcatcaaggcgcaggtggaggcggcgtgcccgggcgtcgtctcctgcgccgacatcctcgccgtcgccgcccgcgacggagttgtcgcgctcggcgggccttcgtggaccgtgcttctgggcagaagggactccaccggttcgttccctaaccaagaaagccaactccaacttcggacttcaaccct

SEQ ID NO: 82970 - DNA, 340 bp, Zea mays
acgcggacgcgtgggcggacgcgtgggcggacgcgtgggctttccccgtcggcgcctccccagatttggccgccgccgccgctgacccaggttgtcttgatggcgcccgctgtagaagccgtgaaggagacaggcaccttccagaaggttcctgccttgaacgaaaggatactgtcatccatgtccaggaggtctgttgctgcacacccttggcatgatctggagataggtcctggtgctccaaccatattcaactgcgtcattgagataccaaggggcagcaaggttaaatatgaacttgacaagaaaactggactgattcaaggtggacgtgtgctgt

SEQ ID NO: 82971 - DNA, 429 bp, Zea mays
acgtacgctcctccccctcttaccaagtcctcctcgggttagggttccttagggttttgtggaggggcgatggcggcggctgatgtggagtaccgttgcttcgtcggcgggcttgcctgggccaccagcaacgagtcgctggagaatgccttcgcctcctacggcgagatcctcgactccaaggtcatcaccgaccgggagacggggaggtctcgcggcttcggcttcgttaccttctcctccgagaactccatgctcgacgctatcgagaacatgaacggcaaggagctcgacggccgtaacatcaccgttaaccaggcccagtcccgtggcggtggcggtggccgccgtggctaacgggggcgtccccggcgccggcggttatggtggcggttgccgtgacggcggttatggcggcggtggcggcta

SEQ ID NO: 82972 - DNA, 422 bp, Zea mays
ggggccacgcacgcgtccgcaaacgacgtccgcccacgcgtccgcagagaggagcttcatcagctcattcaattctcgttccatccctcgtctcttgtgtcccgcctccgttccataattcaccagcgtcgtcctacccatatctcctatcgtcttctccctcgcgccatcagcttccccaagccagcggcgaccatgatctccccggacaccatccgcacggccatcggcgtcatcggcaatgggactgcactcgtgctcttcctctccccagtgcctacgttcatccgcatctggaagaaagggtcggtggagcagtactcgccgatcccgtacgtggcgacgctgctgaactgcatgatgtgggtgctgtacgggctgccggcggtgcacccgcacagcatgctggtgatcaccatcaa

SEQ ID NO: 82973 - DNA, 357 bp, Zea mays
acgattcattctaggaagtctcactctggccctaatcatgctttcatgtataagggtgagacatctagctctaggcaatcaacccatgctaagttgcctagaaagaaagctcctagtgcatcaaatgatcataatatttcatttaaaacttttgatgcatcttatgttttgactaacaaatccggcaaggtagttgccaaatatgttgggggcaaacacaaggggtcaaagacttgtgtttgggtacccaaagttcttgtatctaatgccaaaggacccaaaaccatttgggtacctaaaatcaagaactaaacttgttttgtaggtttatgcatccgggggctcaagttggatact

SEQ ID NO: 82974 - DNA, 392 bp, Zea mays
ggggccagcacgcgtccgcacccaagcccgcagccatgccgcccaagctcgacccgtcgcaggtggtggaggtgttcgtccgtgtgaccggcggcgaggtcggcgcagcgtcttcgctggcccccaagatcggcccgctcggtctttcccccaagaagatcggagaggacatcgccaaggagacggccaaggactggaagggcctccgcgtcaccgtcaagctcaccgtccagaaccggcaggccaaggtctccgtcgtcccctccgccgcggcgctcgtcatcaaggcgctcaaggagccagagagggaccgcaagaaggtcaagaacatcaagcacagcggcaacatcagcctcgacgacgtcatcgagatcgccaggaccatgaggcac

SEQ ID NO: 82975 - DNA, 458 bp, Zea mays
ggggccagccacgcgtccgcagacacgtgggcaccgacccatacgagttctaccagtatgtgcatttgtcggaggttggtaactgtgtcggatctggtattggtggtactactgccctacgaggcatgtacaaagaccgcttccttgacaggcctgtccagagggatattctgcaagagtctttcatcaacacaatgagcgcctgggtgaacatgttgctcatgtcgtccactggaccgatcaagactccagtcggagcttgtgccactgctgttgaatcgattgacatcggttatgacaccattgtggaaggcaaagcacgtgtctgcttcgttggtggtttcgacgacttccaagaagaaggttcgttcgagttcgccaacatgaagggctacaataatgccgaagacgaatttgcgcacgggcgcacaccgcgagaaatgtccgccctaacaaaa

SEQ ID NO: 82976 - DNA, 352 bp, Zea mays
cccggctggccccacgcgtcagcacacgcgtccggagcaagggatgctgctcttaacgccatccagtcgccgctgcttgatattggaattgaaagagccacaggcattgtgtggaatatcactgggggaactgacctgactttgtttgaggtgaatgctgcggccgaaattatctacgaccttgtcgatccaaacgctaatctgatatttggcgccgtcatagacccgtcactgagtgggcaggtgagcataaccttgatagctactggcttcaaacggcaggatgaaccagaaggccgcgtgtcgaagggtgggcaacaaggtgagaatggccgacgcccatccccagcag

SEQ ID NO: 82977 - DNA, 342 bp, Zea mays
agcccacgcgtccggtgctatccattgctctgggcgacacggtatacctgtgggatgcctccagtggatccacgtctgagcttgtgaccattcacgaggacagtggtcccatcaccagcgtcaactgggctccagatggccaccatatcgctattgggctcaactcatccgatatccagctctgggacaccagctccaaccgactggtatgtgcactctcctgcttcaaccagaaatgcatgcacgctctgtcattgaatttaggttgttttttgcctgcagttgagaactctcagaggtgtgcatgaggaaagagttggctcactggcatggaacaacaac

SEQ ID NO: 82978 - DNA, 353 bp, Zea mays
agaaccggacaggcaagagctgccggctgcgctgggtcaactacctccaccctggcctcaagcgtgggcgcatgtctccccatgaagagcgactcatcctagagctgcacgctcggtggggaaacaggtggtccaggatagcacgccgcttgccagggcgcactgacaatgagatcaagaactactggaggacacacatgagaaagaaggcacaggagaggaagaggaacatgtctccatcgtcgtcctcgtcttcgctgacttaccagtcaggctacccagatactccatcaaccattggagttgagggacaggagcttcatggtggcagtggctgcatcacaagcatcctg

SEQ ID NO: 82979 - DNA, 429 bp, Zea mays
acgcccacgcgtccgcccacgcgtccgcccacgcgtccgagagccgaaagaagttgaagaggcaacgaagggtgagaaaaagaagaagactattacagagaaatattgggattgggaactagccaatgagacaaaacccatatggatgagaaatccaaaggaaattgagaacaccgaatacaatgagttctataagaagacattcaatgagtttttggaccctcttgcccacactcacttcacaactgagggtgaggtggaattcaggagtgttctttatgttccaggcatggcgcctcttagtaatgaggagataatgaaccccaagaccaaaaatatccggctatatgttaaaagaatcctcatcccctaagaacttggatggtgaacggttcccaagatacttgagctttgtgaaaggtgtggtgg

SEQ ID NO: 82980 - DNA, 416 bp, Zea mays
ggggccagccacgcgtccgcaaacgcgtccgcccacgcgtccgcccacgcgtccgagcgcacacacacacaaccagatctcccccaaatccacccgtcggcacctccgcttcaagatgcagatctttgtgaaaaccctgactggcaagactatcaccctcgaggtggagtcgtctgacaccattgacaacgttaaggccaagatccaggacaaggagggcatccccccagaccagcagcggctcatctttgctggcaaacagcttgaggacgggcgcacgcttgctgactacaacatccagaaggagagcaccctccaccttgtgctccgtcccaggggaggcatgcagattcttgttgaaaaccctgacgggaagactatcaccctccaagtggagtcctctgaacacattgaca

SEQ ID NO: 82981 - DNA, 361 bp, Zea mays
ccacgcgtacgcaaacgcgtccgagaagaagacgagtgtcaagtgaacctgaaacttgcggtgtcactggctggtagcctgagtgtgagtgagtgatcgagctagctgagctccgatcctcgctagctaggataccgccataccacaagtcttcttcacaagtttaggagtgacagcaacaagagatcgatggcctctgccaccgtgctcaagtcctccttccttcccaagaagtccgaatggggcgccaccaggcaggccgccgcgcccaggccgcccaccgtctccatggtcgtccgcgcctccgcctacgccgatgagctcgtgaagaccgcgaaaacgatcgcgtcgccggggcggg

SEQ ID NO: 82982 - DNA, 397 bp, Zea mays
acgtacgcggggccgagatgctcgtcgtcggcagccatggctacggagccattaaaagggctgttcttggaagtgtgagcgactactgtgcccatcacgcgcactgcaccgtgatgatagtaaagaagcccaagcagcacaagcactgatcaatgccgactgatcactacgtgtactgcaaataatatgtactactgcaaagttatgtgtgcgtccgtccgtttgtgaataattgggtcatcaaccatcacatcttcggttgcttctacaagtatccgatccaatccttctacgtgtggattgggatttacaaataattgattgttctctgaacctgaaaacaatgtatttgtattaatgtgttggaacaattaaatgttgttgcaacttcctttcc

SEQ ID NO: 82983 - DNA, 343 bp, Zea mays
acgcccacgcgtccggcgagccatcgacacgatcgcgagcgcaagcacgtacgttgtcggaagctcaagttagaagaagcaccagtgcctgatcgatggcggcccaggctctcctctccggccggcagctgctgggccgccccgtgcagtcggccgtctctaggtcgtcggcgaggaaggcgcccttcgtcgtcagggccagctccagccctccagccaagcaaggtgccgacaggcagctgtggttcgcgtccaagcagtccctctcctacctcgatggcacgctgcccggcgactatggcttcgacccgctgggcctctcggacccggagggcaccggggg

SEQ ID NO: 82984 - DNA, 355 bp, Zea mays
acgaagccctttgggaagcagctcagggacaaatacgtggagacacagcagcttctcctccagatcgctgggcacaaggatattcttgaaggcgatccattcctgaagcaggggctggtgctgcgcaacccctacatcaccaccctgaacgtgttccaggcctacacgctgaagcggataagggaccccaacttcaaggtgacgccccagccgccgctgtccaaggagttcgccgacgagaacaagcccgccggactggtcaagctgaacccggcgagcgagtacccgcccggcctggaagacacgctcatcctcaccatgaagggcatcgccgccggcatgcagaacactggct

SEQ ID NO: 82985 - DNA, 411 bp, Zea mays
ggggccagcacgcgtccggactagctctatagctcgagtattgcttgctctccacaagaaacaaggcagagcaccaacaatggccgccgcctcctcgtcctcggtcctcctgctgctcctggccgccgccttggctggcatgagcgccaacgccgccaccttcaccatcaccaacaactgcgggttcaccgtgtggcccgcggccaccccggtgggcgggggcacgcagctgaacccgggcgggacgtggaccgtcaacgtgccggccggcaccagctccggccgcgtgtggggccgcaccggctgctccttcaacggcaacagcgggagctgccaaacgggcgactgccgcggcgccctgggctgcacgctgtctgggcaaccgccgctgacgctggccgagttcaccat

SEQ ID NO: 82986 - DNA, 367 bp, Zea mays
ggggcccagcacgcgtccggatgcaccgacgtgtcctgcaccatcgacgcgtcgctcagcatggtcatgggcgacgacatggtcaaggtcgtcgcctggtacgacaacgagtgggggtacagccaacgcgtggttgatctggcgcacctggtggcggccaagtggcccggcgccgcggcggccggcagcggcgaccctctggaggacttctgcaaggacaaccccgagaccgacgagtgcaaggtgtacgaagcatgaggccagggttctttccacgacgaaacgtacagcacgggcgcgagggttctttccatagagaataatatacagattattcgcccaaagagacgtatgttatatatatgag

SEQ ID NO: 82987 - DNA, 375 bp, Zea mays
ccggccgacccacgctcacagtaagaatgaggccatacccgattcaggacacccaaacaacgttccagttcaggcaaccgatttatacggtcacctaaggaaaaaattctctaagacaacatttcccactgaccacaagattccggcatgtaacggttgaggaaacggcggcggtgccttccggggccaagcagatccctgcagctggttccaagtaccagaattttacgcgcctagatgatgatgtccaggttgattggaggcagcagggtgctgtcactcctgtcaagaaccaaggccaatgtggctgttgctgggcgttctctgcagtaggtgccatggaaggtttgatcatgataacgacaggaaacctgg

SEQ ID NO: 82988 - DNA, 419 bp, Zea mays
acgcgtcagcccaggcgtccgcgtcgacccgctctaccccggcggcagcttcgacccgctcggcctcgccgacgatcccgaggccttcgccgagctcaaggtcaaggatctcaagatcggccgcctcaccatgttctccatgttcggattcatcgtccaggccatcgtcaccgggaagggcccgctcgagaacctcgctgaccacattgccgaccccgtcaacaataacgcttgggcctacgccaataacttcgtccccggcaagtgagggaggcgccgccggtgacctttatgtgtccggatgcatgtgaacgcacgctggttttcggtttgtaccatgatgtaaactattgttcaatcgacaaggaataattgtgttcattgtcaaaagaaaaagtctgatcatgataacgacaaga

SEQ ID NO: 82989 - DNA, 418 bp, Zea mays
agcccacgcgtccgaatattttgagcattcagaaacacacctagcgaagcgcactagcaacgacctaacaacaatggcttccaagacattatccctccttgcgcttcttgccctttttgtgagtgcaacaaatgcgttcattattccacaatgctcacttgctccgagtgccattattccactgttcctccctccagttacttcaatgggcttcgaacacccagctgtgcaagcctataggctacaacaagcgcttgcggcgagcgtcttagaacaaccaattgcccaattacaacaacaatccttggcacatctaaccatacaaaccatcgcaacgcagcagcaacaagcactgagccacctagccgtggtgaaccctatcgcctacttgcaacaacagctgcttgcatccaaccca

SEQ ID NO: 82990 - DNA, 417 bp, Zea mays
ggtaccaatcagccaatccccgtccgacccacgcgtcaggactaccgcatcatgcgcggggacagccggatgcacaacatgcgagacgcactaatagggatctaacaccagtggcatctaagacattatcattccttgcacttcttgccctttttgtgagtgcaacaaatgcgttcattattccacattgctcacttgctcagagtgccattattccactgttcctccctccagttacttcaatgggcttcgaagacccagctgtgcaagcctataggctacaacaagcgcttgcggcgagcgtcttagaacaatcaattgcccaattacaacaacaatccttgggacatctaaccatacaaaccatcgcaacgcagcagcaacaagcactgagccacctagccgtggtgaacccta

SEQ ID NO: 82991 - DNA, 412 bp, Zea mays
agaggacactactcctcagaactctcccttccctcttgtaggggccaaaagggtcagagatctaggaagaagagaactagtccccaagcctaacaagaaagcaagctcttctgcaactgttggcattcgccttaatttgtatccatcccaatggcaggcctatctctggaacacccctgggcattcactttcggcctcctaggcaacgttatctccttcatgaccttcctggccccgataccgacgttctaccgcatctacaagagcaagtcgacggagggcttccagtcggttccgtacgtggtggccctgttcagcgccatgctgtggatcttctacgcactgatcaagtccaacgagacgttcctcatcaccatcaacgcggccggctgcgtgatcgagaccgtctacg

SEQ ID NO: 82992 - DNA, 364 bp, Zea mays
gcggatcaagctgcggctgcggctcaagctgcaagtgcggcaagaagtaccctgacctggaggagacgagcaccgccgcgcaggccaccgtcgtcctcggcgtggccccggagaagaaggccgcgcccgagttcgtcgaggccgcggcggagtccggcgaggccgcccacggctgcagctgcggtggcaactgcaagtgcgacccctgcaactgctgatcacatcgatcgacgaccatggatatgattattatctatctagcttgtggtggtggttgaacaataataagcgaggccgagctggctgccatacataggtattgtgtggtgtgtgtgagagagagagaaacagagttcttcagttt

SEQ ID NO: 82993 - DNA, 425 bp, Zea mays
gacccacgcgtacgggaaaaatcgccccatcccctgactatcactggctcactgcccttccacctacaggttccaggttaagtttaagattgataaagattgccgtcctctccctgagagtagtctcaagcaagccatcaaggaaaattacaatgcaaagagcaaatttgatccagagctcaccacaaaacaagtccaaaggttacttttgctgtttaagcctgttagtgcacctcaatctgtttcaaataatcaccttggagaaaggcgccactatgaaaaacgaaggaagccacgccattttgaagaaaggcggcctattgaagcaacgcgtcggccacgatttgatgaggaaaggcgccctgcggttagacatgttccttttgaggatccatacagggcaccacgctatgctccaattcctg

SEQ ID NO: 82994 - DNA, 384 bp, Zea mays
acggaattctcgcaatgacagtatacagatagacacgacagagattctttttatatgtggtggtgcttttgtggacttggaaaagactatttctgaaaggcgccaagattcatccataggatttggggcagccattcgtacgaacatgagaagttctggagctagctgtccaatggttacctcatctttattagaatctgttgaaagtggtgatcttgtaagatatggtctaattccggagttcattggtcgtttgcccattctagtaagtttgggagctctgaatgaatgtcagctcgttcaggttctgacagaaccaaagaattcactttccatacagtacaggaaaatgtttaacctgaacaaagtttagctgcactttac

SEQ ID NO: 82995 - DNA, 418 bp, Zea mays
acccacgcgtccggataagcactccagatgcaacttctcttcttattcaaccatatgataagtcaagcctcaagcttattgagaaaactatagttgctgcaaatcttggtgtgacaccaagcaatgatggagaagtaatacgagtgactgtcccaccattgacatctgatcgcagaaaggaattatcaaagacagtagctaaattagctgaagatggcaaggttgctataaggaatataagaagagatgcaatcaaagcttatgataaactagagaaggaaaagaagctttctgaggacaatgtgaaagatttatcagctgatttacaaaaagtcacagatgagtacatgaaaaagatcgaatccatccagaagcagaaggaacaggaactgatgaaaatttagacctcaagctgact

SEQ ID NO: 82996 - DNA, 216 bp, Zea mays
acccacgcatccacccacgcgtccgcggacgcgtgggggcgtcgtccatgctctccgctaccaccgtgccactccagcaggggggcggcctgtccgagttctccgggctcaggagctccgcgtcgctgcccatgcgccggaatgccagctcgggcgacttcatgtccgccgtctccttcaagacccacgcggtcggcacgatctgcgggtcgccgc

SEQ ID NO: 82997 - DNA, 391 bp, Zea mays
ccacgcgtacggaatgatacagctgatggtttggtcaaggagccagatctgaaggacatacgcatcacctttgaggagtttaaggcatttgctgacttgcgacaaagattggagccactgtcgatggctatctttgctcatgggaaagtgaatggattattgacaaaggaggatctaaaacgtgcaacacaacatgtttgtggtgtcaacttaactgatagagtggtagacatcattttccatgtgttcgacacaaatcaggatgggaacctgagctcggaagagttcttaagagcattatacagaagagaaactgacattcgtcaaccaccacctaccaggtccatggcggtttatctgtcttgctggttcacgtgctacgacgtgttca

SEQ ID NO: 82998 - DNA, 389 bp, Zea mays
acgcccacgcgtccgggaagagaggcgcgcaagcggtccggtctcatggcgcccttccccgccctccgctcatcgtcgccggtggccgccgccgcggcgccgtcgctcggtcgcgtgtccggccacgcatctgcggcgcccagcaagaggcgcgtcgtctcctgcagggccgtcagcagcaggtcgctgtccatcatcaggtgcgagcagagcgcgaagaagggcggcgggccggacacatggctgggccgcgcggccatggtcggcttcgcctccgcgatcgccgtcgaggtggccaccggcaagggcttcctccaggtagggaccgtcgtagagtatgagtatcaacgtaacatcgacagcagcgagggacgccgaaacgcgtgcgt

SEQ ID NO: 82999 - DNA, 392 bp, Zea mays
ttccggggcgccccacgcgtcagatattaattaggttctaatccaattagtagtaagtattttcttttttatttaatagtctctgactatcattaaataaagggtagagcaattcttttttctagagattctagagaaagtgagacaaagtgaagcgaaagagttttctttgtataagaattaggtctatatcatatctaaatagaagggaaatcaaaaagaagggaagtggggattacattggatgaatccttaaggaagacatatcacaaaagaaataaaggctaaagtaagcgctccttgcctttggtttgagcaaaacagattcttgtttcaccgaggaaaagagagaagttctggataaattgacaatgtcaacttgaattgactaa

SEQ ID NO: 83000 - DNA, 413 bp, Zea mays
agaataagacgacttgtttcattgattcttgaagagatcgagcttcttttgcaccacaaggtcgaggatgtcttgcaactgcggatcaagctgcggctgcggctcaagctgcaagtgcggcaagaagtaccctgacctggaggagacgagcaccgccgcgcaggccaccgtcgtcctcggcgtggccccggagaataaggccgcgcccgagttcgtcaaggccgcggcggagtccggcgaggccgcccacggctgcagctgcggtggcaactgcaagtgcgacccctgcaactgctgatcacatcgaatgacgaccatggatatgattattatctatcgatcttgtggtggtggttgaacaataataatcgacgccgagctggatgccatacataggtactgtgtggtgtgtg

SEQ ID NO: 83001 - DNA, 405 bp, Zea mays
cggacgcgtgggcttgctctgatagcttgctccaggacgtacgtacgtacgtagatcgatccatcgatcgctagctagctgacgaccatggcgtccctctcctctgccgccatcaccgccccttccttcacggccgcgcccgctcgcgcagtggtcagcaggaggtccttcaccgtgcgtgcctctctccgcaaggccactgccaccgccgccgtggccgttgccgccagcgtcctgcttgccggcggcggcgccatggcccaggaggtgctgctgggcgcaggcgacggcgggctcgtcttcgagcccagccagttcaccgtcaaggccggcgacaccatcaccttcaagaacaacgccggctttcccgcaaacgtcgtgttccacgaagacgaggtgccgagc

SEQ ID NO: 83002 - DNA, 394 bp, Zea mays
agcccacgcgtccgcccacgcgtccgcccacgcgtccggttcaaggagctagctcaggcttatgaggtcctcagcgaccctgaaaagagagagatctatgaccagtatggcgaggatgccctcaaggagggaatgggaggcggtggtgggatgcatgatccctttgacatattccagtcattctttggtggtggaagcccttttggaggtggcagcagtaggggcagaaggcaacgacggggagatgatgtggttcatcctctgaaggtttctctggaggatttgtacaatggcacatcaaagaagctctctctgtcccgcaatgtcctctgctccaagtgcaatggtaagggttccaagtctggagcttcgtcgaggtgtgctggttgtcaag

SEQ ID NO: 83003 - DNA, 411 bp, Zea mays
acgcggacgcgtgggcgccaaggtgaagagcaagatgctttatgcaagctcaaaccaaaaattcaagagtgggctcaatggcattcaggtggaactgcaggctactgatgcaagtgaaatcagccttgatgagatcaaggatcgggctcgctaggcatcatgatcatgcatcatggactcggcctactactgtggatttgtatgccattatagacttggtgctgtgaaagactgcttgatgatttgcgggtttgttgctgtgtaaaaaaaggtcccatggctcccagaagaccatgaaggttcggatctatcatgtaattccttgttatctgccaattatgtatggactatggacatgtgttgcgctgttcagcttaatactaccaataagtaatccataatgtcccttcc

SEQ ID NO: 83004 - DNA, 414 bp, Zea mays
gcagcagaggcagcgacacgatcgcgagcgcacgcacgtaagcacgttgtcggaagctcaagttagaagaagcaccagtgactgatcgatggcggcccaggctctcctctccggccggcagctgctgggccgccccgtgcagtcggccgtctctaggtcgtcggcgaggaaggcgcccttcgtcgtcagggccagctccagccctccagccaagcaaggtgccgacaggcagctgtggttcgcgtccaagcagtccctctcctacctcgatggcacgctgcccggcgactatggcttcgacccgctgggcctctcggacccggagggcaccgggggcttcatcgagcccaagtggctggcctacggcgaggtgatcaacggccgctacgccatgctaggcgcggtgggcgccat

SEQ ID NO: 83005 - DNA, 410 bp, Zea mays
gcggcggggtagcatttgtgctacgagggcttttgcaatggcggcttcggggttcggcggcggcgaggcgttccggctctcggccgcaccaggggccggcttactgaagctgcacaagggcgacatcaccctctggtccgtcgactgcgccaccgacgccatcgttaatgctgctaatgagcgaatgttaggtggcggaggtgttgatggagctatacatcaagctgctggaccagagctagtgcaagcatgccggaaagttccagaggtcaaaccaggagtccgttgtcctactggagaagctaggattactcctgcttttgagcttcctgcctctcgggtgattcacactgttggccctatatatgatttggacaagcatcctgaggtgtcattaaagaaggcctatg

SEQ ID NO: 83006 - DNA, 414 bp, Zea mays
caactagcaacatagaaagcacaatagtgtaccaacaatggcagctaaaatattttgcctccttatgctccttggtctttctgcaagtgctgctacggcgaccattttcccacaatgctcacaagctcctatagcttcccttcttcccccgtacctctcaccaacggtgtcttcggtatgtgaaaacccaattcttcaaccctacaggatccaacaggcaatcgcagctggcatcttacctttatcacccttgttcctccaacaatcatcagccctattacagcagttacctttggtgcatttattggcacaaaacatcagggcacaacaactacaacaacttgtgctagcaaaccttgctgcctactctcagcaacagcagtttcttccattcaaccaactagctgcattgaa

SEQ ID NO: 83007 - DNA, 415 bp, Zea mays
agaagacagacggcaaggcagccagaacccttgccaagctcatgctcttccgccagttctatgttgccgttattggatacctctacttcaccaggatcattgtgtatgccctcaagacaattactaactacaagtacagatgggtcagcgttgcagcggaggaggtggccaccatggcattctacatgttcatgttctacatgttcaggccagctgagaggaaccagtacttcgcacttgacgaggatgatgaggaagccgcagagatggcgctccgtgaggaggagtttgagctctagacgaccacgtggatgtccaatgacatgggaatgcagccatctcccattcattttctcctcgatgtgatgttgatcatactatacagattcagggtttagctaatatatgtctacgt

SEQ ID NO: 83008 - DNA, 416 bp, Zea mays
ggcttgggttgtgaggatgctcttgttcatctgcttaactatgtttggcccaacatatttgagacatctccccacgttataaatgctgtcatggaggcaattgaggggatgagggtcgcactaggtgcggctgtgattttaaattattgcctgcaaggtctcttccatccagcaaggaaagtacgagaagtgtattggaagatatacaactctttgtacatcggcgcgcaggatgcacttgttgcttcttatcctgccctggaagacgatggggataacatctttagtcgtccagagttggcaatgtttgtctgattaacgctggatgtgcatgtccatgtgtcttcatccatattcttatgaagcttgaactgggtggtactctgagttagagctttgtatttacttgggacacc

SEQ ID NO: 83009 - DNA, 415 bp, Zea mays
agtgaagcacagcggaggcttgactttcagcttggatggcacctagatccactatatgttggtgattacccagaaagcatgcgtcaacgattgggcattgatgttccaaccttctcagagaaggataaagagttcatgaggaacacaattgattttgttggagtaaatcattagacttcaagactcattgcacatctctagaatccagacgatgtttatttctaccaagtgcagcagatggagcgaatagatgaatggagtattggtgaaaaaattggtgaaagggctgcatctgaatggcttttcagacttccttggggccttcataagtcacttacttatatagcgaagaagtacaatactccagcaatttatgttactgagaatggcatggatgaagaggacgatcaatccg

SEQ ID NO: 83010 - DNA, 344 bp, Zea mays
atcagcatttatccagcctgatctctacagatctgattgataccatgagcgacgaattctcgaaaaggttttttgactatgttgatgagaggaagaacctagacatcgatcgtctcgctgaggctgtcgcgattccatccgtttcctcggatttggaaaatcatctggtcgacatcaacacattgatcgcttggactaagggtcatatagagcgcctcggtggattgacggagctcgtcaccatccccgcatgcaccgaatatcgccctttgcctccaattctgtgcggttctttcgtttcgaacccccatacaaagactgtatgtgtgtatggtcacttggac

SEQ ID NO: 83011 - DNA, 413 bp, Zea mays
aggaccgagcaaagcgcaaagccccccaaccgcggatcaatccgcagcatcgatggcgcccaaggcggagaaaaagccggcggcgaagaagcccgcggaggaggagcccgcgaccgagaaggcggagaaggctccggcagggaagaagccgatggcggagaaacgcctccccgcgggcaagtccggcgccggcgagggcaataagggcaagaagaaagccaagaagagcgtggagacctacaagatctacatcttcaaggtgctcaagcaggtgcaccccgacatcggcatctcgtccaatgccatgtccatcatgaattccttcatcaacgacatcttcgagaagctcgccgcggaggccgccaagctcgcccgctacaacaagaagcccatcattacctcccccgagatcc

SEQ ID NO: 83012 - DNA, 380 bp, Zea mays
aggagctggttaagcttgctacagagaggggccgcaaagctaggcctaacttgaaggtgggcatttgtggagaacatggtggagagccttcatcggttgctttcttcgccaagactgggctggattacgtttcttgctcccctttcagggtcccgatcgctaggctagctgcagctcaggtgcttgtctgaggggctgcctcctcgttggcagcctgctgttggtgcatctggtgattaataatactactatgacagagccatatgctctgtgaagagtattagtagcagcgctcataaaagctacagttccatctattttctcagctatgtaaaacttccaaactgttcatgcttaaaactgagggttttcgtggtgtg

SEQ ID NO: 83013 - DNA, 348 bp, Zea mays
ctcctccgtcgccggcctcggtggctgcccgtacgcgaagggtgcgtcggggaatgtggcgacggaggatgtggtgtacatgctcaacgggctgggcgtcaagacgggcgtcgacctgggcaaggtgatggccgccggcgagttcatctgcaggcacctgggacggcagtctgggtccaaggcagcgaccgctctgagcaaagttaccgcgaacgcctccaaactctgacaatttaccatgatcacctactgcagataattgcagtaaaattagcgcatggtaataaatagactgaggctattcaaataaatacggcctcggagctaataatgagtaaatttttaatt

SEQ ID NO: 83014 - DNA, 308 bp, Zea mays
cggactcgtgggcgacgccaaggccgggatcgctctgaacgaccacttcgtcaagctcgtctcgtggtacgacaacgagtggggcgacagcacacgcgtcgtcgacctgatccgccacatgttcaagacccactagacgggttttttccccctgcttctcatggatggttgcagcttgtgtacgccgacaataaatctggatcgcgcgtgcctctgggtcgccaggttcatgctgagtcaggacatgttttgcactttagcatcccttcctgctaccatctgtgaaagaaccgctcgctaatacggga

SEQ ID NO: 83015 - DNA, 348 bp, Zea mays
acccacgcgtccgcatgccaggtgttataccggttggctttctggggggttattcaaggtttgtggcaaaatgccaagctctggaaccgaaatcctttggagaatgatttccgtattacaatttgggggagggaactttaggacatcctgggggaaatgcacctggggcagcagctaatcgtgtggctttagaagcctgtgtacaagctcgtaacgaagggcgcgatcttgctcgtgaaggtaatgaaattatcaaagcagcttgcaaatggagtgctgaactagccgcagcttgtgaaatatggaaggagatcaaatttgatggtttcaaagcgatggataccatat

SEQ ID NO: 83016 - DNA, 364 bp, Zea mays
ccacgagcaaccgataatccgccggcgttgagatgttggtttatcaggatctcctatctggcgacgagctcctgtcggattcattcacctacaaggagctcgagaacggcgtcctgtgggaggtcgagggaaagtgggtcacccaaggtcctgttgatgtggacattggtgccaatccatccgccgagggtggtgaggacgaaagcgttgatgacacagctgtgaaggtggttgatattgttgacacattccgtctacaggagcaacctccttttgacaagaaatcatttgtgtcttacatcaaaaaatacatcaagaatctcactgctgtgttggagccagagaaagcggatgagttcaaaaa

SEQ ID NO: 83017 - DNA, 307 bp, Zea mays
acggcaaaggcaagcgctctcaggccatggagtccatcagcgccagcaccacgctcgtcaagttcacctacgacgatatcaaggctgccaccgacggattcgccaggaagagtattattggccacggtggctttgggaatgtctacaagggggtgctgcgcgacggtgctgaggtggcggtgaagcggttcaagaactgctccgcggctggggacgccgcctttgcccatgaggtggaagtggtggccagcgtgcgccatgtcaacttggttgcgctgcgtgggtactgcattgccaccacacagag

SEQ ID NO: 83018 - DNA, 439 bp, Zea mays
acgcccacgcgtccgcccacgcgtccgtgacaaggtagggatgaagcacatcaagaagtacgtcgaaatgatgacgcacgagaacgtctccagagctgtgctggttctccagcagaacctaactccgtttgcgaagtcgtttctcatagagctggagccgaagatccatctggaaattttccaggaggccgagatgcttataaacatcaaggaacatgtccttgttcctgagcatcaggtgctcacaaacgaggagaagaagacgcttctggagcggtacaccttgaaggaaactcagcttccaagaatacagatcacggatcctattgctaggtactacggcctgaggcgaggccaggtcgtgaagatatcaggcccagcgagacggcgggcagatacgttacataccggtacgttgtatgacagaacggtcagacac

SEQ ID NO: 83019 - DNA, 420 bp, Zea mays
aggtccagttgaatcaagaaaaggcgacggtgcaatgactgcatgtgaggtgctcttattccaccatgaagatatggggatcccatgggagattgcgaagctcggtgtccggcaagggatgtggggctgcgtcaagaggatagagcctggccttcgggcataccaggttgcgaggaccgctggagagcctatctcaaaacatgccgccatggcgcatgttaccaccaggttcgatgctgacgagctcgtcacggaagacagcgtggaggccagttcatccactgacaacaacaagaccaccgaggttgagaagccaaagcactggacaaacaacatacccaaggttctcatgatcggtggcgccgtcgccctggcttgcacctttgacggtggattgctgaccaaggccgccatattcgg

SEQ ID NO: 83020 - DNA, 413 bp, Zea mays
agggggcgagcaggtgagcgtgacggtcacgggccacagcctgggcagcgcgctggcgatgctgtgcgccttcgacatcgcggagacgcgcgcgaacgtgtcgccgggcgacagggtggcgccggtgtgcgtgttctccttcgccggcccgcgcgtcgggaacgtcgccttccggaggcggttcgagcgggagctgggcgtgcgggcgctgcgcgtcgtgaacgtgcacgacagcgtgcccaaggtgcccggcgtgttcttcaacgagtcggcgttcccggagctcgtcctgcgggcggcggacaggctgggcctcggcggcgtgtacacgcacctgggcgtgctgctgcagctggaccacaaggtgtcgccgttcctcaaggagaccctggacctctcgtgctaccacaacc

SEQ ID NO: 83021 - DNA, 380 bp, Zea mays
agaagagaaggttgtgaagaataaagcaagctcaaaagcagatgaatctgagctcagattagcacagcttcaacatcagctcccaaccaatgaacctggtgcactgatgaatcttgtagaagaatcaactgccgatgatgcagatgatgatgatactaaagattgtaaaggtttatttaagaacttaaagttctacttgagtcgagaggtgcctagggagtccctgttatttataattccagcgtttggagggactgtttcatgggaaggagaaggagctccatttaaagaaatagacgaagatatcactcaccagattgttgataggccgacacaaagccatgttttcctctccagggattatgttcaaccacagtggg

SEQ ID NO: 83022 - DNA, 435 bp, Zea mays
cccacgcgtccgcccaaggcaaccaaaccatctcgactcgtggggaagattcgctctcgccggcgtcgacggcctagggttcgaggaacgtccgtccgtccgtccggtgaaggagcggtagggaggcggagatgatcgaggtggtgctcaacgaccgcctggggaagaaggtgcgggtcaagtgcaacgaggacgacaccatcggcgacctcaagaagctggtggcggcgcagacggggacgcgccccgagaagatccgcatccagaagtggtacaacatctacaaggaccacatcaccctcaaggactacgaggtccacgacggcatgggcctcgagctctactacaactgagccgccgcccctctctccctctcgtcaggtactagcagtagcagcgactggttccctctacaactcgatttcctttcgattc

SEQ ID NO: 83023 - DNA, 411 bp, Zea mays
cccacgcgtccgcccacgcgtccgctgatggttactcgctgtgcgccaaggagatgaccaagctctctggtatctcggacatcatcccagagatggagatctgtgacttcgacttcgagccctgtggctactccatgaatgctgttcatggccctgctttgtcgaccattcatgtgaccccagaggacggcttcagctatgcaagctacgaggtcatgggctttaacccgggctctttctcttatggtgacctggttaagagggtgctgaggtgctttggtccaactgagttttctgttgccgtgaccatcttcggtgatcgggacaatgcgaagacctgggggacgaaactggatgctgaggcctatgcttgcagcaacatggttgagcaggtgctgccgtttggtggct

SEQ ID NO: 83024 - DNA, 408 bp, Zea mays
  unsure (1)..(408): unsure at all n locations
cggacgcgtgggcggacgcgtggggaagattttccggtgccaattgccacggaataatgccttctactcagctcaacctccaaagcatgatggctctgacaaaccactctgtccaggagctcctgtatgccactggtgtggtacctggaaaggtgataaaatatgtagtagctgcaagaaagcaaggtactgttatgagaaacatcaggcactgcattggcgtactggtcataaaaatgattgcctccagataataagttctgttgcttcaaattcagttctgccagctgtaggaatagggatttgtttggcttccaaatggtttgttggtcctaaaatagtcagaatcacatgacatctgtgctatagatatggacctcggtggttttctccacattangaaagctg

SEQ ID NO: 83025 - DNA, 408 bp, Zea mays
ccacgcgtacgctgaagaagcaggagctgcagtagctgcggaatcttctactggtacatggacaactgtttggactgatggacttaccagtcttgatcgttacaaaggacgatgctatcacatcgagcccgttcctggggacccagatcaatatatctgttatgtagcttatccattagacctatttgaagagggttctgttactaacatgtttacttccattgtgggtaacgtatttggtttcaaagccttacgcgctctacgtttggaggatctacgaattccccctgcttattcaaaaactttccaaggtccgcctcacggtatccaagttgaaagggaaaagttgaacaagtacggtcgtcctttaatgggatgttctattaaaccaaaattgggattatccgc

SEQ ID NO: 83026 - DNA, 361 bp, Zea mays
agcgaagagaatgaaatgatgctggaccagatggcggatgcagctgagaccattgcagtgactccagaggagaacgaagctatacttcgtcttgaagggatgggctttgaccgggcactggtcctggaagtgttcttcgcgtgcaacaagaatgagcagctgaccgccaactacctcttggatcacatgcacgagttcgacaacgatgacgggctcggagggccaccgctatgagggcgctctcgatccctacatcatgcgaacgaaggctgtagggcagtagtaagaaaacgttttgggaatcctcccgtccggtcgctcactctacaaattcgtttggctttgctgtttaatacaaaat

SEQ ID NO: 83027 - DNA, 365 bp, Zea mays
acgcgtccgcccaagcgtccggtgatcagagtctgagcgaatttttaatcaaatcgtcctaaaatgccactttttggattcagcctattcaaaaaagtcgtcccgggagtctcggcccaatcggacgacgacgacgaactgatcgaccctcaggtaactataagggaatcgtgcgcccctcactgtgcctctctcaaagcgaaactcgacgaatgcaacgcccgggtgaactcgaggtccgcgaccaccgaaacttgcaccgaggagcttttcgatttcgttcattgcatcgaccattgcgtctccaaatcgcttttctctaaactcaaatgaaagaaggacgacggaaccacccttttagcgtc

SEQ ID NO: 83028 - DNA, 426 bp, Zea mays
atccaggacaaggagggcattcccccagaccagcagcgtctgatctttgcgggcaagcagctggaggatggccgcactctcgcggactacaacatccagaaggagagcacccttcaccttgttctccgcctcagaggtggtatgcagatctttgtaaagaccctgactggaaaaaccataaccctggaggttgagagctcggacaccatcgacaatgtgaaggcgaagatccaggacaaggagggcatccccccggaccagcagcgtctgatcttcgccggcaaacagctggaggatggccgcaccctagcagactacaacatccaaaaggagagcaccctccaccttgtgctccgtctccgtggtggtcagtaagtcatgggtcgtttaggctgccgatgtgcctgcgtcgtctggtgccctctc

SEQ ID NO: 83029 - DNA, 392 bp, Zea mays
gcgcaacccctacatcaccaccctgaacgtgttccaggcctacacgctgaagcggataagggaccccaacttcaaggtgacgccccagccgccgctgtccaaggagttcgccgacgagaacaagcccgccggactggtcaagctgaacccggcgagcgagtacccgcccggcctggaagacacgctcatcctcaccatgaagggcatcgccgccggcatgcagaacactggctaggcggcttctcttcactcacctgcagagtgcaccgcaataatcagcttccggatggtggcgttttgtcagttttggatggaaatgccgaactggcagcgtctgttttccctatgcatatgtaatttcctgcctctttatattcactcttgtggtcaag

SEQ ID NO: 83030 - DNA, 386 bp, Zea mays
cccacgcgtccgcggacgcgtgggagtgctaccaagaacaggaaggaaacaccgccgccgccgcgccttccattccagtactcgcggaggaaaggaacaccagccagcgccatggtcacgtcgacgaccgccgccgccgtgctgtccccgccgtccgtggccgggcttcgcctggcgccgtctccccgggcgcgcgtggcgttccgcgcggcgccggcgcggcggtccgtggcggcgcgcgcggagctgagcccgtcgctggtgatcagcctgagcacgggcgtgtccctcttcctgggccgcttcgtcttcttcaacttccagcgggagaacctggcgaaccacgtgcccgagcagaacgggaagacgcacttcgacgccggcga

SEQ ID NO: 83031 - DNA, 423 bp, Zea mays
tgttcttatgcatgcagcagccataagcattgctactagcgtctcctgcacgtgctgtgtcgtttccagggtttcatgcggggcgaagcagctggtctctgccgcctgaacgccgccggaatctgcgaggcctccccgagctgcgtgcgtcgtcggataaggcagccggcacggcaatgccggttccgcttgctccgtacccagctcctccggcgccattcacgccgcccaatggggcccagagccagctcgtctgcaccgggtgccggaacctcctcatgtacccagctggtgcgacgtcggtctgctgcgccgtctgcagcaccgtcaccgccgtgccggctccaggaactgagatggcgcagctagtgtgccgaggatgccaaaccctcctcaggtacatacgcggcgcgacgagcgtgc

SEQ ID NO: 83032 - DNA, 417 bp, Zea mays
agcggacgcgtgggcgacaactctctaccgtccgagaccccaagcaccagcgcggcggcggcggcggcggcggcggcaaccatggctgtcgggaagaacaagaggatctccaagggaaagaagggtggcaagaaaaagaccgtcgaccctttctctaagaaggattggtatgacatcaaggcaccgtcggtgttcagtgtgcgcaacatcgggaagagtctcgtatccaggacacagggtaccaggattgcttctgagggtctgaatcacagagtctttgaggtttgcctagctgatcttcaaggcgacgaggattaagcttacaggaaaatcacgctccgtgctgaagatgtgcagggcaggaatgtgctcacaaacttttgggggatgaattttaccactgataaattgagatcc

SEQ ID NO: 83033 - DNA, 427 bp, Zea mays
agcccacgcgtccgcccacgcgtccgcccacgcgtccgcccacgcgtccggaagaagacgagtgtcaagtgaacctgaaacttgcggtgtcactggctggtatagcctgagtgtgagtgagtgatcgagctagctgagctccgatcctcgctagctagctaggataccgccataccacaagtcttcttcacaagtttaggagtgacagcaacaagagatctcgatggcctctgccaccgtgctcaagtcctccttccttcccaagaagtccgaatggggcgccaccaggcaggccgccgcgcccaggccgcccaccgtctccatggtcgtccgcgcctccgcctacgccgatgagctcgtgaagaccgcgaaaacgatcgcgtccccgggggcggggcatcctgccgatggacgagtcgaacgcgac

SEQ ID NO: 83034 - DNA, 341 bp, Zea mays
gtcaaggtcaatgcaccacagaaagaagattcttagtatacaagtgtacggtggtctccattctgccgagtacgaaaccatagtgcaaaatgctccgccaccgccgtcgtgtgagataactgatatttatggcttcaggaggtcgaggcctttatatggatcattcaggggaggcgttggtcagatgaagctatacttcaacattttctcatcattctgtaaaattctgaaaaagagtcatctttctgttcaactgcatctacgttgattgttttttcattgcgaacactctagtaggcgatttatctacggttttttcactatattcattaagatattat

SEQ ID NO: 83035 - DNA, 366 bp, Zea mays
aggtttacatgcataccaacaggtgtcttacatgattttggcgatggtgtctcctgtcactcattctgtgggcaactgtgttaaacgtgttgtggtcattgtaacatcagtgctgttcttcaggacacctgtttctcctatcaactctctcggtactgcgattgcacttgccggagttttcctgtactcacagctcaagcgacttaagcccaagccgaagacggcttaaatagggattgtattttccatctctttgtgttaatggagttaaacacttctatgtttcaggtgactgcattttaaaagatttgtgcttataacaacaaatgaaaaaccgcaaacggaaaaaaaaaaagggcggccgct

SEQ ID NO: 83036 - DNA, 433 bp, Zea mays
agtgatttgcagaaaagagtagagattaagacccctgatctcatagaaaggatgagagtaacatgtcgaattgcaagagaggttttagatgcagctgctcgtgtaattaaaccaggaattacaacagatgaaattgatagagtcgtccatgaagagacaattgctagaggtggatacccatctccattgaattactatttcttccccaagtcatgttgcacgtctgtcaacgaagtcatttgccatggaattccagatgccaggaaacttgaggatggtgacattgtaaatgttgatgtaactgtatactataaaggtgttcatggtgatttgaatgagacatattttgttggaaatgttgatgaagcttccaaacaccttgtacgttggtcctatgagtgcttggagaaagctattgcgatagttaaacctg

SEQ ID NO: 83037 - DNA, 406 bp, Zea mays
atagcaccaacgtgtatgcttacatctcaataatcgctctaattgtttgcattccacctgcattgatctttgaagggcccaagctaatgcagcatggatttagtgatgccattgcaaaagtaggtttgacaaagtttgtcagtgacctattcttggttggactgttctaccatctgtataaccagattgctacaaacaccttggagcgagtggctcctctgacacatgctgtcggcaatgtgttgaaacgtgtttttgtcattggtttctcaatcatcgtttttggcaacaaaattagcacacaaactggaattggcacgtccattgccatagctggtgttgctatgtactcttacattaaggctaagattgaagaggagaaaaggaaaaagagcgcatgactgct

SEQ ID NO: 83038 - DNA, 365 bp, Zea mays
agacgacttgtttcattgattcttgaagagatcgagcttcttttgcaccacaaggtcgaggatgtcttgcaactgcggatcaagctgcggctgcggctcaagctgcaagtgcggcaagaagtaccctgacctggaggagacgagcaccgccgcgcaggccaccgtcgtcctcggcgtggccccggagaagaaggccgcgcccgagttcgtcgaggccgcggcggagtccggcgaggccgcccacggctgcagctgcggtggcaactgcaagtgcgacccctgcaactgctgatcacatcgatcgacgaccatggatatgattattatctatctagcttgtggtggtggttgaacaataataagcg

SEQ ID NO: 83039 - DNA, 371 bp, Zea mays
agcttttccccaaggcaaccaaaccatctcgactcgtggggaagattcgctctcgccggcgtcgacggcctagggttcgaggaacgtccgtccgtccgtccggtgaaggagcggtagggaggcggagatgatcgaggtggtgctcaacgaccgcctggggaagaaggtgcgggtcaagtgcaacgaggacgacaccatcggcgacctcaagaagctggtggcggcgcagacggggacgcgccccgagaagatccgcatccagaagtggtacaacatctacaaggaccacatcaccctcaaggactacgaggtccacgacggcatgggcctcgagctctactacaactgagccgccgcccctctctccctct

SEQ ID NO: 83040 - DNA, 408 bp, Zea mays
agctccgaagtcaagtccaccccgttgcagccctacagcgaggtgttcggcctccagcggttccgcgagtgcgagctcatccacggccgctgggccatgctcgccaccctcggcgccctctccgtcgagtggctcaccggcgtcacctggcaggacgccggcaaggtggagctggtggacgggtcctcctacctgggccagccgctgccgttctccatctcgacgctcatctggatcgaggtgctcgtgatcggctacatcgagttccagcgcaacgccgagctcgacccggagaagaggctgtaccccggcggctcccacttcgacccgctcggcctggcggccgaccctgagaagaaggagcggctgcagccggcggagatcaagcacgcgcggctcgccatggtc

SEQ ID NO: 83041 - DNA, 414 bp, Zea mays
agcggacgcgtgggcggacgcgtgggcggacgcgtggggcaaagctaagcacagagctagcaagtgaccgaccgagagcaaacaggcaaggcaagatggtgcagcaacagcaagccgcgaaggaggtgatcccgctgctgacgccttacaagatggggcagttcgagctctctcaccgggtggtgctggcgccgctgacgaggtgccgctcctacggcaacgtgccgcagccacacgccgccgtgtactactcgcagcgcgccaccaggggtggcctgctcatcgcggaggccacgggggtgtcggccaccgcgcaagggttcccggagtcccctggcaatcgggacgcacgagcaggtcgaggcgtggaagcccatcgtcgacgcggtcaccggcaagggggccatcttcgtc

SEQ ID NO: 83042 - DNA, 335 bp, Zea mays
agcccacgcgtccggttctttactcaagcgttcattttatatgaagaagaaatcacggattcaaaggctcagatcactgcaattcacctgataattgggacccttcagcggatgaatatatttggggtggaaaatagagacaccctcactcacaagacaacagggtactcagcaaaacttctcaagaagcctgatcaatgccgagcagtctatgcgtgttcacatcttttttggactgatgagcaagatggtataatggatggtgaaagggttctcctttgtttgaagcgtgccttgagaatcgcacatgctgctcaacagatggctagcgctac

SEQ ID NO: 83043 - DNA, 433 bp, Zea mays
cggacgcgtgggcggacgcgtgggttctcctccaccgtcggagctccggcctccaccccgaccaggagcagcttcctcgggaagaagctcaacaagccgcaggtgtccgcggccgtgacctagcatggcaagagctccagcagcaacagcaggttcaaggcgatggctgccaaggaggtggacgagacgaagcagaccgacgaggacaggtggaatggcctggcctacgacatctcggacgaccagcaggacatcaccaggggcaagggcctcgtcgacaacctcttccaggcgcctatgggggacggcacccacgtcgccgtgctcagctcctacgactacatcagccactgccaaaagttctacagactccaccaacattatggatgggcttcaacatagccaagggcttcatggacaagctcgtcgtcca

SEQ ID NO: 83044 - DNA, 374 bp, Zea mays
agaggccatccattttgtcaacctgcggacagctggaaggtctagtggaaacctggctatgaactccgtaccgaaaccagcacttgggtccgaaacatcttggagggaggattttgctgtgggggataaggatgctgtggtcattgttgatcatgggtcaagacgccaagaatccaatctcatgctaaatgactttgttgagatgttccgggcgaagactagctatagtattgttgaggctgctcatatggagctagcggagcctactataaaggatgcttttgggaaaagttttgcaacaaggagcatcacgagttattgtcagtccatatttcctttcccctggacgacactggaagcaagacattcctgct

SEQ ID NO: 83045 - DNA, 425 bp, Zea mays
agctccctctccgaaatcaaggtagcgtacaccgctgcagtttctagagccctctctgccactcgtgatcccactagtcacaatgcctgccctcgccaagcccgcctcccgcaccgccaagcccgccgcggctccgaagccgaagcctgccgccgccaagccgaaggcggccaccgctggtgcctcccacccgccttacttcgagatgatcaaggaggctatcacggcgctcaaggagaggaccggctccagctcgcaagcgatcgccaagtatgtggggggacaagcacggcgcgtctctgccggccaacttcaaagaagatgctttccatccagctccgtgggtccgcagccaagggcaagctcgtgaaggtcaaggcttcgtacaggctctcggacgccgccaagaaggatcccccaagacc

SEQ ID NO: 83046 - DNA, 369 bp, Zea mays
agacgtgttccaggcctacacgctgaagcggataagggaccccaacttcaaggtgacgccccagccgccgctgtccaaggagttcgccgacgagaacaagcccgccggactggtcaagctgaacccggcgagcgagtacccgcccggcctggaagacacgctcatcctcaccatgaagggcatcgccgccggcatgcagaacactggctaggcggcttctcttcactcacctgcagagtgcaccgcaataatcagcttccggatggtggcgttttgtcagttttggatggaaatgccgaactggcagcgtctgttttccctatgcatatgtaatttcctgcctctttatattcactcttgttgtcaagt

SEQ ID NO: 83047 - DNA, 391 bp, Zea mays
agcccacgcgtccgcccacgcgtccgctgatcatcttgtactaggaaaaaatactgattattcagaattacagaattacgcctccttatattttactgagatctccgagctactgaggagattaccaagggttatattgttgatgcttaaaacaaatgactgtttacgtgcagtcagtcatgccctggttgggggcagttccttggagtcgtttatgattattggacgggtatcttctgaagctgtgctggatgctaaaaggatgaacaggaggtcctttctcgatggattgaagatatggctggaggaagccctgctggaagctcgattctttactttgaagctgatgctaagtgttatgcaacttaagaagttgttgcctggctaaaag

SEQ ID NO: 83048 - DNA, 279 bp, Zea mays
agcccacgcgtccgcccacgcgtccggaaggagaaacatatggggagttgaacgagtgctgcaacttcacaaccagttacctagccagcattcttttgcttttcccctgtatattttccattcagtgtcattcgtatggtggtgttgggtctctttagacaaactggggactgttgcttatcctaaaaattcgattgtattgtgtggcatgaaatgatcgatgtcaaagaatattttgaacatgctgccacctaattatacttttcatatgaacatcat

SEQ ID NO: 83049 - DNA, 213 bp, Zea mays
agggagtcaacggaactgttgcccatgaattcatcattgatctaagggcatttaaggcgactgctggtatagagccggaggatgtggcaaagcgcttgatggactacgggttccacgcaccgaccatgtcatggcctgttcctggcacacttatgattgaaccacctgaaagtgagagcaaggccgagctggacaggttctgcgacgctctta

SEQ ID NO: 83050 - DNA, 437 bp, Zea mays
ctccacattaggatgtatatattaatcatcctattttaatatatattaatcatcctattttaattaggttctaatccaattagtagtaagtattttcttttttatttaatagtctctgactatcattaaataaagggtagagcaattcttttttctagagattctagagaaagtgagacaaagtgaagcgaaagagttttctttgtataagaattaggtctatatcatatctaaatagaagggaaatcagaaagaagggaagtggggattacattggatgaatccttaaggaagacatatcacactagaaataaaggctaaagtatgcgctccttgcctttggtttgagcaaaacagattcttgtttcaccgaggaaaagagagaagttctggataaattgacaatgtcaacttgaattgactaattcagttccgcc

SEQ ID NO: 83051 - DNA, 370 bp, Zea mays
aggggagaagatgacccagattatgttcgagactttcaatgttcctgccatgtacgttgcaattcaagcagtgctgtcactctatgccagtggacgtactactggtattgttctcgactctggtgatggtgtgagtcacactgtgcccatttatgaaggatatgcccttccccatgccattcttcgtctggatcttgctggtcgggacctcacagactccctcatgaaaattctcactgagaggggttattccttcacaacctctgccgagcgagaaattgtgagggacatcaaggagaagcttgcatatatagctcttgactatgagcaagagttggagactgccaagaacagctcctcagttgagaag

SEQ ID NO: 83052 - DNA, 409 bp, Zea mays
agcgacaaagatggcatccatcaggaagtcttccttcatggtcccatctgctgacacctatgctcgtgctgccgttcgtcacattggatacgagcctaggtgcacaccatactggccacactctgtcgtgtggttcttgatctccattcttcccgagtcccttatcgacagcgtgcgcctgggcatgtgcattaagatccgcaagaaggggctggccaaggacgccaagaagaaggcgctgtgattgatgtttcagaatgcatgttcagattcgcacatttcctcatcacctgtagtagacacgtgccttgctgtagtcactttattagctaccattgcctcctgagtctgttaagaatcgagaatgtcattgtttcatccgcggttatgatgatgaaaaatacgattc

SEQ ID NO: 83053 - DNA, 150 bp, Zea mays
atccggagttaatgagaatactgatggatgttaagggattaagctggagtgaggcatggagtattacagaaagaaccgtggcatacactaaccatacagtgcttcctgaagctccaaagaaatggggcttgggcaaaatgcaaaaacttt

SEQ ID NO: 83054 - DNA, 425 bp, Zea mays
cccacgcgtccgctcataaacaatgcagggatcatggcctgcccttaccagctgtccaaggatggaattgagctgcaattcgcaacgaatcatgttggccatttcttgctgacaagtctcctgctagacaagatgaaatcaactgctgcagagacaggtgtgcagggaaggatcataaacgtatcatcggtcgcgcataaaagaagtgatggtacatgctttgagctgaacaagctaaacgataaggctaggtaccaaccgttcattgcatacgcgcattcgaagttagccaatgttctccacacaaatgagttatccaggcgttttcaggaagaaggatgcaatctgacagcgaattcactgcatcctggagtgatcgtcacaaataacaatcgccaggttgctggaaacagtgcgctgatttc

SEQ ID NO: 83055 - DNA, 435 bp, Zea mays
cccaagcgtccggcagaggtcccgcggcttcggcttcgtcaccttctccacggaggaggcgatgcggaacgccatcgagggcatgaacggcaaggagctggacggccgcaacatcaccgtcaacgaggcccagtcccgcggcggccgtggaggcggcggcggtgggtacggtggtggccgtggaggcggcggctacggcggtggcgggcgccgtgatggcggcggcggctacggcggtggcggcggctacggtggcggcggcggctacggtggtggtggcggcggctacggcggtggcaacgtggccggggctacggcaactccgacgggaactggaggaactgagcggtggggcccgcgcgggcaagttatcctgttcgctgccgtgatgtttaccctagtccagagggtttatcttcgttcgtctcgtgtttg

SEQ ID NO: 83056 - DNA, 437 bp, Zea mays
  unsure (1)..(437): unsure at all n locations
aggggagccaatggagtcggtgggtcggagtccgagcggaagccgctgtcagaggtggtcggcgactgcgtccagcgctggttccaggacgcgtacaaggaggcgcgcaaaggagacatcgccaaccaggtgcttgtagcgcagatgttcttctcgggttatgggacccccaagaacgagtacaagggaaaacaatggatggatagagcatcaaggttcaggtcttccgctttgaaggttggcatgaaacgtccaggatacaatgcaagtgactcagactctgatgacgatgcanatgatgacgccaaccaataacactcaattacaaattgagttattagttaggagattcacagggaattttccttggtgctgggacttcagggtcgaattacttggtggtttatgcatttattaacactgtgtttgaattgtga

SEQ ID NO: 83057 - DNA, 412 bp, Zea mays
ccgccccgcgcccgaggacgacgacagggaggagggcgagatcaccgacatcgcctgcgctccttccccgcccgccacgcacccgctcgagcactcctggaccttctggttcgacaacccgcagagcaagtccaagcaggccgcctgggggagctccatccgcccaatacacaccttctccatcgtcgaggaattctgggggctttacaagaacattaatcaccctagcaaattgatcgtgggagctgatttccattgcttcaagaacaagatcgagccacaatgggaagaccctatttgtgcgaatggtggtaaatggaacatcagctgtggaagaggaaaatctgatacgttctggctgcacactctgctggctatgattggtgaacaattccactagggtgatgaaatt

SEQ ID NO: 83058 - DNA, 379 bp, Zea mays
cggacgcgtgggtaatattctgcagtagtttctcgagctcctgtagcaagaaagaaaccatgtcgggggtatgggtgttcgaggacgggatcgtgcggcgtgcggacagcgacccgcccagcggcgccggcgccggcgggtcccggccgaacaaggtgctggtgcacgttcccagcggggaggtggtgacgtcgtatgacgtgctggagcggcggctacgcgagctcggctgggagcgctacctctacgacccctgtctgctccagttccaccagcgctccaccgtgcacctcatcaccgtaccccgtgacttctcccgcctcaagctggtccacatgtacgacgtcgtcgtcaagacccgaaacgtcttcgaggtccg

SEQ ID NO: 83059 - DNA, 395 bp, Zea mays
  unsure (1)..(395): unsure at all n locations
cccacgcgtccggtggcgtataggagcaaagttggtctctgatctttcccctgcaagggaaagagaagaacagagacctctgcccctctcgtcactctctctctctctcacaccaccagtgtagtatagggtttcggcttgcctgtgcgtgttactgtcgcaatggcaggaggtctcttctccatggagcacccatgggcctctgtttttggcattctaggcaacatcatctcatttctggtgttcctcgcaccagtgccgacgttcctccgcgtgtaccggaagaagtcgacggaggggttcagctcggtgccgtacgtggtggctctgttcagctgcacgctgtggatcctgtacgcgctggtgaagnacaactccagcccgctgctgaccat

SEQ ID NO: 83060 - DNA, 448 bp, Zea mays
  unsure (1)..(448): unsure at all n locations
acgcgtcagcggaagcgtgggctggcttctcctccccctcttaccaagtcctcctcgggttagggttccttagggttttgtggaggggcgatggcggcggctgatgtggagtaccgttgcttcgtcggcgggcttgcctgggccaccagcaacgagtcgctggagaatgccttcgcctcctacggcgagatcctcgactccaaggtcatcaccgaccgggagacggggaggtcccgcggcttcggcttcgttaccttctcctccgagaactccatgctcgacgctatcgagaacatgaacggcaaggagctcgacggccgtaacatcaccgttaaccanggcccagtcccgtggcggtggcggtggccgcggtggctacggcggcggtcgcggcggcggcggcggttatggtggcgggcgccgtgacggcggttatggccgcggtggc

SEQ ID NO: 83061 - DNA, 330 bp, Zea mays
agccaaaaggcatcaccgccgcgacgacgatggcagcctcgctccaagccgcggccaccctgatgcagccggccaagatcggcggccgggcgccctttgcctcgctgccgtcccgcccgtcgtcgcaactcgcctgcagggcgttcggcgtcgacgccggcgccgccaggatcacgtgctccctgcaggacgtcgccagcaggtgcgtcgacgccgcgaagctcgccggcttcgcgctcgccacctcggcgctcctcgtctcgggcgcgagcgcggagggcacgcccaagaggctgacctacgacgagattcagagcaaaacgtacatgg

SEQ ID NO: 83062 - DNA, 363 bp, Zea mays
agcccacgcgtccgcaagaagcgcagcgcccatggccatggccacgcaagcctccgccgccacgcgccacctgctggccgccgcctgggcgccggcggcgaagccgcggcagctgagctcgcagctcgcgctgccgtcgtcgtcctcccgcgggccggccccgctccgcgcgtccaccgaggaggcggtggaggcgcccaaggggttcgtggccccgcagctggaccccagcatgccgtccccgatcttccggcggcagcacgggcgggctgctccgcaaggcgcacgtggaggagttctacgtcatcacgttgacgtcgcccaaggagcaggtgttcgagatgcccaccggcggcgccgcca

SEQ ID NO: 83063 - DNA, 350 bp, Zea mays
gacccacgcgtaagctcatccccctccggttcgggttcgggttcgtgaggttctccggggttcgggttcgtgggtgagcggatcgagatggcggcgtcggatgttgagtaccgctgcttcgtcggcggcctcgcctgggccacggacgaccactccctccacaacgccttcagcacctacggcgaggtcctcgagtccaaggtccgttcccgtcccagatccgtccatggcttcgtccagatctgacctgtcctgacacaccctcacccggatctgtccctccttcccctctcccctgcagatcatcctcgatcgggagacgcagaggtctcgcggcttcggcttcgtca

SEQ ID NO: 83064 - DNA, 353 bp, Zea mays
cggacgcgtgggtcgcgatccagaagaccaagctcatgacccgcctcacgtacacgctggacgagatcgagggcccgctcgaggtcggctccgacggcacgctcaagttcgaggagaaggacggcatcgactacgccgccgtcaccgtgcagctcccggggggcgagcgcgtgccgttcctcttcaccgtcaagcagctcgtcgccaccggcaagcccgagagcttcggcgggcccttcctcgtgcccagctaccgtggctcctccttcctcgaccccaagggccgcggcggctccaccggctacgacaacgccgtcgcgctccccgccgggggcagaggtgacgaggaggag

SEQ ID NO: 83065 - DNA, 432 bp, Zea mays
  unsure (1)..(432): unsure at all n locations
agtggcgactggatgctcgtcggcgacgtcccctggaagatgttcgtggaaacctgccagcgccttcgtctgatgaaaggttcagaggccgtgaacttggcaccaagagccgcccgatgaggcacactccgttgggcgttggcacgcacgcacgcactggcgtcttgaaggaaagggggaactctgctggtcttgatgaggatcttcacgtgagatangaacgtgtgtacagttgtccccttatggtattgagttgaggaaacttggaagttccattacttgtctgtagtctccactttatatagatgcgataagcttgagatacacattgcctacaatgtcttttgatgaatangaccagacagcaccgaacccgaactccgtcctccacacgggttgctttgccatctcggtggttttgtggtggtggtg

SEQ ID NO: 83066 - DNA, 361 bp, Zea mays
agcaagaaaacaacgcagagctcaccagggaggctgttgatgttttcatttggtgcttaactcaaaatgcagagtcttacaagcagtgggaaagaatttatcttgaaaatattgaagccagtgttgctgtcctgagcaaagttgtgattgattggagggatgtgtctcctaagctcagttctgaagctctcaaggcaacagtgaagaactttaaggctaagaatgaggctgcgctggagtccacaacagatgctggaaagcaggcatctatcaaagaagcagacaagcactgcaaggcgatctttggaaagctgacccgtggcgccacctgcctgaagagcagcctggtggtcatcgcgct

SEQ ID NO: 83067 - DNA, 314 bp, Zea mays
  unsure (1)..(314): unsure at all n locations
acgggagggacttatgtcaccacaaacagaaactaaagcaagtgttggatttaaagctggtgttaaggattataaattgacttactacaccccggagtacgaaaccaaggatactgatatcttggcagcattccgagtaactcctcagctcggggttccgcctgaagaagcaggagctgcagtagctgcggaatcttctactggtacatggacaactgtttggactgatggacttaccagtcttgatcgttacaaaggacgatgctatcacatcgagcccgttcctgnggacccagatcaatatatctgttatg

SEQ ID NO: 83068 - DNA, 410 bp, Zea mays
gaggtatgctacctaccaaaaccctcacggatccctggcatttcgatcgcctcactctgtaccccggacgagttgcagttggatctcagatcggtgatcacataaacaatggtgaaagctgttgctgtgcttggtagcagcgaaggtgtcaagggcaccatcttcttcacccaagagggagatggccctaccactgtcactggaagtgtctctggcctcaagcctggcctccatgggttccatgtgcatgcacttggtgacaccaccaatggctgcatgtcaactggaccacactacaatcctgcgagcaaggaacatggagcaccagaagatgagaaccgccatgccggtgatcttggaaatgtgacagctggagcagacggtgttgcaaacattaatgttaccgacag

SEQ ID NO: 83069 - DNA, 364 bp, Zea mays
aggacgcagattatgtttgaaaccttcgaatgcccagcaatgtatgttgctatccaggctgttctttcgttgtacgctaatgggcgaacaactggtattgtgatggattccggtgatggtgttagccacacggttccaatctatgaaggatacacacttcctcatgctattctccgtttggatcttgccgggcgtgacctcaccgaccacctaatgaagatcctcacagagagagggtactccctcactacgagcgctgagcgggagattgtcagggacataaaggagaagcttgcctacgttgcccttgattatgaacaggagctggagactgccaggagcagctcctctgtcgagaagagct

SEQ ID NO: 83070 - DNA, 433 bp, Zea mays
  unsure (1)..(433): unsure at all n locations
aggcacgacacgacaccaagtcgaggagctcgagggcaccaatcatggccggcgtgaactccagcgtcgtcgggctcaagcccgccgcggcagtgccgcaggccgccgccgcctcatcgccggcgaagcgggtgcagctggccgcgcccgagggccgccgcgccgctctgctcggcctggcggccgtcttcgccgtcacggccaccaccgggtcggccaaggccacgatcttcgatgagtacctcgagaagagcaaggccaacaaggagctgaacgacaagaagaggctggccaccagtggcgccaactttgcgcgcgcctacaccgtggagttcggcagctgccagttcccctacaacttcactgggtgccagggactcgccanccagaagaaagtcccttcatcagcgacgacctcgagattgagtgcgag

SEQ ID NO: 83071 - DNA, 358 bp, Zea mays
acgaccaagggatactactgtcctgccatgtaggcatatgtgcatgtgcagtgagtgcgccaaggtcctgaggtaccaaaccactcggtgccccatctgcaggcagcctgtggagcgtctcctggagatcaaagtgaacaacaaatctgaagatcagcagcagacgccccaatcgccaccgcgcccagacctggctccgcagcaggaaggggtgtagccgtgatcaaagtcagttctgaagtatttggcttgaatttgcggaccttcctgaaggtttgttctctcatttgggcaacggggaatgcaactggtacttttacctttagcatatgtaagcttctggcatcgcatggctttg

SEQ ID NO: 83072 - DNA, 402 bp, Zea mays
agtataaggtgaagctccaaagtcgttcctaaggggatgcagagcttaaagactccaatgacgtccctaaggggatgcagagtcttgtttgttccagtgtgggcgtgtgtgtgtgtgtgttcggcgtcaccatcatattgtatcatatcatcgcatcattccacataacattatgtaacaccctaaagttcactcttgtgaaaatgaggaaaattctccaatcaaacacctttccttgagaatattcataatttcaaagttgctactccaaaaattaacataattttgttttaaactaaaataaaagatacctaaataaactaaattacccttagagtgaaattataagaattatgattaaactatttcttaatatataatctacaatataaattatattcc

SEQ ID NO: 83073 - DNA, 415 bp, Zea mays
agggagcagctgctgttcaagggcaacccgggccccaagaagctgctcaagatgaaaaaggggaaaccgttcatcccggatttcaaactggcgttcgagcaattctgcatccaagccggggggcgttccgtgctggacgaactggagaacaacctggcgctcaaggattgggaaatggaaccctcccggatgaagctggaacggttccggaaaaagtccagcagctcgctctggtacgagctggcctacagcgaggccaatgggaggatccggcgccgccaccgggtgtggcagatcgcgttcgggtcagggttcaagtgcaacagcgccgtgtggagggcgctccggtcggtgaacccggcggaggagacgaacccgtggatggacgagatcgacaggtttcccgtggatgttc

SEQ ID NO: 83074 - DNA, 398 bp, Zea mays
  unsure (1)..(398): unsure at all n locations
agccgcttcccgctccgatcgacctgctccctctccaccaccgaaccccaagggggccagcctcacccgacgaccaaaattccccgagttcaaagaaggcctcaacctcctccacaaagaacggggaatggttcctcaagaacaaaggatctggggcactgtcatgcgcaccctggggcaaaatcctacagaagctgagctcaaggacatgatcaaagatgtcgatgctaatggcaacggcaccatcgatttcccagagtttctcaaccttatggctcgcaagatgaacgacaccgactctgangaagagctcaacgaggccttccgtgtgtttgacaaggaccagaacggcttcatctcggacgccgagctccgccatgtcatgacaaatcttggtg

SEQ ID NO: 83075 - DNA, 109 bp, Zea mays
aggtaatctatgatggcaatgtttgcctggtcatgaagtattattactttcgttgaaaccgtgatgctattaagacttaattttttttatggaacatcgaatgtaaggc

SEQ ID NO: 83076 - DNA, 337 bp, Zea mays
acgcggacgcgtgggcgccgatcacacattggacttgcactggtgcttgctcataattactagttcatcagcaaacaacaaacaatggcaccgaggctagcgtgcctcctagctctggccatggcagccatcgtcgtggcgccgtgcacggcccagaactcgccgcaggactacgtggacccgcacaacgcggcgcgcgccgacgtgggcgtcgggccggtgtcctgggacgacaccgtcgccgcgtacgcgcagagctacgcggcgcagcgccagggcgactgccagctgattcactccggcgggccctacggcgagaacctcttctggggctccg

SEQ ID NO: 83077 - DNA, 385 bp, Zea mays
agcggacccttgggggcaacccacaggattggcaaaacaaaggaaacctcaattgcgaactcccaatttggccgtccaacggcccaatccaaaacggaacccctttgccgtcctaacccccggccaaattacaacaactggcccaggttcaaggaggacctcgttaatcccccggtccaccccggaccaaatttcagggcaccagtggacccctactaaaaaaggaagaggatgaggatgttttcttgtggagctatactagctcgctgctgccttttgttacaatgtttgtacggtcgcaataaatgtatggtcgtgtttgctcgagagctactcaggtgattttgtcgtgggagcaccaaaagcagaaaagaactgttttttt

SEQ ID NO: 83078 - DNA, 362 bp, Zea mays
ggaaaccctagccgccatatctcacgatccactcgagcaccaagccgagggaaggtgaggagcgatggcgcgcggcgtggtgtcggcgaagggcggcgcggtcgcgggcaagaagaaggggtcggtttccttcacgatcgactgcaccaagccagtggaggacaagatcatggaggtcgcctcgctcgagaagttcctgcaggagcgcatcaaggtcgccggcggcaaggctggcaacctcggcgactccgtcaccatctctcgcgagaagaccaaggtcaccgtcacctctgacggacccttctccaagaggtacctgaagtacttgaccaagaagtacttgaagaagcacaacgtgccgg

SEQ ID NO: 83079 - DNA, 352 bp, Zea mays
aagcggacgcgtgggcgtgcggcagttgctcacggatctggaggaggtcgaggaggtcaacaagcagctcgatcagatgggttacaacattggaacacgattggttgatgagttcttagcaaagtcaaatgtatcaaggtgtgttgacttcaaggagactgccgatgttattgcgaagcttggcttcaaaatgttcttgggcgtgactgcaaccgtgaccaattgggatgctgagggtacaagttgcagccttgtcctggaagacaaccctcttgttgatttcgttgagctccctgacacttgccaaggccttcagtattgcaatttgttaagtggagttattaagggggca

SEQ ID NO: 83080 - DNA, 376 bp, Zea mays
aagctcagtatagtgttcgtcacaatactgtgcacaccacaactaacagttatcaggtggtctccgaacccaccggtgtcagccgacgtcttgcatcagtggaaaggattctgtgctctaatcgcgaacgcttactatgtcaaaggaatggcatggttgccagtgaaaaccttgcagctggaacagatggctgtcacaggaagttcagagaaaccatcagtagttgctagccgcatgcagttagttttcagcacattagaggtagtcagcccacagtggccaagagtgtgattagatgaaagcaataccatcaaacaaaggtctgcagttttattctgaccaaaagatatgcatgtccaagttagcaagttcaaac

SEQ ID NO: 83081 - DNA, 426 bp, Zea mays
acgcccacgcgtccgcccacgcgtccggaaaacccagctcttcaaccctataggctccaacaagcaatcgcagcaagcaacatacctttatcacccttgtttcaacaatcgccagccctatctttggtgcagtcattggtacaaaccatcagggcacagcagctgcagcaactcgtgctacctgtgatcaaccaagtagctctggcaaacctttctccctactctcagcaacaacaatttcttccattcaaccaactgtctacattgaaccgtgctgcttatttgcagcaacaactattaccattcagccagctagctactgcctactctcagcaacaacaacttcttccatttaaccaattggccgcactgaaacccggctgcctaatttgcaccaccaattactactaccaatttagccagcta

SEQ ID NO: 83082 - DNA, 358 bp, Zea mays
acggtcttcagacaccatcgacaacgtcaaggccaagatccaggacaaggagggcattcccccagaccagcagcggctcatctttgctgggaagcagcttgaggacgggcgcacgcttgccgactacaacatccagaaggagagcaccctccacttggtgctgcgcctcaggggaggcatgcagatcttcgtgaagaccctgaccggcaagactatcacccttgaggtggagtcttcagacaccatcgacaacgtcaaggccaagatccaggacaaggagggcatcccaccggaccagcagcgtttgatcttcgctggcaagcagctggaggatggccgcacccttgcggattacaac

SEQ ID NO: 83083 - DNA, 381 bp, Zea mays
agtggacaacatgatcttcgtaaaatacaccctaatctgtatgtaattcagactacttatcagatacgacgcatgcacacaattactagggatccctccacagcagcacattatttcatattttatgccgatcggttgattcgattggttgtcgaacatggtcctggtcatcatcctttccagtaaaagcaggtcatcactccgactgggtctgtttacactggtgtggacttctccaaaaggttgtgtggtatctcactgattacgagtggcgaaagtatggagaatgcactacgtgcatgctgtaaacgtatacagattgggaagattcttattcatccggaaggtgacaatggacaacagctcatctatcataattta

SEQ ID NO: 83084 - DNA, 422 bp, Zea mays
aaggaggatttgagttttgcacaagtgatgaggatgaaccagagaatctgtttcgtaatgtttttcgagaccagcacacatattattggtctttttcatctgataattttcagaggaactccaaacgtgctcgctcacaaaaatccagaaactggagttttgaaacagacgaggaggatgaagtatcagctccatcagaggtatctttggcacgacaagctcttgggttgagcacttctggtccgcttaaacttgaagatgttaaaagcgcataccgagcatgtgcacttagatggcatccagatcgccacaatggatcatctaagtctacagcggaggagaaattcaagcattgcaatgcaacatacaagaccttaaggtgaaatttgggccgctgcatagataattttgaatgaagatgg

SEQ ID NO: 83085 - DNA, 364 bp, Zea mays
acgaaatctctaatactagatgggtgccggcgctggcgctgctcctgggacgacgagaacacgacgatcagccgcgcgcgtctatatactgcagtacaagaacacgacggaggcggcggtggacgcggcgcgcatcatcctccggcagtgcgcgctgtccggcacggtgaagcgcgtcatccacacggcctcggtcacggccgcgtcgccgctcaaggaggacggcagcgggtacaaggacttcgccgacgagtccaattggacgccgctcaacctctcctacgaattcaccaacgcttacctggacgtacgtaatacagtgctatataggactaatctatatattgactactcatgtgcatgc

SEQ ID NO: 83086 - DNA, 363 bp, Zea mays
aacgtacgcccacgcgtccgcccgaagcactggtcattggagtagtcgccttgttggtattcggccccaagggtctagcagaggtagccaggaatttggggaagactttgcgtgctttccaaccaaccattagagagctacaggatgtatcaagggagttcaggagcactcttgaacgagaaatcggaattgatgaggtttcccaatcaacgaactataggcccacaaccatgaataacaaccaacaacctgctgccgacccaaatgtcaagcctgaaccagcaccttatactagcgaggaactaatgaaagtaactgaagaacaaattgctgcatcagctgctgctgcttggaatccacaac

SEQ ID NO: 83087 - DNA, 364 bp, Zea mays
acgcccacgcgtccgcggacgcgtgggggcgcgccgctggccgccaccgcggcctccgtcgcgtcgccgctcccgcgcaagccggccacctccaccacctcgctcgaggtcgtcgcggcggggaagaagggctacaagatgaagacgcacaaggcgtcggcgaagcggttccgggtgacggggaggggcaagatcgtgcggcggtgcgccgggaagcagcacttgctcgccaagaagaacaccaagcgcaagaagaggctctcgaagatggtgcaagtcaacaagagtgactacgacaatgttacgggtgcactgccctacctcaaagtgaataggaaagcaaactgagagctacgtggtcttc

SEQ ID NO: 83088 - DNA, 370 bp, Zea mays
agcccaagcgtccgcccacgcgtccggtatcctctcagttgctgccattgataagggcactggaaagaaacaggacatcaccatcactggtgctagtacgctacctaaggatgaggttgagagaatggtagaagaagccgataagtttgccaaggaggacaaagagaagagagatgcaatcgacaccaaaaaccaggcggactcagtggtctaccagactgagaagcaactgaaggagcttggcgacaaagtccccgctcctgtgaaagagaaggtggatgtgaagctccaggagctcaaagacgccatttctggtggatcaacacagagtatgaaagatgccatggctgctctgaaccaggaggtgatg

SEQ ID NO: 83089 - DNA, 147 bp, Zea mays
  unsure (1)..(147): unsure at all n locations
agcggacgcgtgggcgctggaagcccgggtctggggttgggttggggaaagcccttttaaaactgtgttggtcaacttgcaattttaacctttccaatcgccgtttattgtgagttggtcctatannaaanaannanannnnnanaa

SEQ ID NO: 83090 - DNA, 413 bp, Zea mays
aggttctttcagctcggccacaaacaggatcatcactgccaaggaccatgcctctgtccagatcaacattggccacttggatgcgaatggcctgtatgatggtcacttcacaacatttgctctctctgggtttgtccgtgctcagggcgatgcagacagctccttggacaggctgtggcagaagaagaaggctgatatcaagcagtagattttacatctagtttaccaagaattggacactgccttagctatgttttgaattcatgtcactatatgcaatgttgtgatttcagctggtaccttaaatctgaagatttagtatctttgttgggttccttctgagtttgatgtgtggtgttcgtttaattcccctgtacaacccaatttagtaccattgtgaatattttggattc

SEQ ID NO: 83091 - DNA, 361 bp, Zea mays
agaaaatcaagatctcccgggaggttttttgacctagtttatcatgaaaatgcccgtgttctactgcatgatgagagcatataccgatttgaatgttgctcaagtccgacaaggttgtctattcagctgatggaatatggtcacgaaaagccagaagttaccgcagtatcaattgatccaaatttttcttcgtatctttttggcgagtatttatgtagtacgtcagacaagaaattatctgaaggcgtctaacttgcaaggaataagcggaaataatcagataatgatgaaccttcagatttttttgaaggaatggatggtatcaaagttgtgaatggtctcgaatgcaagatatcctgca

SEQ ID NO: 83092 - DNA, 342 bp, Zea mays
acggtaagttcatgaccgaaccggttaggatccttgtgaagcgtgatgagctgaccctggagggcatcaaacaattctttgttgctgttgagaaagaggagtggaagtttgatacactttgtgatctttatgatacactcaccatcacccaagctgttattttctgcaatactaagagaaaggtggattggctcactgaaaaaatgcgtacaaataacttcaccgtatcagctatgcacggtgacatgccccaacaagaaagggatgccattatgggtgagttcaggtctggcgcaactcgtgtgctaataactacagatgtttgggctccaagactggacg

SEQ ID NO: 83093 - DNA, 360 bp, Zea mays
acgcatcgtcccacgggctggcctccacgcctggcgccaatctccacgacgacttgccggccggccgtcttggcgactgccgcggcccataagaggagcctgctgctggcgacggcctccgagacgaggggagtcgcgccggtgaggtccagcgggatcgagaccagcacggtgggtctgggatgtgaggccgtcaccgggcaggtcacggaggtcaacattgacactttctggcccatcgtctaggccgccggcgacaaggtcgtcgtcctcgacatgtacatcgaatgctgcgggccttgctatgtgatggctccgaaattccaggagatgtctgataagaatctggatgttgtgttc

SEQ ID NO: 83094 - DNA, 406 bp, Zea mays
acgggaggcgggctcatgaagacgctgtggctcggctcgctcttcggcctctggtacctgttcaacatctacttcaacatctataacaagcaggtactcaaggttttcccataccctataaacatcacagaagttcaatttgctgtcggaactgtagcagctctgttcatgtggatcactggtattattaagaggccaaagatttctggagcacaacttgtagccatcctacctctggctattgttcatactatgggcaatctcttcaccaacatgagccttgggaaagttgcagtgtcatttacgcacaccatcaaggctatggagcctttcttttccgttactctttctgcaaatttccctgtgcaactacctaacaatttgggtagtaccttcccttcttcca

SEQ ID NO: 83095 - DNA, 356 bp, Zea mays
  unsure (1)..(356): unsure at all n locations
agaggaccccaccaaggtggaccgcagcggcgcctacgtggccaggcaggccgccaagagcatcgtggccagcggcctcgcccgccgctgcctcgtgcaggtgtcgtacgccatcggtgtgccggagcccctgtccgtgttcgtcgactcgtacggcaccggcacgatccccgacaaggagatcctcaagatcgtgaaggagaacttcgacttcaggcccgggatgatcagcatcaacctcgacctgaagaagggcggcaacaggttcatcaagaccgccgcttacggccatttcggccgtgacgacgccgacttcacctgngaggtggtgaagcccctcaagttcgacaaggcat

SEQ ID NO: 83096 - DNA, 331 bp, Zea mays
acgagatcgtactggaccaatctgccaccacactttgatcacacacaggaagttgagatcagaaaaatgcaggctgccgctactgccgccgggttctcggccgtgctgcccgccaagggcaggccggcggcgaggagcagggtggtggcccgtgtccccgccacaaggaggagcgtccgtgtagctgccgtcgtcgcgaccgaggccgcgcagatcgactacagctcaagcgtctcggtgttcccgatggaggcctgcgacctgcttggtggcgacgcgtgcaacgggcccatgttcccggaggccaagcccgcctcggcggcggcggcgg

SEQ ID NO: 83097 - DNA, 337 bp, Zea mays
  unsure (1)..(337): unsure at all n locations
agcccacgcgtccgcccacgcgtccgcccacgcgtccgcncacgcgtccgcggacgcgtgggcggacgcgtgggtcgccatggcctccctctcctctgctgccgtcaccgccccttccttcgccgcatcagcgccagcccgcgccgtggtcagaaggaggtccttcaccgtgcgcgcctctctccgcaaggccaccggcaccgccgccgtgggaatggctgccagcgccctgcttgccggcggtgccatggcccaggaggtgctgctgggcgcaggcgacggcgggctcgtcttcgagcccagccagttcatcgtcaaggccggcgacaccatcaca

SEQ ID NO: 83098 - DNA, 409 bp, Zea mays
aggcaacccagggcgcaaccatgggtcaacaacaacaaaggccggcggccaagccgatgggcacgctcgcctcccaactgggccatccctccgtctctcaacctcaaatggaagatgttcccctcctgaggggattcaattgcccgtcaaaaggttcggggccaagcttcaaagtcccgattttgggtgcagcaggtgggattgggcagccacttgcgctattgatgaagatgaaccctcttgtttcggtgctccatctatacgatgtcgtcaacgcacctggtgtcacagccgacatcagccacatgaacactggtgctgtggtacgtggcttcttgggccagccacagttggaaaatgccctggctggaatggatcttgtaataattcctgctggtgtccctcggaa

SEQ ID NO: 83099 - DNA, 316 bp, Zea mays
ttcgacggacccttggccggttcaaaatggcggcttcggatgttgattaccgctgcttcttcggcggcctcccttgggcaacggacgaccactccctcaacaacgccttcagcacctacggcgaggtcctcgagtcaaagatcatcctcgatcgggagacgcagaggtcccgccgcttcggcttcgtcaccttctccacggaggaggcgatgcggaacgccatcgagggcatgaacggcaaggaactggacggccgcaacatcaccgtcaacgaggcccagtcccgcggcggccgtggaggcggcggcggtgggta

SEQ ID NO: 83100 - DNA, 212 bp, Zea mays
gcgtccggggttatcgcgccgccgccgccgccgccgccgcagccgcaacaatgccgtcgcacaagaccttccggatcaagaagaagctggcgaaaaaagatgccccagaaccgccccatcccctactgggatccgcatgcccactgacaataccatcaggtacaacgccaagcgcaggcactggcgccgcaccaagctcggcttctgagcgt

SEQ ID NO: 83101 - DNA, 394 bp, Zea mays
caaccaaacccgcacgacacgacaccaagtcgaggagctcgagggcaccaatcatggccggcgtgaactccagcgtcgtcgggctcaagcccgccgcggcagtgccgcaggccgccgccgcctcatcgccggcgaagcgggtgcagctggccgcgcccgagggccgccgcgccgctctgctcggcctggcggccgtcttcgccgtcacggccaccaccgggtcggccaaggccacgatcttcgatgagtacctcgagaagagcaaggccaacaaggagctgaacgacaagaagaggctggccaccagtggcgccaactttgcgcgcgcctacaccgtggagttcggcagctgccagttcccctacaacttcactgggtgccaggacctcgccaa

SEQ ID NO: 83102 - DNA, 413 bp, Zea mays
agcccacgcgtccgcccacgcgtccgcacaggcagcagctagcatccctcactctcggtacctgacctgaccacgagagcaacatgggcggaggacacgacatgcacgggcagcactacgggcacaacggcggcgtgaagggcttcgtgtccaacctcgtccacggcggcggcggccatggccatggaagcggctacggccatggccatggaaacggctacggccatgggaatggcggctacggcggcggccacgggtaccctcctcccgccgccggcggcgcgtaccctcacccgcacggcgcctacccgcccgccacctaccccgcgcactcggcgcactacgggcacacggggtcgtaccacaccagccacaacagctacggcggcggcggcggccaccacggcatctac

SEQ ID NO: 83103 - DNA, 417 bp, Zea mays
agggcaaccgcgtccggccgtccgcttccgtctccttggataaccacgacgcccgccggcaagcgaaagcgaagcgagccaacccagccatggagaaggcgatcgatcggcagcgggtcctcctggcgcacctcctcccctccccctccgccgcctcctcgcagcctcagcttgcggcgtcggcgtgcgcggccggggacagcgccgcctaccagaggtcctcctccttcggggacgatgtcgtcgtcgtcgctgcctacaggacgccgatatgcaaggccaagcgaggaggcttcaaggacacctacccagaggacctcctcactgttgttctcaaggctgttctggacaacactagaatcaatccagctgacatcggtgacatcgtcgttggggaccgtgctcggccctggttcc

SEQ ID NO: 83104 - DNA, 439 bp, Zea mays
ggttacggtcaggggcccccggctcgacccaagcgtcagcggacgcgtgggcggacgcgtgggcgcaagggtttgtttcatcatatgacactgctcatcaatacagtgacagtgaagaagatgcacataagtgggtcagtcaccgaaaccatcgagggaacatctgcggagttgatttcatatggcttttaaatcctgacaagtgcaggaagcccctgaagaccagctggaatgaagctgtttttggtatcattaagtacttcctccaagttgttgcattcctttccgaggagaatgcatttgcactcctgaaggcagacagcctttatgatcacatcacatattcaagtttctaccaggcattgtgtcagttaggaatggtccatcctgatagactaagatcagaagaaattgaggagttgtggattgaacctgaccg

SEQ ID NO: 83105 - DNA, 396 bp, Zea mays
  unsure (1)..(396): unsure at all n locations
acacacacagagagagacaagtggtttccaaagccaagtgtgtactagcagtctagcaaccagctagctcgggcggcagcaggcagccatcatgtcggaggagaagcaccaccacttcttcaaccaccacaagaaggacgaggagcagcccgccggcgagtacgggtactccgagaccgaggtggtcaccgccaccggcgaaggcgagtacgagaggtacaagaaggaggagaaggagcacaagcacaagcagcacctcggcgaggccggcgccatcgccgccggcgccttcgcactctacgagaagcacgaggcgaagaaggaccccnagcacgcgcacaggcacaagatcacggaggaggtcgctgccgcggcggccgtcggcgccggcggcta

SEQ ID NO: 83106 - DNA, 70 bp, Zea mays
tgttattgctatcctgccctgggaggaatggtgggagtttgaagtgacaaaggatgactcaaatcctcag

SEQ ID NO: 83107 - DNA, 339 bp, Zea mays
tctgcaagtctcgctacgtagcagtgcaataaaaaaagcagccgcaatggcgagcagcaccatggccctctcctccacggccttcgccggcaaggccgtgaacgtgccgtcgtcgtccgccttcggcgaggcccgcgtgacgatgcgcaagacggcggcgaaggccaagccagcggcggcgtccgggagcccgtggtacggccccgaccgcgtgctgtacctgggcccactgtccggcgagccgccgagctacctgacgggcgagttcccgggcgactacggctgggacaccgcggggctgtcggcggacccggagacgttcgccaagaaccgggagct

SEQ ID NO: 83108 - DNA, 255 bp, Zea mays
gcgtccacggacacgtgggcggacgcgtgggttcgagaagggctccatcttcccacccttcaccagcatcagaaagatctctgcgcacatcgctgcagccgtggctgcaaaagcctacgagctcggtctggcgacccgtctgcctccccccagcgacctggtgaaatatgcagagaactgcatgtacactcccgtctaccgcaactaccggtaatgctgccgggatcaattttgccgtaataaaaaatctatcaa

SEQ ID NO: 83109 - DNA, 418 bp, Zea mays
  unsure (1)..(418): unsure at all n locations
agagagggagggtcggcgcaggacatcgcaacaacggagccgccgaggcgtctgcaaaacctgaccgtccgccccggcgttgccgtggactccatcgagttcacctacaccgacacaggtggccagacgcgcaccgctgggcgatggggtggacttggcggcaacgtccggaagctcgatcttggcgacgctgaatacgtcaaggaagtttctggaacgtacggcgcattcgaaggtgcgactaccctgacctcgttgaggattgtcaccagcaccgccagagcttgggggccatggggcatcnagagcgggacacgtttctgcatcancggcaccatcggcagcagcatcgtgggattctatggacgcgcgacgaacaggctcgtcgctgcgatcggtgtctacctgcgccaacttt

SEQ ID NO: 83110 - DNA, 199 bp, Zea mays
  unsure (1)..(199): unsure at all n locations
acccacgagtccggccaggttgacgctgaaagggtatactcttcctatctagaacttaacttggaagaggtanaaccatgtctatcangaccaaaacggcctcatgatcgagtgacattgaagaatatgaagtctgattggctttcttgcttggacagcgatgtangattcaagggttttgctgtcnccaaagaatcac

SEQ ID NO: 83111 - DNA, 449 bp, Zea mays
gggccaacccacccttcgagtacaagaaccactaccaacctgccctaaaggataatgtttggaaattagaaaagattggcaaggatggcccatccaacaaaaatttaaatgcaattggaatcaaaacagttgaaaatttcccccggcttcttgtaagggatcaccagagattacgtagcattctgggcagtggaatgtcaaataagatgtgggacagccttgttgagcatgcaaagacatgtgtcttaaatggaaagcattatgtatactatgctagagactcaagaaacgtgggtgcaatattcaataacatctacgagttcactggtttgattaccgatgaatagttcatttcagctgaaaatctcacagacaaccagaaggtctatgctgatgcattggtaaagaaagcatatgaggactggatgcacgttgtagaatatgatggc

SEQ ID NO: 83112 - DNA, 326 bp, Zea mays
gatccacagcatttgcatcaattcccacacatctcttaacgaagaggttcttcttggccatctcggtgtgcagcgccaccttggtctcagcatcgaacaccatatcctggagcgcagtctttgcggcgatggcctggtgcgcggtggagaagagcgcgaagcccatgggctggtcgcccttgaagttgatctgggacgcctcgaatctcgggagccagcgcagcaggttgtgcagctccctttccttgacgtctgcagggagccccgtgatgaagatggtgcggacctcgtccgggccaacggtgccaggcgcgccggggacggga

SEQ ID NO: 83113 - DNA, 388 bp, Zea mays
acgcttcctccaccacagtcatcagtggcgttatcctcttcgttctcgcctccctggttgttgttggctgggtgttggcgagctgggagtagagaccgagaagtggagcggccatgaagatccagtgcgacgcgtgcgagggcgcggctgccacggtggtgtgctgcgccgacgaggccgcgctgtgcgcgcgctgcgacgtcgagatccacgccgccaacaagctcgcgagcaagcaccagcgcctcccgctcgaggcgctctccgccaagctcccgcgctgcgacgtctgccaggagaaagcggcgttcatcttctgcgtggaggaccgggcgctcttctgccaggactgcgacgagcccatccacgtcccgggcacgctctccgg

SEQ ID NO: 83114 - DNA, 401 bp, Zea mays
  unsure (1)..(401): unsure at all n locations
cggacgcgtgggcgacgcgcaagccagtgccgcacccagaccagatctccgcgacatatcagtcgttcgtccagctaactgcactgcactgcactgcacgcaatggccaccacggcgaccgaggcggccaaggctgcaccggcgcaggagcagcaggccaacggcaacggcaacggcgagcagaagacgcgccactccgaggtcggccacaagagcctgctcaagagcgacgacctgtaccaggtaaacaagctgagcgcaatgagtggctgaatctgaccgggatctgagtctctgaccgcgggggaagaatgatccgcagtacatcctggacacgagcgtgtacccgcgggagccggagagcatgaaggagctgcgcgagatcnnacgcaagcacccat

SEQ ID NO: 83115 - DNA, 407 bp, Zea mays
  unsure (1)..(407): unsure at all n locations
cccacgcgtccgcccacgcgtccgcccacgcgtccgctatagcaaccggtccagcactttcacgctcagctccagcaatggctgcctccaccatggcgatctcctccacggcgatggccggcacccccatcaaggtgggctccttcggcgagggccgcatcaccatgcgcaagaccgtgggcaagcccaaggtggcggcgtccggcagcccctggtacggccccgaccgcgtcaagtacctcggccccttctccggcgagcccccgagctacctcaccggcgagttccccggcgactacggctgggacaccgccgggctgtccgccgaccccgagaccttcgccaagaaccgcgagctggaggtgatccactcccgctgggccatgctcngcgcgctcggctgcgtc

SEQ ID NO: 83116 - DNA, 286 bp, Zea mays
aggtgtagtcacggcaaaattcttgcaccgacttataaaaaggtggcttcggtttcaaatttggataaaggatttgtaatggcaaaccttgaccctaaaaaaaaaaggaatttggctaaaaattagggattaatgggattcccaaccttaaattttttcccaaaggaaaccaaacctggtaaaaattataatggtgaaaggaacttggttgactttgtcaagttcattaccaagaaaattggtacaacccgtgacacaaagggtcaactaacctcaaaggctggcc

SEQ ID NO: 83117 - DNA, 273 bp, Zea mays
cccacgcgtccgggaccgcacctgcgccgccggcgtggggctggtggtcccgtcctgggcgccgcagacccaggtgctggcgcacgccgccacgggcgccttcctcacccactgcggctggaactccgtgctcgagagcctcgtctacggcgtgcccatggtggcgtggccgctctacgccgagcagaggcagaacgccgtgctgctctccgacggcgtcggcgctgcgctccgggtgcccgagtcgtccaagcggagggagattatcgcgga

SEQ ID NO: 83118 - DNA, 326 bp, Zea mays
acggggggtattcatgtttggcatatgccagctctgaccgaaatctttggagatgattccgtattacaatttggtggatgaactttaggacatccttggggaattgcacctggtgcagcagctaatcgtgtggctttaaaagcctgtgtacaagctcgtaacgaagggcgcgatcttgctcgtgaaggtaatgaaattatcatagcagcttgcaaatggagtgctgaactacccgcagcttgtgaaatatggaaggagatcaaatttgatggtttcaaagcgatggataccatatacaataaaagcaaagccgcaacagtcaaaaa

SEQ ID NO: 83119 - DNA, 408 bp, Zea mays
ccccccgcaagtctgttaagattggcagacctgggtataaagtaaccaaacaatatgatcctgagatgaagcaacactcgtttctttttgaaattggttacccggaaatcgaagataattgcaagccaaggcaccgtttcatgtcatcatatgaacagaaagtccaaagttgggataagggttatcagtacctactttttgctgcagagccctatgaaattattgcattcaagataccaagtacagagattgataaatcagcgaacaaattcttctcttactgggatcctgacaagaaggaatatctactgcaactgtacttcaagccaagaccgccagaagctaataaaccaccaccagctcctccggggactttgcctaatgggactggggttcctggtgctccaa

SEQ ID NO: 83120 - DNA, 395 bp, Zea mays
cccacgcgtccgcggacgcgtgggcgcccaacgcggcaactgcccaccgtccggctcgccggagccgtacgtggcgaccggtggagctggagtgcgcggagaagggatctcagggtatttgccacttccacggaagcggatcgtgaaagggaggaggaggatgtcgccgacgattactattccgttctgggtgtgatgccagatgcaaccactgaggaaattaagaaggcatactacagttgcatgaaggagtgccaccctgaccttagtggggaccaccctgacgtgacaaacttctgcatgttcatcaacgaagtttactcggtgctgagcgatccagcacaacgtgcagtgtatgatgagatccatgggtacacagcaacagcaatcaaccc

SEQ ID NO: 83121 - DNA, 254 bp, Zea mays
acccacgcgtccgagtcagcaccgccttctgtgctgagattgttgagtccgcagatgcctacctctttgcaggccccattttcaatgactacagctctgttggctactcattcctcctcaagaaggaaaaggccatcatcgtccagcctgagcgtgtgatagtggggaatgggccggcattcggatgtgtgatgatgaaagagttcttgtctgaattggctaagaaggttaataagaacaccactgcctatgag

SEQ ID NO: 83122 - DNA, 266 bp, Zea mays
agcaagcccaagccagcggcgtccggcagcccctggtacggggccgaccgcgtcctgtacctgggcccgctgtccggccagcccccaagctacctgaccggcgagttccccggcgactacggctgggacaccgcggggctgtccgccgacccggagactttcgccaagaaccgcgagctggaggtgatccactgccgctgggccatgctgggcgcgctcgggtgcgtgttcccggagctgctcgcccgcaacggcgtcaagttcgg

SEQ ID NO: 83123 - DNA, 389 bp, Zea mays
acggttgatccttggtatcaagttggcttcgtcctcacaaccggggtcaacagcgcatacgttctaggatactctggatcaatcatggtccctctaggctggatcggcggcacatgcggcctcctcctagctgccgccatatccatgtacgctaatgctcttcttgcacggcttcatgaagtcggtggcaaacgccatatcagatacagagaccttgctggacacatatatggaccgaaaatttacgggcttacatgggctctgcagtacattaaccttttcatgatcaacactggctttatcatcttagctggacaagctctcaaggccacgtatggactgttcagtgatgatggagttctgagactcccttactgcattgcgatatc

SEQ ID NO: 83124 - DNA, 359 bp, Zea mays
acgcccacgcgtccggaagaagacgagtgtcaagtgaacctgaaacttgcggtgtcactggctggtagcctgagtgtgagtgagtgatcgagctagctgagctccgatcctcgctagctaggataccgccataccacaagtcttcttcacaagtttaggagtgacagcaacaagagatcgatggcctctgccaccgtgctcaagtcctccttccttcccaagaagtccgaatggggcgccaccaggcaggccgccgcgcccaggccgcccaccgtctccatggtcgtccgcgcctccgcctacgccgatgagctcgtgaagaccgcgaaaacgatcgcgtcgccggggcggggcatcct

SEQ ID NO: 83125 - DNA, 419 bp, Zea mays
  unsure (1)..(419): unsure at all n locations
ttcgaccaaaccttcggccaagccttcgggaaaattgttccttcccttcccaaagacaaacaagcgaacacaaaacaaaaaagcttcaaaccaaaaaaaccaatccaattattgggaagggttccttcctccaaaaaaatggggttaaaaaaggggcaatgaacccccaaggaggacaaggtcttgttccccaaaatcaaaaccttcggccaaagcaactggcgcgcgctgcccaagcaagccggcttgctgcggtgcggcaagagctgccggctccggtggatcaactacctgcgcccggacatcaagcgcggcaacttcagcaaggaggaggangacgccatcatcagcctccacgagcagctcggcaacaagtggtccgccatcgccgccaggctgcccgggcggacggacaacga

SEQ ID NO: 83126 - DNA, 416 bp, Zea mays
aaggaaacaccgccgccgccgcgccttccattccagtactcgcggaggaaaggaacaccagccagcgccatggtcacgtcgacgaccgccgccgccgtgctgtccccgccgtccgtggccgggcttcgcctggcgccgtctccccgggcgcgcgtggcgttccgcgcggcgccggcgcggcggtccgtggcggcgcgcgcggagctgagcccgtcgctggtgatcagcctgagcacgggcgtgtcgctcttcctgggccgcttcgtcttcttcaacttccagcgggagaacgtggcgaagcaggtgcccgagcagaacggcaagacgcacttcgacgccggcgacgagcgcgccaaggagttctcgggcctgctcaagttcaacgaccccgtgggcttcaacctcgtcgacgtcct

SEQ ID NO: 83127 - DNA, 372 bp, Zea mays
aattaaccctcgttcctgtcgcgcagccacgacctccacttccacatcttccccggcggcggcgcggtcagttgaaccatggcggactccaaggccacctcggcggtcaccctccgcacccgcaagttcatgaccaaccgcctcctggcccgcaagcaattcgtgcttgaggtgatccaccccggccgcgccaacgtctccaaggcggagttgaaggagaggcttgccaaggcgtacgaggtgaaggaccccaacaccatctttgtcttcaagttccgcacccacttcggaggaggaaagtccactggtttcggcctcatctacgacaaactcgaggctgccaagaagttcgagccgaaataccgcctcatc

SEQ ID NO: 83128 - DNA, 378 bp, Zea mays
ctatagcaaccggtccagcactttcacgctcagctccagcaatggctgcctccaccatggcgatctcctccacggcgatggccggcacccccatcaaggtgggctccttcggcgagggccgcatcaccatgcgcaagaccgtgggcaagcccaaggtggcggcgtccggcagcccctggtacggccccgaccgcgtcaagtacctcggccccttctccggcgagcccccgagctacctcaccggcgagttccccggcgactacggctgggacaccgccgggctgtccgccgaccccgagaccttcgccaagaaccgcgagctggaggtgatccactcccgctgggccatgctcggcgcgctcggctgcgtcttccccg

SEQ ID NO: 83129 - DNA, 373 bp, Zea mays
agcggacgcgtggggttctctgcaccttatgtttgcagctctgctctgttcagtgggaacgggtcagggggtagatacatcagtaacgggaagctgttgtccagacggcctcgtggaatcgattccaagaagaggctctggactaacgtccttcttgctcttaatgtcctggcttatgtcgctcaggtagcatcacaaggaaagcttcttatgtggggagccaagatcaacagtctgattgatagagggcaattttggcgtttggcaacatcatctctacttcatgcaaatctcacccaccttgcattcaattgtttctctttgaactctattgggcccatggttgaaatgttaagtggtcctagaagatatc

SEQ ID NO: 83130 - DNA, 431 bp, Zea mays
ccggcctcgacccaagcgtcaggagaaggaagagaaagaaaaaaagaaaaagaagatcacttagaataccttgaggagcgtcgcctcaaggatttggtcaacaagcactctgagttcatcagctaccccatctccctgtggactgaaaagacaacggagaaggagatttctgatgatgaacatgaggaagagaagaaagacgctgaggagggaaaggttgaggatgttgacgaggtgaaggaacagaatcaaaactagaaaaagaagatcaaggaggtttctcacgagtggtcattgatcaacaagcagaagcccatctggatgaggaagccagaagagatcacagaggaacaatacgctgccttctacaaaagcttgacaaatgactgggaggaaccatcgggctgtgatccacttctctgtggagggtc

SEQ ID NO: 83131 - DNA, 420 bp, Zea mays
  unsure (1)..(420): unsure at all n locations
ggccaagccagccttcgacgggacgtcagccaaccatttactccaccaatccaaaattgggaaattcaacaccatgaaggtgcggttcgttgcccttgccccccgggggctcgctgcaaccgccgcctcaattaaaaccggcggctgtggttgcaaaacacaacggtttcatcaacggcctcggttctatatgccgcctccgttctatctgccgccgcagcagcagccgcagccatggcaataccccactcaaccaccgcagctaagcccgtgccagcagttcggatcctgcggcgtcggcagcgtcggcagcccgttcctgngccagtgcgtcgagttcctgagggcacagtgcagcccggcggcgacgccctacggctcgccacagtgccaagcgctgcagcagcagtgctgccacca

SEQ ID NO: 83132 - DNA, 349 bp, Zea mays
agaaaaggttgatgtattctcttttgggattgttctctgggaactgctaacaggagaagagccatatgcagatttacattatggtgttataataggtggcattgtgagcaacactctacggccgccagtgcccgactcctgcgaccccgagtggaggtcactgatggagcaatgctggtcaacagaaccatctgagcggccaaacttcacggaggttgcgaataggctgcgctccatggcagcatcccagaaggtacaacaacactaagggaacaccaccggcacgcagaatttgtcccagggcagcattcagtcaaacttgcaggttacatccatgggccgcaaattc

SEQ ID NO: 83133 - DNA, 403 bp, Zea mays
agcggacgcgtgggggacggacggtgctggcatcgccaattcaactccgcatctgcatcggcagcgcgccagctccatagtgtaggaggagatggcgctcacaagaatcggtcttgctggccttgcggtcatggggcagaaccttgccctcaacattgcagagaaagggttccccatctctgtgtacaacaggacaacctccaaggtggacgagaccgtgcagcgtgccaaggcagaaggaaaccttcccgtctacggcttccatgaccccgcgtcctttgtgaagtccattcagaagccacgggtggtgatcatgctcgtcaaggccggcgcgccagttgaccagaccatcgcgacgctcgcagctcactttgagcagggcgactgcatcatcgatgggggg

SEQ ID NO: 83134 - DNA, 359 bp, Zea mays
acgcccacgcgtccgcccacgcgtccgcccaagtgcgaccacgtcgccgtcggcaccggcaccgtcacgcacaaggccgacatcaagaagtttcaggccgccacgcgcctccgcgccaaggacaagattgagggcggcaagatcatccgcgtcgaggcgcaccccatccccgagcaccccaggcctaagagggtgtccgggcgggtgacgctggtgggcgacgccgcggggtacgtgaccaagtgctccggcgagggcatctacttcgcggcgaagagcgggcggatgtgcgccgaggccatcgtggcgggctccgccaacgggacgcggatggtggaggagagcgacctgcgcaagta

SEQ ID NO: 83135 - DNA, 423 bp, Zea mays
aataagacgacttgtttcattgattcttgaagagatcgagcttcttttgcaccacaaggtcgaggatgtcttgcaactgcggatcaagctgcggctgcggctcaagctgcaagtgcggcaagaagtaccctgacctggaggagacgagcaccgccgcgcaggccaccgtcgtcctcggcgtggccccggagaagaaggccgcgcccgagttcgtcgaggccgcggcggagtccggcgaggccgcccacggctgcagctgcggtggcaactgcaagtgcgacccctgcaactgctgatcacatcgatcgacgaccatggatatgattattatctatctagcttgtggtggtggttgaacaataataagcgaggccgagctggctgccatacataggtattgtgtggtgtgtgtgagagagagag

SEQ ID NO: 83136 - DNA, 301 bp, Zea mays
accgccttcctcttccagtccccgcgcgcgagatcgccgccccgtgtgggccctagatcccgatggcctcgcgccgccgcaccctgctcaaggtcatcatcctcggcgatagtggggttgggaagacttccttgatgaaccaatatgtgaacaagaagttcagcaatcagtacaaggctacgatcggcgcggatttcctcaccaaggaggtgcagttcgaggacaggctcttcactctgcaaatatgggacactgctggccaggaaaggtttcagagtctcggcgttgcattctaccgggg

SEQ ID NO: 83137 - DNA, 377 bp, Zea mays
agcaaacaaggaaggaaaagccttctgataacaagcttttctggaatgggtgcttcaatgctactcctagcattgtccttcacctggaaagctctggcaccttattctggtactcttgctgttgttggcactgttctgtacgtgctgtcatttgctctaggagcgggccctgttccagcgctacttcttcctgaaatatttgcctcgagaataagggccaaggctgtcgcattatctctaggcatgcactgggtatctaactttttcattggcctgtacttcctgagtgtcgtcagcaagtttgggatcagcaacgtgtatctgggatttgcatcagtatgtgcccttgcagttctgtacatagctgggaatgtggt

SEQ ID NO: 83138 - DNA, 411 bp, Zea mays
cccacgcgtccgcccacgcgtccgcccacgcgtccgcccacgcgtccgcccacgcgtccgcctccctcctgccgggtccttaataaagagcaccagcgcaaggtgagccgccagcttgccccaggttggtagagcgagcgagaagaaggcaatggcggcggagagcttcctgttcacctcggagtccgtgaacgaggggcacccagacaagctgtgcgaccaggtgtcggacgcggtgctggacgcctgcctggcgcaggaccccgacagcaaggtggcctgcgagacctgcaccaagacgaacatggtgatggtgttcggcgagatcaccaccaaggcgagcgtggactacgagaagatcgtgcgcgacaactggcgcgagatcgggttcacctccgacgacgtggggct

SEQ ID NO: 83139 - DNA, 359 bp, Zea mays
gccttcagaatacaaaccaaaccaaacccatgggcctgggcctaacaatcccaacggcccaacggctgggctccaagccggggccaatcctcaagaagaacttcccggccggcgttctgggcaagggccccggccaaaaaaagaaccctgcgccggcgaacggcttccaaaacaagggaagtccccccggttaggtcaacgggatcaagacgagcacggtgggtctgggatgtgagggcgtcaccgggcaagtcacggaggtcaacaaggacaccttctggcccatcgtcgatgccgccggcgacaaggtcgtcgtcctcgacatgtacaccgaatggtgcgggccttgcaaagtgatg

SEQ ID NO: 83140 - DNA, 338 bp, Zea mays
agctgggtcgaagcacagattgagaaacattctagaagccgtatagaactcatggtgaaggcaaggagtcagtttaaagaaagaagcacagcaacgaatgttgaaattgaagtgcctgttccttcagatgccacaaacccaaatataagaacttcaatggggtctgctgcatatgctcctgagagagatgcaatggtttggaaaataaaatcattccctggtggcaaggaatacatgtgcagagcagaatttagtcttcctagcataacagcggaagaaggggccccagaaaagaaggcgccgatacgggtgaaatttgagataccatatttcaccgt

SEQ ID NO: 83141 - DNA, 355 bp, Zea mays
agcccacgcgtccgatctactgacctgtgacctccgcatttccaaacagcccgagcgagctagagctagcagagcggcaggcacctccctcctcaaggaacatggcccgcacgcagcagttggcagtagtggcgaccgccgtggtggccttggtgctgctggcggcggcgacctcggaggcggccatcagctgcgggcaggtggcgtcggccatcgcgccctgcatctcctacgcgcgcggccagggctcggggccctccgccggctgctgcagcggcgtcaggagcctcaacaacgccgcccgcaccaccgccgaccgccgcgccgcctgcaactgcctcaagaacgccgccgc

SEQ ID NO: 83142 - DNA, 386 bp, Zea mays
acgcgtcagggatatggagaggattgaagggattaaatctcctcctattcaattttgactaggaggggatttaatccccttcaatccccctcaaaccactagtaaccgaacgtggcctgagggggcgggcgagtctttatattgaatgaaactacataaaatagcatgccgtctctgtcactggcaatggacggtggtgcctagcgcaactcagcgcacaactgtgtgtcttgatttttcttctgtttatcacggcattagtgccatgccgttttatgttacagtgttgtgtgctcgcaagcatccgaaaatatgcgtctgagtttagggttgggtcaaacttgtcgaatttggggttctgttataatatgttgagcatggataaa

SEQ ID NO: 83143 - DNA, 355 bp, Zea mays
agccttcacgggcgccttggcgggtttaacgcctttggggggttttccgtgttcctggccttcctccttggcaaaggcggcggcgcccggggctgcgcaagcggctgcgggacgaggtgcggcgcgccatggtgggcaaaggcaaagacggcgagttcgggttcgccaccgtccgcgagggcatgccgctggtgcggtcgacggtgtacgagatgctgcggatgcagccgcccgtgccgctgcagttcgggcgcgcgcgcagggacttcgtgctgcgctcccacggcggcgccgcgtaccaggtgtccgcgggcgaggtgctgtgcgggtaccagccgctggcgatgcgggaccc

SEQ ID NO: 83144 - DNA, 377 bp, Zea mays
agcgcatcctctcatcagcttccttccacattcgtctcgagatctcgccccgtcgccatggacgcgatcgacagcgtggtggatcccctccgcgacttcgccaaggacagcgtccgcctcgtcaagcgctgccacaagcccgaccgcaaggagttcaccaaggtggcggcgcggacggcgatcgggttcgtcgtcatgggcttcgtcggcttcttcgttaagctcatcttcatccccatcaacaacatcatcgtcggttccggctaggcttacaggagtacagggcgactagcatgggagtagtgcaatacttttgggagcaatagataacgaggatcctggtctttcgaatagtattgttaatgaaatttttccgt

SEQ ID NO: 83145 - DNA, 359 bp, Zea mays
agcacgcaaacgcaagctcccaagcagctaccaaccagccgggagagggagcgcacgcactgcgagaatggccacggccggcggaggggccgggcatctgaagctgctgggcgcgtggccgagccccttcgtgaaccgtgtacgcatggcgctgcacctcaaggggctggagtacgagaacgtggaggaggacctcaccaacaagagcgacctgctcctcgcctccaaccccgtccacaagctcgttcccgtcctcctccacggcgacaagcccatctccgagtcactcgtcatcgtggagtacctcgacgacgccttccccggcgctggccaggccgtcctccccgccgacccctatg

SEQ ID NO: 83146 - DNA, 317 bp, Zea mays
aggcaaccgccgtcgccccgttccagggtctcaagtccgccgccagcctccccgtcgcccgccgcagcaccaggagcctcggcaacgtcagcaacggcggaaggatccggtgcatgcaggtgtggccggcctacggcaacaagaagttcgagacgctgtcgtacctgccgccgctgtcgacggacgacctgctgaagcaggtggactacctgctgcgcaacggctggataccctgcctcgagttcagcaagctcgggttcgtgtaccgcgagaactccacctccccgtgctactacgacggccgctactggaccatg

SEQ ID NO: 83147 - DNA, 414 bp, Zea mays
  unsure (1)..(414): unsure at all n locations
agcatgagcacgagcccttgaaaaccttgtatgatgctgttcagtccatcaaacctacagttctgatcgggacatctggagttggaagaacattcacaaaagaaatcattgaggccatgtcttccttcaacgagaggcctatcatcttttcactgtcaaacccaacctcgcattctgaatgcactgctgaacaagcatatacatggagtcagggccgttcaatctttgccagtggcagtccatttgcccccgtggagtacgaaggaaagacttttgtgcctgggcagtcgaacaatgcctacattttccctggactcggcctcggtcttgtgatctctggagccgtccgtgtccacgaggaaatgcntcttcgcggcttcaaaaccgctacctgatcaggccacacaggacaac

SEQ ID NO: 83148 - DNA, 386 bp, Zea mays
ccacgcgtcagatcgtactggaccaatctgccaccacactttgatcacacacaggaagttgagatcagaaaaatgcaggctgccgcaactgccgccgggttctcggccttgctgcccgccaagggcaggccggcggcaaggaccaggttggtggcccttgtccccgccacagggaggaccttctgtgtacctgctgtcttcgagaccgaggccgcacatatcgactacagctcaagcgtctcggtgttcccgatggaggcctgcaacctgcttggtggcaacgcgtgcaacgggcccatgttcccggaggccaagcccgcctcggcggcggcggcggcgagcatgagtgtggccggggtggacagggactacctgtcctacgacga

SEQ ID NO: 83149 - DNA, 342 bp, Zea mays
agcccacgcgtccggccacggcttcctcctccgcctccgcctccgtctcgccgccgccgccctcctcctcctcctcgtcgccggcggtgctccagttcgacgagcagcagcagcagcaaaatccgaggccgcgtgcgccggcggcgtccgggcccacggaggaaccgcccaggccggcccgggcgtcagctccggctccggctccggcgtcgtcctcgtccgtccgccggtgccagacctgccgcaagcgggtggggctcacgggcttccgctgccgctgcggagacctcttctgcggcgcgcaccgctactcggaccgccacgactgctgcttcgactaca

SEQ ID NO: 83150 - DNA, 356 bp, Zea mays
agcccaagcgtccgatcataacatcaacggcatcctggctggccatggttggtgttctggctggtctcacctttctgatgggtcctgttacgatgctaaagctctacggagtcccatactttgtatttgttgcttggctggatatggttacatacttgcaccatcatggccacgaagacaagcttccctggtaccgtggacaggaatggagttatctgcgtggaggactgacgacgctcgaccgggactatggactgattaacaatatccaccatgacatcggaactcatgtcatccatcaccttttccctcaaatcccacattaccatctcattgaggcgaccgaggcagcaaaa

SEQ ID NO: 83151 - DNA, 378 bp, Zea mays
agcggacgcgtgggtggcagagatgctctcatatacaagtaaaagcaactttatttggtccttggttgggcggaaaccaggccgggactcgggagcattttgcattttcttggcgtggtagcttttgatacggtgaagtcactgactcgtggagtgatgttgctcaataatcagaaccttgtcctaatacagccgctgagacatcagctaaggcgaataagggaaggatgagtcatttgcaccatgtttgaccaccaattgttaggtggtccatatattttgtactaattgtgagactttgtgctatggatctcaactgtataccttgctggtgcatggctttgggtttacatgggtgaaaatgagattggggtgccc

SEQ ID NO: 83152 - DNA, 345 bp, Zea mays
aggcgtcgcgtcgcatcctacgattcaaagctctctctgctcgcaggtcgcagccatggcgaagaactacccgaccgtgagcgccgagtacagcgaggctgtggacaaggccaggcgcaagctccgagccctcatcgccgagaagagctgcgccccgctcatgctccgcctcgcgtggcactccgcggggacgttcgacgtgtcgtcgaggaccggcggtccattcggcacgatgaagcatcagtcggaattggctcacggcgctaacgcggggctggacatcgcggtgcggctgctcgagcccatcaaggaggagttcccaatcctctcttacgccgatttcta

SEQ ID NO: 83153 - DNA, 344 bp, Zea mays
acgcgtcaagccaagcttcggccaacgccttcgccaagccttcagatttccggttggccccgtcctcaccttctccgtcacggctcaaatcacggcttgcatcaatggcgtcgttctcggaggctccccccgggaacccgaaagccggcgagaaaatctttaagaccaactgcgcgcaatgccagacggtcgacaagggcgccggccacaatcaaggtccaaacttgaacggtctttttgggagacagtccggtatcactgcaggcgatgccgacactgcgggaaacataaagaaagctgtaatctgggaagaacacacgttgtataagtaacggccaaaacct

SEQ ID NO: 83154 - DNA, 345 bp, Zea mays
cccggttccgggtaacaaggaccattaccaaaagggattctggatggccaattcgaagaaccacacggcgcataaccagtcgttcaaggcgcacaagaacggcatcaagaagcccaagcgccaccgccagacctccaccaaggggatggacccgaagtttctgaggaacttgaggtactcaaggaagggcaacaagaagagtggcgaggctgagtccgaggagtaagatgatggtgattgagtttgtggcgacaaatgcatctcttgtatcgctaagagtcttagctgtgaacttagttctcacttctgtgtgactgtgatcaaaggacttgtgtatgatcaaag

SEQ ID NO: 83155 - DNA, 334 bp, Zea mays
tgctctgttgctggtgactaggagcagtagcgagagggattctggatggccaagtcgattaaccacacggcgcataaccagtcgttcacggcgcacaagaacggcatcaagaagcccaagcgccagcgccagacctccaccaaggggatggacccgaagtttctgaggaacttgaggtactcaaggaagggcaacaagaacagtggcgaggctgagtccgaggagtaagatgatggtgattgagtttgtggcgacaaatgcatctcttgtatcgctaagagtcttatctgtgaacttagttctcacttctgtgtgactgtgatcaaatgacttg

SEQ ID NO: 83156 - DNA, 346 bp, Zea mays
agggctcttctcctcctcgcctcctctccctagtctccacgacgcaagggagagtgacggaaagcgacgcggcgcgagcgaggagggccaaggcgaagaggggaagcaccgcaccaggacccttgttcgccgccgccgcctctgatctccgcgaggttgtcaggattcaatatgtcgaccagcacattcgctacttcctgcacgctgttgggcaatgttagaacaacgcaggcctcccagacagcggtgaagagcccttcgtctctaagcttcttcagccaagttacgaaggttccaagcctgaagacctccaagaaactggatgtctccgccatggctgtataca

SEQ ID NO: 83157 - DNA, 422 bp, Zea mays
agagagaagaacgaacctgagtttgctaagaagcttgcatctgttgctgacctttatgtcaatgatgcttttggcacggcacacagagctcatgcttcaaccgaaggagttaccaagtatttgaagcctgctgttgctggcttcctcatgcagaaggaacttgactaccttgttggagctgttgccaacccaaagaagccatttgccgccattgttggtggatccaaggtctcaactaagattggtgtcattgagtcgttgctggcgaaggtcgatatcctcatccttggtggtggtatgatctacacattttacaaggcacagggatattctgttggaaaatctctcgtggaagaggataaactcgaactcgcaaaatttcccatattgaaagggcaagggcaaagggggtttctcttttc

SEQ ID NO: 83158 - DNA, 364 bp, Zea mays
agcccacgcgtccggcgcccgcgaactctagaggacttgcgcacaagtgacggacaggttgggcccatctgtcggtgtgcgcgtttcccagctgagccgtggggaaagagaggatgagatgggccgaaaacatggaaccttgcccgactatgttcctttactttctctttttctttttttatgtttcttttctttttccaaattcaaggattcaaactaaatttcaattcctgttttgaacttcagatttccaaatatcgcacaatcctattgtgaatataacttctactatttgcattaatattatttatttttcttcctattatttaattatggaagggataattgactttataagaacttt

SEQ ID NO: 83159 - DNA, 365 bp, Zea mays
acgcgtccagtccatctcctctggcgccatcaacgccccttccttcaagggcgcgcccgctcgcgcaatggtcagcaagaggtccttcaccgtgcgtgcctctctccgcaaggccactgccaccgccgccgtggccgttgccgccagcgtcctgcttgccggcggcggcgccatggccaaggaggtgctgctgggcgcaggcgacggcgggctcgtcttcgagcccagccagttcaccgtcaaggccggcgacaccatcaccttcaagaacaacgccggcttcccgcacaacgtcgtgttcgacgaagacgaggtgccgagcggcgtcgacgcctccaagatctcgcaggaggagtacctcaacg

SEQ ID NO: 83160 - DNA, 353 bp, Zea mays
agagccaccatcgatctgcaagtctcgctacgtagcagtgcaataaaaaaaagcagccgcaatggcgagcagcaccatggccctctcctccacggccttcgccggcaaggccgtgaacgtgccgtcgtcgtccgccttcggcgaggcccgcgtgacgatgcgcaagacggcggcgaaggccaagccggcggcggcgtccgggagcccgtggtacggccccgaccgcgtgctgtacctgggcccactgtccggcgagccgccgagctacctgacgggcgagttcccgggcgactacggctgggacaccgcggggctgtcggcggacccggagacgttcgccaagaaccgggagc

SEQ ID NO: 83161 - DNA, 354 bp, Zea mays
ccagcctaaacatcaccgagcataatgacatccaagacaagatagcaatcaaccaaatcaatgctttccagctcattggaatgtcctcctgccttgatctatccggattttttgagaaagaggatgtttctgaaaggaaaatcagatttgcatcaaattattccccagcttatttatttgagaagattgagagcattgtcagaaaaatggggttccaggtacataagagcaacggcaagctaaaagtgatccaagactgcaagggactagcaaattcaagagggcaagagtcattattaatttctgctgaggtgtttgagatcaatgaatctctttatgttgtcgaactaaaga

SEQ ID NO: 83162 - DNA, 333 bp, Zea mays
agcccacgcgtccgcttctcctccccctccggttcgggttcgggttcgtgaggttctccggggttcggtttcgtgggtgagcggatcgagatggcggcgtcggatgttgagtaacgctgcttcgtccgccgcctcacctgagccacggacgaccactccctccacaacgccttcagcacctacggcgaggtcctcgagtccaagatcatcctcgatcgggagacgcagaggtcccgcggcttcggcttcgtcaccttctccacggaggacgcgatgctgaacgccatcgagggcatgaacggcaaggagctggacggccgcaacatcaccgtc

SEQ ID NO: 83163 - DNA, 416 bp, Zea mays
  unsure (1)..(416): unsure at all n locations
agcggacgcgtgggcggacgcgtgggcggacgcgtgggcgtcaccgtctagtacgactgtgcgagggaggaagaggcgaggagaagatgcagatcttcgtgaagaccctgacggggaagaccatcaccctcgaggtggagagcagcgacaccgtcgacaacgtcaaggccaaaatccaggacaaggaagggattcccccagatcaacagcgactgatattcgctggcaagcagctggaggatggacgcacgctggctgactacaacatccaaaaggagtcaactcttcatttggtcctcaggcttaggggtggaaccatgatcaaggtcaaaactctcactgggaaagagatcgagatcgacattgaacccactgactcgattgacaggataaaggancgtgttgaagagaaagaa

SEQ ID NO: 83164 - DNA, 295 bp, Zea mays
ccaaaaaatgcacttgggggaaccaacggggttctgaaccaaaaaaaaggtcatgtctttgaggaaatgcaaaggccgggtaccccgctctacaacatcaaggctttcctccctgtcatcaattcctttggtttctccagccaactgagggccgcaacctctggtcaggcgttcccccattgtgtctttgaccattgggacatgatgggctcagatcctttggaggccggctcccaggctgctcagctggtgctggatatccgcaagaggaagggtctcaaggaacagatgaccc

SEQ ID NO: 83165 - DNA, 351 bp, Zea mays
cttcagccaaacctccgcccaagcctccggtcctggctaaagccgaaacccccgaagaagcaattactgccccaaacaatggggcacaaaggaattgattaagcccgacaaaacacaagttccttgccttcaaacaaaaggataaaggcgttaagcaaattaataatggccccaagccttaacctaaggcacaggcgctcgaccgtctcttgccgtatcagaggtctgacttcgaaggcattttccgtgctatggatggactcccggtgaccatccgactcctggaccctcccctccacgagttccttccagaagggaacatcgaggacattgtaagtgaattatgtgctg

SEQ ID NO: 83166 - DNA, 406 bp, Zea mays
agtgcagatctttgtgaagaccctgactggaaaaaccataaccctggaggttgagagctcggacaccatcgacaatgtgaaggcgaagatccaggacaaggagggcatccccccggaccagcagcgtctgatcttcgccggcaaacagctggaggatggccgcaccctagcagactacaacatccaaaaggagagcaccctccaccttgtgctccgtctccgtggtggtcagtaagtcatgggtcgtttaagctgccgatgtgcctgcgtcgtctggtgccctctccatatggaggttgtcgaagtatctgctgttcgtgtcagtgttggtttaataatggaccggttgtgttgtgtgtgcgtactacccagaactatgacaaatcaagaataagtttgttgtttg

SEQ ID NO: 83167 - DNA, 345 bp, Zea mays
agcccacgcgtccgcccacgcgtccgcccacgcgtccgggctgccgcctgcagggcaagtacttcttccacgagcagatttcaaggcatcgcaccatcatgaatatctttgacaaaacccctcatgtgcataaagacgcatttgttgctccaagtgcatcccttattggtgatgttcaagtcgggtcaggagcttccatttggtatgggtgcgtcttaagaggggatgcaaacatcatacaaattggatctgggaccaatatacaagacaattctcttatacatgtggctaaatctaatctaagtgggaaggtctttccaacaaccattggtaataacgtcacag

SEQ ID NO: 83168 - DNA, 372 bp, Zea mays
aggaccaactagcaacatagaaagcacaatagtgtaccaacaatggcagccaaaatattttgcttccttatgctccttggtctttctgcaagtgctgctaccgcgaccattttcccgcaatgctcacaagctcctataacttcccttcttcccccatacctctcaccagcagtgtcttcagtgtgtgaaaacccaattcttcaaccctacaggatccaacaggcaatcgcagcaggcatcttacctttatcacccttgttcctccaacaaccgtcagccctattacaacagttacctttggtgcatttgttggcacaaaacattagggcacaacaactacaacaacttgtgctaggaaaccttgctgcatac

SEQ ID NO: 83169 - DNA, 388 bp, Zea mays
agcccaagcgtccgcccacgcgtccggacgacttgtttcattgattcttgaagagatcgagcttcttttgcaccacaaggtcgaggatgtcttgcaactgcggatcaagctgcggctgcggctcaagctgcaagtgcggcaagaagtaccctgacctggaggagacgagcaccgccgcgcaggccaccgtcgtcctcggcgtggccccggagaagaaggccgcgcccgagttcgtcgaggccgcggcggagtccggcgaggccgcccacggctgcagctgcggtggcaactgcaagtgcgacccctgcaactgctgatcacatcgatcgacgaccatggatatgattattatctatctagcttgtggtggtggttgaacaataataag

SEQ ID NO: 83170 - DNA, 306 bp, Zea mays
agcgccgccatcatgcgggagggccccaacctcttgaagctggcgcgcaaggagcagtgcctggcgctcggcaccaggttgcgctccaagtacaagatcacctaccagttctaccgcgtcttccccaacggcgaggtgcagtacctccaccccaaggacggcgtctacccggagaaggtcaaccccggcagggagggcgtcggccagaacttccgcagcatcggcaagaacgtcaaccccatcgacgtcaagttcaccggcaaggccaccttcgactaatcacacttcacgtacgccgcacgcccc

SEQ ID NO: 83171 - DNA, 272 bp, Zea mays
gcgtcagattgagaccaactagcatcatagaaggcagattattgttgcattaatggcagccaaaatattttgcctccttaggcaccttggtctttcagcaactgctgcaacggcgaccattttcccgcaatgctcgcagactcccatatcttcacgtcatctcccgtatctcatacctgcggtatcgcctgtaagtgacaactcaactcttcacacctacacgatcgaaaacgcaatcatcaagtggcaacttatatttaacacccctgatc

SEQ ID NO: 83172 - DNA, 398 bp, Zea mays
  unsure (1)..(398): unsure at all n locations
ataagaaaccaaacgatacaggaatacgatacgccgctcgcctgaatcgagaccaccaccgctcccgccctgcctcacctcgccgactagagtttttgccgccgcggatctcgccgtccccgccatggacgcgtcgcacacgggctcctccgcagccgccggcgacgccccgaccaccggggagcaccggatggggaccaccattgtcggggtctgctacgatggtggcgtcgtcctcggcgctgattccaggaccagcactggaatgtatgtagccaaccgtgcttcagacaagattacccaattgacagacaatgtgtacgtttgtcgctctggatctgctgctgatacacaagtcatttcggactatgtacgttnattcctccaacaacacacaa

SEQ ID NO: 83173 - DNA, 349 bp, Zea mays
agcccacgcgtccgcccacgcgtccgcccacgcgtccgagccatcgacacgatcgcgagcgcaagcacgtacgttgtcggaagctcaagttagaagaagcaccagtgcctgatcgatggcggcccaggctctcctctccggccggcagctgctgggccgccccgtgcagtcggccgtctctaggtcgtcggcgaggaaggcgcccttcgtcgtcagggccagctccagccctccagccaagcaaggtgccgacaggcagctgtggttcgcgtccaagcagtccctctcctacctcgatggcacgctgcccggcgactatggcttcgacccgctgggcctctcggacccg

SEQ ID NO: 83174 - DNA, 423 bp, Zea mays
agacttgtttcattgattcttgaagagatcgagcttcttttgcaccacaaggtcgaggatgtcttgcaactgcggatcaagctgcggctgcggctcaagctgcaagtgcggcaagaagtaccctgacctggaggagacgagcaccgccgcgcaggccaccgtcgtcctcggcgtggccccggagaagaaggccgcgcccgagttcgtcgaggccgcggcggagtccggcgaggccgcccacggctgcagctgcggtggcaactgcaagtgcgacccctgcaactgctgatcacatcgatcgacgaccatggatatgattattatctatctagcttgtggtggtggttgaacaataataagcgaggcccaactcgggggccatacataggtattgtgtggtgtgtgtgagagagagagaaacag

SEQ ID NO: 83175 - DNA, 363 bp, Zea mays
agccttgacattctcaaagagcagtggagccctgctctgacaatttctaaggtcctgctctccatctgctccctgctgaccgaccccaacccggacgaccctcttgtcccggagattgcccacatgtacaagacggaccggccgaagtacgagtcgacggcccgcagctggacgcagaagtacgcgatgggctgacgaacgctttcctgctcgtccacccgactggcgtctcaagaaagccgttcctgggcgccattgttcccttggatttgttgttggtcgtgtgtatccctgatccatctaggatcatcgtattgtattgtattgtagtgtatgtcgtcggcttaccatcgttgccatcca

SEQ ID NO: 83176 - DNA, 361 bp, Zea mays
cccacgcgtccggcattcaaaaacacaccaagcgaagcgcactagcaacgacctaacaccaatggctaccaagatattagccctccttgcgcttcttgcccttttagtgagcgcaacaaatgcgttcattattccacagtgctcacttgctcctagtgccagtattccacagttcctcccaccagttacttcaatgggcttcgaacatccagccgtgcaagcctacaggctacaactagcgcttgcggcgagcgccttacaacaaccaattgcccaattgcaacaacaatccttggcacatctaaccctacaaaccattgcaacgcaacaacaacaacaacagtttctgccatcactgagc

SEQ ID NO: 83177 - DNA, 179 bp, Zea mays
agaaactgtacgacgaccttaccactgggttccgcaccctacaacatgaggcacggtgaactgctgtacattttgtgtaacacaataatggctgccaaatggtttacaaggtacggcagttgctcattgacaccatgtccgagaattttccccaccgctactcatttctttgccaccac

SEQ ID NO: 83178 - DNA, 446 bp, Zea mays
accacgcgtccgcccacgcgtccggggaagctcgtgccgtccgacatcatcgtcaggctcctgctcacggccatgctccagagcggaaacgacaggttcctcgtcgacggattccctcgaaacgaggagaaccgccgagcgtacgagagcattgttggcattgagcctgagttggtgctgttcatcgactgcccaagggaggagctggagcgacgcatcctgcaccgcgatcagggaagagacgacgacaacgtcgacactataaggaagcggtttcaggttttccacgactccactctacctgttgttctgtactacgacagaatggggaaggtccgacgggtcgatggcgccaaatccgctgatgcagtctttgacgatgtgaaaggcatatttactcaactacggaccactcagggaagccaaggtggcaatgcgagcagcag

SEQ ID NO: 83179 - DNA, 433 bp, Zea mays
cgaggtggcacacaacgtgtgggccgacaccttctacgccatggcggagaacaacgtcatgttcgagggcatcctggtgaagccgtccatggtgacgcccggcgcggaggccaaggacagggccaccccggagcaggtggccgcgtacaccctcaagctcctccaccgccggatccccccctccgtgcccgggatcatgttcctctccggcgggcagtcggaggtggatgcgacgcagaacctcaacgccatgaaccaggggcccaacccgtggcacgtgtccttctcctacgcgcgggcgctgcagaacacctgcctcaagacctggggcggccacccggacaaggtcaaggcggcgcaggacgcgctgctgctgcgcgccaaggccaactccctggcggcagctcggcaagtacacctccgacggcgaggc

SEQ ID NO: 83180 - DNA, 420 bp, Zea mays
accacgcgtccgcccacgcgtccggaaaataatctcaacggccatattccttcaaacataggcttcctaacgaagctagaaggtatagtcctttccaataataatctcaccggtgtcatcccaccaaccttgggaaacatctccacactaggggtagttgatttttcagtgaatcaactaagcggaagcattcctaataaagtttggcaaatcccaaacataacagtgttaagtctagcacaaaataacctatcaggtggaatcccagatactctctctaacttatcttctcttacatcattaggcttgaacaacaataagctaggcagcgcattgccatcaaacattggcgatgtgttccctcatctaaatatactatacttagattacaacatttttgtgggtacaattccatcttcc

SEQ ID NO: 83181 - DNA, 438 bp, Zea mays
accacacgtccgcccacgcgtccgcccacgcgtccgcccacgcgtccgcccacgcgtccgcatcatgtttgatgtaacttcaaggcttacttacaagaatgttcctacgtggcatagggacctgtgcagggtctgtgaaaacatccccattgtcctctgcggtaataaggttgatgtgaagaacaggcaggtcaaagccaagcaggttactttccacaggaagaagaatctgcagtactatgaaatttctgccaagagcaactacaactttgagaaacctttcctgtaccttgcaaggaagctggctggtgattcgaaccttcactttgttgaagctgttgctcttaagcctccggaagttaccatcgacatggctatgcagcagcagcatgaagctgagcttgctgcagcagctgcaaaacctcttcctgatgacga

SEQ ID NO: 83182 - DNA, 297 bp, Zea mays
accgacaaggagaccaccacccagggccacgatgacctcggcaagcgctgcgctaagtactacgaggccggtgcccgctttgccaagtggcgtgctgttctcaagattggccccaacgagccgtcacagcttgccattgacctgaatgctcagggtctggctcgctacgccatcatctgccaggagaacggtctggtgccaattgttgagcctgagatccttgttgatggccctcatgacattgatcgctgcgcttacgtcactgagacagtccttgctgcctgctacaaggctctc

SEQ ID NO: 83183 - DNA, 370 bp, Zea mays
acagggacaaatacgtggagacacagcagcttctcctccagatcgctgggcacaaggatattcttgaaggcgatccattcctgaagcaggggctggtgctgcgcaacccctacatcaccaccctgaacgtgttccaggcctacacgctgaagcggataagggaccccaacttcaaggtgacgccccagccgccgctgtccaaggagttcgccgacgagaacaagcccgccggactggtcaagctgaacccggcgagcgagtacccgcccggcctggaagacacgctcatcctcaccatgaagggcatcgccgccggcatgcagaacactggctacgcggcttctcttcactcacctgcagagtgcaccgc

SEQ ID NO: 83184 - DNA, 336 bp, Zea mays
  unsure (1)..(336): unsure at all n locations
gaaggatctcccaggaggtcagtggtgatgctctgggtgaggagtttaagggttatgtcttcaagatcatgggtggatgtgacaaacaaggcttcccaatgaagcaaggagttctgacttctggtcgtgtccgccttctgctccacagaggcactccctgcttccgcggttatggcaggcgtaatggtgagcgcaggaggaagtctgtccgtggttgtattgtgagccaagacctatctgttatcaacttggtaattgttaagaagggtgagaacgatctgcctggtttaactgacactganaagccaaggatgaggggtcccaaaagggcctcca

SEQ ID NO: 83185 - DNA, 431 bp, Zea mays
aggattaagccgaaagatcaaaatgacgcatcaattgtcacaaaaactaatttcaagcatctgtattggacgctgacacagcagctagcacaccacaccatcaacggatgcaacatgaggccgggggatatatttgcgactggcacactgagtggacctgaacgggactccctcgggtgtctgctggagctgacatggaacgggcagaaggagataccggtggggaatttgacccgcaagttcctagaagatggagatgaagtcatcttgacaggatgttgcaagggtgaaggctacaacattggttttggaacctgcaccgggaaggttctgccggcacttccctgagccaacacgtcttggcatcagttctccggagtctcaacgatctcagctatcagagagttgtctcaacggtctcaactatcaaa

SEQ ID NO: 83186 - DNA, 389 bp, Zea mays
accacgagtccgcggacgcgtgggccgccagcctccccgtcgcccgccgctcctccagaagcctcggcaacgtcagcaacggcggaaggatccggtgcatgcaggtgtggccggcctacggcaacaagaagttcgagacgctgtcgtacctgccgccgctgtcgacggacgacctgctgaagcaggtggactacctgctgcgcaacggctggataccctgcctcgagttcagcaaggtcggcttcgtgtaccgcgagaactccacctccccgtgctactacgacggccgctactggaccatgtggaagctgcccatgttcggctgcaacgacgccacccaagtgtacaaggagctgcaggaggccatcaaatcctacccggacgccttc

SEQ ID NO: 83187 - DNA, 337 bp, Zea mays
cccttcgggttcgggttcgggtccttaaggttctccggggtccggttccttgggtaaccggatcaaaatggcggcgtcggatgttaagtaccgctgcttcgtcggcggcctcgcctgggccacggacgaccactccctccacaacgccttcagcacctacggcgaggtcctcgagtccaagatcatcctcgatcgggagacccagaggtcccgcggcttcggcttcgtcaccttctccacggaggaggcgatgcggaacgccatcgagggcatgaacggcaaagagctgggacgccgcaacaaaaccgtcaaccaagcccaatctcgcggcggccgt

SEQ ID NO: 83188 - DNA, 430 bp, Zea mays
actggatgccaagagtggtggtgagttggaatcagcacaagctaagaatcaggcactaagggaagctggtgcagttgtgcctacatcatatgaagctctagagagtgcaattaaggaggtatttgacaaactggttgaggaaggaaaaatttctcctgtgactgaaattacacctcctcccattcccgaggaccttaaaactgcaattaagagtgggaaggtccgagctcctacccacatcatttccaccatctccgatgacagaggtgatgaaccgtgctatgctggtgtgcctatgtctacaattattgaacagggttatggagttggtgatgttatctctcttttgtggttcaagcgcagccttcctcgctattgcactcagtttattgagatatgcatcatgctttgtgcggaccatggtccctgt

SEQ ID NO: 83189 - DNA, 433 bp, Zea mays
acgcgtccgaggaaacgtgggcggacgcgtgggcacgcacactctgtgaggataacgaccccctgaatgtcctcatactgatgcaggaacaagttgtccctgggtgtttcctgcaagctcgtgctattgggctcatgcctatgatcgatcagggcgagaaagatgataagattatagcagtctgtgctgatgaccctgaattccgtcactacacggacatcacggacctcccaccgcatcgccttcaagagatccgccgcttttttgaagattataaaaagaacgaaaataaggaggtcgcagtgaatgagttcctgccagcgaaagatgccatcaacgcaatcaagtactcgatggacctgtatggctcatacgtcatcgaaagcctgaggaagtgatctccagctgcttgattgtggttgtggatgctaca

SEQ ID NO: 83190 - DNA, 409 bp, Zea mays
acgaggccgcactgcacgcgagtcctccactccgaccgcacgatggctgcgctgcgcctcgcctccttcaccctccgccccgccgctgcctcggcctccgcctcctccggcgcgaccccaaccgcgtccggctccgtctccgtctccttcgcccgcgcggcgcgggggctgccctccctccgcctggccccgccccgccgccgcggggacctcgccaggccccgcgccgcggccgatgccgcagcggagagctacacgtccgcgctgtcagaggtggccgtcgagaacggcaccctcgaacagacggtctccgacctggagaagctggggaaggtcttcgcggacgaggccgtcgccgagttcttcgacaaccccaccgtccctcgcgaggagaaggccgagctcatcg

SEQ ID NO: 83191 - DNA, 414 bp, Zea mays
aggtggagtcctcggacaccatcgacaatgtcaaggccaagatccaggacaaggagggcattccaccggaccagcagcggctcatctttgctggcaagcagctggaggatggccgtacccttgcagattacaacatccagaaggagagcaccctccacttggtgctgcgtctcaggggtggcatgcagatcttcgtgaagactcttactggcaagacgatcacccttgaggtggagtcctcagacaccattgacaacgtcaaggccaagatccaggacaaggagggcattccaccggaccagcagcggctgatcttcgccggcaagcagctggaggatggtcgcaccttggctgactacaacatccagaaggagagcaccctccacttggtgctccgcctcaagggtggcatgc

SEQ ID NO: 83192 - DNA, 408 bp, Zea mays
gtgacgaggaggagctccagaaggagaacatcaagaacgccgcctcctccaccggcaacatcacgttgagcgtcaccaagagcaacccggagaccggcgaggtcatcggcgtcttcgagagcgtgcagccgtccgacaccgacctcggggccaaggcgcccaaggatgtcaagatccagggggtctggtacgctcagctcgagtgattcgagtgtctaactgctaggtgtccgaccgtcctcatggatcttgggaaggtgtacgtaccatggaaaactttggagagcagaggaggaatcgtgtacgtaatgtacttgttaatgcaaattcgggctgtcgcttttttattttcagtttgggtttcttctctttcttgtgttctcaagaactacatcccctgtgcaaaac

SEQ ID NO: 83193 - DNA, 431 bp, Zea mays
acgggagaaccgaaaatcacgggcgcgagagatcggagcacggcatgtcggaggagcagttcctcgccgtggcgattgaagccgccaagagcgccggcgagattattcgcaagggattctaccagaccaagaacgtcgagcacaagggccaggtggatttggtgacggagacggacaaggcctgcgaggacctcatcttcaaccacctccggaagcacttcccggaccacaagttcatcggggaggaggagtccgcggcgctcggggccaccgctgacctcaccgacgaccccacctggatcgtcgattccctcgacgggaccactaatttcgtccatggtttcccatttgtatgtgtctccgttggcctcaccattgggaaaattcccactgtcggagtcgtcttcaaccccatcatgaacgagcttttc

SEQ ID NO: 83194 - DNA, 276 bp, Zea mays
acggacaggctggggacggtagcatcgacgtggaggtgtgcctcgcgccagacaccatggcgcatctcctcctcgacaaggagttcttgcagtacgtgtcctcccctgcaccgtgaggcggtgacagagtgaatgtgtggcttgttgctgcgcagctacatatattaacgggatttgtaccctttcaccatttggaaagcacttgatatcggcaatttaacccccttgtacacaaattgtcctacaactaactctaggatatataggtgcatttgg

SEQ ID NO: 83195 - DNA, 436 bp, Zea mays
aggattgtgatcagctacttcaatgcaaaattttttaggaacagtcttaatgtgtggtaccagttcattccccagctgatcttcttgaacagcttatttggttacctgtccttgcttattattattaagtggtgcacggggtcaaaagcagatctataccatgttatgatctacatgttccttagcccaacagatgagattggtgaaaaccagttgtttagtggccagaagacagtgcagcttgttctacttctgcttgctctggtgtctgtgccttggatgttgattccaaaacctcttctattgaagaagcaacatcagcaaaggcatcaaggtcaccagtacgcaatgcttcagggcgttgatgaatcagtgggagcagagctgggggaacatcatgaggaagcacatgaccatgaggagtttgagttcagcg

SEQ ID NO: 83196 - DNA, 332 bp, Zea mays
ccggtcgacccacgcatccagcagacgaagccaaagcttatggacttgtcgatattgtaggggatgaaatgattgacgagcactgcgatactgatccagtgtggtttccagaaatgtttaaggattggtagtgggtggatttcttgtaaatttatctcaaacctaaattcgggttttatgctatagaaaatagaaatacttcatgatgatgaatcatcaggttaagatcgatctaaaccaatccattttatatatacatacgacatgccaacggttaaacaacttattagaaatgcaagacagccaatacgaaatgctagaaaatcggccgc

SEQ ID NO: 83197 - DNA, 252 bp, Zea mays
aaaagaaactctttgatcagggatacttggatgagcaattttgtcagattgaggacttgcaggatgaagcaagccctaattttacagaagaagttgtttccctgttcttcaagaactcaaccaggctaatgacaaatattgagcaagctatggacaggaatcccagagatttcagtaaatgggatgtaaacatgcagcatttaaaaggaaccggttcaacaaccggtgcttgcaggatgaaaaacgattgca

SEQ ID NO: 83198 - DNA, 340 bp, Zea mays
attgcaatgattcatacaccaagactttgaagaaatttcatggatggcttgccagttctagttttacggtggcaatgaagcttgctcctaatagagagaaatttatggaggtcattagtggaaccggtgacatcaatgcagatattgagaaattttgcacgaccttctctcctttcctcaaagaaaaccacaactttctggcgagcgtcggtcttgatgatctgaaggcttcatagattaatctccatgctgattacaacaaaataagcatgtcttacgaaactcaaagtgttgccgagggtatacctgtttcccgtagccatctcccccttgaaaaact

SEQ ID NO: 83199 - DNA, 411 bp, Zea mays
gcgtccgaccacgagtccgggaaccctcatgtggttaaaaggcgaataaggaaaggaattcctgattgtctcagaggacttgtttggcagttgatttcaggcagtcgggacctcttactaatgaacccaggggtttacgagacactggtgatatatgagacatcggcctctgaattggaaattattcgtgacatatcacgcacatttccatctcatatattcttccaacaaaggcatggtccaggccaaagatcattgtataacattttgaaagcatattctgtctatgacagggatgttggatatgtgcagggaatgggatttttagctgggttgctgcttctttatatgagtgaggaggatgcattctggttattagtcccattgctaaagggagctgtccatgcacca

SEQ ID NO: 83200 - DNA, 407 bp, Zea mays
  unsure (1)..(407): unsure at all n locations
accaagcgtccggcctcgtgtcacgctacctcagtggggaagcggagcagatcgagtggagcaagatccagacccctacggatgaggtggtggtgccctacgataccgtcgcgtcgcctcccgaagatctcgaggagacgaagaagctgctggataagctcgttgtgctcaagcttaacggagggctcgggacgaccatgggctgcactgggcccaagtctgtcattgaagtccgcaatgggttcacattccttgaccttattgtgattcaaattgagtccctgaacaagaagtatggatgcaatgtcnctttacttctgatgaactctttcaacacccatgatgacacacagaagattgttgagaagtattccaactccaacatcgaaattcatactttcaatcag

SEQ ID NO: 83201 - DNA, 341 bp, Zea mays
cccacgcgtccgcacagccacaagctgctgcgtgcttcctcttcagttcagctgaggtagcggcgcctcacccatcccccccgctacatacacatatctccttcttcgaagaactcggccctttgggagcgagcaggagccggagcaggaccaggaagatcatatcagaagctaggggatatggcgaacgctggcggcggggcggccggggaaggggagtggctcaaggtcgcccagctcagggccctcgtccaggcccaggatgaggaccaccgcgcaaaggaggtggacaacctgacgctgcgtcggttcctgcgcgcgcgcggccacaacgtggacaa

SEQ ID NO: 83202 - DNA, 388 bp, Zea mays
  unsure (1)..(388): unsure at all n locations
agcaaccggtccagcactttcacgctcagctccagcaatggctgcctccaccatggcgatctcctccacggcgatggccggcacccccatcaaggtgggctccttcggcgagggccgcatcaccatgcgcaagaccgtgggcaagcccaaggtggcggcgtccggcagcccctggtacggccccgaccgcgtcaagtacctcggccccttctccggcgagcccccgagctacctcaccggcgagttccccggcgactacggctgggacaccgccgggctgtccgccgaccccgagaccttcgccaagaaccgcgagctggaggtgatccactcccgctgggccatgctcggcgcgctcggctgcgtcttcnccgagctgctctcccgc

SEQ ID NO: 83203 - DNA, 388 bp, Zea mays
gaatttttacaaaagaaaatacttatgatggtgaatccgtcaaaggccttgatgggttcaacatcagaaaagattacctctgccaggtaccaaactttgagttttaaatgataaagctgagaccgggtggttgacttgcacgagaagggagtctcggtgtagtgtctccgtttgagtcgattaaggaccatgtcgatgtaggcttgatgattgaggaccttttaactggtcacatgcctcatcatggataagctttgcctcgggcagactaataccagaaagggcaacacacaatgggagtggagagatggcgagagtagcgtgtaccctccatggtaagaggctggacggtggtgtatctgtgctctcggttggcgtgaacccggtc

SEQ ID NO: 83204 - DNA, 405 bp, Zea mays
cggacgcgtgggaactggttgagaaaaataactggttacccgaggggcctattaccattggtgttacttcaggtgcctcaactccagataaggttgttgaggatgctcttcagaaggtatttgagatcaagcgtcaggaaattttgcaggttgcataaattttaagcagagatttggtgaagagctgaatagttttggcttggcaaaggttactagaaacgttgcacaggcaaatgtttgtacagtagctaaggatgtaacgagttgggcacgaatactaccacgagtcactatccttgtgctggaatttacagtacggtgaaactaaaatggtgttatcattggtccgaataacatttgcatcagcctttctaacttctaaggtcaactttttgccacttgatg

SEQ ID NO: 83205 - DNA, 431 bp, Zea mays
gggtcgggcacgcgtccggagcaaacgggtgcttaagggctccaacatcgtgctgggcccatacgcgcgcggcgacgcacaggtggtcaacgcagattttgtaaagagcagcgtgcgtcccgatgactgccctcgggacggccttccggagtttgcactcgttggccggtccaacgtcggcaaatcgtcgctgctcaactcgcttgtccgccgcaagcgccttgcccttacctccaagaagcctgggaagacccaatgtatcaatcatttcaaagtaaatgacagctggtatcttgttgacttgcctggttatggatatgcttctgcaccacaggaagctcgtaccaattgggatgaatttactagaaattactttctcagtcgggagaatttggtatcggtttttcctcttatagatgcacgtatacctg

SEQ ID NO: 83206 - DNA, 408 bp, Zea mays
gggccggcccacgcgtccgaacgaacgcgctcttctggatccggcactccatcgtgcgcgccatgaccctgtcaagcttcacccgcttcccgttcgccatggattcggaccggcaggaaatcggcagggcccgggaggagctggcgttcgacctcggccggccgcccacggacgaggaggtgcgggcgagggtgggcctctccccgcagaggtaccgcgacgtgctgcggatggccaggcccacatactcgctgcacgcccggaaccgcgtcacgcaggaggagctcatcggcgaggtcaccgacgccgaagccgtcggggtcgacgccggcggcaagcacgacgcgctgctccgcctcgccatcgatgacctcctggactctctgaaacccaaggagagcctggtga

SEQ ID NO: 83207 - DNA, 453 bp, Zea mays
  unsure (1)..(453): unsure at all n locations
acgactcccagctagcccctcacgcgctcgtcggcgccctgtcgagtcgagcccgcatctcgcccgatcgagagcgagcgcatccgcgcgccggggagagctttgctttcggtggtctgtaacgactcaacgacgacggcaggcggtagataaaggcgcgcgatgtgcgacgcggcgccgaggtacaggggcgtgcggaagcggccgtggggccggttcgcggcggagatccgggacccggcgaagcgcgcgcgcgtctggctcggcaccttcgactcggccgaggccgcggcgcgcgcctacgacgtggccgcgcgggccctgcgcggcccgctcgccaggaccaacttccccgcgctcgccaccacctcccgccgccccgcgcccacgtgcagctccggctccaccgtcgagtcctccagcgggccccgcgccggggacccanggccaggg

SEQ ID NO: 83208 - DNA, 315 bp, Zea mays
cccacgcgtccgcccacgcgtccgcggacgcgtgggcgctgggtagctccggcgccggatcgagcgtcgtcgttcctcgaaacttcaggctattagaggagctcgagcgtggagagaagggcattggtgatgggacagtgagctatggaatggatgatgctgatgacatctacatgcggtcatggactggtaccatcattggccctcacaatactgtacatgagggtcgcatctaccagctgaagttgttttgtgacaaggactatccggagaagccacatctgtcagattccactcaagaaatcaacatgacat

SEQ ID NO: 83209 - DNA, 373 bp, Zea mays
  unsure (1)..(373): unsure at all n locations
atcaaagggtttgattgttgactctcgtaaaggctcccttcagccattcaagaaaccttgggcgcatgagcacgagcccttgaaaaccttgtatgatgctgttcagtccatcaaacctacagttctgatcgggacatctggagttggaagaacattcacaaaagaaatcattgaggccatgtcttccttcaacgagaggcctatcatcttttcactgtcaaacccaacctcgcattctgaatgcactgctgaacaagcatatacctggagtcagggccgttcaatctttgccagtggcagtccatttgcccccgtggagtacgaaggaaagacttttgtgcctgngcagtcgaacaatgcctacattttccct

SEQ ID NO: 83210 - DNA, 387 bp, Zea mays
aggacgagtgggcggacgcgtgggaagagcctggaccaacaactcttgctttagggattgatttgacctcgttggggttgaatttgaactcccaagataatctttacaagacatttggctctccgtggtcaagcgagccagctgtaggagaacctgattatcagatcccagcttgtttctctgcagagccaccaccagcgctgcaaccatttcattttcagaagtttcaccctttgacactattctacatcttttacagcatgcctaaagatgccgctcagttatatgctgctaatgaactatacaataaagggtggtttttacacaaagactaccgtgtctggctaacaagagctcctaattccgcacctcttgtgaaaactccac

SEQ ID NO: 83211 - DNA, 404 bp, Zea mays
  unsure (1)..(404): unsure at all n locations
atcgcacactgggagtggagagatggcgggagtagcatgtaccctcctggcatagtagcacgcctggtagggtaatgtgctctcgggtggcgcggacctgttcatgtagtggaggactccgtgggaacggttgacatatgcaagggttaagtgctacatatgtcgtgtggttagagatcccagctgggtataatcggttcgaatcgtcgttgctcctcggttatggagactcatccctgtgaccatcatcgtagttagcaagtgaaatatgagaatgaataaaatggagctagtataggccaagtgcttgaactagatcaggcanatatagattcaggtaataacctaactagtgaaataaaatttggcttaaggatcaactggtancaagcttttctgcaaaa

SEQ ID NO: 83212 - DNA, 406 bp, Zea mays
gcaaatcccccttcgcggccgcaaaaatggtaaacgttcctaaagacaagaagacgtactgcaagaacaaagagtgcaagaagcacacactccacaaggtgactcagtataagaagggcaaggatagcctgtctgcccagggaaagcgccgttatgaccgcaagcagtcaggatatggtggtcagaccaagcctgtcttccacaagaaggccaagaccaccaagaagattgttctgaagctgcagtgccagagctgcaagcactactcacagcacgccatcaagagatgcaagcattttgagattgggggagacaagaagggcaagggcacatctcttttctaagcttctcgtccacctgtcgggtttttgattttaacctgtgggtctactactactgttataaa

SEQ ID NO: 83213 - DNA, 399 bp, Zea mays
cccacgcgtccgcttcgggcccaactccaccaccttcatcgtgccggcggagatcttcccagcaaggctgcggtccacctgccacggtatttcttcagctgcaggaaagtgtggcgccattgtcgggtcatttgggttcctgtacgcggcgcagagcacggatcccaccaagacggactccgggtacccgccgggcatcggagtgcgcaactcgctgttcatgctcaccggatgcaatgttatcggtttcctgttcacgttcctggtgccggagtccaagggaaaatcgctggaagagctctccggcgagaacgacgaggaggcagcaccgcagcaacagcagaccgtgccgacagatttgagtgaataaaacagagaaacagtacactcctactacta

SEQ ID NO: 83214 - DNA, 386 bp, Zea mays
aggaagcgtgggcaaaactattttggttgaacagaagattgactacagcatcatgggaggattagtgattgaattcgggcagaaggtgcttgatatctcaatcaggaacagggcgaagcaaatggaggcgttcttgaggcaaccacttgacttctaacagccttttggataaaagaagcatcatcggaatgcagaggctgtcctgttgaaggttttcctgtgtctgcaattttaatctggccttttgaataaaatgtttcctctaacaagtgaagggcactgtttttattgtctcgtgggccacagatgcctgctgaacaatttatgttcatttcttcttttcttaaagaagcatgcactaagaacatgaaggatgcatgccatgg

SEQ ID NO: 83215 - DNA, 442 bp, Zea mays
accacgcgtccgcccacgcgtccgcccacgcgtccgcactcatcgatctacacacatacatagtttcttctactacacgacgacaaacatggggaagcctgcgaagatcggagagtggggtggatacgccggcgatcgtcgggatctgagggctactccggaccggctgatcgaggtgaaggtcacggcggacaacagcagctgcatccgctccatctccttcatctacatcggagccgatggcaaaccgtacgaggaggggccatggggtttcggccatgctggcacggagtacaagattgatctgtgcaggttcgacgagagcttgacggagatctccgggaccacgggcccagcctacaacattgacaatctggtcaagtctctcaaattcgtcaccaacaaacgcgcttacggaccgtacggcagggacgagggcacc

SEQ ID NO: 83216 - DNA, 262 bp, Zea mays
gcccacgcgtccggcgccgccgcctccgacatcgtctcttcgtccccacgagcaaccgataatccgccggcgctgagatgttggtttatcaagacctcctatctggcgacgagctcctgtcggattcattcacctacaaggagctcgagaacggcgtcctgtgggaggtcgagggaaagtgggtcacccaaggtcctgttgatgtagacattggtgccaatccatccgccgagggtggtgaggatgaaagcgttgatgacac

SEQ ID NO: 83217 - DNA, 315 bp, Zea mays
  unsure (1)..(315): unsure at all n locations
ccgggtcgacctacgagtctgaggttcgcaggatcaccatgttcaaccggctaaacaagtttgggccaaaaatatttgaaacaccccccaacttaaaaaatgcggtcagggaggcaattgaggggatgagggtcgcactangtgcggctgtgattttaaattattgcctgcaaggtctcttccatccagcaaggaaagtacgagaagtgtattggaagatatacaactctttgtacatcggcgcgcaagatgcacttgttgcttcttatcctgccctggaagacgatggggataacatctttagtcctccaaaat

SEQ ID NO: 83218 - DNA, 364 bp, Zea mays
  unsure (1)..(364): unsure at all n locations
accacacgtccgcggacgcgtgggatctggagttggaagaacattcacanaagaaatcattgaggccatgtcttccttcaacgagaggcctatcatcttttcactgtcaaacccaacctcgcattctgaatgcactgctgaacaagcatatacctggagtcagggccgttcaatctttgccagtggcagtccatttgcccccgtggagtacgaaggaaagacttttgtgcctgggcagtcgaacaatgcctacattttccctggactcggcctcggtcttgtgatctctggagccgtccgtgtccacgaggacatgcttctcgccgcctcgaaagcgctagctgatcaggccacacaggacaac

SEQ ID NO: 83219 - DNA, 429 bp, Zea mays
gacgcgtgggtcaagatggttggtgggaccctggcagagcagacgtatttgttccttggtgctggggaggctggaactggtattgcagaacttattgctcttgagatttcgaaacagacgaatgctccaattgaagagtgccgcaagaaggtttggctggtggactcaaagggtttgattgttgactctcgtaaaggctcccttcagccattcaagaaaccttgggcgcatgagcacgagcccttgaaaaccttgtatgatgctgttcagtccatcaaacctacagttctgatcgggacatctggagttggaagaacattcacaaaagaaatcattgaggccatgtcttccttcaacgagaggcctatcatcttttcactgtcaaacccaacctcgcattctgaatgcactgctgaacaagcatataca

SEQ ID NO: 83220 - DNA, 397 bp, Zea mays
  unsure (1)..(397): unsure at all n locations
acggacgcgtgggcggacgcgtgggcagctcttcaaccctataggctccaacaagcaatcgcagcaagcaacatacctttatcacccttgtttcaacaatcgccagccctatctttggtgcagtcattggtacaaaccatcagggcacagcagctgcagcaactcgtgctacctgtgatcaaccaagtagctctggcaaacctttctccctactctcagcaacaacaatttcttccattcaaccaactgtctacattgaaccgtgctgcttatttgcagcaacaactattaccattcagccagctagctactgcctactctcagcaacaacaacttcttccatttaaccaattggccgcactgaaccccgctgcttatttgcagcagcanatactac

SEQ ID NO: 83221 - DNA, 401 bp, Zea mays
aaaggagtagaaataaaataaatcaaggctttcttttggccaaaacattgtgtcattttcagtagatatgtctagactcgggcacaatactgttaactgtgcgagcttcagactgctcctgaaggtcacgctattgctgaggccgaagatgcccttctggctgctgatcatgacttggggcaggcgccagtggtggggtggtggaaattgagcccaggaagcttgagagtgacttgctgaagcagcagaagtcgtaggctgttgattgcctacgtatttcgggatatatggagagtagcacgaagcagtatgcaggacctgcttcggctaattctgccgtgcctcgacttcagcaatttccttttgcttttgtatcatgacctggcacgtccttgttgtgt

SEQ ID NO: 83222 - DNA, 379 bp, Zea mays
atactggaccaatctgccaccacactttgatcacacacaggaagttgagatcagaaaaatgcaggctgccgctactgccgccgggttctcggccgtgctgcccgccaagggcaggccggcggcgaggagcagggtggtggcccgtgtccccgccacaaggaggagcgtccgtgtagctgccgtcgtcgcgaccgaggccgcgcagatcgactacagctcaagcgtctcggtgttcccgatggaggcctgcgacctgcttggtggcgacgcgtgcaacgggcccatgttcccggaggccaagcccgcctcggcggcggcggcggcgagcaggattgtggtcggggtggacagggactacctgtcctacgacgagccaaag

SEQ ID NO: 83223 - DNA, 209 bp, Zea mays
cccacccgtccggccaagatggctcctgagggctaagaaaagctgtacaccaaggtcaagagcattcacgacagcctgatcgaggctggtgtccgcgtcgagtccgactaccgtgagggctactcccccggatggaagttcaacgactgggagctcaagggtaatcctcttcctaaccaattccgtcccaaggattcccaaaaaggttt

SEQ ID NO: 83224 - DNA, 401 bp, Zea mays
  unsure (1)..(401): unsure at all n locations
agcagcacactcagctatccagcaaaagagatcgagacgcaggagtcatggccaccgtcagcgccgccgtggtgaccaccatcgttgcccgcgccgcgatcgccaggcccaatgctctagggctgcctgcgttgagggcgaggagcgagagggtgcggtgcagctacgccaaggatgccaagaacgcggccccagtcagcaccaagggcgcaggcgcgtcgctgctcgccgcagcgggcgcggtgaccgcgtcggcggggcccgcgctggcgctcgtggacgagcgcatgtccacggagggcaccgggctgagcctcgggctcagcaacaacctgctggggtggatcctcctgngggtcttcggcctcatctggtccctctacaacatctacacctctgac

SEQ ID NO: 83225 - DNA, 406 bp, Zea mays
accccgccgccgccgccccccgtcgccccggctcccgcgcgcatcggtctggccctccccgtctcgtctcccccgctccgctgccgcaggtctattgtcccttccagaaacctggctgccagaagggagccgaggggaggaccatctactgcaaagcccacggtggcggcaggcggtgccagtacctgggatgcacgaagagcgccgaaggtcgcaccgaccactgcatagcccacggcggcgggcggcgctgcagccaggacggctgctcgcgcgccgcgcgcgggaggtccggcctgtgcatcaagcacggcggcggcaagcggtgccagagggagagctgcaggaggagcgcggaggggcactcgggcctctgcatctcgcacggcggcgggaagcggtgcca

SEQ ID NO: 83226 - DNA, 424 bp, Zea mays
agctcttcttgaggtcaagggcagaaggcattcttaaagaatattatcctacaagaactgaacgggtggacaagccacttctggaccagattgtaagagcttcatatgatcctggtgctgcaaaagtccttgagagtgtattcaacttcaatctttcaattcctcttaacttcttatttgattcttttggagggaagatattagttatccagggtatgaaagacccccttacaaaatctgaggcatttgtcaccatgctccgagaacattgcagcaaggttcaaatcagagagttaaatgcaggtcatgctccacatgatgaagttccagatgaagtaaataccatactatgtaaatgggtggagcagattgaagttaagccagccctggagaaagacaaggcaatataggtaacatttagaat

SEQ ID NO: 83227 - DNA, 211 bp, Zea mays
gaaccttggggacagagatgcaagcccgggccatttttgaagctgctatagcaatgaccaaccagggtgttcaagtgttcccagagataatggttcctcttgttggaacaccacaggaactggggcatcaagtgactcttatccgccaagttgctgagaaagtgttcgccaatgtgggcaagactatcgggtacaaagttgggacaatgat

SEQ ID NO: 83228 - DNA, 338 bp, Zea mays
  unsure (1)..(338): unsure at all n locations
atcaacgggtcaatccgtgtgacggtgcagggcgaggtcatcgagttctgcttcggggaggagcacctgtgcttccagactctgcagcgcttcacggccgccacgctggagcacggcatgcacccgccggtctctccaaaccccgagtggcgcaagctcatggacgagatggccgtcgtgggcacggaggagtaccgctcggtcgtcgtcaaggagccgcgcttcgtcgagtacttcagatcggctacaccgggagaacgatttccggaaggatgaacatcngcagccggccaagcaaagaggaggcccggcggcggcatcacgaccctgcgcgccat

SEQ ID NO: 83229 - DNA, 395 bp, Zea mays
acgtgtgtctgacgatgttacagaacttgaggcaatattggtgcttcaaggatgaatagtgattgcgtgtcattccgggattagtgcggacagggaaatgttgaaagttgtatgagatcgttccagaaagtgaagagggagcacggtgccctgaggcagaaactagaggcctatttccagctgctatgacaagctggtcctgctggagctgccaacaagcctggatgtaagaactaggagttgcaggaaaacggattatgacccaagaagatacctcactacaactgactggcccggtggccctgctgcgcagcaattaggggtcagcatacgaagcgaaacaagagatgatatgcatggatatgcacaaaactgtaataagagattgttttttc

SEQ ID NO: 83230 - DNA, 434 bp, Zea mays
acccacgcgtccgcccacgcgtccgcggacgcgtgggtgcaaaagcactgaatctcagggtaaggaagaaggacaatggtgttgtcaagattcaggggaggaaggtggggaggaagggtgtcctggagttcgacactgaaatatttgagatcacggcatcctaccacctcatcgagatgaaacaaacgggcggtgattcacttgagtacaagaaactgttggaagaggacatccggccagcactgaaggacatagtctgggcctggcatggagatgaccagcaacaaaagtagtagctttggatctctcttttttgttccataaaattgttagatctttcacttcagattgattttgttcgacatgtgcgtgttcttcttactagttacattctttctgtttctgtggaccattggactgtattctgtcgtgca

SEQ ID NO: 83231 - DNA, 423 bp, Zea mays
acggccgcaagatcgtggacatcctggtggagcagggcatcgtgccggggatcaaggtggacaagggccttgtcccgctcgccggctccaacaacgagtcgtggtgccagggcctggacggcctggcgtcccgcgaggccgcctactaccagcagggcgcgcggttcgccaagtggcgcaccgtcgtcagcatccctaacggcccctccgagctcgccgtcaaggaggccgcgtgggggctcgcacgctacgccgccatctcacaggacaacgggcttgtgccgatcgtggagccggagatcctgctggacggcgagcacggcatcgagcgcacgttcgaggtggcgcagaaggtgtgggccgaaaccttctacgccatggcggagaacaacgtcatgttcgagggcatcctgctgaagccgt

SEQ ID NO: 83232 - DNA, 398 bp, Zea mays
accacgcgtccgcccacgcgtccgcccacgcgtccgctagtgttggagagaagagaatacactacactacgcatggcaaaccagcaccagggccagggcatggcggcattggccctggtgctgctggtgctggcggcggcggcggccaaaacggcttcggcggtttcttgcaaccccgggcacctggcggcttcccccccggcattaatggccggcccagacccttccgcttcttgcggctccaacctcaaggcccaacaggggtgcttctgccatttcgtgaaaaaccccacctacgggcgctacatcaacagccccaacgcgcgcaaggtcgtcgcctcctgcggcgtctccgtgccgcgctgctagtactagtacgtgtgctgtgcatgcatgca

SEQ ID NO: 83233 - DNA, 440 bp, Zea mays
  unsure (1)..(440): unsure at all n locations
agcatcgcaatcggcaacacgccgggcgttctgacggagacgacggctgagctcgccgcctccctctcgctggcggcagccaggaggatcgtcgaggctgaccagttcatgagggctggcctctatgacggatggctcccacacctgttcgttggcaacctgctcaagggccaaactgttggagtcattggagctggtcgcattggctccgcctatgcacgcatgatgattgagggtttcaagatgaacctcatctactacgacctgtatcaggccacacgtcttgagaatttcgtcacagcatatgggcagttcctcaaagcaaacggtgaggagcctgtcacctgnaagagggccgccaccatggaggatgtcctcagggaagctgacgtgataagtctgcatccggtgctggacaagacacctaccatctgataaac

SEQ ID NO: 83234 - DNA, 436 bp, Zea mays
gggtcgaggccgcgtccaggggaaggcgggcgggctggtggttcgggcggagatgtttggccagctcaccaccggcctcgagtccgcctggaacaagctgaggggagtcgatgtattgacaaaggaaaacatagctgaaccaatgcgggatatcagaagagcacttttggaggccgatgtaagtttgccagtagtaagaagatttattgagtctgtaagtgaaaaggctgtaggcactgatgtgatccgaggtgtccgacctgaccagcagttggtgaaggttgtgagtgatgaactggtacaactgatgggcggggaggtatcagatttggtgtttgcaaaatctggaccaactattatattattggcaggtctgcaaggtgttggaaaaactactgtttgtgcgaagcttgccttctatctcaaaaaactgggc

SEQ ID NO: 83235 - DNA, 395 bp, Zea mays
atcctatttctccactccgcttttgcttggttccatcgggccggagaggagaagctagctaactagcagcagctctgttggtgtgtgtgtgtgtggagggtagctgcagctggggctagctggaaaggtcgggagccatggggaggggccgggtggagctgaagcggatcgagaacaagatcaaccgccaggtcaccttcgccaagcgccgcaacggcctgctcaagaaggcgtacgagctctccgtgctctgcgacgccgaagtcgcgctcatcgtcttctccaaccgcggcaagctatacgagttctgtaacggaccgagcatcacgagaacacttgagaggtaaaaaaaaaacagttatgcaggcccagatactgctgtacagaacaaagag

SEQ ID NO: 83236 - DNA, 390 bp, Zea mays
gcgtccaaggacacttgggtgaccccttcaaggtcctggacaaaagggaattgggcaacctggtgaattttgctacaaaaaggggccgcaaagctaggcctaacttgaaggtgggcatttgtggaaaaaacggtggaaagccttcgtctgtggccttcttcgcaaaggctgggctggattacgtttcttgctcccctttcagggttccaattgctaggctacctgcacctcaagtgcttgtctgaggctgcctcctccgttggaaaccggattgcctgctgctggtggatgtggtgatcaacagtattattacacagccatgctaagtgaacattactagtagcagtgctcataaaagctacaatcccatctcccttttttttccaatca

SEQ ID NO: 83237 - DNA, 429 bp, Zea mays
acccacgcgtccgcggacgcgtgggtatcgaggaggtttttagggtggtggtggtgttgtgaggagctgctgccgctgctctccagtctccaccgatggcgatcaagaacatgacggtggcggcgacgacgcggtcgctggacgcggacatgacggtggacgagttcaaggagtggctgcggcggttcgacacggaccaggacgggcgcatcagccgcgacgagctgcggcgcgccctgcgtgccatccgctcccggttcacggggtggaggagcaggcagggcatcagttacgccgacgctgacggcgacggctacatcgacgacagcgaggtcgatggcctcatcgagttcgcgcagaagaactcggcctcaagatcgtcgcctactgatctcacatggggcgcggcgcgcggccgtcggggggtgg

SEQ ID NO: 83238 - DNA, 412 bp, Zea mays
agtctcgtgctccgtcgacaagccggtggtgattggcctggcggcagactcagggtgcggcaagagcaccttcatgcgccggctcaccagcgtcttcggtggcgccgcggagccgcccaagggcgggaacccggactccaacacgctcatcagtgacaccacgacagtgatatgcctcgacgactaccattccctggacaggaacggcaggaaggagaaaggtgtgaccgccctcgaccctagggccaacaactttgatctcatgtatgagcaggtgaaggcgatcaaggaaggccaggcagtcgagaagcccatctacaaccatgtcactggcctcctcgaccctccggagcttatcgcgccaccaaagattttcgtcattgaaggtctgcacccaatgttcgatgagcga

SEQ ID NO: 83239 - DNA, 189 bp, Zea mays
agtttcgcgcgtggacgccaccgtcctccatcccatcatcgccgcgggccatatcccggttatcgccaccgttgccgccgacgagactgggcaagcctataacatcaatgctgatacggcggctggcgagattgccgctgccgtgggcgccgagaagctgctgttgctcacagatgtgtctggcatttt

SEQ ID NO: 83240 - DNA, 367 bp, Zea mays
cccacgcgtccgggggaactgtcaggtaaacgacatcctagacattggctgctctgttggagtaagcaccagatacctcgctgagaagttcccatcagctcaagctgttgggctcgacctatcaccgtactttcttgctgtggcggcacaaaaggaagaaaaactgtcacggccaaagcctattcgctgggttcatgccaatggtgaagcgaccgggctgtcttcagattcatttgaccttgtctcccttgcttatgtgtgccatgagtgcccagcacgagcaatcacgggattagtgaaggaagcattcagggtccttcgcccgggaggaacaatcgccttaactgacaattcccctaaatccaaa

SEQ ID NO: 83241 - DNA, 365 bp, Zea mays
acccacgcgtccgctcaaatatgaaaatgatgctggcaagaaggaaattcagctgcagcttgagaagatgaagaaatatgcttctgttatccgtgtcattgctcatacccagattaggaagatgaagggtttgaagcagaagaaggctcacctgatggagattcaggtcaatggtggtaccattgctgacaaggtggactatggctacaaattctttgagaaagaggtccctgttgatgctgtcttccagaaggatgagatgattgacatcattggtgtgaccaaggggaaaggttatgagggtgtggtcactcgttggggtgtcacccggcttccccgcaagacccacaagggtctccgcaaag

SEQ ID NO: 83242 - DNA, 406 bp, Zea mays
agagaaggttgtggtgtctgaccgtgtcgtggactcaccgtgctgccttgtcactggtgagtatggctggacagccaacatggagaggatcatgaaggcgcaggccctgagggactctagcatgtcggggtacatgtcgagcaaaaagactatggaaatcaacccggagaacccaatcatggatgagctccgtaagcgcgccgaggctgacaggaatgacaagtcagtcaaggatcttgtgatgttgctgttcgagacagctctcctgacctccggcttcagcctggatgaccccaacacctttggcacccggattcatcgcatgctcaagctcggtctgagcatcgatgaggacgagtctgctgaggccgaagctgagatgcctccgctggaagatgacgccggc

SEQ ID NO: 83243 - DNA, 424 bp, Zea mays
  unsure (1)..(424): unsure at all n locations
agaacacgccgctgtctcgaccccttgtcctcctccttcagcaagatggcggagattgagataaaaacagcacctgctgacttccgcttccctacaacaaaccaaacaaggcattgttttactcgctatgtcgagtaccacaggtgtttgaatgccaaaggggatgatgctggtgtttgcgaaaaatttgccaagtactacaggtccctttgccctggagaatgggttgagaaatggaacgagcagagggagcatgggacgtttccaggacctctctgaatgtaccgcccgagacctccagttggaccagtcaacaagttggccaggcagtcctactgttccattctgcattcctacttccagaatcgtaaatgccttttgtcncttgctcttcaaccaagtcacacaaaactgttagtgatgc

SEQ ID NO: 83244 - DNA, 344 bp, Zea mays
  unsure (1)..(344): unsure at all n locations
agctttcttcaaatcattggttcctctttggtgccgacagatcccatacaccatgatgaagttcgcatgcttcgaaaaaacagttgaacttctgtataagcatgtggtgcccaaaccacgttctgaatgcaccaaaggagaacagttggtggtaacgttcgccgccggatacattgccggtgtcttctgcgccatcgtctctcaccctgcggacaccgttgtatccaaactcaaccaagaaaaaggctcttctgccctagacgtcgccaaaaaggttggctttgccggtctctggaagggattgggtcctcgtatcatcatgatcggtacattaancgccgccc

SEQ ID NO: 83245 - DNA, 401 bp, Zea mays
acgtccatgctctccgctaccaccgtgccactccagcaggggggcggcctgtccgagttctccgggctcaggagctccgcgtcgctgcccatgcgccggaatgccacctccgacgacttcatgtccgccgtctccttcaggacccacgcggtcggcacgagcggcgggtcgcggcgggcgccgacggaggcgaagctgaaggtggccatcaacgggttcggccgcatcgggcgcaacttcctgcggtgctggcacgggcgcggcgacgcctcgcccctcgacgtcatcgccatcaacgacaccggcggtgtcaagcaggcgtcccacctgctcaagtacgactccacgctcggcatcttcgacgccgacgtcaagcccgtcggcgacaacgccatctccgt

SEQ ID NO: 83246 - DNA, 427 bp, Zea mays
  unsure (1)..(427): unsure at all n locations
agcgctgtccgctagaccccgcccgaatcaatggagattagggctccgccgacgagcctgaggctcgcgccgccgcccgcctccgccagcttccgccgaaccccgcttaggacctccttccttcgcggcagcgtgtcacttaaagttgtgcaagtacggcagtcaaatgtcaacagatttaagtgcaatagcatacgaagtaacctctttgataggctaacaagggttgtcaggtcctacgcaaatgcagttctaagttcgtttgaagaccctgagaagattctagaccaggcagttctggagatgaatgatgacttgacaaagatgcggcaggccactgcacaggtcttggcatctcaaaagcggcttgagaatanatctaaagctgcagaacaagcttctgctgattggtatcggagggctcaac

SEQ ID NO: 83247 - DNA, 427 bp, Zea mays
actgaacctgttaaggtggaggaagaggtgaagccagagccacccccacagccacagggtgacttggtggatctcagagaagatactgttagtgcagatgagcaaggtaataggcttgctctagcactcttccaggggccacccgctgctggtggaaacaatggttcatgggaggctttcccttcaaatggtggcaacgaggtgacttcggcatggcagaatcctgcagctgaacctgggaaggctgattgggagcttgccctcgtagagacagcaagcaacttgtccatgcagaagccagcaatgtcaggtggtatggacccgctgctgctgaatggtatgtatgaccagggtgttgtgcgtcagcacgttagtgcacaggtgaccaccgggagtgccagcagcgtcgccctgcctgctcctggac

SEQ ID NO: 83248 - DNA, 172 bp, Zea mays
cccacgcgtccgccgcttatgctctggaaacccgttgcacctgtgtacccgcgccttgtcacgaaggtcccaggtggcttaactccagatgaggccacaaaaatgcgcacgagaggacatcagttaccaccaatttgtaaacttgggaaaaatggtgtttatgccaaccttg

SEQ ID NO: 83249 - DNA, 351 bp, Zea mays
agcaaagtaaaacctgtgcatattgttgatgttcctggtcatgctaggctcaagcccaagcttgatgaagtcctgcctaaagctgctggggttgtctttattgttgatgctcaggatttcttgtctagcatgcaagctgctgcagagtacctttatgacattctgacaaaagcatctgtagttaagaaaaggatccctgtgcttatattctgcaacaagacggataaagttaccgcccactcgaaggaattcatcaagaaacagttggagaaagaattgaacaagcttcgggaatcgaggaacgccatatcttcagctgacatctccgatgaagtccagctcggggtccct

SEQ ID NO: 83250 - DNA, 407 bp, Zea mays
acccacgcgtccgcccacgcgtccgcccacgcgtccgcccacgcgtccgcccacgcgtccgctacttgcaacagcagctgcttgcatccaacccacttgctctggcgaacgtagctgcataccagcaacaacaacagctgcaacagtttatgccagtgctcagtcaactagccatggtgaaccctgccgtctacctacaactactttcatctagcccgctcgcggtgggcaatgcacctacgtacctacaacaacagttgctgcaacaaattgtaccagctctgactcagctagctgtggcaaaccctgctgcctacttacaacagttgcttccattcaaccaactggctgtgtcaaactctgctgcgtacctacaacagcgacaacagttacttaatccattggca

SEQ ID NO: 83251 - DNA, 393 bp, Zea mays
ggccaaaattttagccacaaaggccccgactgacgccaaggttaccaaggtcaacaggcgttctggcaaggagcttgagaaagagcccaagttcttgaagaacggcgatgctggtatggtgaagatgattcccaccaagcccatggtggtggagacattctcgcagtatcctccccttggtaggtttgctgtccgcgacatgaggcagacagttgctgttggagtcatcaagagtgtggagaagaaggacccgaccggcgccaaggttaccaaggcagctgccaaaaagaaatgatgcaacctgtcgttaatcctgtatctgcttttgcaatacctgacttgtcactccatcccgaagttttgtatgcggttgttactgttattgtgtactgt

SEQ ID NO: 83252 - DNA, 380 bp, Zea mays
agcactacctaaccagattggaagggcattcgggaaaggactgggaaaaggacccaaatttcccaaaaacggggaagccgggaaggggaaaaagggtcccaataaacccaaggggggggggaacctttcccaataacccccccctgggccaattgccggccgtgacatgagggcaaacggggctgtcggagtcatcaagagtgtggagaagagggaccaactggagcaaggtgacgaaggctgctgccaagaagaaatgatctatctggctggtgacgaaggctgctgccaagaagaaatgatctatctggctggtgctgtgcttgcttgttggttacctcgtggaagcttaaaatatctcgtcctgttgacatccttgc

SEQ ID NO: 83253 - DNA, 427 bp, Zea mays
actgttaatgagaatagtaattcgcttttcttaacaataggacctggggatttcttggttcatcatgctattgctctaggtttgcatacaactacattgattttagtaaagggtgctttagatgcacgcggttccaaattaatgccggataaaaaggatttcgggtatagttttccttgcgacggcccagggcgcggcggtacttgtgatatttctgcttgggacgcgttttatttggcagttttctggatgttaaataccattggatgggttactttttattggcattggaaacacattacattatggcagggcaacgtttcacaatttaatgaatcctccacttatttgatgggatggttaagagattacctatggttaaactcttcacaacttattaatggatataatccttttgggatgaata

SEQ ID NO: 83254 - DNA, 428 bp, Zea mays
acccacgcgtccggaactctctccgcgcggtgcaagaacggtatatgaactctgataaagatgttcccccagttagaattatagttgctgatggagaagaggacgttactatcaaggttagcgatgaaggtggcgggataccaagaagcggcctcccgagaattttcacgtatctgtacagcactgcaaagaatcctcctgagctagatagacctaatactgaaggggtaactatggctgggtatggtttcgggctcccgatcagccgactctacgctcggtattttggcggcgacctgcaaatcatctcgatggaaggatacggtaccgatgcttacctccacttgtcgcggctgggagattcggaggagcccttgccttgacggcatatttttgtggacctccagtaccactcttctcctgtaact

SEQ ID NO: 83255 - DNA, 407 bp, Zea mays
  unsure (1)..(407): unsure at all n locations
cggacgcgtgggcggacgcgtgggatcacattgagtagcaagtaatgtgttccaataatatgtagacatttgagacaaatctgcattattattactaacaaaaactaagacagcaacatcaacacacccaacaacagttcaattcacccaaccacctcctctccctgctctttgatgtcgccctcgcttcttcctccccgaccggccatcagttccgacgactgcttccttcgtttgtccctgcagccagctgtttccaccgttcccagggcaatggtcgcggtccccgcctcgttcgactactcacctgccgtttccaccggttggcaggccgccccatgacccataccagtagaaaattaacgaagctaatgggtacagacacangacagttctaaaatgggact

SEQ ID NO: 83256 - DNA, 387 bp, Zea mays
aaatgacatgcctctttttcaagccatagggatcttgcttgacaggaatccgcatatgaacctgcagggcctgcaatatgaagtactgcactggtgcatatgtaggctggaggcatggttcgctactgacatggacaatatatctctgaaaacttgggatcaggaacatgtgcttaccggcggacatggtcttatggtgaatggctacgaccctgtcatcagagctctcgctcaaggtctagatattcacctcaaccacagggtcacaaagatcatacaacgctataacaaggttattgtctgtgtggaagatggggcgagttttgtcgcagacgctgctatagtaaccgtccctctcggggtactcaatgcaaacatcatcaagtt

SEQ ID NO: 83257 - DNA, 372 bp, Zea mays
aggacgcgtgggcggacgcgtgggcgccgcatagaataattctggcgaggatgacgagctcctttctgaactaaaagataagtgggatgcaatggagaacaagtcctctcttgccttgtatggtgctggagcaatcctcgctgtctggatatccttggttgtagtgagatctctcgactctgtcccgttgctctcatgcatattggagctagtcgggctcagctaatctggatggtttgtgtatcgatacctgctttttcaggaaaatcggaaagaattggccggtgttatccatgatataaatagaaggattgttggcgatgatgaataactgtttcctggtttggtactccaattaacccgccctgtttg

SEQ ID NO: 83258 - DNA, 348 bp, Zea mays
aacaccgaccgtctccaacggcgacaactgcgtctccatcggcgcaggcaccctcaacatgcacttcaaaaacttcacctgcgggcccggcggccacggaatcagcattggaaccctgggcaaccagggctcccggccttccttggccaacttcacggtgcgcaaccccttgatccgccactccaacaacggcttccggatcaagacttggcagggcggctccggcgccgtctcctccgtgtccttccagaacgtgcgcatggacgcggtgcggaaccccatcatcatcgaccagtactactgcctctccaagagctgcgagaacgccacctcggccgtcttcgtctc

SEQ ID NO: 83259 - DNA, 413 bp, Zea mays
cgggtcgacgcccgcgtccgaagcaaacactgcccgagacatagacagcgggacgtcgagatggccgacggggaggacgccgccgccgcgcgccgccgggccgccatcacagactaccgcaagaagctgctcaactgcagggagctagagtcgcgcgtcggcaccgtgagagaaagccttaaaactgcaaagaaggattttaccaagactgaggacgacttaaagtctctgcagagtgtggggcaaataattggagaagtactccgacctcttgataatgaacgctttatcgtgaaggccagcagtggtccccgatacgtggtcggttgccgaagtaaagtggacaaggagaagttgacatctggtactcgtgttgtacttgacatgacgaccttgacaataatgcgcactct

SEQ ID NO: 83260 - DNA, 419 bp, Zea mays
acctgatgcacggacttacttgaatactcttcaacagctcagaataaagagtggtcttatagatcatcttggaattgagcctttgatgatggaagctcttgagaagattgagaaggacattaagaaaccacttttgaggagcgacaagaagaacatggccaccctcttggcagagtttgacaagattaacaaaaagcttggctttcggaaggaggatcttcccaagatcgaggaagagcttgaattggaaattgccaaaagtgagctgactgaacttaagaaagaatgcgttgaaacaatggagactcaactcaagagggaggagtttcaagatgaggagatgcctgatgtcaggaaattggacatcagaaacttcctgtaggcctgatcgacgataatctttgagggccaacgcaact

SEQ ID NO: 83261 - DNA, 338 bp, Zea mays
agcgggagggccccggccgctacgactgggaggcctacgccgagctcgtgcgcatggtggagcgagccggcctccgactccaggccgtcatgtccttccaccagtgcggtggcaacgtcggcgacacctgcaacatcccgttgccgccatgggtgctggaggagatgagcagcaacccggacatcgtgtacacggacaggtccggccgccggaacccctagtacatctccctcggctgcgacacgctgccggtgcttaagggccggacccccatccaggtctacaccgactacatgcgcagcttccgcgagagattccgtgactacctcggcaatgtc

SEQ ID NO: 83262 - DNA, 370 bp, Zea mays
accacgcgtccgctggagcaacatcaggtgccccagcaacaacgggcagagcagctggaagaacgcctggaagaaggccggcgcctgctccggcctcagcgagaaagactacttcgagactgccctctccttccgtagccggatcaacccactcgttcgcctcaaagccaaaggtatcgagccggacttcgggctctacggcctcaaggcgatcaccaaggtcttcaagagcggcatcaacgcgacgccggtgatccagtgcagcaagggccccttcgacaagtacatgctgttccagctctacttctgcgcggcggggaacggcacgttcatcgactgccccgcgccgcagcagtacacctgctccaag

SEQ ID NO: 83263 - DNA, 429 bp, Zea mays
tgccaacgtcgctgaccttctgtgatcattttgaagaaaaacagaactaaaagaaaggtggtgggggtgatctggtaaggcttggttttgccgaaatattgtggggggaggagtggaggagtgataaggtcggtggggtttctatgttaaagtcgtggtctcgggcaatatgcgatttttctttatgccatgttttgggaaattttgtagctgcctaggcctcgtactgttgtggtggttcattagtacgaagacgaaggctctgctggcgatgggagtcctttttctttttgttagtattttgtttaaaactatgtatgaccgaattatttgtcatccttgactcaattctgctgcaaccagttgtatcgtgccatgtgtctctgcagcaccggtcgttgctgttctgagtaaaatctgtttactctg

SEQ ID NO: 83264 - DNA, 373 bp, Zea mays
aggacacgtgggcgacgccggcatgctggcgttcgacaagatggggagctacagctacaacagcaacaacggcggcggtaataccaacaacaacagcaacggcgtggaggtgaagagctacttcaacaagtccgccgggagggcggcgaacaacaacaacaacaacagcagccacgccggcggcggcaacaagaagggcggcgccggggagtacggcaggaagaagcacgccaagagcgagggcgcggcggcggcggcggccacggacaagcagcggttcaagacgctgccggcgtcggaggcgctgccgcggggccaggccatcggcgggtacatcttcgtctgcaacaacgacaccatggacgagaacctc

SEQ ID NO: 83265 - DNA, 424 bp, Zea mays
  unsure (1)..(424): unsure at all n locations
catttacgtatatgcccttgtcccggttcctttccccatccccaactccattatttgcttgatccttgagaagagagaggaagacgagagctagaagcgaaggagaaaagcagttcttcagctaggcaggagggcacaggaaggaggaaatggcgtcaaagaggattcagaaggacctcaaggttctgcagaaggaccctcccacctcgtgcattgcaggtcctgttggtgaagacatgttccactggcaggcaacaataatgggtccatctgataccccatattctggtggagttttccaagttacaatccatttccctcctgattaccctttcanaccaccaaaggtggcatttcgcactaaggtgttccatccanacatcaacagcaacgggagcatttgcctcgacatcttgaaggacca

SEQ ID NO: 83266 - DNA, 416 bp, Zea mays
gtccatcctccatcgccatccaatggccgccaccgccctgagcatgagcatcctccgcgcgccgccgccctgcttctcgtccccactcaggctcagggtcgcggttgccaagccgctggcggcccccatgcggcgccagctgctgcgcgcgcaggccacctacaacgtgaagctgatcacgccggagggggaggtggagctgcaggtgcccgacgacgtctacatcctggacttcgccgaggaggaaggcatcgacctgcccttctcctgccgtgcggggtcctgctcctcctgcgccggcaaggtcgtctctggctccgtcgaccagtccgaccagagcttcctcaacgacaaccaggtcgccgacggttgggtgctcacctgcgctgcgtaccccacctccgacgtcgtcatcg

SEQ ID NO: 83267 - DNA, 431 bp, Zea mays
  unsure (1)..(431): unsure at all n locations
accacgcgtccgcggacgcgtgggggaatccagtagcaacaatagagcaacaatggcgaccaagatattttccctccttatgctccttgctctttctgcatgtgttgctaacgcgacaattttccctcaatgctcacaagctcctatagcttcccttcttcccccataccttccatcaatgatagcttcagtatgtgaaaacccagctcttcaaccctataggctccaacaagcaatcgcagcaagcaacatacctttatcacccttgtttcaacaatcgccagccctatctttggtgcagtcattggtacaaaccatcagggcacagcagctgcagcaactcgtgctacctgtgatcaaccaagtagctctggcanacctttctccctactctcagcancaacaatttcttccattcaaccaactgtcta

SEQ ID NO: 83268 - DNA, 411 bp, Zea mays
aggacgcgtgggcggacgcgtgggcggtgcgttgcgttggtggccgccggcgacgatgtcgtcgtccgcgggcgacaagaggaagaagacggcgtgcgtgaccggagggaacgggtacatcggctccgcgctcatcaagatgctgctggaggacggatacgccgtcaagacgacggtcaggaaccccgacgacatggacaagaactcccacctcaagggcctgcagcagctcgggccgctgacggttctccgcgccgacatggacgaggagggcagcttcgacgacgccgtcgccggctgcgactacgccttcctcgtcgccgccccggtgaacctctcggcacaggatccagagaatgagcagatcgagccgtccgtccgaggcacgctgaacgcgatgcggtcgtgcgc

SEQ ID NO: 83269 - DNA, 377 bp, Zea mays
ggtccacgcacgcgtccgcaccacgagtccggtgcatggcatccggctagggtctcctatacggttgcccgtgctggtcagaatgggtaccaccaccgcactgagatgaacaagaaggtgtacaagatcggcaaggctggacaagagacccacgatgcctccacagagtttgacaggactgagaaggacatcactcccatgggtggcttcccccattatggtatcgtgaagggtgactacctgatgatcaagggctgctgtgtgggaccaaagaagagggtggtgaccctccgccagtccctcctgaagcagacttcccggctggcgctggaggagatcaagctcaagttcatcgacacatcgtccaaatttgggca

SEQ ID NO: 83270 - DNA, 398 bp, Zea mays
agcgactcaccgagcgagagcagcacacacgcagctagctaggagcatcagcagcggcagcagcaatggcggcctccatgatcgcctcgtcagttctggcggtggcgcctcagggcgtgccgcacctcgggcgccgcgcctcctccttcgccgtcgtctgctccatcatcagcatcaagaccgacatgccctacgggattgcgggtggcctgaccgtcgacgtcaacgtcaacgggagaaacggcaagggcaagggcgtgtaccagttcgtctacaagtacggcgcgaacttcgacggatacatcccaatctacaacgaggatgactggtctcccaacggcgacgtctacgtcggtgtgaacactgggcttctgatctgggctctcatcctcgctggg

SEQ ID NO: 83271 - DNA, 432 bp, Zea mays
aggacgcgtgggcttgcgattcgctcgctcgatcctagcttcccttccaagaagcgcagcgcccatggccatgtccacgcaagcctccgccgccacgcgccacctgctggccgccgcctgggcgccggcggcgaagccgcggcagctgagctcgcagctcgcgctgccgtcgtcgtcctcccgcgggccggccccgctccgcgcgtccaccgaggaggcggtggaggcgcccaaggggttcgtggccccgcagctggaccccagcacgccgtccccgatcttcggcggcagcacgggcgggctgctccgcaaggcgcaggtggaggagttctacgtcatcacgtggacgtcccccaaggagcaggtgttcgagatgcccaccggcggcgccgccatcatgcgggagggggcccacctcttgaagctggcgcg

SEQ ID NO: 83272 - DNA, 399 bp, Zea mays
gaccaaatcctgatgaaagtgatccctgggatgaccgtcgacaacgcgttgaacatcatgcaggaggcgcatgtgaatgggttgtcagtggtgattgtctgttcccagtccgaggctgaggagcactgcacgtcactcaggggcaacggcctccgaagctcgatcgagcctgcgagtggtggctgctaaggttctagaaatgggtgtatcttgttttgccaagtatagtttgtaaatacccagcatatcaatctaagctgaaactgaaacgggttggttacatgcagttatcgatacaacgaagctaagtacctcttgggtaggtgtaaatcttgtaagggtaacctgtagaagaagaaacatagtaattttgggtaatgatttatgaaccatttagtt

SEQ ID NO: 83273 - DNA, 394 bp, Zea mays
gggtccacgcacgcgtccgcacacgagtccgcccacgcgtccgcccacgcgtcccgggcaatgcttatgtgatttggagatgcagcaagaccaggacagaagtggcacatctactacgccactgagtacccagagcaaccaatggtcaaccttgagatgtgcatgactggtctggacacgaagaaagcttcagtcttcttcaagactaatgctgatggcaacacaacatgtgccaaggaaatgacgaagctctctggtacctctgaaattatccctgagatggagatctgtgattttgacttcgaaccctgcggctactccatgaatgcaatccatggctctgcgttctccacgatccatgtgacgcctgaggatgggttcagctacgccagtt

SEQ ID NO: 83274 - DNA, 431 bp, Zea mays
aaaaaaagagaaggagaaaaaggaaaaagaagaaaaggaaaagaaagaggagaaaaaacctgaaccgaattttgaaatattgagtaaccctgctcgtgtaatgaaaaatcaacttaaagtcatctcgcttgtcgattccggaagttacgttccgctcaaagatgtttccatcggcggcatcgtcatggttcgtcatgtcaaggccggatctgaagatgaacaacttgtggagccagttgctgcatttggtcccaaagctgatgacgaaaaggagcctgacccaccagagccatttgaatacaccgaagaataaaatccaacattaaattcaattatatattttttttctacttttttttctctcactaataataatacattggatttattcgtttagaaaaaaaatctatgtctaatttaatatatactta

SEQ ID NO: 83275 - DNA, 458 bp, Zea mays
gggtccagcacgcgtccgagaggacccggcggcgggggcgagcggcagcaagtggcggctggcgacgctgacggacgtggaggaggtgaagacggtggcgcggatgctgccgatctgggcgaccacgatcatgttctggacggtgtacgcgcagatgaccaccttctcggtgtcgcaggccaccaccatggaccgccgcgtcgggggctcgttccagatccccgcgggctccctcaccgtcttcttcgtcggctccatcctgctcaccgtgcccgtctacgaccgcctcgtggtgcccgtcgcgcgccgcgtcagcggcaacccgcacggcctcaccccgctgcagcggatcgccgtcggcctcgcgctctccgtcgtcgccatggcgggcgccgcgctcacggaggtccgccgcctccgcgtcgcgcgcgagtcctccgagtccgcctccggaggcg

SEQ ID NO: 83276 - DNA, 430 bp, Zea mays
aagccgccgcggcggcggggatgagggcgtaccacgagcgggtggtggaccactacaacaacccgcggaacgtcggttccttcgacaaggaggaccccaacgtcggtactgggctggtcggcgcgccggcctgcggcgacgtcatgaagttgcagatccgcgtcgacgaggactccggtaaaatcgtcgacgcctgcttcaagacctttggctgcggctccgccatagcgtcctcgtccgtcgctactgaatgggtgaagggaaaaccaatggatgaagtcttgacaatcaagaatactgagattgcaaagcacttgtcccttccaccagtaaagctccattgcagcatgcttgcggaggatgccattaaagctgctgtgaaagactacgaagccaagaacgcgaagatggggcaaaagagtgaagacag

SEQ ID NO: 83277 - DNA, 430 bp, Zea mays
  unsure (1)..(430): unsure at all n locations
aataagacgacttgtttcattgattcttgaagagatcgagcttcttttgcaccacaaggtcgaggatgtcttgcaactgcggatcaagctgcggctgcggctcaagctgcaagtgcggcaagaagtaccctgacctggaggagacgagcaccgccgcgcaggccaccgtcgtcctcggcgtggccccggagaagaaggccgcgcccgagttcgtcgaggccgcggcggagtccggcgaggccgcccacggctgcagctgcggtggcaactgcaagtgcgacccctgcaactgctgatcacatcgatcgacgaccatggatatgattattatctatctagcttgtggtggtggttgaacaataataagcgaggccgagctggctgccatacataggtattgtgtggtgtgtgtgagagagagaganacaga

SEQ ID NO: 83278 - DNA, 437 bp, Zea mays
  unsure (1)..(437): unsure at all n locations
gggtccacgcacgcgtccgcaccacgagtccgcggcctacggcaacaagaagttcgagacgctgtcgtacctgccgccgctgtcgacggacgacctgctgaagcaggtggactacctgctgcgcaacggctggataccctgcctcgagttcagcaaggtcggcttcgtgtaccgcgagaactccacctccccgtgctactacgacggccgctactggaccatgtggaagctgcccatgttcggctgcaacgacgccacccaggtgtacaaggagctgcaggaggccatcaaatcctacccggacgccttccaccgcgtcatcggcttcgacaacatcaagcagacgcagtgcgtcagcttcatcgcctacaagccccgggcagcgactagaccgcgccncgcggccggccccccgccggctagctatagctcctgcg

SEQ ID NO: 83279 - DNA, 384 bp, Zea mays
gggttggcttctcctccccctccggttcgggttcgggttcgtgaggttctccggggttcgggttcgtgggtgagcggatcgagatggcggcgtcggatgttgagtaccgctgcttcgtcggcggcctcgcctgggccacggacgaccactccctccacaacgccttcagcacctacggcgaggtcctcgagtccaagatcatcctcgatcgggagacgcagaggtcccgcggcttcggcttcgtcaccttctccacggaggaggcgatgcggaacgccatcgagggcatgaacggcaaggagctggacggccgcaacatcaccgtcaacgaggcccagtcccgcggcggccgtggaagccgccggcggtgggtacggtggtggc

SEQ ID NO: 83280 - DNA, 324 bp, Zea mays
aggacacgtgggcggacgcgtgggccacgaaggagaacatccggatggcgatgcactggctggtgcagggctgcagctacggcaactccctggtgttccacttctcgggcatcggcgcccaggtggcggacgacgacggcgacaaggcggacgggtacaacaaggccatctgcccgctggacgcgttccagaccgggcccatcctggacgacgagatcaacgaggtcatcgtgcgcccgctggtgcacggcgccaggctgcacgccgtggtggacgcctgctacagcgccacggtcctggacctcccctacctgtgccgcatgt

SEQ ID NO: 83281 - DNA, 426 bp, Zea mays
catctgcgtacacggtctccctcttcctgtcagtagtagagtgagagtgaggcagcgagtaggagacaaggggaaatggggaagggagcgcaagggagcgatgcggcggcggcgggcggcgaggtggaggagaacatggcggcgtggctggttgccaagaacaccctcaagatcatgcccttcaagctcccgcccgtcggcccttatgatgtccgcgtgcgcatgaaggcagtggggatttgcggcagcgatgtgcactacctcagggagatgcgcatcgcgcacttcgtggtgaaggagccgatggtgatcgggcacgagtgcgcgggcgtggtcgaggaggtgggcgccggcgtgatgcacctgtccgtgggcgaccgcgtggcgctggagccgggcgtcagctgctggcgctgccgccactgc

SEQ ID NO: 83282 - DNA, 430 bp, Zea mays
ccgggccgacccacgagtccgcttgtttcttaccaaagctggcacattgaaaccgattgctattgaacttagccttcctccgagcaaggcaggcgagccccggccaagcaaggtccttactcctcccgctgatgctacctccaattggctatggatgcttgccaatgctcatgtcagctccaacgacgccggtgttcaccagctcgttaatcactggctgaggacacatgctgtaatggagccgttcatattggcatcgcatcggcgtatgagcgcaatgcacccagtcttcaagctcctgcacccccacatgcggtacaccctggagattaatgcgctagcactgcagagcctgatcagcgcggacggtgtcatcgagtcttgcttcacccctggtcccgtctccttcgagatcagcgctgcatactac

SEQ ID NO: 83283 - DNA, 437 bp, Zea mays
actggattcagtttccagatcgtaaatacaaatcttgatgaagttagccctcgtgctcgacgaagaagtgctttacttacatggcaacatatagcatcgctgccacccaatttgcctgttatctattgtggaggcttcaatacacagaaggaatctatgactgggcggtttttgcttggcagatccagagaacatggtgttgttggtgatatgagagatgcttggccaaatgctcgagtgcgaaaaaatgtttcactaatacacacatatcatggatttaaaggggagaaacaaggtgccctggaatttcttaaattgatatttagagctctttgcctctgctgggatcgacagacacaggacttgcatatcgactggatcttgtttagaggacgcccattggttcctgcactttgtgaggtcattaatgacaatat

SEQ ID NO: 83284 - DNA, 460 bp, Zea mays
  unsure (1)..(460): unsure at all n locations
ggtccacgcacgcgtccgcacacgagtccgcggacgcgtgggcgacgcgcagtcgcccattcggcatctcgccctcccgtcctgtcccgtccgtccgttctccgattggccgccgcccgcctcgccctcgtcaacaaaagcccaccgcaagcgagcgagcgagccaccctccccgccgccgccaccgcccccgtcccgcccccaccccgactcctcctgaccgccggcgtggggtgcccgggctccacctccggcgacgacaccctccccgccgcgcgcgcccccaccgcctgctccggtttgcgggggtagccggggctccggcctcggcggctttcaaagccccctccctcacaacaggatccaaaatcccgtcctagacttcttctacctcnccttccagaacttcctcttttggcatcccggacggtcgatctcgacccccttcgatttcgattca

SEQ ID NO: 83285 - DNA, 354 bp, Zea mays
tatataatctatgttagtgacatgctaatggaaggtcaatgggagaaaaaggcagtgtatacattttacttggttcgtgagctatatgtgactttccgcaacttcagaattcgcattgcagattatgtgcgctacagaaagatcacttccaacatgaatgaacgctttccagatgctacatcagaagagctcgatgtgagtgatgctacatgtattatttgccgtgaggaaatggctacagcaaaagaaactgctcgatgggcatctgttccatgtgcattgtctaagagaaacaggagaacaggctaaagaagaggttcctctacggcttctccatgggagcttcagctccac

SEQ ID NO: 83286 - DNA, 392 bp, Zea mays
aggacgcgtgggcaaagatgcagtggcatatgcagactgggttaagaaacatcatcagttttctgatatgcttgttcaaacctcaccagctgtaactgggcatgcctttcctagactgaaactacggtacaaaccatcacttgttcagagtggaaggaaagacttgaagctaggacatgccttgatgtgtcctcaggcgaaacatctggaaagggggcttttgctgcttgatgtgaggaatgattatgaatgggatgttgggcactttgaaggtgctcagcggcctaatgtggactgcttcagaagcacttcctttggactttcgggagagatcctctaaatggtgtagacaaagagaggacagatatactaatgtactgcaccggggggga

SEQ ID NO: 83287 - DNA, 375 bp, Zea mays
attgacagaggtgtatctgctgctgctaaggttgtcaggaaggcatatccacaagagaaagttggagtatttgttcagcgtggaaagggtggacccctctctgtagttgaatacagtgaaatggatgcagctatgacaactgaaatcaatcaaactactggccgccttcgttattgctggagcaatatctgcttgcatatgtttactttggattttctgaaccaagtgacaaacagtcttgaaaaggatagcatttaccatctagccgagaagagaattccttcagttcaagggtacacatcaggattaaagcttgaacaatttaaatttgatgtattcaactattctccttcaacagctctttttgaggttttg

SEQ ID NO: 83288 - DNA, 460 bp, Zea mays
ggccggtcgaaattccgggtcgagcacgcgtccgagtcaacacagaatcaaagaaaagctttcccccgatcctctcgcggacaccagcgatgggttcccgctacgaggtggaggtcaccgtcggctccgcccgggacctcaagaacgtcaactggcgcaacggcgacctcaagccctacgccgtggtgtggatcgactccggcagcaagtgctcgacccgcgtcgacctcgacaacggcgagagcccggcgtgggacgagaagctgctcgtcccgctcccgcccacctcccgcctcgacgacgccgtcctctacgtcgacgtcgtccacgccaacgccgcccagggcgtcaagccgctcgtcggctccgcgcgcctcccgctccgcgacgtcctcgacgacgccggggtcgggggcaaggcctcgcgcagcctccgcctcaggcgcccctcgggccgccc

SEQ ID NO: 83289 - DNA, 348 bp, Zea mays
  unsure (1)..(348): unsure at all n locations
ggtccacgacgcgtccgaaggacagagaaagataagaaaggcggtggtcaacttgtgtcctgaggtgcccgtanaagcccaaggacaagaaacaaggagaagagtagatctacatctactccaccgatgagcgcgtctcggttcatcaagtgcgtcaccgtgggggacggtgccgtcggaaagacctgcatgctcatctcctacacatccaacactttccccactgactatgttccaactgtgttcgacaacttcagtgccaatgttgtggttgacgggagcactgtcaacttgggtctgtgggatacagcangacaagaagatacaatagactgcgtccgttgagct

SEQ ID NO: 83290 - DNA, 405 bp, Zea mays
gatggaagccacgatctccaactctcagtggaaacactcgagtcactgatcaagctaacgaaggaaggtatgaagatgaaggttccacggtatgacaagtctgcgtttgggggaaggggtgaccgggctgatccttctgtatggccagaggttgaagggcccttagaggttgttctgttcgaaggatggatgcttggatttaaacctccttccaaatgaagttgtgaaagaagtggatccacagctggaggtggttaacaagaaccttgaagcatactctgatgcttgggacaggttcatccagtcatggattgttattaaaataagagaacccggtagcgtttaccagtggagactgcaggcagaggtcgctatgagagcagatggaaagcctggaatgtctga

SEQ ID NO: 83291 - DNA, 368 bp, Zea mays
acgttgccgaatattgaagagcttactggtgtaaatacaacttgggtatccaccttgatggctcaacatttactagctgctgcagaccgttatgcattggagagattgaagttgctctgtgaacttaagctgtgtgaagatgttgcaataaatacagtggcaaatactttggcactggctgaacagcaccactgttatcagctaaaaactgtttgcttgaaatttgtagctttgcctgaaaatttgaaagctgtcaggcaaaccgatgggtttgattatttgcaacaaagctgcccatccctcctgaccgagcttctcgagtatgtggccaacgcaggagagcactccgtgagcccctgcttgtattc

SEQ ID NO: 83292 - DNA, 377 bp, Zea mays
  unsure (1)..(377): unsure at all n locations
aggcattgtaaaggtgtcagctanggaacaaaccacaaggcaaagacaagaaatcaacaacaagttctccgggggtttgtcagaggtcgaaattgagaagatggtgaaggaggccgagctacattctcagaaggaccaagaaaggaagtctcttattgatctcaagaactctgcagataccacgatctacagcattgagaagagtgtcagcgagtacaaggacaaggtccctgctgaagtcaccaaggagatcgagtctgctgtctctgatctgagggcagctatggctgaggacgatctggacaagatcaagcagaagctggaagcagcaaacaaggctgtttcaaagattggagagcacatgcaacaaagtggcg

SEQ ID NO: 83293 - DNA, 409 bp, Zea mays
  unsure (1)..(409): unsure at all n locations
agcccacgcgtccgcccacgcgtccgcccacgcgtccggaatgctcgtggccagcaaggctcatatccaattaagctgttctacacttcaaacatgcccatcatccttcactctgcgctgattaccaacctctattttatatcccagcttctctacaggaagtacagtggaaacttccttgttaaccttcttgggaagtggaaggagtctgaatactctggccattctattcctgttggtggtcttgcttactatgtaactgccccatcaagtttggctgatgtccttgcaaatccattccatgcactgttttatgtggtcttcatgctgtcagcctgtgctctgttctcaaagacatggattgaanttttcgggttcatcagcaaaggatgttgctaagcagctcaag

SEQ ID NO: 83294 - DNA, 412 bp, Zea mays
gcagaaacgatacggtgcagaacaatacccaatgttcttgcaaatcttgagcaggctcaggaccgacagaacagaccatcagagagccctgttacaccatctaggcagctcttggctcctaatgtacatttctatgctggagagtgggatgaactcccaacaattctctcagttgtgcagccacctgcagcaccaacaaacctcagcttctctgaggatgattttatggatggctgcagtagccatgatggaagcagtgtagttggtcatgactactgccccaggagatctaggaagctttctggtagccgtgcatgggagagagctagtgagaccgaccaggcagatagtggctatgatgtgatcttgatttctgatgtcccctaggcagctaactccctgaagaagctct

SEQ ID NO: 83295 - DNA, 353 bp, Zea mays
gtgacactaaccaccgcagatttagaagcagtggaagcacgagtgattcatggaaggaagtttccgaagagggtcgtctggctttccatgcgctgttcagtagagaaaagcttccgcaaagcttttctcccccacaagcagaaggctcgaaggaagttggcaaggaggaggaagatgaagtcaccacagtggcagttgacctcaacaagagtaccacaagcattgatcatgacctcgacacaattggtgagccaagggcttcctttcccaatgaactgtcgcccctgaagctgaaattgcgccgaacaggcttcaaaccatacaagagatgttctgtggaagcgaaggagaat

SEQ ID NO: 83296 - DNA, 246 bp, Zea mays
ctcaccggcaagctcttcagcaccatcgacgatcttgaccatgccgcgaagatcaagagcaccccagaggccgagaaatacttcgcagcaaccaaagatgctcttggcgatgttctcgccaagctaggctagacgcaagggctaataatggccatgtaatttcggacttgtgtttgttcatatggacccggcaaggcaatgtaccattttctgttgatattgtatcaggaagcacttaactacagg

SEQ ID NO: 83297 - DNA, 358 bp, Zea mays
agcccacgcgtccgcaagaagaagatcaagaccgacaagccctacgggattgggggtggcctgaccgtcgacgtcgacgccaacgggagaaagggcaagggcaagggcgtgtaccagttcgtcgacaagtacggcgcgaacgtcgacggatacagcccaatctacaacgaggatgactggtctcccaccggcgacgtctacgtcggtggaaccactgggcttctgatctgggccgtcaccctcgctgggatcctcggcggcggcgccctcctcgtctacaacaccagcgccctctccggctaaggatatccaatgcatgcgcttcttgcgattcgtcgtgtaaaatcagggtgtctgt

SEQ ID NO: 83298 - DNA, 418 bp, Zea mays
agatgatgaagtcatgcgagcagcgggggagggacctcctgaaccagaacgtgataacggccgcggggctggcggagtggctgaggggggcgaaggagggcgggcaccacgagaccgtgagcctgggcctgccgtcctactcgctgctgtgcaccgtgctgcagtcgatcagggccgggtccgggggcctggtgctgggcagcttcgaggtgaaccagcacaaccggccgcaggaccggctgctggactggttcttccaccccgtgctggtgctcaaggagcagatacaggcgctgaggatgaccgaggaggaggtcaggttcctggagaagctgaccgtcttcgccggcaacgtcgcgggcgctggggcctggcggttggaagaacggcgccgggatgatggtggtgccccaggacc

SEQ ID NO: 83299 - DNA, 418 bp, Zea mays
aggctcgagatccccgagggggtcaaggtcaccatcaagaccaggaacgttgtcgttgagggtccccgtggcactctcgagaagtcgctcggtcacttggctgtctccttcacccaccccaagaagaacctcatcaagatcgagctccaccacggctcccgcaagagcgtcgctaccctccgcaccgtccgcaccctcatcaacaacttgatcatcggtgtcacaaagggctacctgtacaagatgcgttacgtctacgcccatttccccatcaacgtcaacgttgagaagaacggcgagaccgatcagttcgaggtcgagatcaggaacttcattggcgataagcttgtgcgcagggtggtcatgaaggccggtgtccaacttgaaggctgctatgaaccagagggatgagctccac

SEQ ID NO: 83300 - DNA, 367 bp, Zea mays
agcggacgcgtgggcgacgccacagcttgtgttgtgcgcgcgcaatggcactcgtgtccgcctcctcgtcctccaccaccgccgtcgcggcgctcgccaggaatgggcagcaacgggcgtcgtcgtcgttgttctcctcctcctcctcttcctccttcctcgtgggcaggacgctgctgaggcaggccgaggcagcccggccgtcgttcgccgtgcgcgccgcggcggattccgacaggccgatctggttcctcggtagcacccctccaccgtggctcgacggcagccttcccggcgacttcggctttgatccctgtggcctcggatctgacccggagagcctgccgtggaacgtgcacgccgggct

SEQ ID NO: 83301 - DNA, 338 bp, Zea mays
cggacgcgtgggcggacgcgtgggctttaggaacattttcggggatagggactttggaggacgagatgttaaggttgcactcgaactatcatttgtggaagcagttcaaggttgcagcaaaacggtcaccttccaaacgtctgtaacatgtgaaatctgtggtggagccggtgtgcctcctggaaccacacctgaaacatgtctatcttgcaggggttcaggatttatattcatgcaaaccgggccattcaggatgcaatcaacctgcacaaaatgtggtggttctgggaaaactgtgaaggaattctgcaaggcatgcagaggaaacaaagttgtgc

SEQ ID NO: 83302 - DNA, 356 bp, Zea mays
agcggacgcgtgggcaccaagcgaagcgcactagcaacgacctaacaccaatggctaccaagatattagccctccttgcgcttcttgcccttttagtgagcgcaacaaatgcgttcattattccacagtgctcacttgctcctagtgccattattccacagttcctcccaccagttacttcaatgggcttcgaacatccagccgtgcaagcctacaggctacaactagcgcttgcggcgagcgccttacaacaaccaattgcccaattgcaacaacaatccttggcacatctaaccctacaaaccattgcaacgcaacaacaacaacaacagtttctgccatcactgagccaccta

SEQ ID NO: 83303 - DNA, 416 bp, Zea mays
agaaccaaatcgcttaccgcccccgaagcgtctcggttcgcatagcaaagctgctcttgcaacaagccaaacaacccagtggctgctagccgagacaggggatagattgagagagaggcgcgcagatggcgacgccgtcgtcgtcgctttgctccagcttcgcctccctgcggaccgcctccatcggccacccccgtggcatcgcctcctccacgctcaggaaggcattccatgtgagggcatcagctcgggttgacaagttctcaaagagtgacatcatcgtgtccccttcgattctgtctgcaaactttgcgaagcttggtgatcaggtaaaagctgtggaggtggcaggatgcgactggattcatgtcgatgtcatggacgggcgctttgtgccaaacatcacaattggaccc

SEQ ID NO: 83304 - DNA, 379 bp, Zea mays
agagaaaagattcgcggcggtggagtcggagctcaactcatcaatagggtttgatcagcgctccgctcgtgctagccacccagcccccccgcgcccacttgcgacggcgatggcttcgccgtactcgctcagctgggccgacgcgccgccctaccactaccacgggagaccccagccagcgcccgactcacccgcatcctccgacggggccgggccccgctcgctctggatcggcggcctgctgccatggatggacgaggactacctctacggctgcttcaccacctcgcgcgagcttctttcccttgtcatcaaacggaacaagcagactggccaatcagagggctttggcttcctcaaattttctgaccaatacggc

SEQ ID NO: 83305 - DNA, 384 bp, Zea mays
aggtcaatacaacgacatcagcgagctgtctcctcaccgcctgcaagagatcaagcgcttctttgaagattacaagaaaaacgagaacaaagaagtcgcagttgatgcattcttgcccgcgacaacagctcaagaagccattcagtactccatggacctgtatgcccagtatattttgcaaagcttgaggcagtagattgcaagcaacaatttatctatcatgcgtcttggatgggggcgtgattttaataagccaaatcgcttgctatattgggaaccttggaattgagaacagcgtcactagctgtgattcgctcctttctcgttaaattatcatatgaataggccaagtccatacgtttaccgtgtggcgctctgtcagtc

SEQ ID NO: 83306 - DNA, 396 bp, Zea mays
  unsure (1)..(396): unsure at all n locations
aggatacggaatcctagtctcgcaggtgcccaaggacactgaagccttctactcgctgagagacccgtctgaagtgatggggttcctcaattccttggtgagatggaagaagcacccgctgtgacgcaactgaaaacacaacgactgattcagaagccgtaaagcgactgtacttcgtgcggcggcaattttgtagagtttttggctcaccgggtggctcattctttcatgcgtttttattttttatttttttaactgtcacagtccttcgtcactgagaaataacaagtggttgtcccacaccctcttgcaactgtaatctgtaagcaagaggccctccctgttcggtctatatatatatattgaatanaaccgggacgcttttgccttgccctg

SEQ ID NO: 83307 - DNA, 414 bp, Zea mays
agcggacgcgtgggcgacgccggcatgctggcgttcgacaagatggggagctacggctacaacagcaacaacggcggcggtaataccaacaacaacagcaacggcgtggaggtgaagagctacttcaacaagtccgccgggagggcggcgaacaacaacaacaacaacagcagccacgccggcggcggcaacaagaagggcggcgccggggagtacggcaggaagaagcacgccaagagcgagggcgcggcggcggcggcggccacggacaagcagcggttcaagacgctgccggcgtcggaggcgctgccgcggggccaggccatcggcgggtacatcttcgtctgcaacaacgacaccatggacgagaacctcaaggaggaagctgtccgggctgccgtccaggtacaggga

SEQ ID NO: 83308 - DNA, 369 bp, Zea mays
aggagaccaacaagcaacatagaaagtggaatacagtagcaacaatagagcaacaatggcggccaagatattttccatccttatgctccttgctctttctgcatgtgttgctaacgcgaccatttttcctcaatactcacaagctcctatagctgcccttcttcccccataccttccatcaatgaccgcttcagtatgtgaaaacccagcccttcaaccctacaggctccaacaagcaatcgcaacaagcaacttacctttatcacccctgttctttcaacaatcgccagccctatctttggtgcagtcattggtacaaaccatcagggcacaacagctgcagcaactcgtgctaccagtgatcagcca

SEQ ID NO: 83309 - DNA, 353 bp, Zea mays
acgcgtcaacaggattaacgccgaggctgaggccgagggacaacccaccgtgacatgcgtcgtcggcgacagcaccatgaccttcgcgctccgcgccgcgcgagagctcggcctccgctgcgctacactctggaccgccagcgcctgcggcttcaccggctacttcactacggcaacctcgtcaaccgtggaagggtccccctcaagaacgaggagcagctcacggacgggtacctagacaccatcgtcgactggatcccgggcgcgcccaaggacctgcggctccgggacttcccgagcttcgtgcgcaccacggatccgaacgacgtcatgctcaacttcttcatccacga

SEQ ID NO: 83310 - DNA, 365 bp, Zea mays
agcggacgcgtgggcggacccgtgggctccatgagctttcaaacaaccaaaggttcccaattgctggtgcttccaacctgttggctaacaccctttatccataccttgggatggaactgtcaattggtacaatgatccctggatgggatgagaagggtcctgccttgtactatgttgacagtgagggtgcgcggctcgtggggaacaggttctctgttggctctggttcactgtatgcttatggtatcttggatgatggttaccgcttcagcatgtcagttgaggaagcagccgaattagcgcgacgggctatttatggggcaacattccgtgatgcagcaagtggtggttgtgttagtgtttac

SEQ ID NO: 83311 - DNA, 360 bp, Zea mays
cctctccccaacccgtcgagagtcgagaccatccttcccttcttccctcctcgccagaggagagtctcgctagctagggtttccaccaatggcggcgcccaccacctcccgccgcggccccggcggcgcgcgcaacatggacgatgaaaacctcaccttcgagacctccccgggggtcgaggtcgtcagcagcttcgaccagatgggcatcaaggacgacctcctccgcggcatctacggctacggcttcgaaaagccctccgccatccagcagcgcccccgtcctcgccatcatcaacggccgcgacgtcatcgcgcaagcccagtccggcaccggcaagacatccatgatctccctca

SEQ ID NO: 83312 - DNA, 342 bp, Zea mays
aggatcatgaaatgtgacgttgatatcaggaaggacctgtacgggaacatcgtcctcagtggagggacgaccatgttccctggcatcgctgacaggatgagcaaggagattactgccctcgcgccgagcagcatgaagatcaaggtcgtggcgcctcctgagagaaaatacagtgtttggattggtggctcgatccttgcgtcgctcagtacgttccagcagatgtggatatccaaggatgagtacgatgagtctggccctgctatcgtccaccgaaaatgcttctgagctagctatctgccgcgcctttcatagcgtgtcaagctgttgagatctgcgttg

SEQ ID NO: 83313 - DNA, 418 bp, Zea mays
agcggacgcgtgggcaaatccttttgattttggttccatgcaaagtttgctcaatgatccatctattaaggagatggcagatcaaattgcaagggatcctgcattcaaccggatggctgagcagctacagaaaagtgctcaaagcacaggagaacagggcacacctccattaaatcctcaacaatacatggaaacaatgcaaaaggtcatggaaaacccccagtttatgaccatggcagagcgtctggggaatgctcttatgcaggatcctgctatgtccagtatgctggaaacctttagtagtccatcacataaggagcagctggaagagcgtatgtctcgcattaaggaagatccagctatgaagtcaattcttgatgagttagagaatgggggcccttctgcaatgatgaagtac

SEQ ID NO: 83314 - DNA, 383 bp, Zea mays
aggcggcacagaggtgcgacgtacgacgacgacgacgcaggcgccacacatggcatcccagctctccgccgccgtgccccggttccacggcctccggggctacgccgcgcccaggtccgcggtggcagcgctgccgtccgtgagggtgggcaggaagaggtcgtcgtcgcagggcatccgctgcgactacatcggctccgccaccaacctgatcatggtgacgacgacgacgctgatgctgttcgcggggcggttcgggctggcgccgtcggcgaaccgcaaggcgacggcggggctgaagctggaggcgcgcgactccggcctgcagacgggtgaccccgccgggttcaacctcgccgacacgctggcctgcggcgccgtcg

SEQ ID NO: 83315 - DNA, 415 bp, Zea mays
  unsure (1)..(415): unsure at all n locations
agcccacgcgtccgcccacgcgtccgcccacgcgtccgcccacgcgtccgcccacgcgtccggggctgcctgtcgcacatgctggcggactccatccacgcggacgtgaccatcaacacgacggacggggtgctgaaggcgcacaaggcggtgctggcggcgtgctcccccgtgttcaagagcatgttcgtgcacgacctgagggagaaggagtcgtcgacggtggacatcggcgacatgtgcgtggagtcgtgctcggcgctgctgggtttcgtgtacgggacgatcgagcaggggcagttctggaagcaccggctgccgctgctggcggcggcggacaagtacgggatcngcgacatcaaggactgctgcnanganagcctgctggaggacataggctcgggcaacgtgctgg

SEQ ID NO: 83316 - DNA, 416 bp, Zea mays
agcccacgcgtccgcggacgcgtgggcggacgcgtgggtggacggcggcggcatgtccgcgatacaggggagccgccggctcgcgcacaccgatcagttcaggttcctggacaaggcagcgtcggtggagccatcggacgacaagtcgcgtccggcgagcgcgtggcgtctgtgcacggtgacgcaggtggaggagctcaagtgcgtgctccggctgctgccggtgtgggcgagcgggatcgtgttcgcggcggcgtacacgcagatgaccaccaccttcgtcctgcagggcgacacgctggacccgtacgtgggcggcttccgcgtgcccgccgccgtgctctccgtcttcgacacgctcagcgtcatgccgtgggtgccgctctacgaccgcttggtggtcccgctggcgcggc

SEQ ID NO: 83317 - DNA, 372 bp, Zea mays
agcccacgcgtccgcccacgcgtccgcccacgcgtccgcttccgagctctttgcacaggagagaaaggggtcggcaagagtggcaaagccctccactacaagggaagtaagttccacagaatcatccccagcttcatgctccaaggaggtgacttcactctcggggacgggaggggtggtgaatctatctacggcttgaagtttgcggatgagaacttcaagatcaagcacactggtccaggccttctgtccatggccaatgccgggagagatacaaacggatcccagtttttcatcaccacagtgacaacaagttggttggacgggaagcatgtggtgtttggcaaggtgttgtctggaatggatgttgtg

SEQ ID NO: 83318 - DNA, 359 bp, Zea mays
agcgccgacccatccctcaccaagattttctcggcttctaggatcgacattcctagcgcgtggcagatgcctcagggtggtatagatgcaggggaagaaccaagggcggctgccttcagggaattgagagaagagactggtgtcacatccgcagagatcgtggctgaggctcccgtctggttaacatatgatttcccgccagatgtcagaaccaaactgaatgccaggtggggaaccgattggaaaggccaagctcaaaaatggtttttatttaggcttactggaaatgacgatgagattaaccttaatggtgatggatctgagaagccagagtttggtgaatggacatggatgacacc

SEQ ID NO: 83319 - DNA, 355 bp, Zea mays
agggcccgactccgcagtccgcaggaccggtcactcggcacgcaggctagcagcacagcagcagccagagccatcccctctcctcgctacgcttcgcttcctcggcgccgattcctcctcctcctcctccaccctcgtccgtccccttccggcgcacgagctcgcccgagatggcgaacgcgagatcgggtgtcgctgtgaacgatgagtgcatgctgaagtttggcgagctgcagtcgaagaggctgcaccgcttcataactttcaagatggacgacaagttcaaggagatagttgtggaccaggtcggggatcgcgctaccagctacgatgacttcacaaacagcctccctga

SEQ ID NO: 83320 - DNA, 344 bp, Zea mays
ggtgggctggcttctcctccccctcttaccaagtcctcctcgggttagggttccttagggttttgtggaggggcgatggcggcggctgatgtggagtaccgttgcttcgtcggcgggcttgcctgggccaccagcaacgagtcgctggagaatgccttcgcctcctacggcgagatcctcgactccaaggtcatcaccgaccgggagacggggaggtctcgcggcttcggcttcgttaccttctcctccgagaactccatgctcgacgctatcgagaacatgaacggcaaggagctcgacggccgtaacatcaccgttaaccaggcccagtcccgtggcggtgg

SEQ ID NO: 83321 - DNA, 420 bp, Zea mays
agccgcaagaaaggaaacgagagagaaaatcgagtgaaaaggaagggaaacaacataacaaatcgcaaagaggcgtcttccaagtttgtagggttaccggatcggaggagcatccccgcctaggtcaccacagccatggttcgcggatcgctaggcaagcttgcgtcgcgcgccctctccgtcgccgggagatggcagcaccagcagcttcgccgcctcaacatccacgagtaccagggtgcggagttgatggggaagtacggtatcaacgtacccaggggtgcggcggcggggtccgtacaggaggtcaatgacgccttgaagaacatgttccccagtgagaaagagatagttgttaaaagtcaaatccttgctggtggccgagggctgggaactttcaaaagtgggctgcaaggaggt

SEQ ID NO: 83322 - DNA, 367 bp, Zea mays
agcacgccacttcttggggctttcgttgcggacagttacttgggaaggtactggaccattgttgtggtcctcccggtctacatcgtggcaatgctcgtcctgatagcttcagcatcactcccggtattgttccagagcgacgtgcaccctgcagtggtttaccttggtctctaccttgccgccattgccagcggtggcgtgaagccctgcatttctgccttcggggctgatcaatttgacagcaatgacccggcggagctggtgaagaagggctccttcttcaactgctggctccagggtgtacaggtttagggaaatgggagtaagcccccttgtgagcttacttcaagtggttgttgcagctgtc

SEQ ID NO: 83323 - DNA, 415 bp, Zea mays
  unsure (1)..(415): unsure at all n locations
aggtcgcgtttgcagctaggcagatctgagttagccggcggatccgatccgtgcgcgtgcagtgtgtgtgtgtgtgtgtcggtggagatggccacagcttacgctcccatggcgagccaggtgatgaagagcagcctcgtcgtgcactcgaggccgaggggcctgtcaggcgctgctgcgctcacgaggcggcccggccggttcaccgtcaaggccatccagcccgagaaggcaacgtaccaggtggtgcagcccatcaacggcgaccccttcatcggcagcctggagacgccggtcacctcgagcccgctcgtggcgtggtacctctccaacctctcggcctaccgcaccgccgtgagcccgctgctgcggggcgtcnaagtcggcctcgcgcacggctacctcctcgtggggc

SEQ ID NO: 83324 - DNA, 371 bp, Zea mays
aggaagtggtgagcgagtatggagagatgatccttgagttgctcatatcgcagacaagcccacagaaagtgtgcactcagattggtctctgtgtatttgatggtgcccattctgtcagcaatccaattgaatctgttgttgagaaacagaagcgtggttctgatcttttctgtactgcttgtgagatggctgttgtctggatacagaatcagctccgtgaaaacaagacaaaagaactcattttgaattatgctaatcagctctgtgagcgtctccctagccccaatggcgagtcaactgttgattgccatcagatctcaaagatgccaaatcttgcattcaccatagcaaacaagactttcaccttaaca

SEQ ID NO: 83325 - DNA, 296 bp, Zea mays
cccacgcgtccgccgacgaatatgaaggacatggcgtagacctcctgaaatctgaagcgtcaatggagtatctatgcaacttaccaccacataggtatgaagctgttttcgcgaaagaaattccggagacgatcactggcgatgcgtttttagagaagtatggagaccacaacgatgcggtaacagaagttgacccaaagcggtcttactgtgtcaaggctcctactagacatcccatatacgagaacttccgagtggaggccttcaaagcgttgctaacagctgccaaaacagac

SEQ ID NO: 83326 - DNA, 369 bp, Zea mays
aggcacgcgtaagcccaagcgtccgccatcatctgagaccttatcccggattcgaaatgagaaggccaggagatatttgagctgcatgcggaaaaaatatcccgtgccctttactcataaatttcgacatgctgatcctttggctcttcgtcttctagagcgtttgcttgcatttgatcctaaagaccggcctagtgcagaagaggctctagctgatccatactttgcatcccttgctaatgtggaacgtgagccatcaagacacccgatttctaaacttgagtttgaatttgaaagaaagaagctggccaaagatgatgttagagaactgatctatcgagagattttggagtatcatccacagatgct

SEQ ID NO: 83327 - DNA, 434 bp, Zea mays
ggcacgcgtcagcagattaccaggctttacaaggagaaggactttttggaaactgaatttatagttgggcccataccagtagatgatggaaatggaaaagaagtagcaactgaaattgttacaaacatggttacaaacaaaacattctacactgattccagtggacgtgatttcatcaaaaggataagagattatcgatcggagtggaagattgaagtgcaccagcctattgctggaaactattatcctgttaatcttggcatctatgtggaggatggcagcaaagagctgtctgtactggtagacaggtcaattggaggttccagtataaaggatggacaaatagagctaatgctacacaggaggctactccatgatgatgggaaaggcgtcgccgaggcgctaaatgaaacagtctgtctcgataagcaatg

SEQ ID NO: 83328 - DNA, 417 bp, Zea mays
agcggacgcgtgggcggacgcgtgggtacgcgcacaagacgctgcgggagggccactacgaggcggagttcaaggtgccggcgtcgttcgggccggtgggcgcggtgctggtggagaacgagcaccacaaggaggtcttcatcaaggagatcaagctcgtcaccggcggcgacagcagcaccgccgtcaccttcgactgcaactcctgggtgcactccaagttcgacaacccggagaagcgcatcttcttcaccctcaagtcatacctgccgtccgacacgcccaaggggctggaggacctgaggaagaaggacctgcaggcgctgcgcggcgacgggcacggcgagcgcaaggtgttcgagcgcgtctacgactacgacgtgtacaacgacctgggcgacccggacaagaacccgg

SEQ ID NO: 83329 - DNA, 365 bp, Zea mays
agaagactgtcttcaacggatcacactgccgctcccccacgctaaatttgggggctacagtgcacacgctagccgatcaacggctcacgctaccaggcgctctacgcggatgtgccccctagccagcttctctctccccctcgttctgtggtgcctctctcaccctctctaatattgttcacgtgggcccacttccaattattagtagatgaaaaattgataggaggtgaaaagtaggtatagaaaatgatattttatggttgtagtggggtataggggaaggatttagggggaaacgctgtacagagtggagatataggggggaagagaacgctgacgtggcacgtgagtgggatatagggaga

SEQ ID NO: 83330 - DNA, 380 bp, Zea mays
  unsure (1)..(380): unsure at all n locations
cggacgcgtgggggttgttgatatgtgcaagggagtgcagtatctcaatgaaatcaaggattctgttgtggctggtttccagtgggcatcgaaggagggtgcactggctgaagagaacatgcgcgggatttgcttcgaggtctgtgatgtcgttcttcatgctgatgctatccacaggggtggtggccaggtcattccaactgccaggagggtcatttatgcttctcagctcacagccaagccaaggctgctggaaccagtttacctggtggagatccaggccccagaaaatgcactgggtggcatatacggtgttctgaaccagaagagaggacatgtattcgangagatgcaaaggcctggtaccccgctctacaaca

SEQ ID NO: 83331 - DNA, 359 bp, Zea mays
ccagaccacagcgcgacagtgagtacagcagcagcagctgagagcgtgagagcgtgcgaagcaggagggaggacaagaagaagccgatggcggttgtgagcggcagcggcgggaggctgaacccctgggcggagcccttcgtgccttccggggcgcggtaccgcggcctgcggaccgtggaggcgacgccggagcaggaggtggaggacttctcccccgagtggtggcgcctggtgtccgcctccccggccttccgcgaccgctggctgcgcgagtacggcgcgctcggcctactcgacgccgaggacgacctggacgacgacgtcgacagcttcctccccgacgacttcttctcgcct

SEQ ID NO: 83332 - DNA, 412 bp, Zea mays
cggacgcgtgggcggacgcgtggggggagaccccggcattgccggcttgtatgacgagctgcttgtggcggaagaactcaagccctttgggaagcagctcagggacaaatacgtggagacacagcagcttctcctccagatcgctgggcacaaggatattcttgaaggcgatccattcctgaagcaggggctggtgctgcgcaacccctacatcaccaccctgaacgtgttccaggcctacacgctgaagcggataagggaccccaacttcaaggtgacgccccagccgccgctgtccaaggagttcgccgacgagaacaagcccgccggactggtcaagctgaaaccggcgaaacaatttaccccccgggcctggaagacacgctcatcctcaccatgaagggcatcgccg

SEQ ID NO: 83333 - DNA, 337 bp, Zea mays
cccacgcgtccgcgtctgaccgaccggacatgctgggattgccaggttgaagcagtatgtgcctgcaggggtagaattcacgcgctttgggagccaactcagggaccaataagtcgagacacagcagcttctcggcaatatcgcagggcagaacgatatactatgaacgcgatgcattcctgaagcaggggctggtgcagcgcaaaccctatatcaccagcctgaacgtgttccaggcctacacgctgaagcggataagggaccccaacttcaaggtgacgccccatccgccgctgtccaaggaattcgccgacgagaacaagcccgccggactggt

SEQ ID NO: 83334 - DNA, 410 bp, Zea mays
  unsure (1)..(410): unsure at all n locations
aggcgtagcctcatgagggagagactcgtcaattcgccaaactccttcttcatggatgttaattgcaaggggtgcttcaccataaccacgtgttttcagccacccccaaacggttgttgtgtgccctggctgcaaaactgtcctctgccaacccacaggaggaaaggcaaggctcactgagggctgctctttccgcangaagggagactanagcggatgtggtcttcaagttttgctctatgccagatactagcgtcatgaactgcctttagctaagattttccataagttgttctcgagcagctatgtgttgcatgttggctacttccaaacttatatctggtttggtttggattgtgatgaactaatggctctttgaatttatattatgatgttgacgataattggtg

SEQ ID NO: 83335 - DNA, 368 bp, Zea mays
gcgttgcgtcatgggggagagagagaagtgggagacccgcgagaggctgccgtgtagggactagggaccgtagagtaagcgacagcgaaggagggagagggggatggccgggatcgggccgatcaggcaggactgggagccggtggttgtgcggaagaaggcacccaccgccgctgccaagaaggatgagaaggccgtcaacgccgcgcgccgctccggcgcggagatcgagaccatgaagaagttcaacgctggtatgaacaaggcggcgtccagcggcacatccctcaacaccaagcgcctcgacgacgacacagagaacctcgcccatgagcgagttccaagtgacctgaagaaaaatctcatgc

SEQ ID NO: 83336 - DNA, 371 bp, Zea mays
atgaggttctccggggttcggtttcgtgggtgagcggatcgagatggcggcgtcggatgttgagtaccgctgcttcgtcggcggcctcgcctgggccacggacgaccactccctccacaacgccttcagcacctacggcgaggtcctcgagtccaagatcatcctcgatcgggagacgcagaggtcccgcggcttcggcttcgtcaccttctccacggaggaggcgatgcggaacgccatcgagggcatgaacggcaaggagctggacggccgcaacatcaccgtcaacgaggcccagtcccgcagcggccgtggacgcagcggccgtgggtacggtggtggccgtggaggcggcggctaccgcggtggca

SEQ ID NO: 83337 - DNA, 382 bp, Zea mays
cgtcgccttcatctcgggcgtccccgcccgcatccgcgcccgcgacgacgtcgtccgcatggccgagatcaactttctctgggtccacaagaagctccgattcaagcgcctggcaaccgtgctcatccgggaagtcacccgccgcgtccaacaggagaacatctggcaagctgcatacaccgcggggatcgtcctcccaacccccatcaacacctgccgctactggcaccgattcctcaaccccaagaagcttatcgatgttggattctctcgccttggtccgcgcatgactatgagccgcacggtccggctatacaagctgcctgatgcgccgctcacccctgggtttcgcaggatggagctgcgggatgtccctgcggtc

SEQ ID NO: 83338 - DNA, 339 bp, Zea mays
actacggcggcatcatggtgtgggaccgctttaacgacgtgcagaacaactacagcagccaggtgaagggcagcgtctgatgggcataccgcatacgaagcttcaagctacagcacctagccatgcatatatatatagtggctattcgtcaagttatcggactgctagatacaaatataataagagcggatcatcgggagacaaagacgcatgtcagctattgtctcgttttctaagcaacgagcgagagctgcatgcgctggttagatttaatatggatattgcccatacgttatgtaattaaatcaaataaatgttaagttcatattgaatgtgtcg

SEQ ID NO: 83339 - DNA, 203 bp, Zea mays
accatgtcgccgccgttgcgcgaggagttgatgattgcgtacaaggacgacgaggtcgtggacgcctgagtgcggcaagcagagaggaggatcgacgccagcagcgtcttatcttaattgccttgttgttcaatgatgaatcgatcgaattcccttgggttagctttattattgttgttgttattattaatttgactcgctat

SEQ ID NO: 83340 - DNA, 405 bp, Zea mays
gtacgagtacgcgtccggtccagtgcgcgcgtcaagcttgcttagctagccgccatggcctccctcgccgccgtctccgtgaagcccgtggccatcaagggtctcgccggcagctccatctccggaaggaagctcgccgtcgccaggccgtcggcccgctccatccgcaggccccgcgcagccgccgtggtggccaagtacggcgacaagagcgtctactttgacctcgacgacatcggcaacaccaccggacagtgggacctctacggctctgacgcgccctcgccctacaacccgctacagagcaagttcttcgagacgttcgcggctccgttcaccaagagaggtctgctgctcaagttcctgctgctgggcggcggctcacttctggcctacgtcagcgcg

SEQ ID NO: 83341 - DNA, 364 bp, Zea mays
acagcggacacgctcggcctcccgttcgtgcgaccgtatctgagcggacggagcgcggaggacttcgcgggcggggccaacttcgccgtgggcggcgccacggcgctcagcccggacttcttccgtgcaagggggttccacaacatgggaaaccgagtggacctcgacatggagatgaagtggttccgcggcctgctcgacctactctgccccggcaacctcgccggttgctcggatatgatgaaccaatctctcttcttagttggagaaatcgggggcaatgactacaacggacctcttctttctggagttcccttcgaggaaattcgcgccatcactccgagtgttgttgcgaaaatttcct

SEQ ID NO: 83342 - DNA, 427 bp, Zea mays
actttgcagaactccatcaagcagctcgagagtgctgccaccaaaatttacaaagagaagaagttgctgcaagcagaaaactggagcctaaagacaagtaagtatacgctgaaagtcagggagataaacgaccggttgatgatggccgagcgagcgttcaccaaccgagaaggactggtcgggagaccatggtacaagcatatgatatatgcatcatcggatcaagacgactgggggaccaaagccttccctggtatagtctcggccatggacaaggctaagaagtccaacacaaccgagacgtggcgactgctgcagcacgagatttacagggttgccagggctgtgtccaaggcttctgcagtcctggatggtaaactaacatgatgtgcacgtgcactgcagattttcattccattctacatag

SEQ ID NO: 83343 - DNA, 422 bp, Zea mays
agcagccagagaacagggaggtagagaggaggaggaggaggtagaaggcgaaagaaggggaaccaaatcttggacgggaacacatagatttctttggtggaggaaggaggagggcaacaagaggaggttacaggtagcccaatagatctactgctgttgagggagttgatgcaaagctgagttgctgcgcgttggctttctttagagatggcttcagctggtgttgccccttctgggtacaagaacagcagcagcaccagcattggtgccgaaaagttgcaagatcacatgaacgagctaaagattagagatgataaggaagttgaagcaaccataattaatgggaaagggaccgaaactgggcacataattgtcaccactactggtggcaagaatggtcaaccaaaacagacagtgagcta

SEQ ID NO: 83344 - DNA, 427 bp, Zea mays
atgagaatgactgggatgtggttaaacgtggctgggatgctcaggtgctcggagaagcaccctacaaattcaaaagtgcacttgaggctgtgaaaacactgagagcacagcccaatgctaatgaccaatacttgcccccatttgtgatagttgatgacagcggcaaagctgttgggcctgtattagatggtgatgcagttgtcactatcaacttccgggctgatcgcatggttatgcttgctaaagcactagagtatgcagattttaacaattttgaccgtgtacgtgtccccaaaattcgatatgctgggatgcttcagtatgatggtgagttgaagcttccaagtcgctaccttgtttcccaccagagatagatagaacatctggggagtacttggtgaagaatggcatccgcacctttgcttgc

SEQ ID NO: 83345 - DNA, 391 bp, Zea mays
accacgcgtccgcccacgcgtccgagaagacgagtgtcaagtgaacctgaaacttgcggtgtcactggctggtagcctgagtgtgagtgagtgatcgagctagctgagctccgatcctcgctagctaggataccgccataccacaagtcttcttcacaagtttaggagtgacagcaacaagagatcgatggcctctgccaccgtgctcaagtcctccttccttcccaagaagtccgaatggggcgccaccaggcaggccgccgcgcccaggccgcccaccgtctccatggtcgtccgcgcctccgcctacgccgatgagctcgtgaagaccgcgaaaacgatcgcgtcgccggggcggggcatcctggcgatggacgagtcgaacgcgacg

SEQ ID NO: 83346 - DNA, 388 bp, Zea mays
accacgcgtccgatcccaccaaaaatgagcaccgaatctctcgtcttcaagggcagcctcgtcggccacaaggatggcatcaccgcgatcgccacctcgtcggagaaccccgacatgatccttaccgcttcccgcgacaagaccatcattatgtggaccctcactcgtgacgattcgtcgttcggataccccaagcgtatcctccacggacacaaccacttcgtctctgacgttgttgtttcgtctgacggtcaattcgctctctcctcctcgtgggacaagaccctccgtctttgggacctcaacacgggacttaccacccgtcgcttcgttggacacacttcggacgttctctccgtctccttctctgctgacaaccgtcaaatcg

SEQ ID NO: 83347 - DNA, 387 bp, Zea mays
accacacgtccgcccacgcgtccgagacgacttgtttcattgattcttgaagagatcgagcttcttttgcaccacaaggtcgaggatgtcttgcaactgcggatcaagctgcggctgcggctcaagctgcaagtgcggcaagaagtaccctgacctggaggagacgagcaccgccgcgcaggccaccgtcgtcctcggcgtggccccggagaagaaggccgcgcccgagttcgtcgaggccgcggcggagtccggcgaggccgcccacggctgcagctgcggtggcaactgcaagtgcgacccctgcaactgctgatcacatcgatcgacgaccatggatatgattattatctatctagcttgtggtggtggttgaacaataataag

SEQ ID NO: 83348 - DNA, 434 bp, Zea mays
  unsure (1)..(434): unsure at all n locations
agcgtactccgtggcgctcctccgggggcccccgcttcccgccggtccgccccccggcctcctccctccgggcaaccttcggcaacctccccttcaaaaatcaaccaaggtcctcccggccccttccaaaggccccttccaaggacaaaatcggcccccgggaacaatttgttcgaggacctcaaaacgaagtgggaccccgttgaggacaacccaaccgtcctcttgtacggccgcngcgccgtcgtcgccctatggctgacgtccgtggtcgtgggcgccatcaacgccgtgccgctgctccccaagatcctggagctcgttgggctccgctacaccgggtggttcgtgtaccgctaccttctcttttaaggaaagcangaaagagtttggcgccgacattgagaactttgaagaaaaaaattaactggaac

SEQ ID NO: 83349 - DNA, 431 bp, Zea mays
accacttgcacatgctgttggagcgggtaatctgtcactagaattagaggatctttcatttcgttacttgtttcctcattcctatgaccatgttgatcagtggttgagaagccaagaaggtgactgcaaggctataataaatttgtacaaggagcagttgcttcaagcactgcaggctgataatgagttgaggaggattgcacaggacatctcaattcaagggaggtataaaagccgtttcagtactatgaagaagctagtaaaagatggacggaagccagaagaagttaaagacattctaggtttgagggtaatcttggagcctcggtgtggtggcaattcatctgattggggccctagggcttgccacaggacacatgaaattattcaagctatgtggaaggaaatcccgggtagaacaaaagattata

SEQ ID NO: 83350 - DNA, 422 bp, Zea mays
cggacgcgtgggtccgtgtttaacgggcgtagagagagaaagagaacagagcgagagagggggaggacgaagccctccgcgtcgtctcctgctgttccatcccacatctattctgcctcggcttgcaccttcgacctcgctgaaagttctgacctcaaactgaaaggggcctgtgaagcgtttccttgcggcagtgcaatggaggtatttggcaaatctgtgattgctgagcccagcaatgtgattttcttgtccgcaatccttaacacagaaggatcaaaccctagtcacaagtgtgacaagaggtgccagaacgagaacatttttgggaacatgtaccgttgcaaactgactggaaccactcacatctgtgacaaaaactgtaaccagagaatcctctatgacaaccataactcgctctg

SEQ ID NO: 83351 - DNA, 311 bp, Zea mays
aaaagtggcaagggatatgttcacgatggactatcgctaccctctctcggctttccaggcctttgccatttgtctgagtagctttgatacaaaattagcctgtgaataaatggagaagaacaaaggtaaaggagaacagcaggttgcttgcattaggccatcagtgtacctctttccatctggctctcgtgttgccttggttgtatttgtgcttaatgtagccatgaagttggtggccatatatggacgcatgtgttgttgttggccctctcccttagaagtgattaaaagttgcatttggaccacatgtt

SEQ ID NO: 83352 - DNA, 370 bp, Zea mays
gggtccacgcacgcgtccgcacacacgtccgcggacgcgtgggcgaaaaggccatcgcggacgggagcctccttgacctccggggcaaggtgttcacgttcgggctctccctgttgaagctggacatcgggcaggagtctgaccggaacaccgacgtgatcgacgccatcacaacgcacctcggcatcgggtcgtaccgcgagtggcccgaggacaagaggcaagagtggctgctgtcggagctgcgaggcaagcgcccgctgctgcccccggaccttccccagaccgacgagatcgccgacgtcatcggcgcgttccacgtcctcgcggagctcccgcccgacaagcttccgccctacatcatctccat

SEQ ID NO: 83353 - DNA, 371 bp, Zea mays
ggatgaacaaactgttgagcagcagccagaggatctcaagacgcaggagcaacagctcaatgagctcgtggacatccaaatcgaggagattgctggggtcgccaagaacgtcacttcacgttgcaaggataagatgacagagctggtggttcaatgaatctgggtgaggttcctacttcaaacgatgttaaaatgctgtcgtagcttatctggtgaggtctcttttatgggttggcttcttggtagaaagggaatgtttggttattgcactgtcatcgtagtgttagaaccaacacaagcataggcactgagtagattgtcacggcagattattatgtacttcaattctggaatatttgatgggaatgcta

SEQ ID NO: 83354 - DNA, 407 bp, Zea mays
  unsure (1)..(407): unsure at all n locations
gttctagatcgcgagcggccgccctttttttttttttttttttttggagcgaaagaataacaaacattggtacccaagattgtttgctttcacaacgttacaacatatatatcatatatgcatggacaggtacaatgcctctccagcagcaccagcaacaagggtggttagcagcagggactataaacaacagagtaccatccgcgttgatagatttttattactgcaaaattgatccccgcagcactaccggtagttgcggtagacgggagtgtacatgcagttctctgcatatttcaccaggtcgctggggggaggcagacgggtcgccagaccgagctcgtaggcttttgcagccacggctgcancgatgtgcgcaaagatctttctgatgctggtgaagggtg

SEQ ID NO: 83355 - DNA, 414 bp, Zea mays
tgcaaaggtcactggaatgcttttggagatggatcagaccgaggtcctccacctgctcgagtcccctgatgctctcaagtccaaggttgctgaggcgatggatgttctccgcaatgtggcccaccagcaaaacccaaacctcccgaccagtcagcttgccgcattatcactgaccgaaggcattatgtcctaacttgaaggccataacaaactatcttcagtttccaactcagtgcgggtgtttccagaggttgtctggcacatgacagtattgttccttcgatactatggttggacttgtgaatgttgtttccatactggatgttaggttttatttgcgccctacggtgacctgccgttaaggcaaagaacttatttgcaagtctgagcactattttggggggttgggttggg

SEQ ID NO: 83356 - DNA, 442 bp, Zea mays
gggtccagcacgcgtccgagagatcccttgaaaccagctgtgacgggcgtcttagtgttcgtttccactccagatccaattggcaacaagtactatcttggccctgctcctctgcaggatatggcaaggcaaattgctacagccaatggccctactggctataatagggattacctgttctcaatggagaaggcattagccagcattagccacgaagatgattcgatcatagagcttgcaaacgaggtgaggaaggtgctcaacagaacaaaggagaccaagatcactggtgccaatgcttccatgaaatcacatgcccctcttgtgcacctgtccgcgctttcagaaggcaccgttgtggactcgagatagcgacctctactcggaatttactttcagctcttgcatgtttgtggttgtggccatcatgtactgattttcc

SEQ ID NO: 83357 - DNA, 421 bp, Zea mays
accacgcgtccgggcacaaccgaagccaccgcttctagttctcgggttcatcgccagcaatccagaccacataatgggacagccggtgacgaggaggagggagagggacgcggaggcggagctggacctgccgccggggttccggttccaccccacagacgacgagctggtggagcactacctgtgccgcaaggcggcggggcagcgcctccccgtgcccatcatcgccgaggtggacctgtacaggttcgacccgtgggacctgccggagcgcgcgctcttcgggacccgcgagtggtacttcttcacgcccagggaccgcaagtaccccaacggctcccgccccaaccgcgccgccggcgacgggtactggaaggccaccggcgccgacaagcccgtcgcgccgcgcgccgccgcccgc

SEQ ID NO: 83358 - DNA, 415 bp, Zea mays
acagcctaaaaaaaccgtatcgtctcgcctgttcagtttccttctcctcttcccgcagcccggtttgccgaccaggttccaccgttccagagtagccaagcgaatcccgtgtctggttcgcgcgatggcggaggagcagtccaacccccagcaccagcaagcggaggagagggaggttatggtggagcagcagcagccgaggagggccccgaagctgaggtacctggacttcgtccaggtggcggctgcccaggccgcggtgtgcctcgctgggctctacggcctcgccaaggaccacgccggcccgctccgccccagcgttgacgccgtcgagtctgccgtcaagggcgtcgttagccccgtctacgaccgcttcggcggcctgccgctcgacgtcctcgccttcgtcgaccgc

SEQ ID NO: 83359 - DNA, 391 bp, Zea mays
gtcagcctagcaattagctcatcgactccagattggagaactcgacaccatgaaggtgctgatcgttgcccttgctctcctggcgctcgctgcgagcgccgcctccagtacaagcggcggctgtggctgccagacaccaccgtttcatctaccgcctccgttctatatgccgcctccgttctatctgccgccgcagcagcagccgcagccatggcaataccccactcaaccaccgcagctaagcccgtgccagcagttcggatcctgcggcgtcggcagcgtcggcagcccgttcctgggccagtgcgtcgagttcctgaggcaccagtgcagcccggcggcgacgccctacggctcgccacagtgccaggcgctgcagcagcagtgctgc

SEQ ID NO: 83360 - DNA, 385 bp, Zea mays
  unsure (1)..(385): unsure at all n locations
cacacgacgtccgcccacgcgtccgcggacgcgtgggcggacgcgtggggcactttcacgctcagctccagcaatggctgcctccaccatggcgatctcctccacggcgatggccggcacccccatcaaggtgggctccttcggcgagggccgcatcaccatgcgcaagaccgtgggcaagcccaaggtggcggcgtccggcagcccctggtacggccccgaccgcgtcaagtacctcggccccttctccggcgagcccccgagctacctcaccggcgagttccccggcgactacggctgggacaccgccgggctgtccgccgancccgtagaccttcgccaagaaccgcgagctggaggtgattcactcccgctgggccatgct

SEQ ID NO: 83361 - DNA, 448 bp, Zea mays
gggtcctagcacgcgtctgaactgacgtcctgttaggatccaaagcttggaacatgtcgtcaaatgcttgctaaagtttccaatctaattgtttacttggatgatctttatgatgtatatggaaccatagaagaacttgtactcttcacaaatgcaattgcaaggtgggatgcgataccaaatgagacacttccagagtacatgaaagcactttattctattatatatgacacatcaaatgaagttgctgaacacgctttgaagaaacatggttgtagtatgcattatcttctacaaaaatcgtggtatgacatatgcctggcatttttggtggaggcgaaatggcaccatggaaactatagaccaagcattcaaaagtatctagagaatggatgggtatcatcttcagcaacattgttgtttgttacatgcctttcgcaatgcttga

SEQ ID NO: 83362 - DNA, 409 bp, Zea mays
agagaagtaccgcggatcgtcgctggatggcgtatggaaactccccacaggcttcattcttgcgtctgaggaaatctacacgggggccagcagagaggtgaaggaggaaaccggggtcgacaccgagttcgttgacgtcgttgctttcaggcatgcccacaacgtggcgtttcacaagtccgacctcttcttcatctgcatgctgaggcctgtgtcgagtgagatcaagattgacgagacagagattcaggcagcgaagtggatggcgctggaggagttcgtgaagcagcccttcatccaggaagaccacatgttccagaagatcatggacatctgcatccagcgcctccgcaagtgctactgtgggctgacgccgcaccacgtcgtctccaagttcgacgacagaacg

SEQ ID NO: 83363 - DNA, 441 bp, Zea mays
  unsure (1)..(441): unsure at all n locations
aagttttgaaaactcctgtctcacttgatatgcttgggcgcatttttaatggttctggaaaacctattgacaatggccccccgatattgcccgaagcctacttggatatctctggaagttctattaaccccagtgagagaacctatccagaggagatgatccaaactgggatatccaccattgatgtcatgaattccattgctcgtggacaaaagattccactgttttctgctgctgggctccctcacaatgaaattgctgctcagatttgtcgtcaggctggtcttgtgaagacattggagaaaggaaagcatgctgagggtggtgaagatgacaactttgctattgtgtttgctgctatgggaatgaacatggaaacagctcaaatcctcanacgtgattttgaagagaatggttccatggagcgggtcaccctttttc

SEQ ID NO: 83364 - DNA, 390 bp, Zea mays
gtcgaggacggcaacgtccttcagatcagcggcgaacgcaacaaggagcaggaggagaagacggacacctggcaccgcgtggagcggagcagcgggaggttcctgcgcaggttccgactgcccgagaacgctaagacggagcagatcacggccgccatggagaacggcgtgcttacagtcactgtgccgaaggaggacgccaagaagcctgaagtgaagtccattcagatctccggctagacctcggtctgcggtcgtcgtacctgcgtggtttgaggaacggcagttcgcctcggtcgttctgtgaaataaaattgggttacaagaattatggcgtttgtcaatatggtcctaatgtcctaggatggtggaatgtggtcacaaactttg

SEQ ID NO: 83365 - DNA, 348 bp, Zea mays
agacgtacgtacgtacgtagatcgatccatcgatcgctagctagctgacgaccatggcgtccctctcctctgccgccatcaccgccccttccttcacggccgcgcccgctcgcgcagtggtcagcaggaggtccttcaccgtgcgtgcctctctccgcaaggccactgctaccgccgccgtggccgttgccgccagcgtcctgcttgccggcggcagcgccatggcccatgaggtgctgctgggcgcatgcgacggtgggctcgtcttcgatcccagccagttcatcgtcaaggccggcgacaccatcaccttcatgaataacgccggcttcgcgcacaacgtcgtgt

SEQ ID NO: 83366 - DNA, 373 bp, Zea mays
aatggccgaggggtacctcctcacctgcatctcctaccccaaggcagactgcgtcatccacacccacaaggaggaggacctgtactagagatcgggttgctttatgcatcagtggttgctccaagggtggtggtgcgttcgttgctgttccgtgccaccagcggaagggggatttcgttgttgagatgggctagttcttgtcatcaatttcggtcattcgatgagatcatggcatatgagttgtggcaataatgctggcaatatggttttgcaattcaaactgcaaatgtgaccagcaatgtcaaaaactgcacactgtgtctctgtgcgaacttgtgaaattggcattgagttcaattggctagttggctcg

SEQ ID NO: 83367 - DNA, 394 bp, Zea mays
acgagcgagggacccggggcggaagaagagagagaagacgtctctctcctctcggcgtccccgttccccaacctctcgtctgctgcctgcctgcctgcctgcctgcaaaaaggagtttgtcatggcgtctaagcgcatcctcaaggagctgaaggacctgcagaaagacccccccacatcatgcagtgcaggtcctgctggtgaggacatgtttcattggcaagcaacaattatgggaccacctgacagtccctatgctggcggtgttttcttagtgaacattcatttcccgccagattaccccttcaaacctccaaaggtttctttcaagacaaaggtcttccatcctaatatcaacagcaatggaagtatatgccttgacattctcaaagag

SEQ ID NO: 83368 - DNA, 378 bp, Zea mays
ttttgacaactcgtgtcgtcacttgatatgcttgggcgcatttttaatggttctggaaaacctattgacaatggccccccgatattgcccgaagcctacttggatatctcgggaagttctattaaccccagtgagagaccctatccataggagatgatccaaactgggatatccacgattgatgtcatgaattccattgctcgtggacaaaagattccactgttttctgcagctgggttccctcacattgaaattgctgctcagatttgtcgtcagagcggtcttgtgataacattggttaacggaaactatcttgcgggtggtgaatatgacaactttcctattgtgtttgctcccaagggagtgatcatggaaaca

SEQ ID NO: 83369 - DNA, 417 bp, Zea mays
  unsure (1)..(417): unsure at all n locations
cgtccgaccacacgtccgcccacgcgtccggctgcgccaaaatttcaatgttgcggctcaaaactgctggttaaacaagggaggtcctttcactggtgaactcagtgctgagatgctcgtcaaccttggtgttccctgcgtcattcttggacactctgaaacgagagctctgctgggagaatcaaatgaatttgttggagacaaggttgcgtatgccctgtctcagggactaaaggtcattgcatgtgttggtgagacccttgagcagaaggaggctgggtctnacatggatgttgttgctgcacaaacaaaagcaattgctgagaagatcaaggactggagcaacgtacttgttgcctatgaaccagtttgggctattggaactggtacagttgccacctcagctcaggctcagga

SEQ ID NO: 83370 - DNA, 410 bp, Zea mays
acaccaagagggagttcctggctcaagaaggggctcaattgtttcacttcccggtggtggcgatgttcttgagggtagtgagtttgtacatgctgctgctttagtaagtcagtcagcacttttctcaaagggtcttgctgaaccacgcatgtcagatgctgccatggttcacccatctgaggtagctgccaaaggttcacgttggaaagatttgtttgaacctggagtgaggcgtgccctgttagtcggtgttggaattcagatccttcaacagtttgctggaataaacggtgttctgtactataccccacaaattcttgagcaagctggtgtggcagttattctttccaaatttggtctcagctcggcatcagcatccatcttgatcagttctcccactaccttactaa

SEQ ID NO: 83371 - DNA, 441 bp, Zea mays
  unsure (1)..(441): unsure at all n locations
gggtccacctacgcgtccgagaacgcgtcagaccccaagcaccagcgcggctcggcggccgcggggaaccagggttgtcggaaagaacaaacgttgttcgcggggaacacagggggtcacaaaaaaaccggcaaccctttctcaaaaaaggtttggtatgaaatcaaggcaccgtcggtgttcattgtgcgcaacatcgggaagactctcgtatccaggacacagggtaccaggattgcttctgagggtctgaagcacagagtctttgaggtttgcctagctgatcttcagggcgacgaggatcaagcttacaggaaaatcaggctccgtgctgaagatgtgcagggcangaatgtgctcacaaacttttggggcatgaattttaccactgataaactcagattcctagtgaagaagtggcagacattaatcgaagcccat

SEQ ID NO: 83372 - DNA, 398 bp, Zea mays
agcaaagggcaaagcagaagttgcggttggcctcgtcctcctcttctccgtcgcggctcagatctctgcgtgcgtcgatggcgtcgttctcggaggctccccccgggaacccgaaagccggcgagaagatctttaagaccaagtgcgcgcagtgccacacggtcgacaagggcgccggccacaagcaaggtccaaacttgaacggtctttttgggagacagtcgggtaccactgcaggctactcctactctgcgggaaacaaaaacaaggctgtagtctgggaagaagacactttgtatgagtacctgcttaaccctaaaaagtacattcctggaaccaagatggtcttccctgggctgaagaagccgcaggagcgtgctgatctcatcgcgtacctg

SEQ ID NO: 83373 - DNA, 395 bp, Zea mays
  unsure (1)..(395): unsure at all n locations
aaaacgcggcagaccccaagcaccaggtggcctcggcggccgcgggtaaccagggttgtcggaaagaacagcgttgatcgcggggaacacaggggcgcacaaaaaaaccggcgaccctttcccaaaaaaggtttggtatgacatcaaggcaccgtccgtgttcagtgtgcgcaacatcgggaagactctcgtatccaggacacagggtaccaggattgcttctgagggtctgaagcacagagtctttgaggtttgcctagctgatcttcagggcgacgaggatcanncttacaggaaaatcaggctccgtgctgaagatgtgcagggcangaatgtgctcacaaacttttggggcatgaattttaccactgataaactcagatccctagtgaaga

SEQ ID NO: 83374 - DNA, 393 bp, Zea mays
aggacgcgtggggtacggcaggaagaagcacgccaagagcgagggcgcggcggcggcggcggccacggacaagcagcggttcaagacgctgccggcgtcggaggcgctgccgcggggccaggccatcggcgggtacatcttcgtctgcaacaacgacaccatggacgagaacctcaggagggagctgttcgggctgccgtccaggtacagggactcggtgcgggctatccgcccgggactgcccctcttcctctacaactactccacgcaccagctccacggcatcttcgaggtacagtacagcacagcacagcacagtagccactagccagttcgtggttccctttccttgcttcttcttcgttcgctgtccttgcttcttcttcgttcgct

SEQ ID NO: 83375 - DNA, 401 bp, Zea mays
aacacgcgtccgggcgctgccgagggacgacagggagcggatcaacatcgagcagcactgcctggcccgggagatcgtgaacctggtggcctgcgagggcgaggagcgggtggagcggcacgaggtgttcggcaagtggaaggcgcggctgatgatggccgggttcagcccgtccccgctcagcgcgctggtgaacgccaccatcaagacgctgctgcagagctactcgccggactacaagctcgccgagagggacggcgtgctctacctcggctggaagaacaggcccctgatcgtctcatcggcatggcactagtgttgacttcagagaatgttgacctgatggagaatgtttcttgtaaccttcgaagtacctcttagtggtttagatatgtttggct

SEQ ID NO: 83376 - DNA, 323 bp, Zea mays
ccacgaatccggacaaggcggcgcaggacgcgctgctgctgcgcgccaaggccaactccctggcgcagctcggcaagtacacctccgacggcgaggccgccgaggccaaggagggaatgttcgtgaagaactacagctactaattaatcgcccggggatcacccgggataccgccgcccctccgagagatacgtgtgtactgatcatggttaagcacgtactccgatccattcccatcccatgaagccatgataatgatgatatgatccatggaccatgcatggtgctctggtcgatgcaaaaaacagaaaaaaaattttttt

SEQ ID NO: 83377 - DNA, 377 bp, Zea mays
ggtcagccacgcgtccaaacgattcaggcgacgctgtcgagcaggacgtagcgtccagtaatgcacactgtgtcgcgttcctcatcaaagacccccaaaaggtgaaaacggtcgatgagatgagggagcggctgaggatgcgtggtctccgctgccacaggaggggctgcatgaactcgacaaggcttcaggttgtccctctgctagcatcaaggtcacaggcactcaggtatctttccgtgcgctggggcgtatctgtggggaacatgtatctgatcaccggggaacatggcgacaccgatctacaggagatgctatccgggtctttatattaccgtgatcgtccgtggcgtcaccgagaagggttcggaagcact

SEQ ID NO: 83378 - DNA, 288 bp, Zea mays
aacacaaataatgcttggttgtggacagaaacaaacagggtcatttctggatgctgctgctcctaatggtctttttggacttggaatacatgaggtttcagttccaagggtctggagctcataaaggtttgacatctaaggggggtggctatgtgctttggtcgtgatggtattgggccaatcagctttggagaccaatatatctcacaccactaatacacacctcttgacatcaactgacaacatcccacatacgccatcactatatgcgggattactgttggaaat

SEQ ID NO: 83379 - DNA, 430 bp, Zea mays
cccacgaatccgcacacgcgtccgagctgaagttgttctgcgacaaagactaccctgagaagccaccatcagttcgatttcattcaagaataaacttaacatgcgttaatcatgaaactggagtgggtgacccaaagaagttcagcgttctgggtggggggcagcgtgattactcaatggaatacatcctaacccatctcaagaaagagatgacatcgccacagaaccgcaagctagttcagcctccggaagggacattcttctaaagatggcagcaactcatgtccatccatggtgactcggaaacagcttccgcacctgttttctatattttatatatttagtctgatctcccagttatctgtgaaccaccgagatcgactgcaaccagacttggttgatttacaatttgcccggtggttgctaatga

SEQ ID NO: 83380 - DNA, 411 bp, Zea mays
ccacgaatccgcagaaatgaggatggtttgttgataagttcaatatcatcatgcgcaaatctttgggcaatcattatggatgcaggaactggcttctcagctcaagtttatgagctatcttcagagtttcttcataaggagtggatcatggaagggggggataaaagtttctacatcagttctgttgctggctccaacaatggaagttctattgtagtgatgtcaaaaggcacaccatatacacagcaatcttataaagtcagtgattcctttccatttaagtggataaacaagaaatggaaagaaggttttcatgtgactgcaatggcaacatcaggcaatcgatgggctatagtcatgtcccgcagtgctggattttctgagcaggttgtggagttggacttcttgtac

SEQ ID NO: 83381 - DNA, 320 bp, Zea mays
aaccacacgtccgggtgcacccgctccgacctcaagtgcagatacgcgcaccctcacaactccgtttccatcgacctggacaataaggtgactgcgtgtgcggattctctgaggaacaattgcttccgggggatgacatgccggggcgaggatccgcctccacatatccaggagcaattactgagatcagttggcgtggaagacccaaaggtgaagacgatctgcagagattttacacgtgggaagtgttcacgatcagcaaatgactgccgattcttgcaccattcatctgttgaagatgttgcaattgtttttcaaga

SEQ ID NO: 83382 - DNA, 403 bp, Zea mays
  unsure (1)..(403): unsure at all n locations
aaccaagcgtccgcgagttcgctgccaaggactacacagaccctcccccggcgccgctgatcgacgcggctgagctggggtcctggtcgctgtaccgcgccgtgatcgccgggttcatcgccacgctgctgttcctgtacatcaggggtggccaccgtgatcgggtacaagcaccagacggacgcgtccgcgtcgggcgccgacgcggcgtccggccgcgtgggggtgctgggcatcgcctgngccttcggcggcatgatcttcctcctcgtctactgcaccgccggcatctcggggggccacatcattctttttttcaccttccgcctcttcctggcgcccagaggtcccccggtgcgcccgctgctctacaacctggcgcagttcctccgcgccatctgcg

SEQ ID NO: 83383 - DNA, 323 bp, Zea mays
aagggaatttccatacaaatcgaaggccattctattgtttcaaaagatcgaaggtgtggatgtttgcctctttgccatgtatgtacaagagtatggctcagattgcccaccaggaggtcaaagacatgtttatcttgcatatagggagggtgtcaaatacttccggcctgaaatcaaatctgcaactggagaagctctccgcacctttgtgtatcatgaaattttgattggttatctggactactgcaagaaacgagggtttgtaagctgttcaatatgggcttgcccatctacgaaacgagatgattattttttatattgcc

SEQ ID NO: 83384 - DNA, 292 bp, Zea mays
cccacgcatccacagacgcgtgggctctctctcccctctatgtacaatgtgccctggcctcctccgccgccattgcagcgagcaagatcaatccctctgctgccattcatgagtcaaggtggggcattccctcctgtgaagaacatcagggtggggtttgtcatatgcggcccaagcattggcaagggcacccagtgctccaagattgtcacacactttggattcacccaccttatcgcatgcgacctcctgcgccaacaagttcagtcacatactgaacacggtgccatga

SEQ ID NO: 83385 - DNA, 434 bp, Zea mays
ccacgcatccgcacacgcgtccgtcggcttcacgaagaggcgcccaaaccaggtcaagagaacctgctatgctcaggcatcccagatccgtcagatccgccgtaagatggttgagattatgatggggcaggcttctacatgtgacctgaaagagggggtttcgaagttcattccagaagttattggtaaggagattgagaagtctacctccagcatcttcccacttcaaaacgtcttcatccgcaaggtgaagatactcaaggcccccaagttcgatcttgggaagctcatggaggttcatggcgactacaaagatgatgttggtgtgaagcttgagaggcctgtccagggagatgatgctgtgcacgaggttgctgctgccgagtagtttgtttgctacctctatatctaagctgagtccggaaatgacgttg

SEQ ID NO: 83386 - DNA, 288 bp, Zea mays
aaccaaacgtccgcattcgtgttcgtcatggccaccaacgtcaccgtggaaaacctcaaccccaaggtcttaaaatgtgagtatgcagtccgtggggagattgtcatccatgggcagcgcctgcagcaacaactacaaacacaggcagggtctcttccttttgatgagatcctctattgcaacattgggaatccccaatctcttggtcagcaacctgtgacattcttcaaggaagttcttgctctttgttatcatccgtgcctcttggaaaaagaggaaaccacatca

SEQ ID NO: 83387 - DNA, 401 bp, Zea mays
ccacgaatccggagaacaccagccgtattgtcccgactcctgacccctaccgatcctcgcctgctgcagccatggcgacctccgcggcgctctccaccgccgccaatcccacccagctctacgggtcccgcgcttcgctgggcaagccggtgagggggcttggcctgagcatgggccgcgagcgcgcccagcggagcattgtgtgccaggcggcgagcagcatctccgccgaccgcgtccccgacatggagaagcggaagctgatgaacctcctcctcctcggcgccatctcgttgcccaccgtcggcatggtcgtctcctacggcgccttcttcgtccctgccggctccgggaacgccggcggcgggacctacgcgaaggacaagctgggcaacgacatc

SEQ ID NO: 83388 - DNA, 391 bp, Zea mays
acgcgtccaacggaggacatcgacctgcccctcacccgcacacgccccgtcaagaaggtggccctcgtggtcctgaccggcgagcgcggcctctgcgggagcttcaacaacaacgtgctcggggagggcggaaacccgcatcgatgagctcaggcaggtgggcctccagtacaccgtcgtcagcgtggggaagaagggcaacgcctacttccagcgccgcccctacatcccgttggagcgcgatctggaggtgagcagcgtgcccaccgtcaaggactcgcaggccatctgcgacctcgtctactcgctcttcgtctcttttgatgtggacaaggtggaagctgccctactccaagttcgtgttcctggtgcgctcccgacccatcatcca

SEQ ID NO: 83389 - DNA, 328 bp, Zea mays
taagcgtccgaatttttttcccgtaaaaaaattccactagggccgagccatggtacccgtccgcgtgcacaccgtgctcatcaccacccagcacaactacaccgtgggaacgacaagatctccgccgacctcaaggagcacgtcatcaagcccgtgatccctgacaagtacctcgacgagaagaccatcttccacctcaacccgtccgggcgcttcctcatcggcggaccccacggtgacaccagcctcacctgccgcaaaatcatcatcgacacatacggccgatgcggagtccacttttgtggtcccttctccggcaaggacccca

SEQ ID NO: 83390 - DNA, 423 bp, Zea mays
ccacgcgtacggacaccgccacaaggaggagcgtccgtgtagctgccgtcgtcgcgaccgaggccgcgcagatcgactacagctcaagcgtctcggtgttcccgatggaggcctgcgacctgcgtggtggcgacgcgtgcaacgggcccatgtgcggggaggccaagcccgcctcggcggcggcggcggcgagcaggagtgtggtcggggtggacagggactacctgtcctacgacgagccaaagacggtgttcccgggcgaggcgtgcgatgaccttggcggcgagttctgcgaggcgccgtaccaggacggcgtctctttttatctggcgcacgcctgaagaccctgatccatccatttctgtccaccacgctatgtacgtatgtgtagcagatggtttacatctacgtgttagagcccgg

SEQ ID NO: 83391 - DNA, 225 bp, Zea mays
cacgcgtccgcaaacgcgtccgcccacgcgtccggagaccaacaagcaacatagaaagtggaatccagtagcaacaatagagcaacaatggcgaccaagatattttccccccttaagctccttgcgccttccgcaagttttgccaaagccaaaaatttgcggtcaatgtcaaaaacttccaaaagcttcccttcttcccccataccttccatcaatgatagcttc

SEQ ID NO: 83392 - DNA, 409 bp, Zea mays
agccatcgcgtccgactccttccctgccctctcactccaaatccctcctccaccaccgcttcctccgcgtcacccctctcgtcgtcgcctcacgaggcgaccagcggcggaccctcgggggcgcaaccatggggctcttcactgtgacggggaaggccaccacgcccttcgacggccagaagcccggcacctccggcctccgcaagaaggttactgtattccagcatccccattatctgcagaactttgtccaatcaacattcaatgcccttcctgtggatcaagtaagaggtgcaacaattgttgtctctggtgattttttctatttctcaaaagatgctgttcagatcataacaaaaatggctgctgccaatggagtaacacgtgtttgggttggacaaaacaatct

SEQ ID NO: 83393 - DNA, 428 bp, Zea mays
cgaaccattagctttatctactccagagcgcagaagaacccgatcgacaccatgagggtgttgctcgttgccctcgctctcctggctctcgctgcgagcgccacctccacgcatggaggcggcagctgcggctgccagccaccgccgggggttcatctaccgccgccggtgcatctgccacctccggttcacctgccacctcctgtgcatctcccaccgccggtccacctgccgccgccggtccacctgccaccgccggtccatgtgccgccgccggttcatctgccgccgccaccatgccactaccctactcatttttttcggcctcagcctcatccccagccacacccatgcccgtgccaacagccgcatccaagcccgtgccagctgcaaggaaccctcggcgttggcagcaccccgatcctggg

SEQ ID NO: 83394 - DNA, 413 bp, Zea mays
ccacgcgtcaggacatcaccgccgcgacgacgatggcagcctcgcaccaagccgcggccaccctgatgcagccggccaagatcggcggccgggcgccctttgcctcgctgccgtcccgcccggcggggcaactcgcctgcagggcgttcggcgggggggccggcgccgccaggatcacgtgctccctgcaggacgtcgccagcaggtgcgtcgacgccgcgaagctcgccggcttcgcgctcgccacctcggcgctcctcgtctcgggcgcgagcgcggagggcacgcccaagaggctgacctacgacgagatccagatcatttcttatatggaggtgaagggcacgggcacggcgaaccagtgcccgaccatcgacggcggcgtggagtcgttcccgttcaaggccgggaag

SEQ ID NO: 83395 - DNA, 420 bp, Zea mays
gcgtccgcagacacgtgggatttgcaaacaggtcatgtaaataaccatggatgagacaaaagtcttaactgttctaaatgtgtgtcatggatcgctttcaggttctgtttccatatcacaggtgagtaatttaatttcttgtttatttttcggggaggatttgaagattctgggagttgagaagattgcttctcaacaagaaataaagaaggtgtatcacaaattggctctacgtctccacccagataagaatcctagggatgaggaagccaaagagaagtttcagcagctgcagaaggttatatccattcttggttatttatttaaaagagctttatatgatgatactggcatcactgatgatgcactggtgggagaagctgcaaacaatcttcacgagtacttcagaacaatgcacaa

SEQ ID NO: 83396 - DNA, 401 bp, Zea mays
cacgcgtcagccaacacgtccgcccacgcgtccgcccacgcgtccgaacacgcgtccgatcgcccgccgctccaccagaagcctcggcaacgtcagcaacggcggaaggatccggtgcatgcaggtgtggccggcctacggcaacaagaagttcgagacgcggtcgtacctgccgccgctgtctacggacgacctgctgaagcacgtggactacctgctgcgcaacggctggataccctgcctccacttcagcaaggtcggcttcgtctaccccgagaactccacctccccgtgctactaccacggccgctactggaccatgttttttttttccatgttcggctgcaacgacaccacccacgtgtacaacgagctgcacgaggccaacaaatcctaccccg

SEQ ID NO: 83397 - DNA, 426 bp, Zea mays
ctatgaacagacatcgaccatccatttgcaccgaacaatcaatcagattaaaagtctaggagcaaaggcaggagttgttttgaatccagcgactccactcactgcaattgattaggggcttgatgttgttgacctggtgctgattaggggggtgaatcctgcgtttggtggccagagctttatcgagagtcaagtaaagaaaattgcagaactgagaaggttatgtgcagagaagggagtgaacccctggattgaggttgatggtggtgttggtccgaaaaatgcctacaaggttattgaagctggcgcaaattctattttctcaggttctgcagtttttggggctccagactacgctgaagctatcaaatggaataagaccatccaaagacctctagctgtagccgcataaacaacttgacgtgt

SEQ ID NO: 83398 - DNA, 372 bp, Zea mays
gcgtccgcacacaagtccgcccacgcgtccgcccacgcgtccgtttctgtatactttccccgttctattgctaccgcgggtcttatgcaatcgatcggatcatatagatatcccttcaagagggggagtaggtcatcgaaaggatctcggacgagtcgggaaagcacgaaagccagttagaaaatggattcctatttgaagagtgcctaaccgcatggataagctcacattaacccgtcaattttggatccaattcgggatttttcttgggaagtttcgggaagaaattggaataatatcgattcatacagaggaaaattttttttattgatgcaaacgccgtacctacaggataaggatagaggaagaagg

SEQ ID NO: 83399 - DNA, 437 bp, Zea mays
gcgtccggacttaaattgttattttcgtcaggagctttaaagatttgcatctctggcaaatcgagttctgcagtagctagttcatcatcagataacgagtcatcttcaatcagtcaaagcggcttgtgtctcatccaagatacaagcagccattggggtactgaattcaatcattgtcatggatcctcttactgaaagttatacaatggaatcaagcagaagtggactaggccctgtgaaagccattgtcttttcccaatggactggcatgctggatttgctggagctttcactgaatatcaactgtatacagtacatttttttatatggaacaatgtctctcaatttaagagaaaaaaatgtgaaggattttaacactgacccagaggttacagttatgattatgtcactgaaagctggtaatcttgggctcaaaa

SEQ ID NO: 83400 - DNA, 395 bp, Zea mays
gcgtccgcatgcaatccatcctatcaccgcggtacagcttgaatagacactatggtctagagatgcagaagaagatataatccccacttgcagagaacttggaattggaatcgtggcttagggtcgactatgcagaggtttcttctctagtggagggggactagttgactcactatctgagcaggacttccgcaagcatatgcctatatttcagccagagaatctcgacaagaacgctcagatattccagcgcgtgagcgccatcgcagcactgaaaggatgcacgccatcacaactcccgttggcctgagttcacttttttttttatgacgtctgccccatacctggcacaacaaaaatccataactttatccacaacgttggggcactgtctg

SEQ ID NO: 83401 - DNA, 409 bp, Zea mays
gcgtccgcaatcaacgatgaatccggggagccagcacagcttgttattgagaggagagaagaaagaccatcagtgatgaacgctttcgagttaatctctacgtctcagggcctcaatctcgggaggctcttcgagaagcaaacgggttctgtggagggagaaacaaggtttgcgtcaaggcttcctgcaaatgagatactgtcgaagatctaagcagcagcaggacccatgggcttcaacgttcagaagcccaactataagctgaagctgcaaggggagaaccctggaaggaaaagtcacctggccattgcaacattttttttttttcctgcttgtgcctagacttcctgcatggtctgttgtgctgttcttggaccctctgtgctttagactgaaaccaaagataaaa

SEQ ID NO: 83402 - DNA, 426 bp, Zea mays
cacgcgtcagagacaaccatctaccagcgattcagcgagcgagagcagcacacacgcagctagctaggagcagcagcagcggcggcggcgatggcggcctccatgatctcctcgtcagctctggcggtggcgcctcagggcctgccgcccctcggccggggcgcctcctccttcgccgtcgtctgctccaataagaagatcaagaccgacaagccctacgggattgggggtggcctgactgtcgacgtcgacgccaacgggagaaagggcaatggcaacggcgtgtaccagttcctcgacaattaccgtgccaacgtccactgtttttttttactctacaaccacgatgactggtctcccaccggcgacgtctacctcggtggaaccactgggcttcttatcttggtccgtaccccttcctgggga

SEQ ID NO: 83403 - DNA, 419 bp, Zea mays
ccaacgcgtccgccaacccactagctcaaaaccctaaagatctcgcctgctcgcctccgccgccagagcgagctccccatcttcatccgtcaaccatggcgacccagatcagcagggggaagaagttcgtcagcgacggtgttttcggggcggagctcaatgagatgctgacgcgggagctggcggaggacggctactctggcgtggaggtgcgcgtcacgccgatgcgcacggagatcatcatccgcgccacgcgcacgcagaacgtgctcggcgagaagggccgtacgatcagggagctcacctccgtcgtctttttttatgttcaacttccctgagaatggcgttgagctttatgccgagaaggtcctcaaccgtgggctctgtgccatcgcgcaagcccaattcctccgttacaa

SEQ ID NO: 83404 - DNA, 383 bp, Zea mays
cacgcgtacgaaaggggaaagcatcatagcaacagttttcaagaatgtggagcatccggagaacaacgagaagccgatggacaagtgcaaggttaagttcaagattgtcagcctgaaagtcggggggccggtggagtacgtccctgaactggtgggtgagcagaaggaccaggtcgcggttgagcaaatattgcgggtagtattcttggatgctgagcgcccaagcccacaaatggacaaactcaagcgccagctagctgaagcagaaccagcccttgaggcacgcaagaaacctccagaggacaatggtccccttattgtttgtgaaggccttgtgattgacgaatggaacgaacgaagagagaggtaccttgctcgccagc

SEQ ID NO: 83405 - DNA, 389 bp, Zea mays
cacgcgtacgcacagtcctcctccactaccagagcatgcgcattgaccacgacccgaaccgccgccgccgccgccgctcaccctccgagcgccttcctgctcctcctcgtactcctcggttgcgcgtccctcgcgatcggaggagcaaccatgggggggcacgtcctctgcggcgtcaaggagaacccagccgcggccaacagcgccgattccgacgggctcggccgcttcgccgtcgaccagcacaacacgcgcgagaacgccctgctggagttcgtgcgcgtggtggaggccaaggaacacgtggtggccggcatttagtatttttctcacgctcgaggccgtcgaggccgggaggaagaagctctaccatgccaacgtctgggtca

SEQ ID NO: 83406 - DNA, 414 bp, Zea mays
gcgtccgcaaacgagtccgcccacgcgtccgggtacccgcaaaagttgttctggtggcacatgcacctcgggctcaggaattcaaggggacttcaatcttaataatcttgaagatggtagagtggcctcagcatttatggttgggttgttggtgtggtcgttgatatttgcaagccttgtaaaaagatataatcctttcaggcttattggtgttggcttgttagtgtggactatcgcaacagctggttgtggagtatcatttgatttctggtcaattactatatgccgcatgtttgttggcgttggggaatcttcattttttagtctcgcagctccattcattgatgacaatgcaccggtagctcacaaaacagcatggcttggtatgttccacatgtgtttaccaactgggat

SEQ ID NO: 83407 - DNA, 413 bp, Zea mays
  unsure (1)..(413): unsure at all n locations
cacgcgtccaggactctgtggacaagaacgaggcggagatctcgccatcaacactatatgccattgcctgtgtcacggagggggtgccgttcatcaatgggagcccccagaacacttttgtgcctgggctgattgatcttgctatcaagaacaactgcgggatcngtggtgacgacttcaagagtgggcagaccaagatgaaatcggtcctggttgattttcttgttggtgctggaataaagcccacctcgattgtgagctacaaccacttgggaaacaacgacggcatgaacctgtctgcccctcaaacattcaggtccaattttttctttatcagcaacgtggtggatgacatggtctcaatcaatgccattctccatgggcccggcgagcatcccgatcatgttgttgtc

SEQ ID NO: 83408 - DNA, 377 bp, Zea mays
tccggcggccccacgcgtcaggacgcccttttttttttttttttatatggtatccaacactttgaaaccatcaaatttgatctccttccatatttcacaagctgcggctagttcagcactccatttgcaagctggggggataatttcattaccttcacgagcaagatggcgcccttcgttacgagcttgtacacaggcttctaaagccacacgattagctgctgcaccagctgcatttccccaacgatgtcctaaagttcctccaccaaattgtaatacggaatcatctccaaagatttcggtcagagctggcatatgccaaacatgaatattttttttttcaccggtataacacctggcattgatacccagtcctg

SEQ ID NO: 83409 - DNA, 385 bp, Zea mays
ctactgcacctgctggacggcttccgcggctccggcacagggttcgagccccgcgggagggaccccgcgctggtgaacaagtccaccgacttcctccgggaggaccacatggtgcggcgcgtgtggtaccaggcggagaacaagggcggggtgaggacggaggacggccggtgggtgctgccgccgcggcagagggtgctcgacgaccacccggaggacactgaccatcacctccagcggctcggtctcaccgcgtgaagctcagcaatactctgatagtagcgttaactactgcgtgtggcgttcgcctacttgttttttgcagtcggttcacctgttgccgcgcgcggcagctcagtggcgccttcatgccgtgcatgatgcc

SEQ ID NO: 83410 - DNA, 384 bp, Zea mays
ccggcggcaccaccgtcaccacgcgtccggaagataataaagaaagtccctatagaagtcggcaactgcacaggatttgcagtcaaccgtacattttttccttacacacagggttctcatcttctagttagggggggtattgatgttttcagaattgatcgaggggggagcacctttggcatgccaatgggaccttttcaactccaagatgtggctgggtatggagttgccttggcagtaaaggatatctacgctgatgcctttggacaaagaaatttggactctgaccttgtggatttgatggtaaaggatggacgacacggaaatgttttttttataggttactacatttatgacaagggtgggaagccaaagccagatcct

SEQ ID NO: 83411 - DNA, 407 bp, Zea mays
ccacgcgtacgcagacgcgtgggcggacgcgtgggcgcgacgtggaagttcgacacggaggcgctgcccaacgacctcgtcaagcgcgggctggccgtgcgcggggaggacggggagctggggcgtggccatcaaggactacccctacgcccacggggggctcctggtctgggactccatcaagcagtgggcgtccgagtacgtcaacgtctactacaagtccgacgaggccgtggccgccgaccccgagctgagggcgttctgggacgaggtgcgcaacgtggggcacggcgacaagaaggacgagccgtggtggcccttgtcttttacccgcgacagcctggtggagacgctgaccaccatcatgtgggtcacctccggccaccactcggccgtcaacttcgggc

SEQ ID NO: 83412 - DNA, 378 bp, Zea mays
cacgcgtacggaatacccggccttcgcgctcgtcaacaaggtcaacagagaggcgctcaagcactccacggggcagggccaccccgtcaagctcgtgccctacaacccggactaccacgaggagggggtgctctggaccgagagccgcgacggggggggcggcttccgctgcgtccgcatggtcaacaacatctacctcaacttcgacgccttccacggcgacaaggcccacggcggcgtccatgacggtaccgagatcgtgctctggaactcgtgcgagggcgacaaccacccctggaagatcctcccttggtgtattttcttttgatactactacctggtaccctactcataattctgccggctgctgcgatcccc

SEQ ID NO: 83413 - DNA, 289 bp, Zea mays
ggtgccggtgtcttctgtgctattataaaacaaccggctgacaaccttgtgtctttcctgaacaatgccaagggagctacattgggagatcctgttaacaagcgggggctctggggtctcttcactagaagacggcgggggcgtatcgtcatcattggtacccttactggtgctcactggggaatttaccatgcattcaaactcatcgtttgactcccaacaactggaggtgttacacctgccccatcagcatacgctgaattcaaagccactccttgatttttttttc

SEQ ID NO: 83414 - DNA, 391 bp, Zea mays
cacgcgtcaggaacacctgaaacttgcggtgtcactggctggtaaccagagtgtgagtgagtgatcgagctaactgagctccgatcctcgctagctaggataccgccataccacaagtcgtctgcacaagtttaggagtgacagcaacaagagagggatggcctctgccaccgtgctcaagtcctccttccttcccaagaagtccgaatggggcgccaccaggcaggccgccgcgcccaggccgcccaccgtctccatggtcgtccgcgcctccgcctacgccgatgagctcgtgaagaccgccaaaacgatcgcgtctttttttttgggcatcctggccatggaccagttcaacgcgaccttccggaagcggctggcgtccatccggctg

SEQ ID NO: 83415 - DNA, 404 bp, Zea mays
ccacgcgtacgcacgccccggagatcttcggcaagatgggcatcaacacccggagaccgcgctgccgtggttcaagacgggcgtcatcccgcccgcgggcacctacaactactgggccgggggggcacactcttcgtcttcaacatctcgggggggggcttcgccgagcaccgccgcctctagtactggtacaacccgggctccatgggcaaccagtacttcctcggcctcgagaagttcctcgccggctccggcgacccctcctaccccggcgggcccctcttcaacccgctccgcttcggcaacaccgatattgactgatttgatctcaacctcaaggagatcaagaatggcaggctcgccatgctcgtcatcctccgttacttcatccatgggctcgtcaa

SEQ ID NO: 83416 - DNA, 378 bp, Zea mays
agcagcggccgtttgcctcgatgaggtcctctgggttaccagcctcgtgcacgccttccagtgggccctgcctgacggcgcggcggccgtttgcctcgacgaggtcctcaagctcggggtggagatgaagacgccgctcgtcaccgcagggggcccccgcaccgcctgatccgtcctgccgccgacgcgtcacgtcacgcgttgtttgcatggatgatggtatctttgtctgtctgtgtggtcttcgctaaagtttgcttcttctcgatcgtcggttcgttcgtgcctccaccttagcctagggtttggtttctttttttgtactgagtgtgtcatagtctcaccatcaccggggctccaattttggaaaactgcgtg

SEQ ID NO: 83417 - DNA, 412 bp, Zea mays
gcgtccgcaaccacgtgggcagcggcacagaggtgcgacgtaagaaaacgacgacgcaggcgccacacatggcatcccagctctccgccgccgtgccccggttccacggcctccggggctggggcggcgcccaggtccgcggtggcagcactggggtgggtgacggtgcgcacgaagaggtcgtcgtcgcagggcatccgctgcgactacatcggctccgccaccaacctgatcatggtgacgacgacgacgctgatgctgttcgcggggcggttcgggctggcgccgtcggcgaaccgcaaggcgaccgcggcgcttatattttttgcgcgcgactccggcctgcataccggtgaccccgccgggttcaccctcgccgacacgctggcctgctgcgccgtcgggcacatcc

SEQ ID NO: 83418 - DNA, 351 bp, Zea mays
gcgtccgccaacaagtccgcaaatccacggtttaataacgaaacgtattaacttaccataacaacaactcaattcctatcgaattccttcctatcgaattcctatagtaaaattcctataggagggaacgtacacacggtgtacacattatagggggtgaaacatattcattaacttaagcatactcctttttttatttaatgagttgatattaattaaatatctttttttttagatttttgcaaaggtttcatttacgcctaatccatatcgagtagaccctgtcgttgtgagaattcttaattcatgatttgtttttttttacttatgtcaccacacacataaactaaa

SEQ ID NO: 83419 - DNA, 390 bp, Zea mays
cacgcgtcagagataggtgttcctgatgaacctctctgctcccttaatatgtgagttcttccgtgatgcccaaaagaaggtcctcccgtatgctgactacatcttcggcaacgaaactgaggcagggatctttgccaaagtcagaggatggaagacggggaatattgaggagattgctttgaagatctctcaacttcctttggcttcaggcaagcaaaagaggattgctgtgattactcaaggtgctgatccactggttgttgctgacgatgggaaggtgaaaacgttccctgttatcctattgcccaaggagaagcttgtttttttttatttgccaagtgatgctttcgtttgaggcttcctctcacacttggttctaggcaagggcat

SEQ ID NO: 83420 - DNA, 391 bp, Zea mays
acgaacgcgtgggcggacgcgtgggcggacgcgtgggagaacgcgtgggcggacgcgtgggtgaaggagaagaagatgctcctatcggagctatgccagggtgctataggcttgggtggaggcacgggctgcttgacgaggtttacaggggcgcgcgatgttggtgttaatagttttgttctctttcctaaagttcccgatgcattgaagtctccaacaggagatgaagcgtacaacgataatggtctggttccacgtacaatccgcttgctcaaggacaagttccctgatattgttatctacacagacgtctcttttttttcttagtcatctgatggtcactatggtattgttacggaagatggggtaattatgaatgatgaaacacttt

SEQ ID NO: 83421 - DNA, 424 bp, Zea mays
ccgcgctcgcgctcctcgccggcgtcacaaaacatcggcgccaaggcgagccccgccgccgccgcctacggggaagcagccaacgtgttcggcaagaccaagaagagggcgggcttcatctcctacgtcggcgacggggtggggctgctgatcccgtccaagtggaaccccagcaaggagcgggagttccccgggcaggtgctccgctacgacgacaacttcgacgccaacaccaacgtgtccgtcatcatccaccccacctccaagaaggccatcaccgagtacggctcccccgaggagttcttctcttatgtcgactacctgctccgcaaccacgcctacggcggcaacaccgactcccagggcgggttccagaccgacgccctggccacccccaaccttctggagagctccaccccccttg

SEQ ID NO: 83422 - DNA, 438 bp, Zea mays
gcgtccgcaaggtaccgtcccactgcatgcgtcaagagcctgactggttttcttgttctgatttgtcatttgctggtgctcaaagccggcttggtttcctcgaaggatcagcatctactcgtgagtgtggactttgtcacatctgatatcaggggtgggaaatctttatccgagatggcgctgcaaaacattggtgcttcaaacagggatgatgccttctacaggtacaagatgcccagaatgattaccaagatagaaggccgtggtaatggtatcaagacaaatgttgtgaacatggttgacatagcaaaagcacttgttatttttagcttcctacacaaccaagtactttggatgtgagcttggtgcacagtccaaatttgatgagaagacaaggatttccttggttaatggggctcatgatactgcaaagctggc

SEQ ID NO: 83423 - DNA, 418 bp, Zea mays
cacgcgtacgaacttgcaatgaaaggcagagagccactgttcgtaccatgtacgccaaaggggtgcatggagctcttgtcaaggagcggagtcactgttaaaggtaagcgggcagttgtggttggtcgcagcaacatcgtcgggctacctgtaggggtgctccttctgaaggcagatgcgaccgtatctgttgtgcactcgcggacccctgatcctgaaagcattgtacgcgaagctgacatagtcatcgcggcagctgggcaggctatgatgatcaaaggtgactggatcaagccaggtgctgcggtcatcgatgtctttactaactccatcgatgaccctacccggaagtccgggtaccggctcgtcggcgatgtggatttcgcatcggcgagcaatgttgctgggtacctgactc

SEQ ID NO: 83424 - DNA, 409 bp, Zea mays
ccacgcgtcagatagagaccaacaagcaacatagaaagtggaatccaatagcaacaatagagcaacaatggcgaccaagatattttccctccttatgctccttgctctttctacatgtgttgctaaggcgacaattttccctcaatgctcacaagctcggagagcttcccttcttcccccataccttccatcaattatagcttcaatatgtgaaaacccagctcttcaaccatataggcttcaacaagcaatcgcagcaagcaacatacctttatcgcccttgttgtttcaacaatcgccagccctatctttggtgcagtcattgtttattaccatcagggcacaacagctgcagcaactcgtgctacctctgattaaccaagttaactctgggaaaccttttctccct

SEQ ID NO: 83425 - DNA, 259 bp, Zea mays
gatggtgttttggttactaatgaaacatgcaacctagtgtggtttggaaacaaataggtgtatttcaattgatgtgtgaacaaggttgaattcaacttttctgatgttgagggatgctttatactataaggatgcttttactcttctcaagcttgctgatctgcgtatgtatgaacacatatctacaactcctgatgagtttgacaatgcctaaattttgttttattcctagaaaataagatatgttctaacttaactt

SEQ ID NO: 83426 - DNA, 537 bp, Zea mays
  unsure (1)..(537): unsure at all n locations
gggactaccnaagctataaacatttgagtctttcgtacttacttgccggtccggcctaccttcgtcgaccctcgcgtccgcgagatcccatggtcaaattttgacttccacagcggagttttgctgagcgactttggactatttgaagcgacggtattacactgtcttgttcggtgtttcaagaagcatggggataggatctcagctcatctgggaccgtgcccttggcctgccacttgagaggccgaatagtgctaccatggagtggctggagaactacttcaagaacaatgctgattgaatcatttcacaaatgctagcattctacaaacttagactgtgtataattttaaacactcatgttatcatattggaagatttccatatagcatgttaaagattactatgtaccatattcgttagacaggtgaaatacggtgttgttataaccagtcgggcactgaaatgttacttgtacacatattcactatatgtcatgttagtttgcttgtgtattattgtttatgtaagtgctag

SEQ ID NO: 83427 - DNA, 500 bp, Zea mays
  unsure (1)..(500): unsure at all n locations
agggatagtacacgtccgctgtcgtagtgatcgtcgcgctccgtatacccggctccacccacgcgtccgcagtcgccagccctatctttggtgcagtcaangctacaaaccatcagggcacagcaagtacattataatgaagctaagtctgctcaatcaaggggcgtctgcaaacctttctccctactctcagcaactacaatttcttccattcaaccaactgtctacattgaaccttgctgcatattttcagcatcaactataaccattcaaccagctatctactgtcttactatagcaacgcacaaactttttcatttgactcaatttggcgaactttaaccccattatattttatcatactacaattctctctccatttattcaactatcttctttaaacttagctttacttatttatatcaatttacattaatggtttattattgctacaagtttagctgttaaaattgttatataatccttcaatattgacacat

SEQ ID NO: 83428 - DNA, 531 bp, Zea mays
  unsure (1)..(531): unsure at all n locations
cgagtataagaggcttggatatagaagcatgagtanttcgttacttccttagcgatccggactacccgcgtcgacccacgcgtccggagcattcagaatcacactaagcgattcgcactatcaacaacctaacagcgaatggcgaccaatatattatccctccttgctcttcttgctctttttgcgagcgcaacaaatgcgtccattattccacaatgctcacttgctcctagttccattattccacagttcctcccaccagttacttcaatggccttcgaacacccagctgtgcaagcctataggctacaacaagcgattgcggcgagcgtcttacaacaaccaattgcccaattgcaacaacaatccttggcacatctaacaatacaaaccatcgcaacgcaacagcaacaacagttcctaccagcactgagccacctatccatggtgaaccctgtcgcctacatgcaacatcaactgggtgcattcaaaacaattgtgctatcaaaaatttattcaaaactcccaaaa

SEQ ID NO: 83429 - DNA, 538 bp, Zea mays
  unsure (1)..(538): unsure at all n locations
aggagatttacaaggtctcaagtagtaaccttgagtcnttcgtacttctgtaccggtccggacttcccgcgtcgacccacgcgtccgcaaattgcaccaagtaaattcatcgattggccgtcgacaggggaattaatggcgtggtcgtctagcagcagccaccgccgcctcatcctcgcagccgccgtcctgctctccgtgctcgcggctgccagcgccagctccgggacctcctgcgtgccggggtgggccatcccgcacaacccgctcccgagctgccgctggtacgtgaccagccggacctgctgcatctggccgcgcctcccatggccggagctgaagaggagatgctgccgggagctggctgacatgccgtcgatctattctgttcttagttcttagcattctaatggataagttcgttgatcttgtgagcatgtttcccctatttggaaaaattaataatagttattttttattgttctaagattagtttttcaattctatattgattttatttattatcagtaatcaatcg

SEQ ID NO: 83430 - DNA, 549 bp, Zea mays
aggtccaagtagacactggcacgtttacgtactcacttaccggtccggactacccgcgtcgacccacgcgtccggggactcgtgggctcaaattgcaccatgaaatccatcgagaggccgtcggcaggagaataaatggaaagggcctcgagcagcacccaccgccgcctcatcctcgcagccgccgtcctgctctccgtgctcgcggctgccagcgccagcgccaggacctcctgcgtgccagggtgggccatcccgcacaacccgctcccgagctgccgctggtacgggaccttccggacctgcgtgcgtagggccggtctctaccttgggcgaaacgtggagagggcgctcgatcgggaagtctgtggaaacgtcgcaagttcttgcgatagtagcgggaaggcttcaggcgctgagataatatattggagatcgcgtacctgacgtgatcggagtaatatatagaggtcaacatgagcgagagggtcatgaggagtgtagagaagttttgtcgcagatggggggaagattaggtgcgttattagg

SEQ ID NO: 83431 - DNA, 522 bp, Zea mays
  unsure (1)..(522): unsure at all n locations
cggttcaaaactgangctgcagcacgtacttaccttcgtgtatccggttccgnctatcccgcgtcgacccacgcgtccgtgcactcttccgccaacattcaagcttgaaagcggaatccagtagcaacggcagaggaacaattgcaaccaacatatgccccctccttatgctccttgctctttctgcatgtgttgctaacgcgacaattttccctcaatgctcacaatctcctatagcttaccttcttcccccataccttccatcaatgatagcttctttatgtgaaaacccatctcttcttccctattagctccaacaagcaatcgtagctatctacataccatgatcacccttattattataacaaatttcacgtactatactttgttcatctttctgtccttttcatttagtcacatttattaatttatcttaagcttaccgtttattaccatatttccatttataaaattatatattctttgtatatctgataatattttactctgaactacacattc

SEQ ID NO: 83432 - DNA, 537 bp, Zea mays
  unsure (1)..(537): unsure at all n locations
gataaatgtaggtcacaagtagaacactgcaggcggtacngactgtcttaccggtccggactatcccggcgtcgacccacgcgtccggatcatcaaagctgcagtttgtagtttggatcgccgaacagaacagcatgaagatggtcatcgttctcgtcgtgtgcctggctctgtcagctgccagcgcctctgcaatgcagatgccctgcccctgcgcggggctgcagggcttgtacggcgctggcgccggcctgacgacgatgatgggcgccggcgggctgtacccctacgcggagtacctgaggcagccgcagtgcagcccgctggcggcggcgccctactacgcctggtgtgggcagacgagcgccatgtaccatccgctccggctacagtgctgccagcagcagatgatgatgatggacgtgcaatcctgtccgcagcagcttttaatgatgatgcaacgtgaacgttcccgttttcaccttaaaattatcttgtttagaacatatttgtaatctttctggacagattatttat

SEQ ID NO: 83433 - DNA, 567 bp, Zea mays
  unsure (1)..(567): unsure at all n locations
agccatctcacctgctgacaatagttactacctgtgtaccgtccggatacccgctcgacccacgcgtccgcccacgcgtccggctaatggcacattanaatcacccatagtttgtntgatggtggtcgactttttataaaaaccgatactaacccctaatatctaatagcgtacaacaaatccccatacttcttgaatgtgatgcatcttattattataaaatagttccacacttagctactatctatatactttaataaatctattgatatctaatactaaatcgtctcatactttgtaaccatttaacacatctatactatatcatatatcataaacataatataaacaatctcaactataatattatcctacttatctacactctatctctttaatcattcacatcttatactaatatcaataccactactaacttaatcctattatattatatatttaatattatactataatattatttcatcatcttaattagttgatatacatatattcatcaccataacattaataatatctcacatacttcactcatctctacttctt

SEQ ID NO: 83434 - DNA, 503 bp, Zea mays
gggtttagtacactgctgctatcgtagctactgcgtactcgtccggatatccgcgtcgacccacgcgtccgcgatatcctaaagtgttttgttttcttatcatcaccatgtctttactttcaggccgcatcaaactcaatctctcagaacccacataaaagatcattgctgagtacatatgggttggtggatctggtatggacctcagaagcaaagccaggactctacctgggccattgagtgaccctgcaaaactttcgaagtggaactatgatgggtctagctatttatcaagctctaatggatgacaagtaaaatcatgtctatacagcacaagctgtttttagaggtccttcttatttaaagttactcattaattattgtcaatttatatattggttatactcttatatatgtgtatctaatatctatgattgagtgctattattttgttacatgtcatatattgtatttatataataaagtattaagtttatattata

SEQ ID NO: 83435 - DNA, 490 bp, Zea mays
  unsure (1)..(490): unsure at all n locations
aggggtgtacgctgtagtgtagtcatgcgtctcgctccgtatacccgggtcgacccacgcgtccgccgcacgcgtccggtccccatggtagngttagtggcatagtgaatgtgaacatacctgctgatggtgcatgaaattggtggagcatttggtggagaaaaagcaactggtggtggacgagaagcagggagtgattcctggaagcagtacatgaggagggcgacttgtacaatcaactatgggagcgagctacctctagcccagggaatcaattttggttaatcctgcagaaatgttgcgcgtggatctcaaagttttctgcagacgtggatgccgtatggaaagaactgatgcaaccgcatatgagatcttagcaaaactgagcagcatttattggcgtcagttgtgaaacttaaactgcaggaacatcttgtacataaataaaataagatgtttgttgctcgttggccctaggtcacttattggt

SEQ ID NO: 83436 - DNA, 507 bp, Zea mays
aggtctagctcatgatactatcttagctactccgttctcgtccggataacccggctcgacccacgcgtgcgcccacgcgttcgatctccttctcaataactatattattcttccattcccgtctggatttaatcatacataacccgtccattcacatgcgaggatgaaatcaactcccctgtgtctcctgctactctttacaaggccctaattacagatacctacaacttcatcccaaaagcacttgattcccttcataaaagtttaacactcttagcgtaacaatgctcacccattaacaaacataatatatcaaaataacatatactatataataacttaaaatattaatttatcctaatatcaaacctattaattaaaaccaaattaaaataatacatacaaccatttaaatcaataaaatattaaaacaatcttacatatacatagatataaataattattaatattacatcaataataaacatataatgattacccattacc

SEQ ID NO: 83437 - DNA, 538 bp, Zea mays
  unsure (1)..(538): unsure at all n locations
gaagcttatactagtctaacaagctagacgactgcagtcnttacgtanctcgtccggaattacccggcgacgacccactcgtcctgagaccaacaagctacatataaagattaaaacttgatcaacaatagagcaacaatggagaccgtgatattttaactacttatgctccttgctctttctacatgtgttgctaacgctacaattttccctcaatgctcacaagctcctatagcttccctttttcccccataccttccatcaattataacttcattatgtgaaaacccatctcttcaaccatataagcttcaacaaacaatcacaactaaacaacataccttttatcacccttgttgtaaaaactatcaacagccctatctttgatgcaaacaattatacaaaccattatgtctcaaacaacttaaaaaaaaaaatataactatattaaaaattacataaaattaaaaaacataaatataataaataaaatataaaaaaatctaattaaaaaatagatatatattataacataaag

SEQ ID NO: 83438 - DNA, 525 bp, Zea mays
  unsure (1)..(525): unsure at all n locations
ggggagttagtggtttntgtacgataacgacgacttatcgtactgccgtaccggtccggaattcccgggtcgacccacgcgtccgcaagaacccatggccaaatgttgatgctcacagtggagttttgctgaaccactttggagtatctgaagcacggtattacactgtcttgttcggtgtttcaagaagcatggggataggatctcagctcatctgggaccgtgcccttggcctgccacttgagaggccgaagagtgttaccatggagtggctggagaactactgcaagaacaaggctgcttgaagcttttcacaaatgctgctttttcccaaccttggctgttaataatttaaacgcgagttatagaaatagtcattttccctttggccgttgaataacgcaagagcaatatgctcaggcggaagaattttgtatcttccgtaacttggtgaacatccagatacttgatctgcggcaacaatgggcagaagagattaggaaaaanaaaaaanaaanaaaaaaa

SEQ ID NO: 83439 - DNA, 523 bp, Zea mays
gggtaggggagggttgtctacgaaacggggagttaatggcatgctgtaccggtccggaattcccgggtcgacccacgcgtccgcccacgcgtccgcccacgcgtccggagggaacgtgacgagatggaggcgaggatgatggaggagcgggaggcggagcgggaggctcgcctggcagatcatcagaggatggcggagatgttccagtacatgcagagccttggcgccgcacagggcttcgctccgccacctccattgttccctgcagttgaccctgctatcttccatactcctggccaatctggggcgacatgcaacaaccctcatgaagggttcagcccaacgcagcaccagtcgaactcgccacctccatgagagttatgtttctagtgtttagacttcagaacttgcgttcaatacttatgttcttgatacttatgagacttatgaacttgtgttgaatagttatgtcagagctcgagacttatgagacttatggtctttatacttatgttcgcgttga

SEQ ID NO: 83440 - DNA, 518 bp, Zea mays
  unsure (1)..(518): unsure at all n locations
gtagttttctgaggtgcgaagctgagacgtcgcagcaccaccggtccggaattcccgggtcgacccacgcgtccgcaacaagcaacatagaaagtggaatccagtagcaacaatagagcaacaatggagaccaagatggtttccctccttatgctccttgctctttctacatgtgttgctaacgcgacaattttccctcaatgctcacaagctcctatagcttccctttttcccccataccttccatcaattatagcttcagtatgtgaaaacccagctcttcaaccatataggcttcaacaagcaatcgcagcaagcaacatacctttatcgcccttgttgtgtcaacaatcgccagccctatctttggtgcagtcattggtacaaaccatcagggcacaacagctgcagcaactcgtgctacctgtgatcaaccaagtagctctggcaaacctttcntcctactctncgcaacaaccaattcttccattcaaccaactgtctacactgaaccctgc

SEQ ID NO: 83441 - DNA, 507 bp, Zea mays
  unsure (1)..(507): unsure at all n locations
agtagtacctccgattccatactactagcantgcagctcctccgtctgaattccccgtccagccactcgtccatcacattaccaacatacccactttgctaaaccaccttaaaagatatcttaggctcatcaaagaacttttgcatgcactggactcatttgctcaaagtacaacttggttatcacacctataaacttgaaccttttcaatgttaaccttgcaatggcttttacaggcctgtatcatctttcactgaagatcatgcaacattacttatcccatgataaagatgctgcttcacaactgtaatcatatataatgacaacaatcaaagaataactgattgtaaatcctgcatcctatgagtctactcttgattttttttttctgtgcaagcaaacaataacttatctttcatgtttgttttcctgttattctgaaatcttgagcattctaattttaaaatctttccccaaaaataaaaaccaattaaatcattttttaag

SEQ ID NO: 83442 - DNA, 524 bp, Zea mays
agttgaggggagaggtgtgattaccgcaacacgaacacttcgtactgctgcggaattcccgggtcgacccacgcgtccggcaacatagaaagcacaatagtgtaccaacaatggcagccaaaatattttgcctcctgatgctcgttggtctttctgcaagtgctgctacggcgaccattttcccgcaatgctcgcaagctcctatagcttcccttcttcccccgtacctctcaccagcggtgtcttcggtatgtgaaaacccaattcttcaaccctacaggatccaacaggcaatcacagctggcatcttacctttatcacccttgttcctccaacaatcatcagccctattacatcagttacctttggtgcatttattggcacaaaacatcaaggcacaacaactacaacaacttgtgctagcaaaccttgctgcctactctcagcaacagcagtttcttccattcaaccaactagctgcattgaacctctgttcttatttgcaacaacaacaactaccaatc

SEQ ID NO: 83443 - DNA, 515 bp, Zea mays
gagtagggtctggtttagtaagagacggtagtaatctcaacccctccggaattcccgggtcgacccacgcgtccggtcaacaatacccttaatatctcccgtgagactcttcagcagaacaagatcctgaaggtgatccggaagaaccttgtgaagaagtgtgttgagctcttctttgagattgctgaaaacaaggaggactacaacaagttttatgaggctttctccaagaacctcaagcttggcatccatgaagactcgcagaacaggggcaagattgctgagcttctgagataccactccacgaagagcggtgatgagctgaccagccttaaagattatgtgacgaggatgaaggaggacagaacgacatctactatatcactggtgagagcaagaaggcaatgggaaaactcccttttctgaaaaacttgaaaaaagggctacgaagtcttgacattgtgatgccattgattagtatgcctgttgtcaacttaaggaagttgaaggccaaa

SEQ ID NO: 83444 - DNA, 524 bp, Zea mays
  unsure (1)..(524): unsure at all n locations
nagtagggaagtgtgtgntgataccgcaatgattgcactgctgtaccggtccggaattcccgggtcgacccacgcgtccgcgaaggcaatggtcgaggagttattgaaggagtatgagaacgtctgcactctgcgagggcggatgccgatatcctctgacctcagcaacccgcggaacttcgtgacaaagatcagccgttacaacaaggtggtgaacatccccaacagcatgacgatattggacgaactcctgcccatctcagtggagatggcgaagaggaacctgcggggcatctataacttcaccaaccccggcgtcgtcagccacaacgagatcctagagatgtacaagcagtacatcgaccctagcttcaagtggacaaacttcaccctcgaggagcaggcgaaggtcatcgttgctccgcgaagcaacaccgagatggacgcaccacaactgaagaccgagttcccggaactgctgccaatcaaggcctcgtggataaggtccgtttttaagcccaccg

SEQ ID NO: 83445 - DNA, 527 bp, Zea mays
  unsure (1)..(527): unsure at all n locations
agttagtntagtagttcgttatgaatacgaagctcttgttatgctgtaccggtccggaattcccgggtcgacccacgcgtccggagcattcagaaacacaccaagcgaagcgcactagcaacaacctaacaacaatggctaccaagatattatccctccttgcgcttcttgcgctttttgcgagcgcaacaaatgcgtccattattccacaatgctcacttgctcctagttccattattccacagttcctcccaccagttacttcaatggccttcgaacacccagctgtgcaagcctataggctacaacaagcgattgcggcgagcgtcttacaacaaccaattgcccaattgcaacaacaatccttggcacatctaacaatacaaaccatcgcaacgcaacaagcacaacagttactaccagcactgagcccactagccatggtgaacccctgtcgcctacttgccaccagcaactgcttgcattccacccaacttgctctaagcaacgtaattgcaaaccaagca

SEQ ID NO: 83446 - DNA, 522 bp, Zea mays
  unsure (1)..(522): unsure at all n locations
gtagtaaaaggttgtgtacgtatcccgcaatantgcactgctctaccggtccggaatcccgggtcgacccacgcgtccgcagaccattagctctatctactccagagcgcataacaacccgatcgacaccatgagggggttgctcgatgccctcgctctcctggctctcgctgcgagcgccacctacacgcatacaagcggcagctgcggctgccagccaccgacgccggttcatctaccggcgtcggtgcatctgccaccttcgggtcacctgccacctactgtgcatctcccaccgccagtccacctgacggcgccgggccacctgccaccgccggtccatgtgccgccgccggttcatctgccgcctgcaccatgccactaccctactcaaccgcaccggcctcagcctgatccacagccacacccatgctcgtgccaacagccgcattcaaacacgtgccagcttcagggaacctgccgcgtatggaacacccccgacctggggcaatgcgttcagtt

SEQ ID NO: 83447 - DNA, 525 bp, Zea mays
  unsure (1)..(525): unsure at all n locations
nagtagggtgagaggttgcctttgagtccgcgactgatggcactgctcgtaccggtccggaattcccgggtcgacccacgcgtccgcaaattgcaccaagaaatccatcgagaggccgtcgacaggggaattaatggcgtcgtggtctagcagcagccaccgccgcctcatcctcgcagccgccgtcctgctctccgtgctcgcggctgccagcgccagcgccgggacctcctgcgtgccggggtgggccatcccgcacaacccgctcccgagctgccgctggtacgtgaccagccggacctgcggcatcgggccgcgcctcccgtggccggagctgaagaggagatgctgccgggagctggcggacatcccggcgtactgccggtgcacggcgctgagcatcctcatggacggcgcgatcccgccgggcccggacgcgcagctggagggccgtctagaggacctgccgggctgcccgcgggaggtgcagaggggattcgccgncaccctcgtcacggaggccga

SEQ ID NO: 83448 - DNA, 538 bp, Zea mays
  unsure (1)..(538): unsure at all n locations
ggagtttggggaagtnntaagggtgtntctaccggagacgggggggttgatgtcacgctcgtaccggtccggaattcccgggtcgacccacgcgtccgcggacgcgtgggcgcaaattgcaccaagaaatccatcgagaggccgtcgacaggggaagtaatggcgtcgtcgtctagcagcagccaccgccgcctcatcctcgcagccgccgtcctgctctccgtgctcgcggctgccagcgccagcgccgggacctcctgcgtgccggggtgggccatcccgcacaacccgctcccgagctgccgctggtacgtgaccagccggacctgcggcatcgggccgcgcctcccgtggccggagctgaagaggagatgctgccgggagctggcggacatcccggcgtactgccggtgcacggcgctgagcatcctcatggacggcgcgatcccggcgggcccggacgcgcagctggagggccgnctaaaggacctgccgggctgcccgcgggaagttcagaggggattcggcggcccccttc

SEQ ID NO: 83449 - DNA, 521 bp, Zea mays
  unsure (1)..(521): unsure at all n locations
gtagtnttagagtttgttaagatgacgacagcatgcggtaccgctccggaattcccgggtcgacccacgcgtccggcaacatataaagcacaatagtgtaccaacaatggcagccaaaatattttgcctactgatgctcggtggtctttctgcaagtgctgctacggcgaccattttgccgcaatgctcgcaagctcctatagcttcccttcttaccccgtacctctcaccagcggtgtcttcggtatgcgaaaacccaattcttcaaccctacaggatccaacaggcaatcacagctggcatcttacctgtatcacccttgttcctacaacaatcatcagacctattacatcagttacctttggtgcatttattggcacataacatcagggcacaacaactacgacaacttgtgctagcaaaccttgctgactactcttagcaacagcaagtgcttacattcaaccaactagctgcattgaactctgcttcttaaatgcaacaacaacaactaccattca

SEQ ID NO: 83450 - DNA, 525 bp, Zea mays
  unsure (1)..(525): unsure at all n locations
aagtaggttnnaaaggtgtgatacaggaggacgaaggtatgtgcgaccgctccggaattcccgggtcgacccacgcgtccgggccaaatcaagacgggagctccttgccggtctgagcgcctggccaaatacaaccaggtgctcaggatcgaggaagagctcggtgatgccgcggtctacgccggagcaaagttcagggcaccagtggagccctactaagaaaggaagaggatggggatgttttcttgtggagctatactagctcgctgctgccttttgttacaatgtttgtacggtcgcaataaatgtatggtcgtgtttgctcgagagctactcaggtgattttgtcgtgggagcaccaaaagcagaaaagaactgtttttttaaaaaaaaaaaaaaaaagggcggccgctctaaaggatccaagcctacgtacgcgtgcatgcgacgtcatagctcttctatagtgtcacctaaattcaaatcactgggcggtcgtttacaaacgtctgactggaaaaccct

SEQ ID NO: 83451 - DNA, 526 bp, Zea mays
  unsure (1)..(526): unsure at all n locations
agatagggancatggtttgaggactgagacacgcacacttcgtacaccgtaccggttcggaattcccgggtcgacccacgcgtccggctgaacggtagtactagttgttgatgcaaataagcagccagctgctgtctggcccgggcaatttcttccattcaaccaactagcatcattgaactctcctgcctatgtacagcagcaacaactactaccattcatccagctagctgctgtgagccctgctgccttcttgacacagcaacaattgttgtcgttctacctgcacgctgcgcctaacgttggcaccctcttacaactgcaacaattgctgccattcaaccaacttgctttgacaaacccagcagcgttctaccaacaacccatcattggtggtgccctcttttagattgcttatgagttatagttcaataataaagtttttttgatgatgtttgcggcttcccagagataagaaagtacatttctagattaaacacacaaattagaaagggcggccgctcta

SEQ ID NO: 83452 - DNA, 530 bp, Zea mays
  unsure (1)..(530): unsure at all n locations
agtagggggagtggttgagttcagtttcgacgnctagtctaccgcgtcggcattcccgaattcgacggcacgcactcacgcgacccgtatcagcaaagcgtcagtgcgtacagaggatcgtcgaacagaacagcatgaggatggtgatcgctctcgtcgtgtgcctggctctgtcagctgccagcgcctatgcaatgcagatgccctgcccctgctcgaggctgcaaggcttgtacggcgctagctcacacctgacgactatgatgggcgccggcctactcgacccatacgcggattaccccgatctgccctaatgaaacccccttgcaacagcaagtactacgccaggtcgtgtaataccagcgcgatcaaacaggcgtgccagttgcaccacacgttgtacctgacaaggatgatggacgcccagtccggctcgcagcatcttcaccagatgatgccgcctgaaccctacacgttcccgccagcactatcctttacaacccatatttgtagcattaacagcatcagcc

SEQ ID NO: 83453 - DNA, 524 bp, Zea mays
agtagggaaagggttgtctatgagacggagattaatgcactgctctaccggtccggaattcccgggtcgacccacgcgtccgcccacgcgtccgccaacaagcaacatagaaagtggaatccagtagcaacaacagagcagcaatggcgaccaagatattttccctccttatgctccttgctctttctgcatgtgttgctaacgcgacaattttccctcaatgctcacaagctcctatagcttcccttcttcccccataccttccatcaatgatagcttcagtatgtgaaaacccagctcttcagccctataggctccaacaagcaatcgcagcaagcaacatacctttatcacccttgttgtttcaacaatcgccagccctatctttggtgcagtcattggtacaaaccatcagggcacagcagctgcagcaactcgtgctacctgtgatcaaccaagtagctctggcaaacctttctccctactctcagcaacaacaatttcttccattcaaccaactgtct

SEQ ID NO: 83454 - DNA, 525 bp, Zea mays
  unsure (1)..(525): unsure at all n locations
nagtagggtagggttgtgtacgaaacgggggtttatggactgctcgtaccggtccggaattcccgggtcgacccacgcgtccggatcagcaaagcggcagtgcgtagagaggatcgtcgaacagaacagcatgaagatggtcatcgttctcgtcgtgtgcctggctctgtcagctgccagcgcctctgcaatgcagatgccctgcccctgcgcggggctgcagggcttgtacggcgctggcgccggcctgacgacgatgatgggcgccggcgggctgtacccctacgcggagtacctgaggcagccgcagtgcagcccgctggcggcggcgccctactacgccgggtgtgggcagacgagcgccatgtaccagccgctccggcaacagtgctgccagcagcagatgaggatgatggacgtgcagtccgtcgcgcagcagctgcagatgatgatgcagcttgagcgtgccgctgccgccagcagcagcctgtacgagccagctctgatgcaacagcagcagcaagc

SEQ ID NO: 83455 - DNA, 511 bp, Zea mays
  unsure (1)..(511): unsure at all n locations
cgtgtaataatgcaactngactganatcatcgttacctccattcccgggtcgacccacgcgtccgattgcgggaaaatggtcacaagctcctatagcttatcttcttcccccatacctctcaccagcggtgtcttcaggatgtgaaaacccaattcttcaaccctacaggatccaacaggcaatcacagcaggcatcttacctttatcacccttgttcctccaacaatcatcaaccctattacatcaattaccttcggtgcatttattggcacaaaacattaaggcacatcaactactacaactcttgctagcaaaccttgctgcctacgctcatcaacatcagttacctttggtgcaatttgtggcacaaaacatcagggctcaacatctactacaactcgtgctagcaaaccttgctggctactcttaacatcagcagtttctgccattcaaccaactagctgcattgaactctgatgcttatttgcaacaacaacaactactaccatt

SEQ ID NO: 83456 - DNA, 497 bp, Zea mays
  unsure (1)..(497): unsure at all n locations
gtgtacgactgatatnttcagataccactagtannnccntnnnnnntnngnnannnntncngggcggggggnngngagggttngngtttaagagctgatagtctgagactgagagagatagaggtgatgatggcggtgcatgcgcaggggacgcgggtgccgctggtcctggcgctcttcctcctcctggccggttgcggcagcgaggcgcagccgctggtgccggcgctgtttacgttcggtgactcgtcggtggacgtcgggaacaacgactaccttcacaccatcatcaaggccaacttcccgccatacggcagggacttcgccaaccacgtcgccaccgggaggttctgcaatggcaagctggcgaccgacatcaccgtcgacacgctggggttcactacctaccctggcgcgtaccttaacccacaagccttggggcaaaaaccttctatcggcgcaactttgcgttcgcggggtctgggtactacgaccac

SEQ ID NO: 83457 - DNA, 527 bp, Zea mays
  unsure (1)..(527): unsure at all n locations
agtagggncgttttagtggtgatacgtagtccctccggagcaccnttcggtccggaattcccgggtcgacccacgcgtccgnccacgcgtncgcagcaacagcagtttcttccattcaaccaactagctgcattgaactctgctggttatttgcaacaacaacaactaccattcagccagctacctgttgcctacccccagcaatttcttccattcaaccaactggcagcattgaactctcctgcttatttacagcagcaacaactactaccattcagccagctagctggtgtgagccctgctaccttcttgacacaaccacagttgttgccgttctaccagcacgctgcgcctaacgctggcaccctcttacaactgcaacaattgctgccattcaaccaacttgctttgacaaacctagcagtgttctaccaacaacccatcattggtggtgccctcttttagatttcttatgagttatagttcaataataaaagtttttgtctgatgtttgtggcttcccagan

SEQ ID NO: 83458 - DNA, 536 bp, Zea mays
  unsure (1)..(536): unsure at all n locations
agttagtanatttaggatttgtgtacgtagcatgtacgctcgtacgtaccgccccggaattcccgggtcgacccacgcgtccgcccacgcgtccgggtcgtgcgcggcacctacaagggccgcgaggggaaggtggtgcaggtctacggacgacgctgggtcatccacgtcgagcggatcacccgcgagaaggtgaacggctccaccgtgaacgtgggcattcaccccttcaaggggatcgtcactaagctgaagctcgacaaggaaccgaaggcgctcctggaccgcaaggtccggggccgcgccggcgacaagggtaatggccagtttactggcgaccacttcgctgacgcctccgctggttgcgcccgcaacggggccatttttcaggagatcggattgggctcttcacgggccatcttatggctgtcataccggcttttccctaaaatctttagattttggtacccatggttaattgatagaaggtttaaggaatttgaaaactggtcttagccttgaataaaagttctggc

SEQ ID NO: 83459 - DNA, 533 bp, Zea mays
  unsure (1)..(533): unsure at all n locations
agttaggggngatgtgtgntgtttcacgccatcgatagctacgtgctaccgccttcggaattcccgggtcgacccacgcgtccgaagagcccagatgagcaccctttcttttccaaggatctgcctgagccccggttgccaggtatgcggtacccaaaggttttgcatcccattgctgattctatcaatatcaacaaagagatttggaaaatgtattttgatgaacttctaccaagattggtgaaagaaggaagtgatggtaatgctggatccagtgctctttgtgacacaacctgcttgcaggcactctccagaaggatccactatgggaagtatgtggcagacgcctagtttcaagagtcccctgaagcttacacgccagccataatagcccaagtctgcttttgttccaactattagtatttctagtactactattttcatttattttttaatctaattccaaagtttcagaaccaaattgtttttctgatccattggaaaaatattattaattcttggtaacatttggg

SEQ ID NO: 83460 - DNA, 531 bp, Zea mays
  unsure (1)..(531): unsure at all n locations
aggtagttnatacaagtgttatcgactgagtntcggttatgcctgtatnaccgtaccggttcggaattaccggctcgacccacgcgtccgaattgccgtcacgactccctcatcagggtgacaatcagctgccctgagaacgggaggagcgccgcagggaagctcgtgcgcctaccgaggtcgatggccgagcttctcggactaggtgcaaagaagttcggcatcaagcctgccaaggtcctgacagttgatggtgctgagattgatgaggtggagcttatcagagacagtgatcatattcttctcgtcagtgatgaatgggtgccagatgttgcacaaattatgcctaaacaataagtgagccagctgtagagctcttattgcaatttgacatgatatgggaaaacatgcccctgtgaccctgtgtgcatgtccacatttaaactgaagtgtagcttatgatggttttgaagctttatgatgcattcagcttggaaatgaattcgtactcacttggtccactagactgtt

SEQ ID NO: 83461 - DNA, 530 bp, Zea mays
aggtagttttaaagtgctgtggcttgatacacgaacatctcagtataaccgtaccggttcggaattcccggctcgacccacgcgtccgctactttggaacaggagtacaagagtgatatctttggagagcgaggcatcttgctggagcctgtccatggtatcgtggaggctctgtttaggaggtacacagaacaaggaatggatgaagagtcggcctacaaaaacactgtcgagggcataactgggatcatctcgaaaaccatctcaaagaaagggatgcttgaagtgtacaactctttgagcgaggaaggcaaaaaggagttcaacaaggcttatagcgcatcgttttacccatgcatggatatactctacgaatgctatgaagatgtggcctctggaagtgaaatccggagcgtggtgttggctgggcggaagttttatgagaaagagggcctcccagcttttccgatgggcaacatcgaccaaactcgcatgtggaaggttggtgaaaaggtgcgctcaacccgtcc

SEQ ID NO: 83462 - DNA, 503 bp, Zea mays
  unsure (1)..(503): unsure at all n locations
agtgtgaagctggcaaacanttccgnagntcttntgtactgtctttccgggtcgacccacgcgtccgcggacgcgtaaggtcatccacactaacgaacgaactcttgctccgatcacgagctagctgagggcgaccatcgcggctgtgctgaacagcatgaagactccgcaagtggtgtccgtgctgctaatggctgcgctgctggcttcgtccgcgtcggcggcgatcacctgcgggcaggtggggtcgtcgctggcgccgtgcattccttacgcgacggggagggccagcgcgctcccctcgtcgtgctgcaacggcgtcaagagcctcaacagctcggcgcggaccatctcggaccgtcaagcggcgtgccgatgcctcaagagcctcggcaacagcgttaagagcgtcaacatgggcaccgtcgccaccatccccggcaagtgcggcgtctacgtcgtattccccatcagcatgttcaccgactgcaacagatcatctg

SEQ ID NO: 83463 - DNA, 512 bp, Zea mays
  unsure (1)..(512): unsure at all n locations
cgtgggacgtcttgatnactntcacgtatgctcatcgccagcacctaccggtccggaattcccgggtcgacccacgcgtccgctgttctacccatggcttgatagtaaatggatgcctcagcctctaattctccgcgctgaagtgtacaaggttggtgtcacacactacttttcgttcttgaaagctagagaggagctcggctacgtgcccattgtgaggccccacgaaggcttggccgcaacgatctcgtactggcaagagcggaagagaatggagctggatggcccgaccatatttacttggctggccgtaacgatcgggatgctggccgtgttttctgccgcctgcctcccgccagtcggcccgttgaaatgggtgctcgacgtccacatgtttgttttccgctcgatgctcgtgatccggctggtcttggcggtagcgatcgcactgcatgctggcgaagccgtgtacgcctggttcttggcgagaagggttgacccgaggaacgctg

SEQ ID NO: 83464 - DNA, 526 bp, Zea mays
  unsure (1)..(526): unsure at all n locations
agtaggacgttttnagtgtgataacgaactgtacagcatcactcttcggtacggacttcccgggtcgacccacgcgtccgcccacgcgtccgattcttcaaccctacaggatccaacaggcaatcgcagcaggcatcttacctgtatcacccttgttcctccaacaaccgtcagccctattacagcagttacctttggtgcatttgttggcacaaaacatcaaggcacaacaactacaacaacttgtgctaggaaaccttgctgcctactctcagcaacagcagtttcttccattcaaccaactggctgcattgaactctgctgcttatttgcaacaacaactaccattcagtcagctagctgctgcctacccccagcaatttcttccattcaaccaactggcagcattgaactctgctgcttatttacaacagcaacaactaccaccattcagccagctagctgatgtgagccctattgccttcttgacacagcaacagttgttgccgttctacctgcacgctgc

SEQ ID NO: 83465 - DNA, 528 bp, Zea mays
  unsure (1)..(528): unsure at all n locations
aggtgagggnanaaggggtctgaaatcgtagtctgtagctcatacggaccgctccggaattcccgggtcgacccacgcgtccgccaggatctaccgggcttcagagaggcgctggaggagtacgcgaaagcgatggaagagctggcggtcaagctgctggagctgatcgcccggagcctgaagctgaggcccgaccggctgcacggcttcttcaaggaccagacgaccttcatccggctgaaccactaccctccttgcccgagccccgacctggccctcggcgtggggcggcacaaggacgccggcgccctgaccatcctgtaccaggacgacgtcggggggctcgacgtccggcggcgctccgacggcgagtgggtccgcgtcaggcccgtgcccgactcgttcatcatcaacgtcggcgacctcatccaggtgtggagcaacgacaggtacgagagcgcggagcaaccggtgtcggtgaactcggcgagggagaagttcttcatgccctactttttcaccccgcgg

SEQ ID NO: 83466 - DNA, 519 bp, Zea mays
  unsure (1)..(519): unsure at all n locations
agttagggncaggttttgataccgcaangaagcaatctcaccgctccggattcccggtcgacccacgcgtccgcggacgcgtgggtccagatcagcaaagcggcagtgcgtagagaggatcgtcgaacagagcagcatgaagatggtcatcgttctcgtcgtgtgcctggctctgtcagctgccagcgcctctgcaatgcagatgccctgcccctgcgcggggctgcagggcttgtacggcgctggcgccggcctgacgacgatgatgggcgccggcgggctgtacccctacgcggagtacctgaggcagccgcagtgcagcccgctggcggcggcgccctactacgccgggtgtgggcagccgagcgccatgttccagccgctccggcaacagtgctgccagcagcagatgaggatgatggacgtgcagtccgtcgcgcagcagctgcagatgatgatgcagctngagcgtgccgctgccgncagcagcagcctgtacgagccagctctgatgcagca

SEQ ID NO: 83467 - DNA, 532 bp, Zea mays
  unsure (1)..(532): unsure at all n locations
tagttagtnntaggtttgtgactatcgaagacggagggtagagtgttactgctgctcggaattcccgggtcgacccacgcgtccgcttcaaggtcattcctgggcccggtgagaagccaatgatagttgttcagcacaaggggggggaggaacagtttgcagccgaagagatctcctctatggttctcatcaagatgcgtgagatcgctgaagcttaccttggcagcacgatcaagaatgctgttgtcacggtccctgcctatttcaacgactcgcagaggcaggccacaaaggatgctggggtgattgctggcctcaatgtgctgcgtatcatcaatgagccaaccgctgctgctattgcctatggtcttgaccagaaggcaaccagtgtccgtgagaagaatgtcctcatttttgaccttggaagtggtaccctcgatggcttccttcctaccatttgaggaaggatcctttgaagtcaaggcacagctggcgacacccaattttgtggtgaagacttttacaacaggat

SEQ ID NO: 83468 - DNA, 526 bp, Zea mays
  unsure (1)..(526): unsure at all n locations
agtaggagagggttggccacgtaaatcgtagctcttcgtatgccgtaccggtccggaattcccgggtcgacccacgcgtccggttgcaacaacagttgctgcaacaaattgtaccagctcttactcagctagctgtggcggaccctgctgcctacttgcaacaactacttccattcaaccaactgactgtgtcgaactctgctgcgtacctacaacagcgacaacagttacttaatccactagcggtggctaacccattggtcgctgccttcctacagcagcaacaattgctgccatacaaccagttctctttgatgaaccctgccttgtcgtggcagcaacccatcgttggtggtgccatcttttagattacatatgagatgtactcgataatggtgccctcatagcggcatgtgtttcctaaaaataatcaatatattgattgagatttaaaaaaaaaaaaaaaagggcggccgctctagaggatccaagcttacgtacgcgtgcatgcgacgtcatagctctn

SEQ ID NO: 83469 - DNA, 508 bp, Zea mays
gagggtatgtatcctacgagcttatgcatgcaccaccggtccggaattcccgggtcgacccacgcgtccggcattcagaaacacacctagcgaagcgcactagcaacgacctaacaacaatggcttccaagacattatccctccttgcgcttcttgccctttttgtgagtgcaacaaatgcgttcattattccacaatgctcacttgctccgagtgccattattccacagttcctccctccagttacttcaatgggcttcgaacacccagctgtgcaagcctataggctacaacaagcgcttgcggcgagcgtcttagaacaaccaattgcccaattacaacaacaatccttagcacatctaaccatacaaaccatcgcaacgcagcagcaacaagcactgagccacctagccgtggtgaaccctatcgcctacttgcaacaacagctgcttgcatccaacccacttgctttggcaaacgtagctgcataccaacaacaacaacagtt

SEQ ID NO: 83470 - DNA, 513 bp, Zea mays
  unsure (1)..(513): unsure at all n locations
cgtaggctaactgaagactnttcgaatgnaccancgctacgtcctttccgggtcgacccacgcgtccgcggacgcgtgggggagaactcgacaccctgaacgtgctgatcgttgcccttgctctcctggcggtcgctgctgacgcctcctccagtacaagcggcggctgtggctgccagacaccaccgtttcatctaccgcctccgttctatatgccgcctccggtctatctgccgccgcagcagcagccgcagccatggcaataccccactcaaccaccgcagctaagcccgtgccagcagttcggatcctgcggcgtccgcagcgtcggcagcccgttcctgggccagtgcgtcgagttcctgaggcaccagtgcagcccggcggcgacgccctacggctcgccacagtgccaggcgctgcatcagcagtgctgccaccagatcaggcaggtggagccgctgcaccggtaccaggcgacatacggtgtggtcctgcagtccttcctgcagc

SEQ ID NO: 83471 - DNA, 521 bp, Zea mays
  unsure (1)..(521): unsure at all n locations
agtagttactttaagtgtattcagaatatatgggaaacgtaccggtaccgacttcccgggtcgacccacgcgtccgcccacgcgtccgcggacgcgtgggctaccattgggggcagttgtgacaactcctgagattgcgagtgtgttagctcaaaaaatccaatttaacacatttggtggaaatccagtttgttctgctggtgggttagctgtgcttaaggttcttgacaaggagaaacgccaggcacattgtgctgatgttggatctcacttgttggagcgtctaaaatcgcttcaggagaagcacgaaatcataggtgatgttagaggaaggggactgatgcttggggtggaactcgttacggacagaaaggagaagacccctgccaagtcagaaaccattgaactgtttgagaagctcagagatctcggngtactagttggaaagggcggtctgcatggtaacgtcttcagaataaaaccaccgatgtgcttttcgaaggacgatgcagacttcttgg

SEQ ID NO: 83472 - DNA, 533 bp, Zea mays
  unsure (1)..(533): unsure at all n locations
aggttagggntgcggtgtcntgataaagcacattattgcacgtctctaccgctccggaattcccgggtcgacccacgcgtccggagaccaacaagcaacatagaaagtggaatccagtagcaacaatagagcaacaatggagaccaagatattttccctccttatgctccttgctctttctacatgtgttgctaacgcgacaattttccctcaatgctcacaagctcctatagcttccctttttcccccataccttccatcaattatagcttcagtatgtgaaaacccagctcttcaaccatataggcttcaacaagcaatcgcagcaagcaacatacctttatcgcccttgttgtgtcaacaatcgccagccctatctttggtgcagtcattggtacaaaccatcagggcacaacagctgcagcaactcgtgctacctgtgatcaaccaagtagctctggcaaacctttctccctactctncgcaacaacaatttctttcatttcaaccaaatgtctacactgaaccctggt

SEQ ID NO: 83473 - DNA, 530 bp, Zea mays
  unsure (1)..(530): unsure at all n locations
agttaggggagaggtctgattaaggcgatcggacgtatagtgtgatgctcgtaccggtccggaattcgacgccacgcgtcaggcttcgtcagagaatgcagtcgatcttgcagaggccatcctagagaaatcggaaggcaaggtgcggctgaccggcttgggcgcccgtgacagtctccgactggaggcaggcctgtgcctgtacggcaacgacatggagcagcacatcacgccggtggaagccggcctctcatgggcgatcggcaagaggaggagggcagagggcggtttcctgggcgcagacgtgatcctgaagcagcttcaggaaggcccaaagatcaagcgcgtgggcatggtcacgcaagggccgtccgcgcggagccacagcgagctggtgaaccgctcgggggaaaggatcggcgaggtgaccagccggaggttcagcccgtgcctgaagaagaacatcngctatggctacgtgaagtcgggaatgcacaaggctgngnnacgagtgaanngtgtcgttcgcc

SEQ ID NO: 83474 - DNA, 527 bp, Zea mays
agttaggaagtgtgttgaaattgaggacgggggtatagtgtaatgctcgcggaattcccgggtcgacccacgcgtccgctgcttagatattctgtatgactcgtggtcaccagcgatgaccgtgagctctgtctggatcaggatcctgtctatgttgtctagttcgccagcaaagcaacgcccggcggacaatgaccgctatgttaggaactgccgcaacgggaggtcgccaaaggagactagatggtggttccatgacgacacggtgtaatgatctctgtggcattgcctgtcagccttctgtactgtgatatatctcttcaagggggagatgagatgatttaggcctatttctaagcaaccctctattggattgcgaagcttaccttgctgtggtggtatgtaaatgagttgctcacgtgtcagtctgggaatatgtgttatcaccatcaatgatataatatagcatgaagcatgattggaccctgcctaagtcactgaaacgagctcaaaaggtatgtgcacgt

SEQ ID NO: 83475 - DNA, 540 bp, Zea mays
  unsure (1)..(540): unsure at all n locations
nagtttaggatagtgtcttcgtgaaacaccgcatacggggggtatantggtacgctcgtaccggtccggaattcccgggtcgacccacgcgtccgcccacgcgtccggttggtctggatcagttcatcacgaagaacgctacactcgactaatgagaaggaggctgatgcatgcccaatcagggcaatgaagttctctgtctcccctgttgtgcgtgttgctgttcagtgcaaggttgcttccgaccttcccaagctagtagaaggtttgaagcgtctggcgaagtccgatcctatggttctgtgtacaatggaagaatctggtgagcatatcattgctggagctggtgagcttcatcttgagatttgcctgaaggatctgcaagaggacttcatgggaggtgctgaaattattgtttctcctcctgttgtgtccttccgtgaaaccgttcttgagaagtcctgccgcactgtcatgagcaagtcacctaacaagcacaaccgtctgtacatggaagcgcgccccctggaggagggtctt

SEQ ID NO: 83476 - DNA, 529 bp, Zea mays
agtgagggagtgggtttattatgaatacgagatatatggcacgctcgtaccggtccggaattcccgggtcgacccacgcgtccgcatgcgggaagatgttcaatttgtcatgcttggatctggtgacccagagcttgaagagtggatgagatctacagagtcgatcttcaaggataaatttcgtggatgggttggatttagtgttccagtttcccaccgaataactgccggttgcgatatattgttaatgccatccagattcgaaccttgtggtctcaatcagctatatgctatgcagtatggcacagttcctgttgtccatgcaactgggggccttagagataccgtggagaacttcaaccctttcggtgagaatggagagcagggtacagggtgggcattcgcacccctaaccacaggaaaacatgttgtggacattgcgaactgcaatatctacatacagggaacacaagtcctcctgggaagggctaatgaaacgaggcatgtcaaaagacctcacgtgggaccc

SEQ ID NO: 83477 - DNA, 509 bp, Zea mays
  unsure (1)..(509): unsure at all n locations
agtgcaaaaatgataccntacgatacgatcgcagctgcactcggtccggaatcccgggtcgacccacgcgttctccacgcgttcgccacgcgttcgccacgcgttcgtcacgcgttcgcccacgcgttcggacgaactagcaacatagaaagcacaatagtgtaccaacaatggcagccaaaatattttgcttccttatgctccttggtctttctgcaagtgttgctaccgcaaccattttcccacaatgctcacaagctcctatagcttcccttcttcccccatacctctcaccagcggtgtcttcaatgtgtgaaaacccaattgttcaaccctacaggatccaacaggcaatcgcaacaggcatcttaccattatcacccttgttccttcaacaaccgtcagccctattccagcagttacctttggtccatttggtggcacaaaacatcagggcacaacaactccaccaacttgggctagcaaaccttgttgcatactttaagaac

SEQ ID NO: 83478 - DNA, 518 bp, Zea mays
  unsure (1)..(518): unsure at all n locations
ggagtnccctnnagtggattacgatacagtcatctnacttcgcagctcgtttccggntnaagcnangcgtccggccacgcgtccggctatggcttccgcggcgcacgcccgcgcccccaccgacccgcttcccaagggtgctgatggatttttccgggcagtaatctcgaacatggaaaaggtttatttgagcaggaatcctacagccaaaaccattctggagcttgtacgatcttatgatggtgatcatatttgctatgatcactttgctttccggacatttggggtcaatggttatggtataaactcactttctgactttttcactgattttggttatttacctcgcgaagaactcagatttccagctaaaaagcttagggcactatggttttccccgcccactaatgatggctactctggaactggtacatatggacctttgccaaggatattcatttcagaacttcttgtggatgagttgactactcaaagccaggaaattatacataaataca

SEQ ID NO: 83479 - DNA, 512 bp, Zea mays
  unsure (1)..(512): unsure at all n locations
cgtggctctgaacctttcacgatgactatcgcaagcgctaccggtccggaattcccgggtcgacccacgcgtccggttcgacgacgtgctccgtgcggggcagctgctcatcgtaccccagggctacctcgtcgccacgcaaggcgcacggagaaggcttccagtacatcgccttcgagacgaaccctgacaccatggtcagccacgttgccgggaagaactccgtcctgagcgacttgccggccgccgtcatcgccagctcgtatgccatctgcatggaggaagctgcagagctcaagaacggtaggaagcatgagctggctgcgcttactcctgctggcagtggcagctaccaacaaggtcaagctggcagcgcccaacagtaggcacaacctcagagtgatctgcctgaataagtactcgtagactggtataattaaacaaagcttgcttatgttaaacctgcgggttgataatccttcaactacatagcttttaaggtttttgatccn

SEQ ID NO: 83480 - DNA, 538 bp, Zea mays
  unsure (1)..(538): unsure at all n locations
agtagggctgggtcnaattactgaactacgagnatgatcgtactgctcgtacacagttccggatcgacccacgcgtccgtccttaccgacccaaggactgaccatcagccaattaaggagtctgctctggggaacatgcccaccattgccttctgtgatactgactctcccatgcggtatgtcgatatcggcatcccagcgaacaacaaggggaggaacagcattggatgcctgttctggcttttggccaggatggttctgcagatgaggggcactatcctccctgggcacaagtgggaggtcatggtggatttgttcttctacagggacccagaggaagcaaaggagcaggaggaggaagctgctgttgcccctgagtttgccgcaatcactgattaccaaggagctgatcagtggggtggtgaccagtggacctctgatgtgactgcgccgnctgttgctcctactggtgctgattggggtgctgctccaactccggttcctacccgggatggctgggatcaaaatctggcccccc

SEQ ID NO: 83481 - DNA, 523 bp, Zea mays
  unsure (1)..(523): unsure at all n locations
agttagagtagttgatacagagaaagtgtagttcgacgctcggaattcggtcgaccagcgtcggaggcacagcgctggatcgcttttggcttacagaggttgacttcgaaggatttgccctgctatggatggactttcaatgactattcgacttctggacccttcccttcacgagttccttccagaagggaacgtcgaggaaatcgtgcgtgaactgtgttctgagacgggagccaaccaggaggatgccctcgcacggatcgaaaagctttcggaagtaaacccgatgcttggcttccgtggctgcaagcttggtatatcgtaccctgagctaacagaaatgcaagcccgtgccatctttgaagctgctatagcgatgaccaaccaaggcgttcaagtctttccagagataatggttcctcttgttggaacaccgcangaattgggacatcaggtggcccttatccgtcaagtcgctaacaaagttttcaccagtatggggaaaactattggggtcaacaaa

SEQ ID NO: 83482 - DNA, 538 bp, Zea mays
  unsure (1)..(538): unsure at all n locations
agtagtatgatctgattctgatacctcagtacntctgtatgtcgtaccggtccggaattcccgggtcgacccacgcgtccgcggacgcgtgggccgacgcgtgcgttcttggatgatgtatgtcgtcaaccagaaaactgggttatggaattaccactatgaagcggtatgcgtacgtcgacgagcacctgttgtgcgatatcgaaagacagcatgtcagcgtcgacgacatcgtctgtcacgacggcagcgtttgagcgcattccgagagcttccccgagttaaagcctgacgaggatgctggtatcataaaggactttgatgaacctgatactcttgcaccaactggtatttgcgttgtaagtacatagtacatggcgattcaaggtgatcttgggattgtcatccgaagtaaggaagggcactgggggcattactatcaaatataaccgggatgtncgtggattattggtgtctacgaagaggctattaattcaagggcatttaacacgggtggttttaagggttttggattacc

SEQ ID NO: 83483 - DNA, 541 bp, Zea mays
  unsure (1)..(541): unsure at all n locations
aagttaggtacggtgtctgatttacgtagctacgtanctcctcgtcatgtcttaccggtccggaattcccgggtcgacccacgcgttcgcccaagcgtacagcagccgagatttcttcgatctgcgcttgcgtttttttggcttgtaaagattttagttttccccccttcaactgttgctagccttgagtcgctgagaagtttcgagaagggtggtgtgagtgtcggatagctcaagatggatccggtgttgctggacgacgtcatacgccggcttctggaggtgaagaatctcaagcctgggaagaacgcgcagctgtcagagtcggagattaagcagctctgcgctgccgccaaggagatcttcctgcagcagcccaacctgctggagctcgaggcccccatcaaaatctgcggtgatgtccatggccagtactctgatctcctgaggctatttgattatggtggctatccgcctcaggccaactaccttttcttgggtgattatgtggatcgtggaaagcaaaacctataaacaatat

SEQ ID NO: 83484 - DNA, 522 bp, Zea mays
  unsure (1)..(522): unsure at all n locations
gtagtttaaattaggtgggaagctgagacgctcngataccgtcgcaagcacgtccggtccggaattcccgggtcgacccacgcgtccgtcagcattgccaacatagccgactttgctaaaccacctgaaaagatatcttaccctcagcaagttgctgttgcatgcactggactcatttggtcaaggtacagcttggttatcacaccgagaaactggaaccttttcagtgttaacgttgcaatggcgggtacaggcctgtatcagctttcacggaagatcaggcaagattacttatccgatgagaaagatgctgcttaacacctggaggcttaattaatgacaacaggcaaagattaccggatgggaaagcctgcatcctaggagtctactctggatttttttttcctggccagccaaggattaccgattggtcaaggttggtttcccggtaatcctaaattcggaaccagcctaattggaaaatcttccgccaaaaaggaaaaccattgaatggtgttttgg

SEQ ID NO: 83485 - DNA, 538 bp, Zea mays
aagtaggcagaggtgtgattaacgcgatacgacgcatgttggaccggcccggaattcccgggtcgacccacgcgtccgaatttttcttccctttggctccgtgaggttccggtgctcgctcgctcgcctgagcttcgatcgagcccggtcggcgaggcaggcgcccgatcgccgctctccgggagcttccggggggccgtcggatggagccgtacgcggcggcgaagagcggcggggccgacgccggcaccggcaccggactggaagactcgatgcggaggctggggctcggcgacgacggggaagcaggggaggagaagcttccggagcggccgggcgaggcggactgcgcctactacctccgcacgggcgcctgcggctacggtgagcgctgccgctacaaccacccccgcgatcggccggccccggttaatggagttggaaagaccgcagttacagtggagtacccagagcgttctggacagtctctctgggagtactatgcaaaaaatgggcccctggtaaaatgggtcccaca

SEQ ID NO: 83486 - DNA, 537 bp, Zea mays
  unsure (1)..(537): unsure at all n locations
agttaggtgagtttaaatagaggtagagagaagctggtaccggcccggaattcccgggtcgacccacgcgttcgcaagaagcttgtctctggcaccaaggagggtctgaaacttgatgaaacttaagaccaaaagaagaagaaagaagaacttaaagaaaaattttaagggcttttccaaggcatcaaaggaggtcttgggtaacaaatttaaaaaggtggtgtatctgatcccttttggactaacatgctgncttgtgactagcgagtatggctgnaccgncaacatggaaaggatcatgaangcacaggccctgatggactcgagcatggcgggctacatgtcgagcaaaaagacaatggagatcaacccagataaccctatcatggatgagctccgcaagcgttcctaggctgacaagaatgacaagtcagtcaaagatctcgtgatgctgctgttcgagactgctctcctgacctncggctttagnctggatgaccccaaaaccttcggcaacggtttcaccgcatgctcaaa

SEQ ID NO: 83487 - DNA, 541 bp, Zea mays
  unsure (1)..(541): unsure at all n locations
nagttagggtgagttgatacagaggacggggagtatgatggtaccgcctcggaattcccgggtcgacccacgcgttcgctcttcggcttctttctggagcaactaggggtccgttcttgatccgatccggccagtggacaacaacttttcccaattcgatcgaattgattggccgccaaggccaaaaggagatgattacccctaaaagcctcgattgccaagaattcgaagtggaaaaagccgtggcgatggaatcgcagaccattcggcacatgatccaagatgactggtccgacaacggtatccctctttctaacgtcaacttcaagatcctatccaaggtaatcgagtacttgaacaagcacgtacatgccgtcgtcggcgtcgtcgtcgtctcgaatgccggtttcgacgacctgggtggcggccccggttaccagtacggccgccttcggtgagacctnaggaactgggatgcggacttggtcaagtcgaccaggccacgctttttgacccatattgggttggaaatatatggaac

SEQ ID NO: 83488 - DNA, 527 bp, Zea mays
  unsure (1)..(527): unsure at all n locations
agtaggatcgtcnaagtttgtgataccgccacttgatcgcatcactctccggaccggcattcccgggtcgacccacgcgtncgagaaccgtctccgcaatctccccgcctccctcccgcctccacccaatggcgtctctccctaacggtggcggcgccgacgcctctggctcatgcggcgcgcgccctgtggacaaggaggtggacttcgccaactacttctgcacgtacgcctacctttaccaccagaaggagatgctctgcgaccgcgtccgcatggacgcgtaccactccgccgtcttccgcaacgcgccccacttccagggcaaggtggtccttgacgtgggcaccgggagcggcatccttgctatctggagcgcgcatgccggggccaggaaggtgtacgccgtcgaggcgactaacatggcggagcacgcgcgcgagcttgctcgcgccaacggcgtcacggatatcgttgaggtgatacagggcaccgtggaagacgttgaccttccggagaaagtgatg

SEQ ID NO: 83489 - DNA, 528 bp, Zea mays
  unsure (1)..(528): unsure at all n locations
aagtagtcaggtgtgttacagcaacaagacatatcgtacgcncggattcccggtcgacccacgcgtccggggagacgcagaggtcccgcggcttcggcttcgtcaccttctccacggaggaggcgatgcggaacgccatcgagggcatgaacggcaaggagctggacggccgcaacatcaccgtcaacgaggcccagtcccgcggcggccgtggaggcggcggcggtgggtacggtggtggccgtggaggcggcggctacggcggtggcgggcgccgtgatggcggcggcggctacggcggtggcggcggctacggtggcggcggcggctacggtggtggtggcggcggctacggcggtggcaaccgtggcggcggctacggcaactccgacgggaactggaggaactgagcggtggggcccgcgcggccaagttatcctgttcgctgccgtgatgtttaccctagtccagagggtttatcttcggtcgtctcgggtttgtgttgcccatctggggttttgattgcca

SEQ ID NO: 83490 - DNA, 535 bp, Zea mays
  unsure (1)..(535): unsure at all n locations
gggagttttggtttattatagatacgtagctcgtcgtaccggcccggaattcccgggtcgacccacgcgtccgcccacgcgtccgcccacgcgtccgatcttcgttcagcccactgggagtggagtgactcactcgggtccattctataaaacctctgcccgggggctagggtttcctcccagccgtcatcgtttcgcgtccgcctcagcccgccgcagggagaggtaagttcaggagacatcttcgagaagctgaaatggctcctaaagctgctcctgccaagaagggtgatgccaagacccaggccttgaaggttgccaaggctgtgaagtctggggcagccaagaagaagaccaagaagatccgcacgtctgtgacatttcaccgccccacgaccctgaagaaggctagggaccccaagtacccacgaatcagcactaccggaaggaacaagcttgatcagtaccaaattctcaagtacccccttaccacagaatcagcgatgaagaagattgaagataacaccactctggn

SEQ ID NO: 83491 - DNA, 541 bp, Zea mays
  unsure (1)..(541): unsure at all n locations
ggtagtactgggttnatgatcgagtaagtagctcatccgtactgccgtaccggtccggaattcccgggtcgacccacgcgtccgccctgctacgcgtagccaaagtcaacggcggcgctgccaacacgctctccaagatcaacgctgtgcgcactttgatcgcgcgcgtgctgaccgacatctagcagaagcagaagtcggtgctgcatgaggcgtacaagaagaagaagctgatgacgctcgacctccgacacaggaagacccgagccatcctcaggcgcctcaccaagcaccagctatgcttgaagaccgatagggaaaagaagcgtgagaagtatttacccatgaggaagtacgctatcaaggcctagatcagtgaaagaacattcatgctgtcaagctttgctcagaaggtacttgaatttgagacaaatgtatctgcatccaagttctatgcatctgatcaactgcatgatgaaaaactagtactttttgcttgtataaacatgccttacacaaaataaatggggaacaaaatgta

SEQ ID NO: 83492 - DNA, 547 bp, Zea mays
  unsure (1)..(547): unsure at all n locations
tagatagtctaagtggatgactgaggtccgtnnacccagtacttcgtaccggtctcggaattcccggctcgacccacgcgtccgccctgctactcgtagccaaagtcaacggcgacgctcccaacacgctctccgggatcaaggctgtgcgcaccttcatctcgcgcgtgctgaccgacatctagcacaagcacaagtcggctgctgcatgaggcgtacaagaagaagaagctgctcacgctcgacctccgccccaggaagacccgatccatcctcatgcgcctcaccaagcaccagctatgcttgctgaccgataggtaaaagaagcatgagaagtatttacccatgaggaagtacgctatcaaagcctagatcagtgaaagaacattcatcctgtccagctgtgctcagaaggtacttgaatttgacacaaatttatctgcatccaaattctatggatctgaaccactgattgaggaaaaactagcactttttgctcgtttaaaaatccttttcacattatgtggtgggttaccccaccacttag

SEQ ID NO: 83493 - DNA, 526 bp, Zea mays
  unsure (1)..(526): unsure at all n locations
gtagtttaccctnngagttggaatacgtaactcttacgtatctcatcgcagcactaccggtccggaattcccgggtcgacccacgcgtccggtcatgtttagattttaagcttgttttatgttggaaagtactggaaagactgctacttgtctttatatttggtaattcagccgtagattgctatgctggttgggatttactcgtgaaccagagtttttctgtcttatatatcctgaattggttaaaaaaaaaaaaaaaaaaaaaaaaaaaaaaaaaaaaaaaaaaaaaaaaaagggcggcccgtttaaaaggatccaggttaacttccccttccttccaagtcatagcttttctatagggtcacctaaattcaattcactggccgtcgttttacaacgtcgtgactgggaaaaccctggcgttacccaacttaatcgccttgcagaacatccccctttcgccagctggcgtaatagcaaagaggcccgaaccgatcgcccttcccaacagttgcgcagactgaat

SEQ ID NO: 83494 - DNA, 521 bp, Zea mays
  unsure (1)..(521): unsure at all n locations
gtagtattttaagtggctatgtaaccgtcattctncctccgcagcactaccgtccgtattcccggtcgacccacgcgtccgcccagcttacatgtcaccttgtcttacgcttgaaagtactggaaagactgcggcttatctggatatttggtaattcatccataaattgctatgctnattagtatttactcattaaccanattttttctgtcttatatatcctgaattggttaaaaaaaataaaataaaataaaaaaataaaaaaaaaaaaataatatataaagggcatgccgctttatagtatccaatcttactttctcttgcatgctacgtcatatctcttctatagtgtcacctaaatccaattaactggccgtcattttacaacgtcttgactggaaaaaccctgacgttacccaacttaatctccttgcatcacatccccttttcgccaccttgcgtaatatcaaataggcctaatccgttcgcccttcctaacatttactcatcctgattgtcaa

SEQ ID NO: 83495 - DNA, 546 bp, Zea mays
  unsure (1)..(546): unsure at all n locations
gagtttagggctagagtgntgtacagacgaacaggagctacatcgtacacgcccggaattcccgggtcgacccacgcgttcgcgctgatgaatgcatggttcttggccacgaaacactttatggcattgctttccgaaactctgaaagctgacgacccctagctttggagacttgaaccacttgatcagtgcaacgatgagtggtgtcacttgctgcctncgcttcccaggacagcttaactctgacctgcgcaagcttgcagtcaacctgatcccgttccctcggctccacttcttcatggttggctttgcgccactcacctcgcgtggctcgcagcagtaccgtgcgctcaccgtccctgagctaacccagcagatgtgggatgccaagaacatgatgtgtgctgctgacccacgccatggtcgctatctcacagcctctgccatgttccgtggcaagatgagcactaaggaggtgatgagcaaatgattaatgtccagaacaagaactcgtcctacttttggagtggatacccaacaacgtga

SEQ ID NO: 83496 - DNA, 546 bp, Zea mays
  unsure (1)..(546): unsure at all n locations
aggtagggttagatggattactgagtacgacgctatatcgcactgctcgtaccggtccggaattcccgggtcgacccacgcgtccgcggacgcgtgggtcggcatcccagcgaacaacaaggggaggaacagcattggatgcctgttctggcttttggccaggatggttctgcagatgaagggcactatcctncctgggcacaagtgggaggtcatggtggatttgttcttctacagggacccataggaagcaaaggagcaggaggaggaagctgctgttgcccctgagtttgccgcaatcactgattaccaaggacctgaccatgggggtgttgaccagtgaacctttgatgtgactgccccgcctgtggctcctactgttcctgatgggggtgctgttcaagttccggttcttaccgttaatgcttggaaccaacctggggcccttgaacttgtgttgaacggaattgaacctccttgggttgttccaacgggttggaaccaaaacaccccgcaaccgattgcccaaagtttgaattaggcctt

SEQ ID NO: 83497 - DNA, 543 bp, Zea mays
  unsure (1)..(543): unsure at all n locations
tagtagtnnctcggtttgatatcagaactacgagtatgatcgtactgccgtaccggtccggaattcccgggtcgacccacgcgtccgtggacgcgtgggcttagaggctagacccagtatccgggctctcaagcgggctcttttggtggcactgaggtgtgttgatcctgactctgaaaagagacctaagatgggccaggttgttaggatgcttgagtcagaagaagtaccataccgggaggatcggagaaatcgtagaagtcgcactggaagcatggatattgagtccattgcagagggttccaactctgcggagtttggaaagaaggtagaaaggactggaagctctatatctgacagatctcaaccatgaggcctggaaatctaagctatatcaggaactgtctcagaaacgatgttaatcaccaaggtgattgctgtcctgataggggatgctggtaggtgacagaggcaaggcaggcccaggtattactggctaaagattatgccctagattttaagggcagcttaaaaattatttgt

SEQ ID NO: 83498 - DNA, 538 bp, Zea mays
  unsure (1)..(538): unsure at all n locations
gtaggtaaggngtatgattacgagatttatggcatgctgtaccggtccggaattcccgggtcgacccacgcgtccgcccacgcgtccgcccaggcaggcaggtcggcgaggagggcaggaagaccgaagaccgagccgtgcgggggctcgggacgggaacgggacaggaccccaaaatctcagatccttcctgcccgcccgcccgtgcccgtcgacgcgtcgttcttgccggccgcgccccaccttcgccctctcctcctccaggggaatcggatacgccacaggctgcgcgatggtgctgtgggtcttcggctacggctccctcatctggaaccccggcttcgacttcgacgacaaaatcctcggcttcatcaagggctacaagcgcacctttaatctcgcttgcattgaccacagaagcacaccggagcattcggcgaggacctgcacgctttgaaccggcgacgaagccatatgcctgggaattggatattggggcagggtggttcagaaaaagagcttaaacccatggcctccc

SEQ ID NO: 83499 - DNA, 512 bp, Zea mays
  unsure (1)..(512): unsure at all n locations
agtggaaatactgatactcntcacgnatgactcatcgccagcagctaccggtccggaattcccgggtcgacccacgcgtccgcccacgcgtccgagaaagcacaatagtgtaccaacaatggcagccaaaatattgggcttccttatgctccttggtctttctgcaagtgctgctaccgcaaccattttcccacaatgctcacaagctcctatagcttcctttcttcccccatacctctcaccagcggtgtcttcagtatgtgaaaacccaattcttcaaccctacaggatccaacaggcaatcgcagcaggcatcttacctttatcacccttggtccttcaacaaccgtcagccctattacagcagttacccttggtgcatttgttggcacaaaacatcaaggcacaacaactaacacaacttgtgctaggaaacctngctgnctactctcagcaaccagcagttctttcattcaaccaactggcttgattgaactcttgtggttaattgc

SEQ ID NO: 83500 - DNA, 515 bp, Zea mays
  unsure (1)..(515): unsure at all n locations
agaggccaactgannccntaccgtagctcatccgccagcgctaccggtccggaattcccgggtcgacccacgcgtccgcacacactcgagaactccatttcgatctcatttgaaatcaacccatcctcgttggctccgtctagcagcctctcaccctcatggccaagatcaagatcgggatcaatgggtttggcaggatcggaaggctggtggccagggtggccctgcagagcgacgacgtcgagctcgtcgccgtgaacgaccccttcatcagcaccgattacatgacctacatgttcaagtatgacactgtgcacggacagtggaagcaccatgaggtcaaggtgaaggactccaagacccttctctttggtgagaaggaggttgctgtgtttggctgcaggaaccctgaggagatcccatggggttcggttggcgcttgaatatgttgttgagtctactggtgttttcactgaccaggagaaggctgcagctcacttgagggtggtgccaaa

SEQ ID NO: 83501 - DNA, 509 bp, Zea mays
  unsure (1)..(509): unsure at all n locations
agtgtgcctactgaatctacgttgnantcttctgccagctcctaccggtcctgaattcccgggtcgacccacgcgtccgcacacacttgagaactccatttcgatctcatttgaaatcaacccatccttgtgtccttcgtctgagcatcctttcaccctcatggccaacatcaagatcgggatcaatgggtttggcatgatcggaaggcttgtggccattgtggccctgcacagctacgacgtcgagctcgtagccgtgaacgaccccttcatcagcacctattacatgacctacatgttcaagtatgacactgtgcactgacagtggaagcaccatgaggtcaacgtgaacgacttcaagacccttctctttggtgagaaagaggctgctgtgtttgactgcacgaaccttgcagagattccatggggttcagttggtgctgaatatgtagaataatctactggatgtattcattatacaataataaattattatatatttatttatn

SEQ ID NO: 83502 - DNA, 546 bp, Zea mays
  unsure (1)..(546): unsure at all n locations
ggttagtcttagagtggtacagggggagagagggaactttgtaacggcccggaattcccgggtcgacccacgcgtccgcggacgcgtgggttcagcctcaccaaccaaggcatcagctgctatcgttctccaggccgagaaggacttgcagccttggattgctagagatgacgaacaaggtcagaagatgtggagagtcaaccagcgtatagtgaagcttatagctgagcttatgaggaaccatgacagccctgaagcgttggtgatactcgctagtgccttcgaccttctacttcgtgctaccgatggaatgctcgtcgatggtgaagcttgtactttgccacagcttgagcttctggaagtgaccgctcgggctgtccatcttatcatcgaatggcgagattcaggtttatcagttgcagatggtctttcaaatctgctgaagtgccgtctatcaaccaccatccgctgcctttctcacccaagtgcacacgtgcgcgcaactaacatgtgtgtgctncgcgacaatctgtgcaacggttcccc

SEQ ID NO: 83503 - DNA, 547 bp, Zea mays
agttagcgtagagggttacagcaacaaagattacatcgtaccggcgcggaattcccgggtcgacccacgcgtccgaaccaattgcccaattacaacaacaatccttggcacatctaaccatacaaaccatcgcagcgcagcagcaacaagcactgagccacctagccgtggtgaaccctatcgcctacttgcaacaacagctgcttgcatccaacccacttgctttggcaaacgtagctgcataccaacaacaacaacagttgcaacagtttctgccagcgctcagtcaactagccatggtgaaccctatcgcctacctacaacagcaacaacttctttcatctagcccgctcgctatgggcaatgcacctacatacctgcaacatcagttgttgcaacaacagttgctgcaacatattgtaccagctcttactcagctagctgtggcaaaccctgctgcctacttgcaacaactacttccattcaaccaactgactgtgtcgaactctgctgcgtacctacaacagcgacaaccagttctttattc

SEQ ID NO: 83504 - DNA, 547 bp, Zea mays
  unsure (1)..(547): unsure at all n locations
tagtaggttctagagttgntgtagaaatacgtagctcatccgtatgccgtaccggtccggaattcccgggtcgacccacgcgtccgcctcatcctccacatctccaccgcatcggaactaggaaggcgaagccgaaggcgcggcgcggcgcggcacggatcgagcgatggcggtggcccctcctacggcggcggcgctggagcagctaagcagcagcaagatgttcgacggcttcaatctccgcttccgccaccagagcgccacccttggctgcgccatgactttctccatctacctgcccccgtccccggcgtccaaccttcccgtgctgtactggctctcgggtctcacctgcaccgacgagaatttcatcataaagtccggcgcccagcgcgccgccgctgcccacggcatcgccctcgtggcacctgacaccttcccacgtgggttaaatattgaaagagagtcagacagctatgaatttggtgtgggtgcccggttttatttggaagccgcccagtgaaagtggggaaaatctcgctcgtgt

SEQ ID NO: 83505 - DNA, 538 bp, Zea mays
  unsure (1)..(538): unsure at all n locations
gagtaggtcgaggaaactgaacaacgagcattatggaacgctctaccggtccggaattcccgggtcgacccacgcgtccgcagctagctagcgttccctcttcttcacctcactaacaccagcagctcgatcgctctgtcctgcaataatggccgctcgctcctcctcccagcagctggtcgcggcggcggcggcggcggtcctggcagcggcgctgctgctgctggcggcgggggccgggacggcgtcggcggcggtgagctgcggcgaggtgacgtcgtcggtggcgccgtgcctcgggtacgcgatgggcagcgcggcgtcgccctccgcggcgtgctgcagcggggtgcgctcgctcaacagccgcgcgtcgtcgacggcggaccggcaggccacctgcaactgcctcaagagcatgacgggcccgttcggcggcggntcagcatgggcaacggcgccaacatcccggaagtgcggggtttcgttgggtgcccattagcccaacgttgacttgaccagaacaactgttcgtggc

SEQ ID NO: 83506 - DNA, 506 bp, Zea mays
  unsure (1)..(506): unsure at all n locations
gtaggcctatgaaactcttaagcagcttcatgcagcactcaccggtccggaattcccgggtcgacccacgcgtccgggaatccagtagcaacaatagagcaacaatggagaccaagatattttccctccttatgctccgtgctctntctacatgtgttgctaacgcgacaattttccctcaatgctcacaagctcctatagcttccctttttcccccataccttccatcaattatagcttcagtatgtgaaaacccagctcttcaaccatataggcttcaacaagcaatcgcagcaagcaacatacctttatcgcccttgttgtgtcaacaatcgccagccctatctttggtgcagtcattggtacaaaccatcagggcacaacagctgcagcaactcgtgctacctggatcaaccaagtagctctggcaaacctttctccctactctccgcaacaccaatttcttccattcaaccaactgtctacactgaaccctgctgctaatt

SEQ ID NO: 83507 - DNA, 512 bp, Zea mays
gtggcatatgaaaccttacgacgctctatgcaagcactaccggtccggaattcccgggtcgacccacgcgtccggattggagaactcgacaccatgaaggtgctgatcgttgcccttgctctcctggcgctcgctgcgagcgccgcctccagtacaagcggcggctgtggctgccagacaccaccgtttcatctaccgcctccgttctatatgccgcctccgttctatctgccgccgcagcagcagccgcagccatggcaataccccactcaaccaccgcagctaagcccgtgccagcagttcggatcctgcggcgtcggcagcgtcggcagcccgttcctgggccagtgcgtcgagttcctgaggcaccagtgcagcccggcggcgacgccctacggctcgccacagtgccaggcgctgcagcagcagtgctgccaccagatcaggcaggtggagccgctgcaccggtaccaggcgacatacggtgtggtcctgcagtccttcctgcagca

SEQ ID NO: 83508 - DNA, 548 bp, Zea mays
  unsure (1)..(548): unsure at all n locations
gagtagggttgagtgttaagaagacaagattatatcgtaccggcgcggaattcccgggtcgacccacgcgtccgcccacgcgtccggctgcttccattcaaccaactgactctgtcgaactctgctgcgtacctacaacagcgacaacagttacttaatccattggtagtggctaacccattggtcgccgccttcctacagcagcaacaattgctgccatacaaccagttctctttgatgaatcctgtcttgtcgaggcagcaacccatcgttggaggtgccatcttttagattacatatgagatgtactcgataatggtgccctcataccgacgtgtgtttcctagaaataatcaatatattgattgagatttacaaaanaaaaaaaaaaagggcggccgctctagaagatccaagcttacgtacgcgtgcatgcgacgtcatagctcttctatagtgtcacctaaattcaattcactggcccgtcgtttacaacgtcgtgactgggaaaaccctggggttaaccaaatttatagccttggagaacc

SEQ ID NO: 83509 - DNA, 537 bp, Zea mays
ggtagatctcagttgtgtcatctctcgtgtctgtcgtaccgctcgtattccctggtcgacccacgcgttcgcccacgcgtcctgtactcaatgtcaccatcaacatcaccacccatttttctcctagtgtgaaatctgctaccaccatacaggttttgggagaaatgggtggtgatgttgatggtgccattgcttccgtgacacctattcctcctatacatccaactgtctatgatgaatcctgtcttgtcgtggcagctacccatcgttggaggtgccatcttttagatgacatatgagatgcactcgataatggtgccctcataccgacgtgtgtttcctataaataatcaatatattgattgagatttacataatatacaaataatgggcggccgttctaaaggatccaagcttacgtacgcgtgcatgcgacgttatatctcttctatagtgtcacctaaattcaattcactgtccgttgttttacaactttgcgacttggaaaaccctgtggtttccccactcaaatagcct

SEQ ID NO: 83510 - DNA, 557 bp, Zea mays
  unsure (1)..(557): unsure at all n locations
ngggttagagtcagagtanttatcgaanctacgacgcttgatcgtactgctcgtaccggtccggaattcccgggtcgacccacgcgtccggtgaaaaggtgggctcgtccgagtctgccctgctcgccaagctgggtatccgccccttctcgtacggcctccaggtcaccagtgtctacgaggatgggtccgtgttcagccctgaggtgcttgacctttccgaggaggacctgattgagaagtttgccactggtgtctccatggttgcctccctgtcactggcgatctcgtacccgacccttgctgctgtgccccacatgttcatcaatgggtacaagaatgtgcttgctgttgctgtcgagacagactactcgtacccacatgctgacaagatcaaggagtaccttaaggacccaagcaagtttgcttgtgccggcccggttgctgctggggactctggcgcttcagctgtgtccaagggagaataaaaggctttggagcccctaaaggagtttgaccacggaaaagggtttatagcccttttcgaccacaggtgc

SEQ ID NO: 83511 - DNA, 544 bp, Zea mays
  unsure (1)..(544): unsure at all n locations
agtagttntaggttgnttacgagtacgacactctatgcactgctcgtaccggtccggaattcccgggtcgacccacgcgtccggactccccgagtcgacaggccacaaatcccaattccaaaaccttttctccgtcccatcgccggcgatcttctccttcgccgccaatggatctctccgctgtccaggctgccctctccgacaagtcctactccaccctcgcctccctctgcgacgaacttctcctccaggccgcgtcccagggattcaccaccgacgaatggccctactctgtccacctgcttgcccacctctacatcaatgacctgaacagcgcgcggttcttctggaagtcgttgccgcaggaggtcaaggacacgcggccggagctcgccgctgtctggaggattggtcagtgcctctggaaaagagattatgctggcgtcaacacggctgcacaggggttcgagtggggtcctgacctcgctgactttatcactgtctttctagagagcgtcacacagcaggtatctaaatggtggac

SEQ ID NO: 83512 - DNA, 553 bp, Zea mays
  unsure (1)..(553): unsure at all n locations
nagttagcgcagatgcttacgacctataganatcatcgtactgccgtaccggtccggaattcccgggtcgacccacgcgtccggccacgcgtacgcccacgcgtacgctctggtcttcattgttgacctcaaggcagactagaagaagatcaaggctgtcgtcaagaagatgtatgacatccaggcaaagaaggtcaacaccttgatcaggcctgatgggaagaagaaggcttacgtgaagctgactcccgactatgatgctcttgatgtggccaacaaaatcggaatcatctaagtgctgcattaggcatctgttgattactagctcaatctgttgtgtgctagttctatgtgaaaccagagttttggagctatggatctcaatcgttccattaccatgtgttatgcacacttctgaatctgatgtccagagataaatctgaaggtgaccgcggtttataaggttccaaagctaggtccccgggccatgcgaattataaactttttttaaggggccccaaaattcaattcatgtgcccgtggttaacaaacc

SEQ ID NO: 83513 - DNA, 515 bp, Zea mays
  unsure (1)..(515): unsure at all n locations
agtgactcatcgaaactntaccgtagctcatccgcagcgctaccggtccggaattcccgggtcgacccacgcgtccgcgttctcgtcgtgtgcctggctctgtcagctgccagcgcctctgcaatgcaggggccctgcccctgcgcggggctgcagggcttgtacggcgctggcgccggcctgacgacgatgatgggcgccggcgggctgtacccctacgcggagtacctgaggcagccgcagtgcagcccgctggcggcggcgccctactacgccgggtgtgggcagacgagcgccatgtaccagccgctccggcaacagtgctgccagcagcagatgaggatgatggacgtgcagtccgtcgcgcagcagctgcagatgatgatgcagcttgagcgtgccgctgccgccagcagcagcctgtacgagccagctctgatgcagcagcagcagcagctgttggcagctcagggtctcaaccccatggccatgatgatggcccagaacatgccggc

SEQ ID NO: 83514 - DNA, 541 bp, Zea mays
  unsure (1)..(541): unsure at all n locations
aggaggtnnnctttnnttaggtggcatttactgtnactcttacaggaggctctactgccagcacctaccggtccggaattcccgggtcgacccacgcgtccgcccacgcgtccgcccacgcgttcgcccacgcgtccgcccacgcgttcgcccacgcgtccgcccacgcgtccgcggacgcgtgggccggcggacgtcaagaaggtggccaccaccttgcagcgcgccatcaaggtggtcggcacgccggcgtacgaggagatggtgaggaactgcatgatccaggatctctcctggaagggccctgccaagaactgggagaacgtgctgctcagcctcggggtcgccggcggcgagccaggggttgaaggcgaggagatcgcgccgctcgccaaggagaacgtggccgcgccctgaagagttcggcctgcagggcccctgatctcgcgcgtggtgcaaagatgttgggacatcttcttatatatgctgattcgtttatgtgatatggacaagtatgtgtagatgcttgcttgtgctagtg

SEQ ID NO: 83515 - DNA, 542 bp, Zea mays
  unsure (1)..(542): unsure at all n locations
agttagactcggttagtacagcagatgagcatgttgtaccggcccggaattcccgggtcgacccacgcgttcgcaccaacgcatattgcaccaagaaatccatcgaggaggtcggcgacaggggaaattaatggcgtcgtcgtctagcagcagccaccgtcgtctcatcctcgcagccgtcgtcctgctctccgtgctcgcggctgccagcgccagcgccgggacctcctgcgtgccggggtgggccatcccgcacaacccgctcccgagctgccgctggtacgtgaccagccggacctgcggcatcgggccgcgccttccgtggccggagctgaagaggagatgctgccgggagctggcggacatcccggcgtactgccggtgcacggcgctgagcatcctcatggacggcgcgatcccgtcgggcccggacgcgcatgctgagggcccgctagaggacctgtcgggcttgccgcgggaggtgcaaaggggattcgncgncaccctcgttacaggaggcccagtgcaacccgggcccaata

SEQ ID NO: 83516 - DNA, 552 bp, Zea mays
agttaggtcagagttattacagcgctacaagacatgatcgtaccggcgcggaattcccgggtcgacccactcgtccggcacaggaagcatcttgacagcagtatcgatttcgttgggaggctcgtcttcggatttgagaaagggccttcgatgcttgaggctgttagaacctctggtcaaccattagtcgatgactgggactgtttgaagaggatggtgcggattttcgagtcccagtgtggttcacttactcagtacggcatgaagtacatgagagcgtttgcaaacatctgcaacagtggtatatctgagatgaaaatgagggagtcgagcatcagcgcttgcagcagctacaactcggcgaggtggagcccgatggctcggggacacagtgcttgatggtaaagatcaaatagcaaagccccccgaggtctgctgccccatgtccctgtgagcgagctcgtatcatctggggactgtggacccatcgacggttgtacatatcatgcacttgtgctcctgcctatgttaaaatgtataccccctccactc

SEQ ID NO: 83517 - DNA, 542 bp, Zea mays
  unsure (1)..(542): unsure at all n locations
nagtagttnctggttgagtatgagtaagagcttatcgcatgctgtaccggtccggaattcccgggtcgacccacgcgtccggcgaatcgtgttatgtcgataccgtgatggggtctcttaattagcgcatcgagtcagactcgtttgggcaatctgaagatgtttagggatcaacattacctttgtgtacctttgtggcctatggttcgtggatgcacagggatcaatataagtacctttgtgccccatggttcgtggatcactgtgcatgtgttcttccgcgtctttgttgttattttggctccatctgtatgatttaacaaaggaaggttcattagatgggccacatttacacactgtttatccacacgggtccactgatactcttccttttgccaccatgggctctggttctcttgctgcaatgtcagtgtttgaatcgaagtacaaagaaggccttactagggaggagggaatacagattgtgtgcgaagcaatctgtgctggtattttcaatgacttgngtagtgggagcaacgtgg

SEQ ID NO: 83518 - DNA, 504 bp, Zea mays
  unsure (1)..(504): unsure at all n locations
gtggctgactcatncngatgatatcatcggacctccattcnccggtcgacccacgcgtccgcccacgcgtccgggccccatggtagtgattgtggtatagtgaatgtgaacatacctactaatggtgctgaaaggggtggagcatttggtggagaaaaagcaactggtggtggacgagaagcagggagtgattcctggaagcagtacatgaggagggcgacttgtacaatcaactatgggagcgagctacctctagcccagggaatcaattttggttaatcctgcagaaatgttgcgcgtggatctcagtgttttctgcagacgtggatgccgtatggaaagaactgatgcaaccgcatttgagatctcagcagacttgagcagcatttattggcgtcagttgtgaaacttaaactgcaggagcatcttgtacataaataaaataagatgtttgttgctctttgtcctcggcaagttttgtttccagtatactttatacttatg

SEQ ID NO: 83519 - DNA, 528 bp, Zea mays
  unsure (1)..(528): unsure at all n locations
agtgagttaaccctanagagtggtaattcgcaaacaatcgcagcaccntccggacctgcattcccgggtcgacccacgcgtccggagctagttcagaagtatgttggagaaggtgctcggatggtcagggaactgttccagatggccggctcaaagagaggcatgcattgtattctttgatgaagttgatgcaattggtggtgctcgttttgatgatggggttggtggtgacaatgaggtgcagcgtacaatgttggaaatagtaaaccaacttgatgggtttgatgcaagagggaacatcaaagttctcatggccactaataggcctgataccttggatcctgcacttctgcgccctggtcgcttggacagaaaggtggaattcgggctacctgacttggagggccgtacccaaattttcaagatccatacacgtaccatgaactgtgagcgagatattcgtttcgagcttctggcacggctctgccccaactctactggagctgatataaggagcgtttgcacaga

SEQ ID NO: 83520 - DNA, 537 bp, Zea mays
  unsure (1)..(537): unsure at all n locations
agggaggaccctcnanaggtggacactactgatactcttaccggatgctctatgccagcacctaccggtccggaattcccgggtcgacccacgcgtccgctttatcgcccttgttgtgtcaacaatcgccagccctatctttggtgcagtcagtggtacagggcatcagggcacaacagctgcagcaactcgtgctacctgtgatcaaccaagtagctctggcaaacctttctccctactctccgcaacaacaatttcttccattcaaccaactgtctacactgaaccctgctgcttatttgcagcaacaactattaccatttagccagctagctactgcctactctcaacaacaacaacttcttccatttaaccaattggccgcactgaaccccgctgcttatttgcagcagcaaatactactaccatttagccagctagctacagcaagccgtgcttccttcttgacacaacaacagttgctgccgttctaccagcagtttgcggctaaccccgcaaccctcttacaactacaac

SEQ ID NO: 83521 - DNA, 553 bp, Zea mays
agtagggtagatgtgtgacgtagctacagcatatgatcggccgtccctgaattcccgggtcgacccactcgtccgaaatttccatgcctattatggtggctcccactgctttgcacaaactagcccaccaagaaggagaggttgcttatgcccatgcagcagctgctgcaggaactataatgacgttgtcttcatggtcatcttgcagcattgaggaagttagctcaattgcaccaggactccgtttcttacaactttcagtattcaaggatagggatatcgtgcaacagcttgtcagaagggctgaaaatgctggctataaggcaatcgccgtcactgtcgacgctacacgccttggtcgcagggaagccgatgtcaggaacagattcaagctgcctgaaaatgtcgtgttgaagtgccttgaacgactggatctcagcaagatggacaagactaatggttcaagccttgcttgttacgccactttccctatttacagctcttttttttggaaagattcaagagggttccaacgattatcccgggtcttatt

SEQ ID NO: 83522 - DNA, 559 bp, Zea mays
  unsure (1)..(559): unsure at all n locations
agtaggctcgagttgtgattacatagntaccagcacatcatcgtaacgtcccggaattcccgggtcgacccacgcgtccgcccactcgtccgcggacgcgtgggataagattgcatttgttcccatctctggttttgagggtgacaacatgattgagaggtccaccaaccttgactggtacaaaggcccaaccctgcttgaggctcttgatcagatcaccgagcccaagagaccctcagacaagcccctgcgtctccccctccaggatgtgtacaagattggtggtattggaactgtgccagttggtcgtgtggagactggtgtcatcaagcctggtatggttgtcacctttggtccaactggcctgactactgaggtgaagtctgttgagatgcaccatgaggctcttcangaggcccttcctggtgacaacgttggctttaacgtgaaaaatgtcgcggtgaaagatatcaaacgtggttatttggccttcaacttcaagatgaccccttccaagaagctttcaactttacccttcagtgatcatcaatgaaacccc

SEQ ID NO: 83523 - DNA, 538 bp, Zea mays
  unsure (1)..(538): unsure at all n locations
gtagttaagttgtgctgattacgagctctagtatgncgtaccggtccggaattcccgggtcgacccacgcgtccgcattaactatctctgagtaagagtggcccttatagctgagagataatcaacgagagcctgatcgagtgcgtggactagttgaaccagttcatgcatgctcgcattgtggccttcatggtcgacaactgctccacaactggttgttcgggatctaggaaatggtctccacgcttggattacatcttgacccaccaggcgtctgtgactgctgacaagactgcaccgatcaaccaagacctcatcagcaacttcatgtgtgaccctgtgcacggcgccatcgaagtctgcgctcagctgaggcctaccgttgacatctcagtgaccgttgatgcagatttcgtgcgcccagagcttcgacagtatttataagcgtgtatagatcctcagtgtgactgcaatggctactgttgaagaacttaatatgcctcggcttatgaactctcttattgtgccttttaatggg

SEQ ID NO: 83524 - DNA, 544 bp, Zea mays
  unsure (1)..(544): unsure at all n locations
ggtagtctgggttnatgctgatnactgaggcnctcgtatgtcgtaccggtccggaattcccgggtcgacccacgcgtccgcccacgcgtccggtgcaagaagggcacatgacgccaagcaaaagggacgccggtcaggatatggtaagcgtaggggtaccagggaggctaggctacccaccaaggttctgtggatgaggaggatgcgtgtgctgaggcgccttctccgcaagtatcgtgaggccaagaagattgacaagcacatgtatcatgacatgtacatgaaggtcaaaggtaacgccttcaagaacaagagggtgcttatggagagtatccacaagtccaaggctgagaaggccagagagaagacactttctgaccagtttgaggccaagcgcgccaagagcaaggcgagccgtgagaggaagatcgctaggagggaggagaggttggcccagggtccacgagaaataacaccacctgtctcattcacagctccagctactggggcaccgaagaaagcaaagaagtgaaatattgaaata

SEQ ID NO: 83525 - DNA, 556 bp, Zea mays
  unsure (1)..(556): unsure at all n locations
tagaggctcggtnnnnactgatntatgatacgctcgcacgtcgtaccggtccggaattcccgggtcgacccacgcgtccgagctcatacgtatatcacttgccatgccagcctagcttcttccgtgtctgtctttctcaataaatacatgccactcacatggtgctcctccatcttccaagtcaccaacgcaaattgcaccaagaaatccatcgagaggccgtcgacaggggaattaatggcgtcgtcgtctagcagcagccaccgccgcctcatcctcgcagccgccgtcctgctctccgtgctcgcggctgccagcgccagcgccgggacctcctgcgtgccggggtgggccatcccgcacaacccgctcccgagctgccgctggtacgtgaccagccggacctgcggcatcgggccgngccttccgtggccggagctgaagaggagatgctgtcgggagcttgcggacattccggcgtactgtcggtgcacagggctttacattctcatgggcagggccgataaccccgggggccgaaaacgcaccttttggg

SEQ ID NO: 83526 - DNA, 539 bp, Zea mays
  unsure (1)..(539): unsure at all n locations
agggagggccnttcngaggtggaacgtaccgcagactcttactgaanactcatcgncagcacctaccggtccggaattcccgggtcgacccacgcgtccgcacatagaccatacatctcacttcgccaaaaaaattccgtcaacagttgaagtgatacccatggcaaaactactcttgggtttgctccttgcccttgctattctagggacaacatcggctgctggttgtgtacaagacgcggaagacatgaaacgagagtgcaagcagtttgagctattcccagcgaacccaaagttgccaccgtcggcagcatgttgtgctgtgtggaagagggcagatgttccatgcctatgcaaatatgttaacaaggaagtagagaaggtatggtgcatggagaaggttgtgtacgtcgccaactattgtaagaggccgtttcaacctggctacaagtgccggagttatacagttcctcttagtatgtaaaaaggagtggttgggacatgtggtactctctcctagaactttaatttgagattgg

SEQ ID NO: 83527 - DNA, 531 bp, Zea mays
  unsure (1)..(531): unsure at all n locations
gggagttttccctcanaggttcngaagtccggagaccgatacgcacaccntccggaccggcattcccgggtcgacccacgcgtccgcaatcgccagccctatctttggtgcagtcattggtacaaaccatcagggcacagcagctgcagcaactcgtgctacctgtgatcaaccaagtagctctggcaaacctttctccctactctcagcaacaacaatttcttccattcaaccaactgtctacattgaaccgtgctgcttatttgcagcaacaactattaccattcagccagctagctactgcctactctcagcaacaacaacttcttccatttaaccaattggccgcactgaaccccgctgcttatttgcagcagcaaatactactaccatttagccagctagctgcagcaagccgtgcttccttcttgacacagcaacagttgctgcctttctaccagcagtttgcggctaaccccgcaaccctcttacaactacaacaattgttgccctttgtccaacttgctttga

SEQ ID NO: 83528 - DNA, 529 bp, Zea mays
  unsure (1)..(529): unsure at all n locations
agggaggacgtgnggttgtgatacgcagctcatcgtagacccttcgcagctcgtccgcggctcgacccacgcgtccgcgtatgcgtccgcccacgcgtccgcaatgaatgaaatacctaatgttaggccttcatagtcaatggagcagcttggataaagaaattttacatgtgcaaacgggcgctagtaacagtgcatgcattccaaaccaggtcctttgagcaatctgagtaactgtagttacagagtacaatacatccaaagcacactatccttgaattacagagctcaaaccacctgaacttgttattgtggacttttttcatctcatcgctggttctccctcctgcgtgcgtagcgggtcctgtcattgtacctaggcctgtctgcagccctctgtggcacgggctcgacccttctctgcctctcaggaggcctctgaacaatctcaccgttgacaagcagttcagctccgtaagccttggactcagggtcaacatacgaatccggtagccccaagggaacaccn

SEQ ID NO: 83529 - DNA, 566 bp, Zea mays
gttgatgtggtgttagtttttgaaagcctaacgcctgcagtacctgtctcggattcccgggtcgacccacgcgtccgcccacgcgtccgcggacgcgtgggggccactgaagcgaagtcgaagagccatgagtctgattcgttggctttgagggaggagatcagattactgactgataacctggagtctattataagtgaagctctgtcacgttagatggtagtttttatcctgtaactattattgatccatttttatgaatagtatttatattatatctattatttttttttttatatatatttattgtttattttctattattttattatatttttattatatattttttatttttattattttcttattatattttttcttcttatatttatagatatctttattttttattatattattatactttattatattttttatataataatttttttattcatataaaatatattatgaatttaatatttattttatagatttattatattattttatttatatttatttttatttatattctatatatttattttataatgtat

SEQ ID NO: 83530 - DNA, 522 bp, Zea mays
  unsure (1)..(522): unsure at all n locations
agtnagagagtgtgtccactgatgaactgctngctatgacgtaccggtccggaattcccgggtcgacccacgcgtncgcgcaaatgatgatgccacaatgtcactgcgacgccgtctcgcagattatgctgcaacagcagttaccattcatgttcaacccaatggccatgacgattccacccatgttcttacagcaaccctttgttggtgctgcattctagatagaaatatttgtgttgtaccgaataatgagttgacatgccatcgcgtgtgactcattattaacaataaaacaagtttccaaaaaaaaaaaaaaaagggcggccgctctagaggatccaagcttacgtacgcgtgcatgcgacgtcatagctcttctatagtgtcacctaaattcaattcactggccgtcgttttacaacgtcgtgactgggaaaaccctggcgttacccaacttaatcgccttgcagcacatccccctttcgccagctggcgtaatagcgaagaggcccgcaccgatcc

SEQ ID NO: 83531 - DNA, 520 bp, Zea mays
  unsure (1)..(520): unsure at all n locations
aggntagcttagcgtgttttcnngacgttgcaatgctgnagcgctgtacgtaccggtccggaattcccgggtcgacccacgcgtccgtgctatgtttggatatgttcaattctgttgcaattttatgtaaaggctgataataccacaagataaaatggaccatccatgacacagagtcagcacagggaactctgcgtcagatcacacagctaagcactcatcattcgaacaagttcaagaaaactagataatattattatattgggtaacgctacttgtccatcctcactcctcatcctcatcgccagcatcgccgccaccgcttgccttcttctgattctttctcttcacccttcctgcggggcctncaccgaatgggcttgacagtgaaaagtcaatgtgcttctcagactccaccctcaccatgaatgatgggcgccggcgggctgtacccctacgcggagtacctgaggcagccgcagtgcagcccgctggcggcggcgccctactacgccgggtg

SEQ ID NO: 83532 - DNA, 516 bp, Zea mays
  unsure (1)..(516): unsure at all n locations
agatgaggctgggtcgacgcctgaggctgcagctgtncggatgcggtacgaattcccgggtcgacgccacgcgtccgggaggaatacgtcactgccatcaaggaggaaatcaacaaggtcgttaagcttcaagaagagcttgacattgatgtgcttgtgcatggcgagcctgagagaaacgatatggttgagtacttcggtgagcagctctccggttttgcgttcactgccaatggctgggtgcagtcttatgggtcaaggtgcgtcaagcctccgatcatctacggtgacgtgagccgtcccaaccccatgaccgttttctggtcgaagacggcacagagcatgacgtctcgcccaatgaaggggatgctgactggcccagtcacaatcctcaactggtcctttgtccggaatgaccagccgagggttgagacttgctacccagatcgtcttgcgatcaagaaggaagtcgaggatcttgatgctggtggtttttaaggtattcaaaatgacgag

SEQ ID NO: 83533 - DNA, 520 bp, Zea mays
agttagatgctgtgtcgatgatggaatcgtcgcaatgccgtaccggtccggaattcccgggtcgacccacgcgtccggaagaggaaggagaaggccaaggttgcctacgagaggaagaagcaattggccaagctgcgtgtcaaggccgagaaggcagccgaggagaagttggggtctcagttggagattcttgcccctatcaagtactgaggagctgtgctttgtcatcagttttggggaacatctagtctttgttttaagtgttcggtaacagtttgtgacagtataatctggtaaaccgtgttatttttctgccactcctatttgaacacattttctagctggtgaatgaactgtttggtcgatcttgttcagatgtctggttcgcattcgcattctgagagatttcatgtctcgtgctaaaaaaaaaaaaaaaaaaagggcggccgctctagaggatccaagcttacgtacgcgtgcatgcgacgtcatagctcttctatagtgtcacctaaattag

SEQ ID NO: 83534 - DNA, 517 bp, Zea mays
ggttaaggaggggtcggatgatgtagctgaagcactgcgaacccgtccggattcccgggtcgacccacgcgtccggttgtaggaaaaaagcccagattgaagatagaatctgatgctattgatgcttcagatgggctggacacgcttgcaaaccttgcaattcttggtgaaggtgaagcgctcccttcgcagccaacaacaaaacatccccgccaccgtcccggctgctcatgcatcgtctgcatccaaccaccaagtgggaagggtccaaagcacaagcagacatgcacctgtaacgtttgtatgacggttcgccgtcgttttaggacactcatgcttcgacgcgagaagaaggtgacaagagattcctctcgcaagaaagagacgggccaatccaatgaggaaggtcacacaacaagccgtgttcggtccgccaggagccaatggcagtgcaaacaggtttcccccaaaaacccattgaaatgcttattcgccccaaaacattggccgttattag

SEQ ID NO: 83535 - DNA, 515 bp, Zea mays
  unsure (1)..(515): unsure at all n locations
ggaggaggaggnttcgtgtactgagactganacngtaggactgcggtaccggtccggaattcccgggtcgacccacgcgtccgcggacgcgtgggcggacgcgtgggcggacgcgtggggttggacaaacccagcagcctcctaccaacaacacatcattggtggtgccctcttttagattgcttattagttgtaattcaataataaagttttttggatgatgtatgtggccaaccagaaataagaagttacatttccagattcaaaaaaaaaaaaaaagggcggccgctctagaggatccaagcttacgtacgcgtgcatgcgacgtcatagctcttctatagtgtcacctaaattcaattcactggccgtcgttttccaacgtcgtgactgggaaaaccttgccgttacccacctaaatcgccttgcagaacatccccttttcgccagctgccgtattaccgaaaaggcccgaaccgatcgcccttcccacagttgcgcagcctgaatggcga

SEQ ID NO: 83536 - DNA, 527 bp, Zea mays
  unsure (1)..(527): unsure at all n locations
ggttggagtagtgtgtgtagttttgaaatgtatgcagtnacgcatgcagtaccggtccggaattcccgggtcgacccacgcgtccgtggacctctgacatctcggaggaccctgctgaagagattagggaggcgcccaagcgggactcgagtgaggggcagtaaagccggctttatgtgcctagaaactagtagctagtgtttgctgctgtcgaatgacactatgcaatgtgatctggaacctggtttcttgggtgcgacgcttgtagccgtgttatgactgtcgtccgtaaaatttgggggctccccgtaagggatgctgcctggcaaggcctcggtgtcccacctcgtctgtggcgtggggcgctggagcccggtctggttgggttgggaagccctttaaactgttgtcacttgcattttaccttttccatcgctgtttattgtgagtggtcctatatcaatggctggtctcagtggtctatacgtaaaaaaaaaaaaaaagggcggccgctctagaggatccan

SEQ ID NO: 83537 - DNA, 328 bp, Zea mays
gggagtgttcggtgagctagctcgagcccgattcgtcgaccacgcgtcgcacctctacctcgcacctcgtttggacttatggcatgagaatgttgaatatcgcttacagagaggactttacgttcggcttatatcattaccagagtatgcggatattttagacctaacaactgcgagatgatgtaggtgactctggtacttcaggatgagtgtcattcatctcgatttggctgatccgatctgaagtcggcgaaggggtctaaaaacgatggacgtatggacaagctctatgaagactgctttggagtgtaagacagacttgaatcga

SEQ ID NO: 83538 - DNA, 526 bp, Zea mays
  unsure (1)..(526): unsure at all n locations
agatcagaggcggtcttanaatgactgaactgatagctatgccgtaccggtccggaattcccgggtcgacccacgcgtncgcggacgcgtgggcggacgcgtgggtagaaagtggaatccagtagcaacaatagagcaacaatggcgaccaagatattttccctccttatgctccttgctctttctgcatgtgttgctaacgcgacaattttccctcaatgctcacaagctcctatagcttcccttcttcccccataccttccatcaatgatagcttcagtatgtgaaaacccagctcttcaaccctataggctccaacaagcaatcgcagcaagcaacatacctttatcacccttgtttcaacaatcgccagccctatctttggtgcagtcattggtacaaaccatcagggcacagcagctgcagcaactcgtgctacctgtgatcaaccaagtagctctggcaaacctttctccctactctcagcaacaacaatttcttccattcaaccaactgtctacattga

SEQ ID NO: 83539 - DNA, 517 bp, Zea mays
agagggctgtgttctgagacgaaactctaggactgccgtaccggtccggaattcccgggtcgacccacgcgtccgcccacgcgtccgaccaactagcaacatagaaagcacaatagtgtaccaacaatggcagccaaaatattttgcctccttatgctccttggtctttctgcaagtgctgctacggcgaccattttcccgcaatgctcgcaagctcctatagcttcccttcttcccccgtacctctcaccagcggtgtcttcggtatgtgaaaacccaattcttcaaccctacaggatccaacaggcaatcacagctggcatcttacctttatcacccttgttcctccaacaatcatcagccctattacatcagttacctttggtgcatttattggcacaaaacatcagggcacaacaactacaacaacttgtgctagcaaaccttgctgcctactctcagcaacagcagtttcttccattcaaccaactagctgcattgaactctggttcttatt

SEQ ID NO: 83540 - DNA, 507 bp, Zea mays
aggaagttagccgtgttcgaggatgacgactcaggtaatacgtaccgctccggaattcccgggtcgacccacgcgtccgggttcctgattctacatatgatatgattggaggccttgaccagcaaattaaagagatcaaagaggtcattgagcttccaatcaaacatccggaactatttgagagccttggaattgcccaaccaaagggtgtcctcctttatggacctccaggcacaggaaagacattgctggcacgtgcggttgctcatcacactgactgcaccttcatcagggtgtctggttctgaattggttcagaagtatattggtgaaggttcccggatggttcgggaactatttgttatggccagggaacatgcgccatgcatcatgttcatggaagaaagtgactctatcggatctgctagaatggagtctggaactggcaacggtgatagtgaagtgcatcgtacaatgcttgaacttctaaaccagcttgaggggtttg

SEQ ID NO: 83541 - DNA, 536 bp, Zea mays
tggttttattagggtcgtgtatacgaacacagtacgtcattagtactggcgtagcaattccgggttcgaagcaacgccatcacgcgtacgcgtaccgaccacgcgtccggaatgtaagatgctgaagagaaaattgaagaggacatgtcagacagactggcacgagaaagggctgaggaacaagctaggcatgaggcattgctcagaaagagatccaaagtgttgcataggagtctgcctaggccaccggctgtttcagtagagattatccggcaatctcttattagaagttgtgatagcatattcagaagcacctttatgccttcttcataattattacaagctgattttacttatatttattgaacttctttatcttctaatatttgtttattatacttattttcaattattatgtatattttaattgtgaaatgtatatatcctattttagcatatatttatatctggctttttgttgagatttagtcttcttttttaactgtttacatttgtttaattatttttttactttt

SEQ ID NO: 83542 - DNA, 524 bp, Zea mays
ggtgagagggtgtgtgttttgagaccaggctgtaggcacgcggtaccggtccggaattcccgggtcgacccacgcgtccgaactctgcttcttatttgcaacaacaacaactaccattcagccagctacctgctgcctacccccagcaatttcttccattcaaccaactggcagcattgaactctcctgcttatttacagcagcaacaactactaccattcagccagctagctggtgtgagccctgctaccttcttgatacaaccacagttgttgccgttctaccagcacgctgcgcctaacgctggcaccctcttacaactgcaacaattgctgccattcaaccaacttgctttgacaaacccagcagcgttctaccaacaacccatcattggtggtgccctcttttagatttcttatgagttatagttcaataataaagttttttgtctgaaaaaaaaaaaaaaaaaaaaaaaaaaaaaaaaaaaaaaaaaaaaaaaaaaaaaaaaaaaaaaagagaaaaca

SEQ ID NO: 83543 - DNA, 524 bp, Zea mays
  unsure (1)..(524): unsure at all n locations
gggggagaggtctcagtgctgggacgnacgctgtaggactgcggtaccggtccggaattcccgggtcgacccacgcgtccgggcagccaaaatattttgcttccttatgctccttggtctttctgcaagtgttgctaccgcaaccattttcccacaatgctcacaagctcctatagcttcccttcttcccccatacctctcaccagcggtgtcttcaatgtgtgaaaacccaattgttcaaccctacaggatccaacaggcaatcgcaacaggcatcttaccattatcacccttgttcctccaacaaccgtcagccctattacagcagttacctttggtccatttggtggcacaaaacatcagggcacaacaactacaacaacttgtgctagcaaaccttgctgcatactctcagcaacatcagtttcttccattcaaccaactggctgcattgaactctgctgcttatttgcaacaacaattaccattcagccagctagttgctgcctacccccagcaatttn

SEQ ID NO: 83544 - DNA, 505 bp, Zea mays
  unsure (1)..(505): unsure at all n locations
aggcnagagccgtgtccgacgctgcagacttagncagtacgtaccgcgtcgnattccgggtcgaccaccgtcgaacaatctgggacattaaccctcaaaccattgcaacgcaacaacaacaacaacagtttctgccatcactgagccacctagccgtggtgaaccctgtcacctacttgcaacagcagctgcttgcatccaacccacttgctctggcgaacgtagctgcataccagcaacaacaacagctgcaacagtttatgccagtgctcagtcaactagccatggtgaaccctgccgtctacctacaactactttcatctagcccgctcgcggtgggcaaatgcacctacgtacctacaacaacagttgctgcaacaaattgtaccagctttgactcaactagctgtggcaaaccctgctggctacttacaacagttgcttccattcaaacaactggctgtgtcaaaatctggtgggtacctacaacagcgaccacaggtac

SEQ ID NO: 83545 - DNA, 500 bp, Zea mays
  unsure (1)..(500): unsure at all n locations
aggaaggagctgtgtcngagaatgaaactgaggcatccggtaccgcgttcggattcccggtcgaccaacgcgtccgctttggtgcatttgttggcacaaaacatcagggcacaacaactacaacaactcgtgctagcaaaccttgctgcctactctcagcaacaacagtttctgccattcaaccaactagctgcattgaactctgctgcttatttgcaacaacaactagtactaccattcagccagccagctgctgcctaccctcagcaattacttccattcaaccaactagcagcattgaactctcctgactatgtacagcagcagcaactactaccattcagccagctagctgctgtgagcactactgccttcttgacacagcaacaattgttgtcgttctacctgcacgctgcgcctaacgttggcaccctcttacaactgcaacaattgctgccattcaaccaacttgctttgacaaacccagcagcgttttacca

SEQ ID NO: 83546 - DNA, 530 bp, Zea mays
  unsure (1)..(530): unsure at all n locations
agggnaggaggcgtcgtgtcagattccatgaatcgatagcaatgacgtaccggtccggaattcccgggtcgacccacgcgtccgtggaaagctaaggtggcaccggtgtttccaagaatactagggcatgaggcgtacggggtagtggagagcgtgggggagcacgtggagggcttcgcggcgggggacaccgtggtgccgacgttcctggggcagtgcgagcgctgcgccagctgcgcgtcggagcacagcaacgtgtgcgacgcggtgccgttcgtcatcggccccgggatgccgcgcgacggcaccacccggtttcgggacgcgcgggggagcccgctgcacgacctcctcgtcgtcttcagcttcagcgagtacaccgtcgtggacgtgaaccaggtggtcaaggtcgaccccgtcgtgcctgccaaactcgcctgcctcctcagctgcggcgccggcaccggggtatgagccacgtggaggtctgccaaggtggagccaggatccactgttgcaatctttggccg

SEQ ID NO: 83547 - DNA, 523 bp, Zea mays
aggtgagagggctgtgtcctgagacggacgctgtagcgactgcggtaccggtccggaattcccgggtcgacccacgcgtccgggcagccacaagaaaccacccccttccggcacacgggctcgaccacctgactgcatgaccgtgcctgtctgtgttctagggacaagcagagcagagagatccaggagcgagcagaggcggcgagaagaggatgagcaccacaacggcgtcgtcgctgaaccccaacgcgccgctcttcatgccggcggcgtaccggcaggtggaggacttctcgcccgagtggtgggagctcgtcaacaccaccggctggttccgggaccactgcttccggcagcgccagctccacgaggccgtctgcgacgacgtcgccgcgctcctccccgacgacctcctcgacaccaacgacctcttctacgcgcccgacgtcgttcaccaccaaccagcgacggcgctgctgcccgggtacgatgtactcgacgtgctcgcggcgctgagccctaa

SEQ ID NO: 83548 - DNA, 515 bp, Zea mays
aggatagagggtgtgtccgaggctgatgactcagcgcttacgtaccggtccggaattcccgggtcgacccacgcgtccgcccacgcgtccgcccacgcgtccgcggacgcgtgggggaccaactagcaacatagaaagcacaatagtgtaccaacaatggcagccaaaatattttgcctccttatgctccttggtctttctgcaagtgctgctacggcgaccattttcccgcaatgctcacaagctcctatagcttcccttcttcccccgtacctctcaccagtgttgtcttcagtatgtgaaaacccaattcttcaaccctacaggatccaacatgcaattgcatcaggcatcttacctttatcacccttgttccttcaacaatcatcagccctattacagcagttacctttggtgcatttattggcacaaaacatcagggcacaacaactcgtgctagcaaaccttgctgcctactctcagcaacaacagttacctttggtgcatttgttggc

SEQ ID NO: 83549 - DNA, 497 bp, Zea mays
  unsure (1)..(497): unsure at all n locations
cggtaggtagctgtngtctcccgctggagccgtgagacgtcgtaccgtccggattcccggtcgacccacgcgtccgcccacgcgtccgacgcaaattgcaccatgaaatccatcgagaggccgtcgacaggggaattaatggcgtcgtcgtctagcagcagccaccgtcgcctcatcctcgcagccgccgtcctgctctccgtgctcgcggctgccagcgccagcgccgggaccttctgcgtgccggggtgggccatcccgcacaacccgcttccgagctgccgctggtacgtgaccagccggacctgcggcatcgggccgcgcctcccgtggccggagctgaagaggagatgctgccgggagctggcggacatcccggcgtactgccggtgcacggcgctgagcatcctcatggacggcgcgatcccgccgggcccggacgcgcagctggagggccgtctagaggacctgccgggctgcccgcgggaggtgcagag

SEQ ID NO: 83550 - DNA, 519 bp, Zea mays
  unsure (1)..(519): unsure at all n locations
aggctcgagggcgtcgtgtcngaccgctgtaagctgnacgcatgacgtaccggtccggaattcccgggtcgacccacgcgtccggagaaccctncgagcatcctagtgactcccatggctccggccatgtcggcgcagttcacaagaataaccttcagcaacctgtttgtccgtcgggctggcccatgcagcacggagctgaccgtggagggaaggccatccgaccagctgggcaggagaaacctcactgacagccccgtatttgacggccgtggccctgacgccagcctcgtggctcgcgtacagggagtcgctacccagatgggcgacgtgcgccagttgtacaccgtcgtgttccaggagaggccgctcaagggctccacgctcgtcaccgaaggcgcgatgacagaagggtcagacgagtgggcgatctacggtggaactggagtgttcgcgatggcgagaggcgtcataaggagaacgtttcttgccgacacgagcggcgggaactccgacgag

SEQ ID NO: 83551 - DNA, 497 bp, Zea mays
  unsure (1)..(497): unsure at all n locations
aggnagttagctgtgtctcgcaactgagccattcagcctccggacacggcgcgcatttccgggtcgacccacgcgtccggcatgtacacgggccagttcgtctactgcggtcgccgcgccaccctctccatcggcaacgtgctgcccctccgcgggatccctgaaggtgccgtcgtctgcaacgtctagcaccacgtctgtgaccgcggagacttcgccagcgcctgtgtggactacgccattgagatcagccaacaacggtgccaacgtgacatcgaggattaaaatgctctctggcaccaaaaagattgtacccatcaggtgccgtgctatcattgggcatgccgctggaggacgcaagacttataatcctgtggtcaatgttggtaacgcgtgctaaacagtccgtttatgatggaactgctcgcctgatgatgaaggtttataccttaagcctaaacagtgttcctaataaggactgatttcttctatgcaac

SEQ ID NO: 83552 - DNA, 522 bp, Zea mays
ggtagaggctgtgtcagctgatgcagtcgtcgcgatgacgtaccggtccggaattcccgggtcgacccacgcgtccgcgaccagagaggagtgggcgagctggttaagcttgctacagagaggggccgcaaagctaggcctaacttgaaggtgggcatttgtggagaacatggtggagagccttcatcggttgctttcttcgccaagactgggctggattacgtttcttgctcccctttcagggtcccgatcgctaggctagctgcagctcaggtgcttgtctgagggtgcctctgctcgttggcagccggatcgcctgctgttggtgcatctggtgattaataatactactatgacagagccatgctctgtgaagagtattagtagcagcgctcataaaagctacaggtccgtctcttttctcagctatgtaaaacttccaaactgttcatgcttaaaactgagggttttcttaaaaaaaaaataaaattgacttaaatgtataaataattgtttatttaa

SEQ ID NO: 83553 - DNA, 526 bp, Zea mays
  unsure (1)..(526): unsure at all n locations
agttagaggcgggagttcgggtgctgcaactganngctactggcgataccggttcggaattcccgggtcgacccacgcgtacgcggacgcgtgggctgaactgtccgtcggcgtctaggcggccccgcgcgtcggacatccactcgctcctgaggtcgatgagcctctggccggcgtcgttgacggtgccgtcggcgttgacgagcgcggcgtcctgcctacacatgtggccctgcatgaacccccagagcacgacgccctgcaccgccgggtgcgcgaacgcctcgcgcaggaccacctctaggtcgtcggcgcggagcgcgtcatcgggctcgcagacgtcgacctccgtgaaccagacgggcaagccggtggcggcgtagaccgtgtcgagcgcgtcgcagatgacctcggcgacggggtgggtgacgtggccctgcatcccgacgccgtcgacccgggcgccgtcccgctgcagggctcggacgaggtcgacgtaccgctgcggcgtggtggacgggacgcc

SEQ ID NO: 83554 - DNA, 520 bp, Zea mays
  unsure (1)..(520): unsure at all n locations
agcaggagcggggtcgnatgctgatatcgtcgccatgacgtaccggtccggaattcccgggtcgacccacgcgtccgctgcctcctctacgagcttctccgcaacaagctcgacgaggcccgcgtccgcgagatcgtcgccgacgctgtcgacatcgagcgcgagttcgtctgcgacgccctccctgtcgcgctcgtcggcatgaacggggatctcatgagccagtacattgaattcgtggccgaccgcctgctcatggcgctcgggtgcaagaagatgtacaacgtgaccaatcccttcgactggatggagctcatctcgctgatggggaagaccaacttcttcgagaagcgcgtgggtgactaccagaaggcatccgtcatgaacagcctcaacggcggcggcgctgccgaccacgtcttcagcatcgatgaggacttctgagttggcacgcgtaatctatggtgtcggtttaatgttagtatttgcttgtagtttggaagtgtgatacatgtactct

SEQ ID NO: 83555 - DNA, 519 bp, Zea mays
  unsure (1)..(519): unsure at all n locations
aggtaagagactcgtgttcnaacgctgaatgcctcagcgctgacgtaccggtccggaattcccgggtcgacccacgcgtccgccaacaagcaacatagaaagtggaatacagtagcaacaatagagcaacaatggcggccaagatattttccatccttatgctccttgctctttctgcatgtgttgctaacgcgaccatttttcctcaatactcacaagctcctatagctgcccttcttcccccataccttccatcaatgaccgcttcagtatgtgaaaacccagcccttcaaccctacaggctccaacaagcaatcgcaacaagcaacttacctttatcacccctgttctttcaacaatcgccagccctatctttggtgcaatcattggtacaaaccatcagggcacaacagctgcagcaactcgtgctaccagtgatcagccaagtagctctggcaaaacctttctcctactctcagcaacaacaatttcttccattcaaccaactgtctacactga

SEQ ID NO: 83556 - DNA, 510 bp, Zea mays
  unsure (1)..(510): unsure at all n locations
aggtagggagcgggggtgtgtgtactgaaactgnatgcggtagcgacggcgtggagttcccgggttgacgcacgcgtccggggtcacttgacgcatgggtctctcctatgatggtcagaggcggaacatgctgtccttggtttcagacttggtgggaaacagatgatttggtggtgcaacaagatggatgctactacacccaagtattcaaaggcccgttatgatgagattgtgaaggaagtctcttcctacctgaagaaggttggatacaaccctgataagatccacttcgttccaatctctggttttgaaggtgacaacatgattgagaggtccaccaaccttgactggtacaagggcccaaccctacttgaggctctggacttgatcaatgagccaaagaggccttcagacaagcccctgcgtctccccctttaggaagtgtacaagattggtggtattggaactgtccctgttggacgtgttgagacctggggcataaagcctggg

SEQ ID NO: 83557 - DNA, 523 bp, Zea mays
gtgagaggagggcgtgtgtactgggacggacgcgtcgcgactgcggtaccggtccggaattccgggtcgacccacgcgtccgacgcgatcaaggcgcagctggagagggcgtgcccgggcgtggtgtcgtgcgccgacatcgtggcgctggcggcgcgcgacgccgtgtcgtaccagttcaaggcgtcgctgtggcaggtggagacggggcggcgcgacggcacggtgtcgctggcgtccaacacgggggcgctgccgtcgcccttcgcgggcttcgcgggcctgctgcagagcttctcggaccgggggctgaacctgacggacctcgtggcgctgtcgggggcgcacaccatcggcgtggcaagctgctccagcgtcaccccgcgcctgtaccaggggaacgccagcagcgtggacccgctgctggactcggcctacgcgcggacgctcatgtcgtcgtgccccaacccgtcgccggcgttggccaccgtggcgcttgacggaagcacgccgtttcggtttg

SEQ ID NO: 83558 - DNA, 517 bp, Zea mays
  unsure (1)..(517): unsure at all n locations
agaaggagaggggtcgtggctgatgcttangcgtacgactgccgtaccggtccggattcccgggtcgacccacgcgtccgcccacgcgtccggaaagcacaatagtgtaccaacaatggtagccaaaatattttgcctccttatgctccttggtctttctgcaagtgctgctacgacgaccattttcccgcaatgctcacaagctcctatagcttctcttcttcccccatacctctcaccagcgttgtcttcagtatgtgaaaacccaattcttcaaccctacaggatccaacaggcaatcacagcaggcatcttacctttatcacccttgttcctccaacaatcatcagccctattacatcaattacctttggtgcatttattggcacaaaacatcagggcacaacaactacaacaactcgtgctagcaaaccttgctgcctacgctcagcaacagcagttacctttggtgcaattgttggcacaaaacatcagggcacaacaactacaacaactg

SEQ ID NO: 83559 - DNA, 523 bp, Zea mays
  unsure (1)..(523): unsure at all n locations
gggagagagggctgtgtactgagcggaggctgtaggcactgcggtaccggtccggaattcccgggtcgacccacgcgtccgcggacgcgtgggttagaagaggtgaaacaccccctcgaggtacacagcacccagagcgaaaaaactgtggccctgccggggggaacaccaccttgcacggagagccgaaacctcctccatgcagggatctggatgcctgctaggtttgcttcggagcattacgagcacgcgcataacttggctcgtactgtaaggtgtgcaaactgcacacagcggaggctgtgttatttgtattctgaagctttcttgtgtttcgtcaagaaagcttctctaacttttatcctgcactatcagataaacggtaaattgatagagaataagatgttttcgagctcatgtttagtggcaaacgctntatatttttggcaagctgtgaaggagctgaaccagtgacaactcgaagaattcattntgttgtattaagtcttcttgttagcccatt

SEQ ID NO: 83560 - DNA, 513 bp, Zea mays
agaggagagtatctgtgttagaagatgcagctgtcggactgcggtaccggtccggaattcccgggtcgacccacgcgtccgcggacgcgtgggccagatttcagcttctatgaccgttttgctccaatttatacacaagctcgacacctgccaccttcaaaggttcttgatgctgatgtgacagacagtgttattggtgaaggatgtgttattaaaaactgcaagataaaccattctgtagttggactccgatcttgcatatctgaaggtgctatcatagaggacagtttactaatgggtgcggactactatgagacagaagctgattaaaaacttcttgccgaaaaaggtggcattcctattggtattgggaaaaattcatgcatcaagaaagcaatcattgacaagaatgcttcaattggaaacaatgttaagatactcaatgctgacaattgttaaaaagctggaatggaaacagtacggtacttcaatcaaggttgaaatggcacaatg

SEQ ID NO: 83561 - DNA, 509 bp, Zea mays
  unsure (1)..(509): unsure at all n locations
aggtagtagtgtgtgtctgtggactgagcatgacgcagtcgtaccgctccggaattccggtcgacccacgcgtccgcagaaacacaccaagcgaagcgcactagcaacgacctaacaacaatggctaccaagatattagccctccttgcgcttcttgccctttttgtgagcgcaacaaatgcgttcattattccacaatgctcacttgctcctagtgccattattccacagttcctcccaccagttacttcaatgggcttcgaacacctagctgtgcaagccaacatgcaacaacaagcgcttgcngcgagcgtcttacaacaaccaattgcccaattgcaacaacaatncttgccacatctaacaatacaagccataacaacgcaacagcaacaacagtttcctaccagaactgaaccaacctagccatggggaaccttgccgcttacttgcaagagcaactggttgcatttcacccaatttgttttggcaaccgtagttgcaaaccg

SEQ ID NO: 83562 - DNA, 519 bp, Zea mays
  unsure (1)..(519): unsure at all n locations
agttagagggtgtgtcnnatcctgaatcgatgcatgccgtaccgtccggattcccggtcgcccacgcgtccgcccacgcgtccggcggcggctgcggctgccagccaccgccgccggttcatctaccggcgccggtgcatctgccacctccggttcacctgccacctcctgtgcatctcccaccgccggtccacctgccgccgccggtccacctgccaccgccggtccatgtgccgccgccggttcatctgccgccgccaccatgccactaccctactcaaccgccccggcctcagcctcatccccagccacacccatgcccgtgccaacagccgcatccaagcccgtgccagctgcagggaacctgcggcgttggcagcaccccgatcctgggccagtgcgtcgagttcctgaggcatcagtgcagcccgacggcgacgccctactgctcgcctcagtgccagtcgttgcggcagcagtgttgccagcagctcaggcaggtggagccgcagcaccggt

SEQ ID NO: 83563 - DNA, 505 bp, Zea mays
  unsure (1)..(505): unsure at all n locations
agagagctctgtcgacgtgatactgagcatncnannncnnnnnntnnnnnnnnnnnnnnnnnnnnnnnnnnnnncacatagaaagcacaatagtgtaccaacaatggcagccaaaatattgtgcttccttatgctccttggtctttctgcaagtgttgctaccgcaaccattttcccacaatgctcacaagctcctatagcttcccttcttcccccatacctctcaccagcggtgtcttcaatgtgtgaaaacccaattgttcaaccctacaggatccaacaggcaatcgcaacaggcatcttaccattatcacccttgttcctccaacaaccgtcagccctattacagcagttacctttggtccatttggtggcacacaacatcagggcacaacaactaccacaacttgtgctagcaaaccttgctgcatactctcagcaccatcagtttcttccattcaaccaactggctgcatggaactctgctgctaatttgcaacaccaa

SEQ ID NO: 83564 - DNA, 525 bp, Zea mays
  unsure (1)..(525): unsure at all n locations
agacagagagtgtgtgtgtgctgggacgnaaccgtcgccactgcggtaccggtccggaattcccgggtcgactcacgcgtccgctccgctacaagctcctcggaggccttgccgtccggagggcctgctatggtgttcttcgctttgttatggagagtggtgccaagggttgtgaggtcattgtgagtggaaagctcaaggctcaaagagccaagtccatgaagttcaaggatggctacatgatctcatctggtcagccagtgaatgagtacatcgactcagctgtgagacacgtcctcctcagacagggtgttctgggtatcaaggtgaagatcatgcttgactgggacccgaagggcaaggttggcccgatcacccctcttccggacctggtgaccatccataccccgaaggacgaggacgagctgcgccctcctgtcttggcagctgaggtctaaggtcccaacagcgtcctcgaaatggcagtttgatctggtcctagctaggtttgtatcttatgataag

SEQ ID NO: 83565 - DNA, 519 bp, Zea mays
ggtgagtcggggtcgacgcctagaaaactgaactcgtccgaatgcggtaccggtccggaattcgaggcacgagccacgcgtccgcggacgcgtgggcggacgcgtgggtgctgggcaagaaaagttcggtggccttagggatggctactacattcatggtcagtgtgccatcattatgtttgatgtcacttctaggctgacatacaagaatgttccgacatggcacagggacctgtgcagggtctgtgagaacatccccattgttctttgtggtaacaaggttgatgtcaagaacaggcaagtcaaagccaagcaagttacattccaccggaagaagaacttggcgtactattagaattctggccaaaaccatttccacttttaaaaaccctttccttaacctgctttggaacttggaagggaacagaaaccttactttggttaaacctttgcttttaaaccaccacaaaagccgaatggtattggcctttaacaacagccttgaacctaacttttaat

SEQ ID NO: 83566 - DNA, 524 bp, Zea mays
aggtagagagtgtgtgggttctgatacgaaagctgtagcgatgcggtaccggtccggaattcccgggtcgacccacgcgtccgcggacgcgtgggcggacgcgtgggtgctgggcaagaaaagttcggtggccttagggatggctactacattcatggtcagtgtgccatcattatgtttgatgtcacttctaggctgacatacaagaatgttccgacatggcacagggacctgtgcagggtctgtgagaacatccccattgttctttgtggtaacaaggttgatgtcaagaacaggcaagtcaaggccaagcaagttacattccaccggaagaagaacttgcagtactatgagatttctgccaagagcaattacaactttgagatgcccttcctttacctcgctaggaagctggcatgggatcagaaccttcactttgttgaaactgttgctctgaaaccaccaaaagtgcagattgatatggacctgcatcagatccatgaaacttgacttgcaccttgccg

SEQ ID NO: 83567 - DNA, 541 bp, Zea mays
cgaggtctggagtatcgagtcgtggtgtgttctgcacatgcatctcgtcagtcatgaccgctctcggttcagattcccgggccgacccacgcgtacgatccatatcagcatatcggcaattctcttagaggatcgtcgaacagaacaccatgaagggggacattgatctcgtcgtgtgcctggctctgtcagctgccagcgcctctgcaatgcagatgccctgcccctgcgcgttgcttcagggctagtacggcgctggcgccggcctgacgacgatgatgggcgccggcggactgcacccctacgctgagtacctgaggcagccttaatgcagcccgctagctgcgacgccctactacgccttgtgtgggcagactagcgccataatccaaacccttcggcaacaaggctgcctgctacacatgatgatgatttgacggccagttcgtctagcaataacgtctgaatcaaatatgcaattttgagccttcctatattcgcaataatagcctgtaccaatccatcttttatgcaccaacag

SEQ ID NO: 83568 - DNA, 522 bp, Zea mays
  unsure (1)..(522): unsure at all n locations
cgtnagtntcgtggagtcatagagatcgaaagctgtacgcctgccgtaccggtccggaattcccgggtcgacccacgcgtccgcttgagaaagacgaatcattgaagtctaaagatgaagagtttaaagatatgaaggataaggtcctacgcagctatgctgagatggagaatgtccttgccagaacaaagcgtgagtcagagaacaccaagaagtatgccatacagagcttctccaagagcttgttagatgttgcagacaatttgtctcgggcatcatctgttgtcaaggcaagtttctcaaagatagattcatctaacgattctgatgaagctgtaacactactgaaaaccctactagagggtgttgagatgactgagaagcaacttggagaggtcttcaagaagtttggagttgaaaagtttgatcctttgaatgagaagtttgatccaaataggcactatgccattttccaaattcctgatccttcaaaaccatcaggaactgttgcttgctgtgggn

SEQ ID NO: 83569 - DNA, 509 bp, Zea mays
ggttataagggggattaaatactgaatgcagtacgctcgcacagtaccggtccggaattcccgggtcgacccacgcgtccgccaagaagacgtactgcaagaacaaagagtgcaagaagcacacactccacaaggtgactcattataagaagggcaaggatagcctgtctgcccagggaaagcgcctttatgaccgcatgcagtcaggatatggtggtcagacctagcctgtcttccacaagatggccatgtccaccaagaactttgttctgaagctcctattccagagctgctagcaatatttacagcatgccacctacagatgcatattttcctcttatgctggttacatctaaggcaggcacgcatcttgactacattaagatgcttactatgatgctgtctcaatttacatatgttgtttactttatttatcttgaacagtctgtgactccttgttacttactttatgcttgtggttttattttgcaaaatgtgaaaaactttag

SEQ ID NO: 83570 - DNA, 528 bp, Zea mays
  unsure (1)..(528): unsure at all n locations
gatatagagtagtgtgtctnatattgaactgattctttgcagattcggtccggaattcccgggtcgacccacgcgtccgggctttcacaaagtatgctctcaaatatgaaaatgatgctggcaagaaggaaattcagctgcagcttgagaagatgaagaaatatgcttctgttatccgtgtcattgctcatacccagattaggaagatgaagggtttgaagcagaagaaggctcacctgatggagattcaggtcaatggtggtaccattgctgacaaggtggactatggctacaaattctttgagaaagaggtccctgttgatgctggcttccagaatgatgggttgattgacatcataggtgtgcctattgggaaagggtattgatggtgttgttacttttttggatgttttattctgtctttgtattctatgtattcttttgtatgattttttatataatttagtttattatattgtttctattaaatttctttatctatgttccttatatatatgtttgtatgat

SEQ ID NO: 83571 - DNA, 529 bp, Zea mays
  unsure (1)..(529): unsure at all n locations
tgaggagtgagtgcgtgtgtctttgtatgcataccgtnggcactgccgtaccggtccggaattcccgggtcgacccacgcgttcgtccacgcgttcgtacacgcgtcctttgtttcgtgggcaactagcaacatagaaagcacggtagtgtaccaacaatggcagccaaaatatattgcttccttatgctccttggtctttctgcaagtgttgctacctctaccatttttccactaatgctcacatgctcctatagcttcccttcttccttcatacttcttaccagcggtgtcttcaatgtgtgaaaacccatttgttcaaccttacaggatccaacatgctatcgctacaggcttcttaccattatcacccttgttccttccaacatccgtcattccttttacctcagttacctttggtccatttgggtgaacaaatatttattgatttcaattcttcctcttacttaggctatctaacctagttgtatactttgagttacatgataatcttccattctccaatgtgt

SEQ ID NO: 83572 - DNA, 522 bp, Zea mays
gggtagcagtgagtgtgtcttgaactgcagctgtacgcctgcagtaccggtccggaattcccgggtcgacccacgcgtccgccagctagctgcagcaaaccgtgcttccttcttgacacagcaacagttgctgcctttctaccagcagtttgcggctaaccccgcaaccctcttacaactacaacaattgttgccctttgtccaacttgctttgacagacccagcggcctcctaccaacaacacatcattggtggtgccctcttttagattgcttattagttgtaattcaataataaagttttttggatgatgtatgtggccaaccagaaataagaagttacatttccagaaaaaaaaaaaaaaaaaaaaaaaaaaaaaaaaagggcggccgctctagaggatccaagcttacgtacgcgtgcatgcgacgtcatagctcttctatagtgtcacctaaattcaattcactggccgtcgttttacaacgtcgtgactgggaaaaccctggcgttacccaactg

SEQ ID NO: 83573 - DNA, 523 bp, Zea mays
agtagtgtgtggggtgttagctcaggatgctgtacgcctgcacgtaccggtccggaattcccgggtcgacccacgcgtccgccagctagctgcagcaaaccgtgcttccttcttgacacagcaacagttgctgcctttctaccagcagtttgcggctaaccccgcaaccctcttacaactacaacaattgttgccctttgtccaacttgctttgacagacccagcggcctcctaccaacaacacatcattggtggtgccctcttttagattgcttattagttgtaattcaataataaagttttttggatgatgtatgtggccaaccagaaataagaagttacatttccagaaaaataattctcattaatgtcattattaaaaagggcggccgttttaaaggatccaagcttacgtacgcttgcatgcgacttcatagtctttctataggggcacctaaattcaattcactggcctgttttttaacatcgttatgactgggtaaaaccctggtcgtaccctaat

SEQ ID NO: 83574 - DNA, 530 bp, Zea mays
  unsure (1)..(530): unsure at all n locations
tgagagagctaggtntcgtcgtgtcatagaatagtaagctgtacgcctgcagtaccggtccggaattcccgggtcgacccacgcgtccgcccacgcgtccgcccacgcgtccgcggacgcgtgggcaactagcaacatagaaagcacaatagtgtaccaacaatggcagccaaaatattttgcttccttatgctccttggtctttctgcaagtgttgctaccgcaaccattttcccacaatgctcacaagctcctatagcttcccttcttcccccatacctctcaccagcggtgtcttcaatgtgtgaaaacccaattgttcaaccctacaggatccaacaggcaatcgcaacaggcatcttaccattatcacccttgttcctccaacaaccgtcagccctattacagcagttacctttggtccatttggtggcacaaaacatcagggcacaacaactacaacaacttgtgctagcaaaccttgctgcatactctcagcaacatcagtttcttccattcaaccaactggg

SEQ ID NO: 83575 - DNA, 624 bp, Zea mays
aggagtgagtcgagtattgtatctgatacgtgcagtatcgtccgtattcccgggtcgacccacgcgtccgcccacgcgtccgcccacgcgtccgggcggcctgtaccgaggtctcggccctagctgcatcaagctcatgcccgccgccggcatctccttcatgtgctacgaggcgtgcaagatgattctcgtcgactaggatgatgatgatggatagttcgtagtatttattatttttggtgtcatattttatatggtagtattttatactgtcatgatttattttattttattatgattgtagttttattttatgttttatattatatgttttattatggttattatgatttctcattatatttattcatgaatatatgtttagtgcttttattagattatcgttatttatttatattgttttttatttataattttgtatatgttatgatatgtgataggtagttatttattattaatgttattatggttattttttattgacttgaggttatatatgatgttaggtgattagagtttcttgttataatgttatattattatatatgtgttttctactatggagctgatggttgtgttgaatatgtggagtgtttctgtggt

SEQ ID NO: 83576 - DNA, 539 bp, Zea mays
gtggagttgtgggttggttatcagcatctgtgcaatgccgtaccggtctcggaattcccgggtcgacccacgcgtccgcccacgcgtccgcggacgcgtgggaaagcggcagtgcgtagagaggatcgtcgaacagaacagcatgaagatggtcatcgttctcgtcgtgtgcctggctctgtcagctgccagcgcctctgcaatgcagatgccctgcccctgcgcggggctgcagggcttgtacggcgctggctccggcctgacgactatgatggtcgccttattttagtacttcttttttgttttctctttgttattttattttatttatatcgatatttgtgtttttattattgtttctttttgtgttatatttctttgtcttttgtttatattatttttttttgttattttttttatttttttatgttttgtttattatatttgtattatattatttttatttttttttgattttttgattggtagattttattattattatatttgtattttttatttttttttatgtttaattt

SEQ ID NO: 83577 - DNA, 538 bp, Zea mays
agatgtttaagtgtagtggtgtgacgtctataggtacgctagtacgatagcacgtaccggtctcgtattcccgggtcgacccacgcgtccgtaatattttcagcattcaaaaacacaccttgctattcgcactagcaacgacctaacaccaatggctaccaagtatattagctcttcttgctctgattgcccttttagtgagctcaacagatgcattcattattttatagtgaatacttgtttacattgcctgtttaccacaatatattcttgagattaataacatagttttgcacaatgatgccctactgttgcttacattgtgtttcttgctcttattgatgattcttcaatgatagctgattccagttatattgaggttaacaagcttttgattatttctttttttaaattgcttcaacatattgatttgaacatgcttattatagtaagatccttgttcaatcaagatttcattacttttagcattacatattgatgattttattaatggttggtttttatgaccatgttattt

SEQ ID NO: 83578 - DNA, 490 bp, Zea mays
tgataagtgggtgtgtgttcgcactgattcgtgcacgacgtccggattcccggtcgacccacgcgtccggaagctgcactcacttgaaggtggttccaataagttgtcatatgtcttatcaggggctccaaactcatgatgtataattttacagtgtaccatctgctatttcatgatctttgctactaaaacaggatgatccatttcctcaagttcttcaactggctgtattttaaaagtataaaagctttgtggctttcgcattgaaagtgatgtgtatttgatggtttaaggatgtcctaatcttacaaactgttcgatagagacctgtataatcttagctgttattactttatctccatgtcttttgtcgtcttaaatttctattgtgttttcatttttatattttaattatttatttgtatgtttcttttttattcttattttatttacttttatttatttgatttatatgttttttttatattat

SEQ ID NO: 83579 - DNA, 526 bp, Zea mays
agtgtatagttggtgtgtaagtatcagaacgctatacgctagcacgtaccggtccggaattcccgggtcgacccacgcgtccgctgccatccgtgctgatccttctgtggtcaagtcaaccaagcagccaccaaaggagcacaagaggtacaaccccaagaaactgacatacgagcagaggaaggccagtctcattgaaaggctcaaccaactcaactcctcgggcggcgcatatgacgacgacgaggatgacgagtaaagtttcgtcccatcgaagtagtgctatcttatgcggcgatcagtattcgtgctatggcatttatcgctacctgtagtctttcaacatgcatttttggtatattttagtttgtctttcataattttttttgctatttttttattttttattatatgctgaatttaatttttttatatttattagtctttttaattcttgttttatatgttattttttttttatgtattatattatatgttttattatattatttattttttttcctcg

SEQ ID NO: 83580 - DNA, 520 bp, Zea mays
  unsure (1)..(520): unsure at all n locations
ggtagtttcgtggggtcattgcataggatagcgtnacgcctgcagtaccggtccggaattcccgggtcgacccacgcgtccgccgcgacaaggtgcagcagttcatgaccattaccggcgccagtgagaaggttgcccttcaggcactgaaagctagtgattggcacttggaaggagcttttgacttcttctatagccaacctcaggtttctgtggtcaatactcggcatcttgaagatattttcaacagatataaagaacctgatgctgatatgataatggtggaaggaatatctcaattttgcaatgatctgcaggttgatcctcaggatattgtcatgcttgtcatatcatggcacatgaaagccgccacaatgtgtgaatttactcgtcaggaattcattggtggactgcagtcaattggggtagattcaatcgagaagtttcgtggaaaattaccatcattacgagctgagctaaaagatgacaataaattccgtgatatatacaactttgcatt

SEQ ID NO: 83581 - DNA, 519 bp, Zea mays
  unsure (1)..(519): unsure at all n locations
ggagtggctcntgtctttggatggatgctgtagcgactgccgtaccggtccggaattcccgggtcgacccacgcgtccgggaggctaccctgagggattggagaggcccaaggatccaggactgaactccttgcggaccacaagagaactgaaagaaggaatggttatcacagtggagccaggctgctatttcattgatgctttgctaactaaaacaagggatgatccaatttcctcaaagttcttcaactggcaagaggttgaaaagtataaaagctttggtggcgttcgcattgaaagtgatgtgtatgtgacggctcaaggatgccggaacctcacaaactgcccgagagagacctgggagatcgaggctgtaatggctggcgcaccatggcctctgccggcttcaagttctatggtggtagcagcagagaatagcaatgacatatctaaagcgtcgtaattttctctatgctcaatccatatcccgagttgaaacaaattcgacctggattcttn

SEQ ID NO: 83582 - DNA, 518 bp, Zea mays
cggagtgtgtgggtctttggctgcatgctgtacgcctgccgtaccggtccggaattcccgggtcgacccacgcgtccgccgaactccaaaccctagcttcgctcgttgcggcggcgagccggcgatggcgaagtctctgcgatccaaacgcgagaagcggcttcggacgttgcgccgggagatagcagagccgttctacgacaagaaggaggccgccaagctcgccgcgcaggccgcagccctagctgctgccccgctcccggtccgcgggcccccgccgtcccaggatgccggcaccccccgcgccgctagctcggcctcggctatggatgtggagatgtctggtgcagggaacagcaggtctaagaccatcttgaggccacttggcagcattagcaagaagaaggtgcagcttcatttgaagatcaagaaagacaagagaaaagctaggaagaagggaaagttttcttttaagaagtagacgagtgtatgataaatcatgcaggtttgttcccggt

SEQ ID NO: 83583 - DNA, 536 bp, Zea mays
  unsure (1)..(536): unsure at all n locations
tgttaaagtgggtgcgtggctctattgaatccgatagcatagcacgtactcgtccgnaattcccgggtcgacccacgcgtccgcatccccatcctcttcctttcttagtatgtgctatactagctcgctgctgccttttgttacaatgtttgtacggtcgcaataaatgtatggtcgtgtattctcgagagctacttatgttttttttttcttatatttcttattcattttttatattttttgtgatttgtttttttttttatttttatttgttttttatcatatatttttttgttgttatttatcatattttatatattttatattttatttattttttttttttttattttattttttttatttttattttttgtatatttattttatttttcttttatattatttttttttattgtttttattttttttttatttgttttttgatttattttttttttaaatattttttttttttattttatttttattttatttatttttttttttattttattttttttttgttatttatt

SEQ ID NO: 83584 - DNA, 528 bp, Zea mays
agatgatagtaggtgtgtgtgtctcaggaccgataccatgccgtaccgtccggaattccgggtcgacccaagctcccaagcacatagaatgtagaatgcagtagcttctttcgagctccaggatcaccctgacaaggagggggctatctataccttacatgtcatcatcatgaaccaccctggccagattggcaatggctatgccccagttctggactgccacaccttacacattgctgtcaagttagctgaactcgttaccaagattgataggctatccttctaggagctggagaaggagcccaaaattctaagaactgtgatgctggtatggtgaaaatggtttctactaaactcattgaggtggagaccttttgttaatatccctcctatttggtcgatatgcatgttctttacatgatgctatactgtggcttgttagaatcattatgaatgttgtataagaatggacctaactggaaccaatgtgaacaagggatttttgccaagattataagatctatctgg

SEQ ID NO: 83585 - DNA, 514 bp, Zea mays
ggagtggtgtgtcttggctggagccgtaggcactgccgtaccggtccggaattcccgggtcgacccacgcgtccggaaggatctgaagcgtgggtatgtggcctccaactccaaggatgaccctgccaaggaggctgctagctttacctcccaggtcatcatcatgaaccaccctggccagattggcaatggctatgccccagttctggactgccacacctcacacattgctgtcaagtttgctgagctcgttaccaagattgataggcgatccggcaaggagctggagaaggagcccaaatttctcaagaacggtgatgctggtatggtgaagatggttcccactaagcccatggtggtggagaccttttctcagtatcctcctcttggtcgatttgctgtccgtgacatgaggcaaacggtggctgtcggagtcatcaagagtgtggagaagaaagaccccaacttgagccaaggtgacgaaagcttctgccaagaagaaatgaactatctg

SEQ ID NO: 83586 - DNA, 518 bp, Zea mays
gaagtgcgtgtgtcctgggctggtagctgtagtcactgccgtaccggtccggaattcccggggcgatagatgcgtagcggcacgctttcggagaccaacaagcaacatagaaagtggaatccagtagcatcaatagagcatcaatggcgaccaagatttgtccctacttatgctccttgctctttctgcatgtgttgctaacgcgacggttttccctcaatgctcacaagctcctatagcttgccttgttacgccataccttacatcaatgatagctggactatgtgaaaacccagctcttcaaccctataggctccaacaagcaatcgcagcaagcaacatacctttatcacccttgtttcaacaatcgccagccctatctttggtgcagtcattggtacaaaccatcagggcacagcagctgcagcaactcgtgctacctgtgatcaaccaagtagctctggcaaacctttctccctactctcagcaacaacaatttcttccattcaaccaactgt

SEQ ID NO: 83587 - DNA, 523 bp, Zea mays
aggaggtgtgtggggttatagatatgtatgctgtacgcctgcagtactcgtccggaattcccgggtcgacccacgcgtccgattttgagcattcagaaacacaccaagcgaagcgcactagcaacgacctaacaacaatggctaccaagatattagccctccttgcgcttcttgccctttttgtgagcgcaacaaatgcgttcattattccacaatgctcacttgctcctagtgccattattccacagttcctcccaccagttacttcaatgggcttcgaacacctagctgtgcaagccaacatgcaacaacaagcgcttgcggcgagcgtcttacaacaaccaattgcccaattgcaacaacaatccttgccacatctaacaatacaagccatcacaacgcaacagcaacaacagttcctaccagcactgagccacctagccatggtgaaccctgccgtctacttgcaagagcagctgcttgcattcaaaccacttgctctggcgaacgtagttgctaacct

SEQ ID NO: 83588 - DNA, 511 bp, Zea mays
ggtatttagagggggctgtaataattgaactgcatacgctagcaggtaccggtccggaattcccgggtcgacccactcgtccgggctttagaaaatttatgtccaaagcttgtcctcgtttccaagttccatctaggagaacttgcacaagggatattgtacgtcattactttgaagagaaagccaagctcaagaagttgttcaaagattcttgtcagagagtgtgcctgacaacagatgcttggacttctcaggttcaagatggatatatgactattacagcaactttcattgatgaaaactggaacttgcacaagaaagtgataagttttttcatggtaaagggtcacaagggggaggatattgggaagaacttgacaagatgcttagctgattggggtttggatagaagaatgactataaccgtggataacgcatgtgcgaatgacagtggtgttgattatttgaggaagcagttgcataaaaaccacattgccaagggcaagttctg

SEQ ID NO: 83589 - DNA, 523 bp, Zea mays
gtgttagtgtgtgcgtacatcttgcttgctgtacgcctgcagtaccggtccggaattcccgggtcgacccacgcgtccgctaaactggcactcttgaagcgagccatgggttttgttatacagcatcttggcccatcggatcgcctttcagtcatcgctttctcttcaaccgccagaaggttgttccatctccaacggatgtcacactctggccggcagcaggccctgcagactgtgaactcgcttgttgctagtggtggcacaaacattgctgatgcactgaagaaagctgcaaaggttattgaggaccgaagccatcaaaatccagtatgcagcatcattctcttgtctgatggccaagatacgtacaatattccctcaaatattaggggtgcccggccagaatacagttcactagttccatcctccattctaaaccacacatttggcttagtgccggtgcatgggtttggttttggagtagaccatgattcggatgctttgaattcgattgcggtagccc

SEQ ID NO: 83590 - DNA, 519 bp, Zea mays
ggagtgtcggtagtcatagcctgcaagctgtacgcctgccgtaccggtccggaattcccgggtcgacccacgcgtccgcccacgcgtccgattgaaccgtgctgcttacttgcagcagctactattaccattcagacagatagctactgcctactctcaacaacaacaacttattacatttaaccaattggccgcactgaaccccgctgattatttgcagcaacagatactactaccatgtagccagctagctgcatcaagccgcgcttccttcttgacacaggagcagacgctgcctttctaccagcaggttgcggctaacctcacgaccattttacaactactacaatagctgccctgtgtccaacttgctttgacaaaccgagtagcctgctaccaacagcacatcattggtggtgccctattgaagactgcttattagatgtaactcactactcaagtctttgggatgatgtatgtcgccaactagagataagaagctacatttccaagaacata

SEQ ID NO: 83591 - DNA, 526 bp, Zea mays
agtagtgtctggtgtcatagaatacaatgctgtacgcctgcagtaccggtccggaattcccgggtcgacccacgcgtccgaagaaatctaaaagagggcaccaccaatgatgggttatagttcaataataaagttttttgtctgatgtttgtggcttcccagaaataataaagtccatttctaaaaaaaaaaaaaaaaaaaaaaaaaaaaaaaaaaaaaaaaaaaataaaaaaaaaaaagaaaaaaaaaaaaaaaaaaaaaaaaaaaaaaaaaaaaaaaaaaaaaaaaaaaaaaaaaaaaaaaagggccgcccgttttaaaggatccaagcttacttacccttccatccaacgtaataccttttctatagggccccctaaatcaaattcactgcccgtcttttaacaacttcgaaactggaaaacccttggctttcccaaactaaatccctttgcagaaaatccccttttcgcaagttgcctaattaccaaaaaggcccaaaccaatggcctttccaaacagttct

SEQ ID NO: 83592 - DNA, 518 bp, Zea mays
aggagtgtgtcgtgtcttgaatgcatgctgtacgcctgccgtaccggtccggaattcccgggtcgacccacgcgtccgcgcaaattgcaccaagaaatccatcgagaggccgtcgacaggggaattaatggcgtcgtcgtctagcagcagccaccgccgcctcatcctcgcagccgccgtcctgctctccgtgctcgcggctgccagcgccagcgccgggacctcctgcgtgccggggtgggccatcccgcacaacccgctcccgagctgccgctggtacgtgaccagccggacctgcggcatcgggccgcgcctcccgtggccggagctgaagaggagatgctgccgggagctggcggacatcccggcgtactgccggtgcacggcgctgagcatcctcatggacggcgcgatcccgccgggcccggacgcgcagctggagggccgtctagaggacctgccgggctgcccgcgggaggtgcagaggggattcgccgtcaccctcgtcacggaagccg

SEQ ID NO: 83593 - DNA, 527 bp, Zea mays
  unsure (1)..(527): unsure at all n locations
aggttaagtgggtgtcgtgcngtcataggatgctatacgcctgcagtaccggtccggaattcccgggtcgacccacgcgtccgcggacgcgtgggcaagaatgctccagatggttcattctttttgcttcatgcatgtgctcataatcccaccggtgtagatcctacggaggaacaatggagagaaatatcccatcagttcaaggtgaaaaaacattttccattctttgacatggcataccaagggtttgccagtggtgatccagagagagatgccaaggcaatccgaattttccttgaagatggacaccaaattggatgtgctcagtcatacgcaaagaacatgggactttatggacaaagagcaggatgcctgagtattttgtgtgaggatgagatgcaagcagttgctgtcaagagccaactgcaacagatcgcaagaccaatgtacagcaacccacctgttcatggtgcactggttgtttctataatcctcagtgatccagaattgaagagtttgtggtaaaa

SEQ ID NO: 83594 - DNA, 525 bp, Zea mays
  unsure (1)..(525): unsure at all n locations
aggtaagaagtgtgtgggtcatggaatagcatgctgtacgcctgcagtaccggtccggaattcccgggtcgacccacgcgtccgcccacgcgtccggaattatgcttgaggatcaggtggcacctaaagcatgtggacatactgaaggaaggaaagtcatatcaagggaggaagctgtcatgcacataaaagctgctgtagatgctaggaaagagagtggctctgacattgttattgtagcaaggacagattctcgccaagctatttctcatgatgaagcattatggagggtgaaagcatttgctgatgctggagcagatgttctatttattgatgcccttgcttcagtagaagagatgaaagcattttgtgcggttgcaccagaagttccaaagatggcaaacatgttagaaggtggtggtaaaactcccatattgagccctgctgaacttgaagaaattggtttcaggcttgtagtatatcctttatccttagttggggtatcaatgcgtgcaatgcangatg

SEQ ID NO: 83595 - DNA, 522 bp, Zea mays
  unsure (1)..(522): unsure at all n locations
ggagtgtctgatgtcttaggatggtagctgtagcgcactgccgtaccggtccggaattcccgggtcgacccacgcgtccgggatattcatgttgaatgcgaaattagcaccagtagagagcatggcgcccatatggggttcgagatatgcttggggttaaaataaacatgacaacttggacgctgtagactgaccctagagcatctatcaaaggaaccagacagcgatcatgagtttaggaggcaacggagggcaataacaaggactcatctgacacacaaggattctgggagttgaggagagtgcttcacaacaagagatagagaaggcgtatcacaaattggctctgcgcctccacccggatacgaatcctgngaacgagccaaagagaagtttcagtagttgcagaaggttatatccattcttggagatacagagaaaagagctttatatgatgagactgacatcagtgatgacgatacaatcttcaggagtacttncgaacaatgtacaaaaaggtgn

SEQ ID NO: 83596 - DNA, 509 bp, Zea mays
tgggattataggtgggtgtagtaaataactggatgccgttcgctcgcacgtaccggtccggaattcccgggtcgacccacgcgtccgacaacacaatttctaatgtcccatgtgttcttttggcgcttattggattagtgaatgctttccgccaaggttttgagaagcgattcagtgtcctgcacatatccaatatgatacttgctattgggagtatgatttttcatgccaccttgcaacttgtcctacaacagagtgactagactccaatggtctgggagatccttctttatatgtatgtcctttattcgccggactggcattacaggagcacaatgccaaccttccttttcctatatggtgctgcctttgctgtagttcatttctttgccctgttccaattcgtattcaagcttcattacattggcctttgcttcccttgctatccccggattgaccagttcttcattccgtccatatacttggctcgtaagctctttcaaaagctt

SEQ ID NO: 83597 - DNA, 472 bp, Zea mays
gggtattgagaggtgctgaagtattggactcattcctagcagtaccgtccggattcccgggtcgacccacgcgtccgacacacaatttctaagtcccatgtgttcttttggcgcttattggattagtgaatgctttccgtcaaggtttgagaatcgattcagtgtcctgcacatattcatatgatacttgctattgggagtatgattttcatgccaccttgcaacttgtcctacaacagagtgcgtgactccaatggtctgggagatcctctttatagtatgtctttattctctgaatggcttacatgttcacaattctacttccttttctatatgtgctctctgctgatattatttatttgcctgttcaaatatatttatgctgatacattgtcctttcttttcttcattctctggttacatgttatttttcttacaaataatgtttttttatgtgtagaatattttgttg

SEQ ID NO: 83598 - DNA, 554 bp, Zea mays
gttttagttcggggtacatttgaatgcgtacgctgcagtaccgtccgtattcccgggtcgacccacgcgtccgggaatcaacggtttcggaaggatcggcaggctcgtggccagggtcgccctgcagagcgaggatgtcgagctcgtcgccgtcaacgaccccttcatcaccacggattacatgacctacatgttcaagtactacaccttgcacggccaatgtatgcacagctacatcaccctcaaggactccaagtctcttctcttctgcgagaatctcttcactgtctttgtcatcatgaaccctgatgatgatcctcttttttgaggctttgtcttttgtttttttttgttttttatctttttttttattttatttgttttttttttttattcatttcttttttttattttattttattttcttatttattttatactttttatttaatttattttttattttatattttatttcttttatattgtttatttatatgaatatcttttagttttctatatttctttattatcttcttactttatattactct

SEQ ID NO: 83599 - DNA, 526 bp, Zea mays
  unsure (1)..(526): unsure at all n locations
tgaggtaggagtgtgtcgtgtatctgaaatcgatacnctgcagataccggtccggaattcccgggtcgacccacgcgtccgatcttgagcaaaaatatgaattcatgacatctgatcaccagtatatttcccggaaacatgaggaggataaggtgattgtgttcgaaaagggagatttggtatttgtgttcaacttccactgcaacaacagctattttgactaccgtattggttgtcgaaagcctggggtgtataaagtggtcttggactccgacgctggactatttggtggatttagcaggatccatcacgcatccgagcacttcatcgtcgactgttcgcatgataataggccatattcattcttggtttatacaccaagctgaacatgtgtcggctattctccagttgagtgatagcggtgtactcgttgcttctcggcatgtgttgtgctgtcgatgtgaggaataacactttgttaaaatcggctgatgcttgcttgcttgcttattttaggttattttcg

SEQ ID NO: 83600 - DNA, 533 bp, Zea mays
  unsure (1)..(533): unsure at all n locations
aggttnnaagtggcgtgtcgttcnatcaatcggactctcagtacgctctgcacgtaccggtccggaattcccgggtcgacccacgcgtccggaggagactacctacggccatggcgaggagaaggcttctcgcgctcgccttccggctctactggaggccttacgcgacgcatccgtggcggcgacccccgccccggtttctgtcctcagctgcgtccggcaccctcgatcacctgaagtcgccgcctttcgcgcgtccggctgcccggaaccccgcctgctatccatgggatcgattctgaggacggcagaagaggaccatgttcatgcagacacagtcgaccccgaacccgcagtcactcatgttctatcctggaaagccagttatggagattgggagctctgatttccctaatgctcggactgcgatgacatccgctatggctaagtcgctttctgctattgatggagtaaccagtgtattctctggatctgattttgtaactgttacagaatcagaagaaacatcctgg

SEQ ID NO: 83601 - DNA, 519 bp, Zea mays
  unsure (1)..(519): unsure at all n locations
gtagtgtctcgtgtcattggactgcaagtgtaggcatgcacgtaccggtccggaattcccgggtcgacccacgcgtccggcaggatttgactgtgactataatttgtacccagataaagatgcccagtatcacttcttcaggaattatctgcaccctgatagacctagtgaggtatgtgaaacaaaaccaattgaaatctattcttggaattcaagttctttctgaagtaaatgaagctttctgttagtacctactctatgtaatatatatttgacgctatgagtagttccatctttgcttgttttttatgaagttagtaatacctccatatgtgccacatgtgtttgacattttgagcgttgttaagctttttttctgaacaaacataggaggtctgcgtgccatttcattaacgccccgtttggatcactggaattgaattccattctaataataataatttaagcatatatcaattaagctaattcattnttatacaaaatatatttgtatactan

SEQ ID NO: 83602 - DNA, 517 bp, Zea mays
ggaggtgcgtaagtcttgaactgatactatggacgccgtaccggtccggaattcccgggtcgacccacgcgtccgcccacgcgtccgagaaagggtagcacgaacatgggggacaactgcacctggattaccttatgtcgaggaggcaattaccaatgctggtgactggttggttggtggggacttggaggttatagaaccaatcaagtacaatgatggtctagatcagtatcgcctgtctccagcacagctgcgtgaagagtttgccaggcgcaatgctgatgcagtatttgcctttcagcttcgcaatcctgtacacaatgggcatgctcttcttatgaccgacacacgcaaacgtctccttgagatgggttataaaaaccctgttcttctgctccatccactgggaagattcacaaaagcagatgatgtgcctcttagttggagaatgaaacaacatgagaaaggttttggaggaggtgttcctcaaccaaaatcaactggtggtgcgatcctt

SEQ ID NO: 83603 - DNA, 523 bp, Zea mays
  unsure (1)..(523): unsure at all n locations
ggttaagtagtatgtgtgtcttgatcgcataccgtacgcactgccgtaccggtccggaattcccgggtcgacccacgcgtccgcggtagccggcggcggcggaggaggaaagcaggcaggccatggcgtcgtcgtcgtcgaccccggcggccgtccgcgagatgcagaaggatctcgaggtccaggccaacgccctcagcaagatccagaaagacatcgccaagaaccaccaggtccgcaagcagtacaccatccaggtcggcgagaacgagctcgtcctcaaggagctggagctgctcagcgatggggccaacgtgtacaagctcatcggaccggtgctggtcaagcaggacctcgcggaggccaaggccaacgtcaagaagcgcatcgagtacatctccgcagagctgaagcggatggatcgggcgctcaaagacttggaggaaaagcaaaacagcaagaaggaatcgatattcaagttgcagcagaggatgcangctgtacaagctaaggcttagacaac

SEQ ID NO: 83604 - DNA, 524 bp, Zea mays
ggggagggggtgtgtgtcttgatagatgctgtacgcctgcagtaccggtccggaattcccgggtcgacccacgcgtccgctgcgcctctacatttcttctctctctgctcctccgcctccgcctgatccatccaagacagggatcgccatgtcggactcggaggagcaccacttcgaatcgaaggccgacgctggggcgtccaagacctacccgcagcaggctggcaccgtccgtaagaacggcttcatcgtcatcaagaaccgtccctgcaaggttgtggaggtttctacctccaagactggtaagcatggccacgccaaatgccactttgtcgccatagacatattcaatgggaaaaagcttgaagatattgttccttcatcacacaactgtgacattccgcatgtgaaccgtactgagtatcagctgattgatatttctgaggatggatttgtgagccttcttacttcagatggcaacactaaggatgatcttagactcccaactgatgagactcttgtgg

SEQ ID NO: 83605 - DNA, 515 bp, Zea mays
gggaataagtgaggagtaaataactgatgcatacgctgcagtaccggtccggaattcccgggtcgacccacgcgtccgcccacgcgttcgccagaatctgagctcctacaaggataagaaatttgtggacattagcagggaagatttggacttaggtgatagcaatgaggaaagagaggagataaagcagcagttcagccaaacctgtgattggataaagaatcgcttgggtgacaaggttgcacgtgttggcatatctaatcgtctgaggtcatcgccatgtggttcagttgcagcgaagattggttggatagcctatattgaaaggctaatgagagcacagactatgtgtgatccaaccaacttggatttcatgctgctcttggtaggatgattagattatgtctagcaacatgtgctaaatataagccttgaataacagtatgtatgttatatgtctgttgagtactgtatccctgaatgttcttttctgtattcttatatttgtgatgtct

SEQ ID NO: 83606 - DNA, 510 bp, Zea mays
agagtttaagtagtgagtgtagtattgatacttatatgttgcgaataccggttcggaattcccgggtcgacccactcgtccgcccactcgtccgggggacactatcctgggttatagagcggttcaggttaattggaaagatctggactattgcaatgtttgtgatatggatgaggagtatgaagacaacttattcttgcaatgtgacaagtgtcgtatgatggttcatgctagatgttatggtgaacttaaacaattggatggaggactttggctttgcaacttgtgtcgaccaggtgcacctcgtgtgtctccaaaatgctgtctatgtccagtcacaggtggtgcaatgaatcctacaacagatggccgttgggctcatctcgcatgtgctatatggatccctgaaacatgcttaaaggatgtaaagagaatggaacctattgatggactgagcataatcaacagggaccgttggaaactgtatgcagcattttccggagttcatat

SEQ ID NO: 83607 - DNA, 515 bp, Zea mays
ggggttatgagtgtagggggttagatactggaatgcggtacgcctgcagtaccggtccggaattcccgggtcgacccacgcgtccgcttacgctcttgccacgcacctttcaccagtgttgacttcagtatgtgaaaacccaattcttcaaccctacaggatccaacatgctattgcatcaggcatcttacctttatcacccttgttcctccaacaatcatcatccctattacagcagttacctttggtgcatttattggcacaaaacatcacggctcaacatctcgtgctagcaaaccttgctgcctactctcagctacaacagttacctttggtgcatttgttggcacaaaacatcagggcacaacatctacaacatctcgtgctagcaaaccttgctgcctactctcagcaacatcagtttctgccattcaaccaactagctgcattgaactctgctgcttatttgcaacatcaactagtactaccattcagccagccagctgctgtctact

SEQ ID NO: 83608 - DNA, 525 bp, Zea mays
  unsure (1)..(525): unsure at all n locations
tgtggaggagtgtgtgntgttatggaatgcatactgtcgcagtaccggtccggaattcccgggtcgacccacgcgtccgctagttctagatcgcgagcggcgccctttttttttttttttttgctgctggcataacattacgacaatagttcatccgttcgacaacaaattttggcacaacttccacaggttcagcacttgaacaatctaagttaccaacacaaggcattttaagttcagagaaaagtgagaaataaacacatggccatttctagtccatctttactccaacaaaaccttagatgctgctcgggtacatgaacactctgaccttgcgccccatggactcatgcgggaggttggacttgaacttggcacggacgacgcccgagtttacgtgcggacgggtgaccttgccccagatgcacctgtagcgggtctcatagctcttggtcttggccttgtagatgtacgccatgctcttgccagcgtaccacgcgacatccatattggtgttcacccttt

SEQ ID NO: 83609 - DNA, 524 bp, Zea mays
  unsure (1)..(524): unsure at all n locations
gtgttagagtaggtgcgtanatctttgaatgcagtacgcttgcagtaccggtccggaattcccgggtcgacccacgcgtccgaacatacctttatcacccttgttgtttcaacaatcgccagccctatctttggtgcagtcattggtacaaaccatcagggcacagcagctgcagcaactcgtgctacctgtgatcaaccaagtagctctggcaaacctttctccctactctcagcaacaacaatttcttccattcaaccaactgtctacactgaaccctgctgcttatttgcagcaacaactattaccattcagccagctagctactgcctactctcagcaacaacaacttcttccatttaaccaattggccgcactgaaccccgctgcttatttgcagcagcaaatactactaccatttagccagctagctgcagcaaaccgtgcttccttcttgacacagcaacagttgctgcctttctaccagcagtttgcggctaaccccgcaaccctcttacaactac

SEQ ID NO: 83610 - DNA, 504 bp, Zea mays
  unsure (1)..(504): unsure at all n locations
natagaatcgaagctgttgacgtgccggtccggaattcccgggtcgacccacgcgtccggtcacgcgtccggaaccccgctgcttatttgcagcagcatatactactaccatttagccagctagctgcagcaaaccgtgcttccttcttgacacagcaacagttgctgcctttttaccagcagtttgcggctaactccgcaaccctcttacaactacaacaattgttgccctctgtccaacttgctttgacagacccagcggcctgctaccaacaacacatcattggtggtgccctcttttagattgcttattagctgtaattcaataatatagttttttggatgatgtatgtggccaaccagaagtacgatgttacatttccagattctaatgtgatattggtctccaagggagtccgattaaagaagccgaaatcaaagggcggccgctctagaggatccaagcttacgtacgcgtgcatgcgacgtcataactcttctata

SEQ ID NO: 83611 - DNA, 516 bp, Zea mays
  unsure (1)..(516): unsure at all n locations
gtagtacgtgtgtcttgcatgcatgctgtacgcactgccgtaccggtccggaattcccgggtcgacccacgcgtccgtggctacttcaacgaggccaatttcatcggagaaggtggattcgggaaggtgtacaagggcaagatcaacggacagatggtggcagtgaagcagctcgctcgagacggcgtgcaggggaggaacgagttcttggtcgaggtgctcatgcttacagtgctcaaccatcgcaaccttgtcagcttggtcgggttctgcgcgcagggggacgagaggctgctggtctacgagtacatgccgttcggaagcctggagagccatctgtttgacgtgcctctcggcaagaaaccactcgactggaacacgcgcgtgaggatagccgtgggagtcgcggaaggggtttcctacctgcacaacgtagccgacccgcctgtgatctaccgcgacatgaaggccgncaacattctgctgggcgaggacttcagcccgaggctctccgac

SEQ ID NO: 83612 - DNA, 526 bp, Zea mays
  unsure (1)..(526): unsure at all n locations
gagaaggagttgcgtgtcttggtacgagctcgtnggcactgccgtaccggtccggaattcccgggtcgacccacgcgtccgcccacgcgtccgcccacgcgtccgcagctagctctagcaaagcacttgccatctaccgaccgccgcattccaaacagcccgacgagctagcagagcggcaggcacctccctcctcaaggaacatggcccgcatgcagcagttggcagtggcgacggcggccgtggtggccttggtgctgctggcggcggcgacctcggaggcggccatcagctgcgggcaggtggcgtcggccatcgcgccctgcatctgctacgcgcgcggccagggctcggggccctccgccggctgctgcagcggcgtcaggagcctcaacaacgccgcccgcaccaccgccgaccgccgcgccgtctgtaactgcctcaagaacgccgtcgccggcgtcagcgggctcaacgccggcaacgccgtcagcatacccttcaagtgcggcgtcagcatccccta

SEQ ID NO: 83613 - DNA, 525 bp, Zea mays
  unsure (1)..(525): unsure at all n locations
ggtagttntcgcgntgttcttacggcatggaagctgtngcgcactgccgtaccggtccggaattcccgggtcgacccacgcgtccgatccagatcagcaaagcggcagtgcgtagagaggatcgtcgaacagaacagcatgaagatggtcatcgttctcgtcgtgtgcctggctctgtcagctgccagcgcctctgcaatgcagatgccctgcccctgcgcggggctgcagggcttgtacggcgctggcgccggcctgacgacgatgatgggcgccggcgggctgtacccctacgcggagtacctgaggcagccgcagtgcagcccgctggcggcggcgccctactacgccgggtgtgggcagccgagcgccatgttccagccgctccggcaacagtgctgccagcagcagatgaggatgatggacgtgcagtccgtcgcgcagcagctgcagatgatgatgcagctngagcgtgccgctgccgncagcagcagcctgtacgagccagctctgatgcagcagcag

SEQ ID NO: 83614 - DNA, 553 bp, Zea mays
  unsure (1)..(553): unsure at all n locations
aggagtaggagtggcgtcgntcgtcgatagtacactagagatccgntatgctagctgcacgatgctcgntgaccggaattcgcagggctcgactccacgtcgtactcgactcaagcacacccagtcattcggtgagtacataagaaagctacatgatgtaccaacaatggcaggcaaaaggagatgcctacataatgctattggtattcctgcaagtgctgctacggccaccattttcccgcaatgctcacaagctcctatagcttcccttcttcccccgtacctctcaccagcggtgtcttcggtatgtgaaaacccaattcttcaaccctacaggatccaacaggcaatcgcagctggcatcttacctttatcacccttgttcctccaacaatcatcagccctattacagcagttacctttggtgcatttattggcacaaaacatcagggcacatcaactacaacaacttgtgctagcaaaccttgctgcctactctcagcaacagcagtttcttccattcaaccaactagctgcattgaactctgcttct

SEQ ID NO: 83615 - DNA, 527 bp, Zea mays
  unsure (1)..(527): unsure at all n locations
agttttagggagtggtgttcnaacgctgtatactgtacgcatggacgtaccggtcccgaatttccgggtcgacccaagccttccggtgaaacccgcggcggttgaatggtcattagcccccgcaggaacataagaggggggttttgtcaagacccacaagagcaatgcatacttcaagcgtttccaggtgaagttcaagagaaagcgcgctggcaagacagactacagggccaggataaggctgattaaccaagacaaaaacaagttcaatacacccaaatacagatttgttgtgcgatttaccaacaaggacatcacagcacaaatcatatctgctagtatagcaagtgatatggttcttgcttctgcttactcgcatgagttgccacgatatggtctcgaaggtggtctgaccaactatgcagcttgctacttgactggccttcttgtggctcgccgtgtgctcagaaccggtgtttaaaataaggaatttaaggccaatgttaagcacctgtgaagacctcttt

SEQ ID NO: 83616 - DNA, 528 bp, Zea mays
  unsure (1)..(528): unsure at all n locations
ggttntagggtgtgtacgaagactgcatatgtacgcactgccgtaccggtccggaattcccgggtcgacccacgcgttcgcggacgcgtgggcggacgcgtgggcggacgcgtgggcggacgcgtgggtggcaaggttattccaggtgcaatggacagtgctgtatcgaaacatttatcgcatgcatatggatctttggctgaacaagtggctactattgcccagaacgaaggcttgggaaagcgccttgctcatggatacccatttttggaagctgaagtagcatactgtgctcgttatgagtactgtgaatctgccgtggattttgttgcaaggagatgccggcttgctttccttgacacagatgctgctggtagagcatttgcccgaatcattgaaattttagcttcagagcacaagtgggacaaggcaaggaaagatgcggaactgcagaanggtaaagagttcttggaaacattcaagtcatctaagaacgcccaattccatgattggaagcataatggacgt

SEQ ID NO: 83617 - DNA, 527 bp, Zea mays
  unsure (1)..(527): unsure at all n locations
aggtangagggcgtgtattanagtgctggttctnangctgtacgcactgccgtaccgattcccgtgtcgacccacgcgtacgcgtacgcgttcggaccaacatgcaacatagaaagtggaatccagtagcaacaatagagcatcaatggcgaccaagatattttccctccttatgctccttgctctttctacatgtgttgctaacgcgacaattttccctcaatgctcacaagctcctatagcttcccttcttcccccataccttccatcaattatagcttcaatatgtgaaaacccagctcttcaaccatataggcttcaacaagcaatcgcagcaagcaacatacctttatcgcccttgttgtttcaacaatcgccagccctatctttggtgcagtcattggtacaaaccatcagggcacaacagctgcagcaactcgtgctacctctgatcaaccaagtagctctggcaaacctttcttcctactctcagcaacaacaatttttttcattcaaccaactgtcta

SEQ ID NO: 83618 - DNA, 533 bp, Zea mays
  unsure (1)..(533): unsure at all n locations
agantnagaggcgtgtgtcnnanatccgtattctcgtaccttgccgtaccggtccggaattccccgggtcgacccacgcgttcgcggacgcgtgggtcttgctgggcttgctgcaggcatggccattggcatcgttggtgatgctggtgtcaaggcgaacgctcagcagccaaagttgtttgtgggcatgatcctcatccttatttttgctgaagcgcttgccctctacggtctcatcgtcggcattatcctctcgtcccgtgccggccagtcccgcgcagattataggcacgtttcagatgtcaacaccgtgccgtcgacagttgcctggtcgtagctgggtcatgttctatatccatgagacacgaagctggagcactttgagaggcttacttttatgctgtctagttctccatcttctgttgagtcgagaaaacaagaaaggctgtgtaatcaagggatgacttttacccttgtgccattcttttccctgtcgaggtggggggtgggtttcgggtgaatgctaattatgc

SEQ ID NO: 83619 - DNA, 505 bp, Zea mays
  unsure (1)..(505): unsure at all n locations
attggaaatcgaaccgtnggcatgccgtaccggtccggaattcccgggtcgacccacgcgtccggggcacaacaactacaacaacttgtgctagcaaaccttgctgcatactctcagcaacatcagtttcttccattcaaccaactggctgcattgaactctgctgcttatttgcaacaacaattaccattcagccagctagttgctgcctacccccagcaatttcttccattcaaccaactagcagcattgaactctgctgcttatttacagcagcaacaactactaccattcagccagctagctgatgtgagccctgctgccttcttgacacaacaacagttgttgccgttctacctgcacgctatgcctaacgctggcaccctcttacaactgcaacaattgctgccattcaaccaacttgctttgacaaactcaacagtgttctaccaacaacccatcattggtggtgccctcttttagattgcttatgagttatagttca

SEQ ID NO: 83620 - DNA, 531 bp, Zea mays
ggatttaggagtgcgtgtgtattgagctggagactgcacgcactgccgtaccggtccggaattcccgggtcgacccacgcgtccgctttaggacactgcaacgtttcacggctgctaccctggagcatggcatgcacccaccaaatgcaccaaagccagaatggcgagcccttcttgatgagatggcagttgtggcaactgaggaatatcggtccattgtcttcaaagagccacgctttgtcgagtatttccgccttgcaacccctgaaacagagtatggtaggatgaacataggaagcaggccatccaagagaaagccgagcggaggtatcgactcactccgagcaatcccatggatctttgcttggacacaaacgcggttccacctcccggtctggctaggatttggagccgcattcaagaatgtcctccagaaggacatcaggaacctccacatgctccaggaaatgtacaatgagtggccatttttcaaggtgactattgatctggtggagatggtgttcgccaagg

SEQ ID NO: 83621 - DNA, 507 bp, Zea mays
  unsure (1)..(507): unsure at all n locations
gagtacgagttgggagagtgaagtaatgaactgcatcctcgcgcgtgccgtaccggtccggattcccgggtcgacccacgcgtccgcagcagcgagtgcaaccgcgagagcgatcagcgatgggctccttcttctcgaccttagtgacgccccctccggccgccgacgacccgaactgcgccgtggtggccgcgcactccaaggccacctacgacgagcagtgggcggcccacaagagcagcagcaagctgatggtgatcgacttctcggcgtcctggtgcgggccctgccgcttcatcgagccggccttcaaggagctggccttccgcttcaccgatgccatcttcgtcaaggttgacgtcgacgagctcgcggaggtcgcaaggacatggaaggtagaggcgatgccaacgttcgtgctggtcaaggatgggaaggaggtaggccgtgtgattggngctaagaaggacgagcttgagaggaagatcaggatgttcgtcacgtcan

SEQ ID NO: 83622 - DNA, 485 bp, Zea mays
aggagtgactcgtagttataggctgcctagctgtagcgcatgccgtaccggtccggaattcccgggtcgacccacgcgtccgcccgatcgacaccatgagggtgttgctcgttgccctcgctctcctggctctcgctgcgagcgccacctacacgcatacaagcggcggctgcggctgtcagccaccgccgccggttcatataccgacgccggcgcatctgccacctgcggttcacctgccacctacggtgcatctaccaccgccggtccacctgccgccgccggtccacctgccaccgacggtcgcatgtgccgccgccggttcatatgccgacgacaccatgccactaccctactcaaccggcccggactagcctatgcccagcacacgcatgccctgcaacagcgcatacagcccgacagctgagggacctgcgcgtcgcagaacccgatctggccaggcgcgaattctgggatcatgcacg

SEQ ID NO: 83623 - DNA, 530 bp, Zea mays
  unsure (1)..(530): unsure at all n locations
agtttttaggnagtacgtcgtgttctgatacggaggctgtaggcactgccgtaccggtccggaattcccgggtcgacccacgcgtccgaccaattgcaacaacaatccttggcacatctaaccatacaaaccatcgcaacacaacagcaacaacagttcctaccagcactgagccaactagatgtggtgaaccctgtcgcctacttgcaacagcaggtgcttgcatccaacccacttgctctggcaaacgtagctgcataccaacaacaacaacaattgcaacagtttctgccagcgctcagtcaactagccatggtgaaccctgccgcctacctacaacagcaacaactgctttcatctagccctctcgttgtgggtaatgcacctacatacctgcaacaacaattgctgcaacagattgtaccagctctgactcagctagctgtggcaaaccctgctgcctacttgcaacagctgcttccattcaaccaactgactgtgtcgaactctgctgcgtacctacaacagcg

SEQ ID NO: 83624 - DNA, 502 bp, Zea mays
  unsure (1)..(502): unsure at all n locations
gggggtaaggagtngctgtgtaatgagctggatacgtagcgatgccgtaccggtccggaattcccgggtcgacccacgcgtccgcaagaagaacgtggtcgagatgcccggcaatggcgacgtgcccttcacccacgccaacatcaccctcgccaggcagcagctcgggtacaagcccaccaccaacctcgatgtcggcctcaagaagttcgtcaagtggtaccagtcctactacggctacaccaggggatccaagaactcgcgacaatgatccatgctaattcttccttcttcctttctcgctttggcccggccgcggccacccactctcggatcaaacattgacattcttatcaggatttttttggtggaaatatgttatgttaaggtgttcctttattaagtagagaaataccggggacaaattctttgcttggggaggagatggaggaaagtgcctgaggaggaaaacattcgagggctggaggaggaaaagcaatgg

SEQ ID NO: 83625 - DNA, 502 bp, Zea mays
gtagtactcgagttatgaactggagacgtcacgcactgccgtaccggtccggaattcccgggtcgacccacgcgtccgcaactagcaacatagaaagcacaatagtgtaccaacaatggcagccaaaatattttgcctccttatagctccttggtctttctgcaagtgctgctacggcgaccattttcccacaatgctcacaagctcctatagcttcccttcttcccccgtacctgtcaccagcggtgtcttctgtatgtgaaaacccaattcttcaaccctataggatccaacaggcaatcgcagctgccatcttacctttatcacccttgttcctccaacaatcatcagccctattacagcagttacctttggcgcatctattggcacaaaacatcagggcacaacaactacaacaactcgtgctagcaaaccttgctgcctactctcagcatcaacagtctcttacattcaaccaactagctgcatggaactctgctcc

SEQ ID NO: 83626 - DNA, 522 bp, Zea mays
  unsure (1)..(522): unsure at all n locations
agtatataaggtagggtcgtcanagtttccggaaactgatngcaatgcacgtaccggtcccgaatcccgggtcgaaccacgccgtccggccaggctttaatcaatagccatgatgaaccctgtcgnctacctacaacagcaacaactgctttcatctagcccgctcgctgtggccaatgcacctacatacctgcaacaagaattggtgcaacagattgtaccagctctaaactaactagctgtggcaaaccctggttgctacttgcaacaactggtttcatttaaccaactaactatgtgaaacttgtgggtcctacacaaggccacagtactaaatcatggcagtggctaacccattggtcgctgccttnctacagcagcaacaattgctgccatacaaccggttctctttgatgaatcctgtcttgtcgaggcagcaacccatcgttggaggtgccatcttttagattacatatgagatgtactcgataatggtgccctcataccggcatgtgtttccta

SEQ ID NO: 83627 - DNA, 528 bp, Zea mays
agttttagggcgtgtgtacgaagtactgcatttgtacgcactgccgtaccggtccggaattcccgggtcgacccacgcgtccggtcgtctccatgagctttcaaacaagcgaaggatctctattgctggtgcttccaaactgttggctaacatcctttattcatatcgtgggatgggactgtcgattggtacaatgatcgctggatgggatgagaagggtcctggcttgtactatgttgacagtgagggtgcgcggctcgtggggaacaggttctctgttggctctggttcactgtatgcttatggtatcttggatgatggttaccgcttcagcatgtcagttgaggaagcagccgaattagcgcgacgggctatttatggggcaacattccgtgatgcagcaagtggtggttgtgttagtgtttaccacgttggccctgatggttggacgaagctttctggggatgatgtcggagagctgcactaccactactacccggttcagaaaactccggttgaacaggagaa

SEQ ID NO: 83628 - DNA, 521 bp, Zea mays
  unsure (1)..(521): unsure at all n locations
agttttgggcggtgtcgnagacggatccgtgcgatgccgtaccggtccggaattcccgggtcgacccacgcgttcgcccacgcgtccggccctccaagtaactgcgaagagcatagtgcatgaggaatgagcttgtagctagctcatatgtctgaataataagcacagcaagaagatgaatgcatttctcggatcgttcatccggaacaataattaaaggggatccggatttgttcttgtgatataattaacgattcctgttatacttggaagtagctaggctcgtccccatccaatgcaagcaaagatctgatctcccaacgtgcatgagaaaatgtgagcgatttacttcaccggtccttcctctaattaaatggaaatgtgaagtggaacataagaaattaaggtgaaaaaaaaaaaaaaaaagggcggccgctctagaggatccaagcttacgtacgcgtgcatgcgacgtcatagctcttctatagtgtcacctaaattcaattcactggccgtcg

SEQ ID NO: 83629 - DNA, 528 bp, Zea mays
ggtataggagggagtctagtcctgatacggatgctgtaggcactgccgtaccggtccggaattcccgggtcgacccacgcgtccgcggatcgagatggcggcgtcggatgttgagtaccgctgcttcgtcggcggcctcgcctgggccacggacgaccactccctccacaacgccttcagcacctacggcgaggtcctcgagtccaagatcatcctcgatcgggagacgcagaggtcccgcggcttcggcttcgtcaccttctccacggaggaggcgatgcggaacgccatcgagggcatgaacggcaaggagctggacggccgcaacatcaccgtcaacgaggcccagtcccgcggcggccgtggaggcggcggcggcggctacggtggtggccgtggaggcggcggctacggcggtggcgggcgccgtgatggcggcggcggctacggcggtggcggcggcggctacggtggcggcggtggctacggtggtggtggtggcggctacggcggtggcaaccgtggcgg

SEQ ID NO: 83630 - DNA, 496 bp, Zea mays
  unsure (1)..(496): unsure at all n locations
agaagtaagtcgtgtattgaaactgagcgtncgcctgccgtaccggtccggaattcccgggtcgacccacgcgtccgggcttatctgtatgatggttactgggaagatatcggtaccattgcggcattttataatgcaaacttgggaataaccaagaagccaatgccagatttcagcttctatgaccgttttgctccaatttatacacaacctcgacacctgccaccttcaaaggttcttgatgctgatgtgacagacagtgttattggtgaaggatgtgttattaaaaactgcaagataaaccattctgtagttggactccgatcttgcatatctgaaggtgctatcatagaggacagtttactaatgggtgcggactactatgagacagaagctgataaaaaactccttgccgaaaaaggtggcattcctattggtattgggaaaaattcatgcatcaggagagcaatcattgacaagaatgctcgaattggaa

SEQ ID NO: 83631 - DNA, 507 bp, Zea mays
  unsure (1)..(507): unsure at all n locations
ggatantgagtagtnagtgaagtattgaatgcatactgtaggcatgccgtaccggtccggaattcccgggtcgacccacgcgtccgcggacgcgtgggtttcacctattatattccatgaaagcgtcatgattgcagttgctcgtggtgataacactggggaatcaattcctatgctcctaaggataccccgcttctttgatccatggggtggttatgatatgataggctttggtgacattatcttccctggattgcttgttggattcagctatagatttgacagagcaaacagaaagggtgtcttgagtggatattgtctctggctaattgtgggatatgcagttggccttttcattacgtatcttgcgctgttcttgatggacgggcatggtcaacctgcgttgttgtaccttgtgccatgtacattgggggttattggtattcttggttggttaagaggtgagctttatgaattatggaacttcggaaaaagtccaggagaaaa

SEQ ID NO: 83632 - DNA, 506 bp, Zea mays
ggagtacgtgtagtattggtatgcaagacgtcgcgcactgccgtaccggtccggaattcccgggtcgacccacgcgtccgtgaaaacccagctcttcaaccatataggcttcaacaagcaatcgcagcaagcaacatacctttatcgcccttgttgtgtcaacaatcgccagccctatctttggtgcagtcattggtacaaaccatcagggcacaacagctgcagcaactcgtgctacctgtgatcaaccaagtagctctggcaaacctttctccctactctccgcaacaacaatttcttccattcaaccaactgtctacactgaaccctgctgcttatttgcagcaacaactattaccatttagccagctagctactgcctactctcaacaacaacaacttcttccatttaaccaattggccgcactgaaccccgctgcttatttgcagcagcaaatactactaccatttagccagctagctacagcaagccgtgcttccttctt

SEQ ID NO: 83633 - DNA, 523 bp, Zea mays
agtttagtagtgtgtagatcctggactcgtagcctgcacgtaccggtccggaattcccgggtcgacccacgcgtccgggagaactcgacaccatgaaggtgctgatcgttgcccttgctctcctggcgctcgctgcgagcgccgcctccagtacaagcggcggctgtggctgccagacaccaccgtttcatctaccgcctccgttctatatgccgcctccgttctatctgccgccgcagcagcagccgcagccatggcaataccccactcaaccaccgcagctaagcccgtgccagcagttcggatcctgcggcgtcggcagcgtcggcagcccgttcctgggccagtgcgtcgagttcctgaggcaccagtgcagcccggcggcgacgccctacggctcgccacagtgccaggcgctgcagcagcagtgctgccaccagatcaggcaggtggagccgctgcaccggtaccaggcgacatacggtgtggtcctgcagtcctttctgcagcagcagccgcaggg

SEQ ID NO: 83634 - DNA, 520 bp, Zea mays
ggaggtctcgagtcctggtacggatgcgtcggcatgccgtaccggtccggaattcccgggtcgacccacgcgtccgctccctgctacgcgtagccaaggtcaccggcggggctcccaacaagctctccaagatcaaggttgtgcgcacctccatcgcgcgcgtgctgaccgtcatctcgcagaagcagaagtcggcgctgcgtgaggcgtacaagaagaagaagctgctcccgctcgacctccgccccaagaagacccgcgccatccgcaggcgcctcaccaagcaccagctctccttgaagaccgagagggaaaagaagcgtgagaagtatttccccatgaggaagtacgctatcaaggcctagatcagtgaaagaacatttatcctgtcaagttttgctcagaagttacttgaatttgagacaaatctatctccatccaagtactatgtagctgatcaactgcatgatgaaaaacgagtactttttgcttgtttaaaaaaaaatattataaaaggggt

SEQ ID NO: 83635 - DNA, 522 bp, Zea mays
  unsure (1)..(522): unsure at all n locations
aggaggtgctgtataactgatacggatactgtaggcactgccgtaccggtccggaattcccgggtcgacccacgcgtccggctgctcaagaacctgatggagtcgcagaaggttgactacgattttgagtactacaagctggaaatggcagctgatgtgcagctactcactctctctgaggggaaatcaaacatccttccttcagatttggtagtgcctttccggccatcctctgttcccacaattaatgcaggtgctgaggaaactgagagctggaggtggtttttgaccacagtaaggtctcttcctcagtccactgaacctgaaacttaccagatgattcaggatgaaatggtcagtgccatgcgtgatgataggagcttgggttgttctgaacttagcagatggctaacaatggcacanataatggcctncagctntggcgagaagagtctttctttggagcactggcagatggtgaaggagcttgagaggcttagaaagcagaggatgcaatgagan

SEQ ID NO: 83636 - DNA, 523 bp, Zea mays
  unsure (1)..(523): unsure at all n locations
ggagggctcgagtattaggatcgtatgctgtaggcactgcacgtaccggtccggaattcccgggtcgacccacgcgtccggaaggattgaagcatgctggtttgttttggtttggtttgtatgttccattccagtgcagcgcggtggcgcagaacgagtgcaacaacggctgcgccggcgggctgatgacgaacgcgtactcgtacctgatggagtccggcggcctgatggagcagagcgcgtacccgtacacgggcgcggcggggccctgccgcttcgacccgacccaggtcgccgtccgcgtggccaacttcaccgccgtgccggccggcgacgaggcccagatccgcgcggcgctcgtccgccgcgggcccctcgcggtggggctcaacgcggcgttcatgcagacgtacgtgggcggngtgtcgtgccctctcatctgcccgcgcgcatgggtcaaccacggcgtgctcctcgtcggctacggcgcgcgcggcttcgcggcgctgcggctgggctacct

SEQ ID NO: 83637 - DNA, 532 bp, Zea mays
  unsure (1)..(532): unsure at all n locations
agatataggagtaactcnagtattaggatcgtagctgtaggcactgctcgtaccggtccggaattcccgggtcgacccacgcgtccgcagacacgtaaggacgcggtgaaccctggcacctacttgcaacagcaattgcttgcatgcaacccacttgctatggcgaacgtaactggataccagcaacaacaacagatgaaacagttcatgccagtgctcagacaactagccatggtgaaccctgacgtctacctacaactactttcatctagcccgctcgcggtgggcaatgcacctacgtacctacaacaacagctgctgcaacaaattgtaccagctctgactcagctagctgcggcaaaccctgctgcctacttacaacagttgcttgcattcaaccaactggctgagtcaaactctgctgcgtacctacaacagcgacaacagttacttaatccattggcagtggctaacccattggtcgctaccttcctgcagcagcaacaacaattgctgccatacaaccagttct

SEQ ID NO: 83638 - DNA, 496 bp, Zea mays
ggagtgagtgaagtattgaactgataccgtaggcatgtcgtaccggtccggaattcccgggtcgacccacgcgtccgctgcagccctccatccacgaactcccgttctccatttacacccatggcggtgtcgatcgagctcaccaaggagtacggctacgtcgtgctggtgctggtggcctatgtcttcctcaacctttggatgggcttccaggtcggcaaggcccgcagaaactacaaggtgttctaccccaccatgtacgccatcgagtcggagaacaaggacgccaagctcttcaactgcgtgcagagggggcaccagaactctctagagtggatgcccgttttcttcgtcatactgctgctgggcggtctgcagcacccgaccatcgccgccggtctgggcggcatctacatcgtcgcgaggttcttctacttcaagggatacgccaccggcgttccggacaaccgtctcaagattggggggctcaactacg

SEQ ID NO: 83639 - DNA, 502 bp, Zea mays
  unsure (1)..(502): unsure at all n locations
ggagggctcgtagtactagtcgtatgctgtaggcactgccgtaccggtccggaattcccgggtcgacccacgcgtccgcggacgcgtgggcgcaaattgcaccaagaaatccatcgagaggccgtcgacaggggaattaatggcgtcgtcgtctagcagcagccaccgccgcctcatcctcgcagccgccgtcctgctctccgtgctcgcggctgccagcgccagcgccgggacctcctgcgtgccggggtgggccatcccgcacaacccgctcccgagctgccgctggtacgtgaccagccggacctgcggcatcgggccgcgcctcccgtggccggagctgaagaggagatgctgccgggagctggcggacatcccggcgtactgccggtgcacggcgctgagcatcctcatggacggcgcgatcccgccgggcccggacgcgcagctggagggccgtctagaggacctgccgggctgcccgcgggaggtgcagaggggn

SEQ ID NO: 83640 - DNA, 501 bp, Zea mays
ggaaaaaaggagtagtgagtattgatacggatgcgtgcgcatgccgtaccggtccggaattcccgggtcgacccacgcgtccgagtggctccaacaatccaccggcaccaacccagcgcggcgccaccggcgacccgtaccccctcccccggagagcgatggcgacggagctgacggcggctcatctgcgcgcgtacgacggcaccgacccgttcaagcccatctacgtctccgtccggggcaaggtctacgacgtcacctgcggccgcgggttctacggccccggcggcgcctacgccgtcttcgcgggccgcgaggccagccgcgccctcggcaagatgtccaaggacgaagccgacgtctccggggacctgtccgggctcaccgacaaggagctcggcgttctcgccgactgggagatcaagttccaggccaagttccccgtcggggtccgactcggcggcgacgccttgactcgtcaggctcggtctaaattactct

SEQ ID NO: 83641 - DNA, 528 bp, Zea mays
  unsure (1)..(528): unsure at all n locations
aggtnttaggcgtgtgtacnaagtccggatactgtactatggccgtccggtccggaattcccgggtcgacccacgcgttcggccctttgcaagtatagtctctctgctaagcgaagcgaagcttcaagctagtctcggcggctctagaagacgatgggcaaggacgacgtgatcgagagcggcgctggcggcggcgagttcgctgccaaggactacacggacccttccccggcgccgctgatcgacgcggcggagctggggtcctggtcgctgtaccgcgccgtgatcgccgagttcatcgccacgctgctgttcctgtacatcacggtggccaccgtgatcgggtacaagcaccagacggacgcgtcggcgtcgggcgccgacgcggcgtgcggcggcgtgggcgtgctgggcatcgtctgtgccttcggcggcatgatcttcgtcctcgtctactgcaccggncggcatctcggggggccacatcataccccggcgtcaccttcgggctttttctggcgcgcaagg

SEQ ID NO: 83642 - DNA, 527 bp, Zea mays
agtttaggcgtgtctacgaagctggatgctgtgcgactgccgtaccggtccggaattcccgggtcgacccacgcgtccgatcgttctcgtcgtgtgcctggctctgtcagctgccagcgcctctgcaatgcagatgccctgcccctgcgcggggctgcagggcttgtacggcgctggcgccggcctgacgacgatgatgggcgccggcgggctgtacccctacgcggagtacctgaggcagccgcagtgcagcccgctggcggcggcgccctactacgccgggtgtgggcagccgagcgccatgttccagccgctccggcaacagtgctgccagcagcagatgaggatgatggacgtgcagtccgtcgcgcagcagctgcagatgatgatgcagcttgagcgtgccgctgccgccagcagcagcctgtacgagccagctctgatgcagcagcagcagcagctgctggcagcccaaggtctcaaccccatggccatgatgatggcgcagaacatgccggccatgggtg

SEQ ID NO: 83643 - DNA, 533 bp, Zea mays
  unsure (1)..(533): unsure at all n locations
agttnatagtgagtcgtagtacnagtgtctggatcctgatacnatgcacgtaccgtcccgaatttccgggtcgacccaagccttccgtgaaggtcctccggggttcggttccttggttaaccggatcaagatggcggcgtcggatgttgagtcccgctgcttcgtcggcgggctcgcctgggccacggacgaccacttccttcacaacgccttcagcacctacggcgaagtcctcgagtccaagatcattctcgatcgggagaaccataagttccgccggttccggttcgtcaaccttttcaacgaagaagccattccgaaccgccttcaaggccttgaccgcaaaggagctgaacggccgcaccataaccgtcaacgaggcccaatcccgcggcggccgtgaaggcggcggcggtgggtacggtggtggccgtggaggcggcggctacggcggtggcgggcgccgtgatggcggcggcggctacagcggtggcggcggctacggtggcggcggcggctacggtggtggtggn

SEQ ID NO: 83644 - DNA, 528 bp, Zea mays
  unsure (1)..(528): unsure at all n locations
gttatgaggagtgagtgtagtcccgatacgaatacgtncgcactgccgtaccggtccggaattcccgggtcgacccacgcgtccggtgctacctctgatcaaccaagtagctctggcaaacctttctccctactctcagcaacaacaatttcttccattcaaccaactgtctacactgaaccctgctgcttatttgcagcaacaactattaccatttagccagctagctactgcctactctcagcaacaacaacttcttccatttaaccaattggccgcactgaaccccgctgcttatttgcagcagcaaatactactaccatttagccagctagctgcagcaaaccgtgcttccttcttgacacagcaacagttgctgcctttctaccagcagtttgcggctaaccccgcaaccctcttacaactacaacaattgttgccctttgtccaacttgctttgacagacccagcggcctnctaccaacaacacatcattggtggtgccctcttttagattgcttattagtt

SEQ ID NO: 83645 - DNA, 521 bp, Zea mays
gtagtgctctagtattgatcgcacagtgtaggcactgcacgtaccggtccggaattcccgggtcgacccacgcgtccgcatagaaagtggaatacagtagcaacaatagagcaacaatggcggcaaagatattttccatccttatgctccttgctctttcttcatgtgttcctaacgcgaccatttttcctccatactcacaagctcctatagctgcccttcttcctccataccttccataactgaccgcttcagtatgtgaaaacccagcccttcaaccctataggctccaacaagcaatcgcaacaaacaacttacctttatcacacctgttctttcaacaatcgccagccctatctttggtgcagtcattggtacaaaccatcagggcacaacagctgcaacaactcgtgctaccagtgatcagctaagtagctctagcaaacctttctccctactctcagcaacaacaatttcttccattcaaccaactgtctacactgaaccctgctgcttatttg

SEQ ID NO: 83646 - DNA, 525 bp, Zea mays
  unsure (1)..(525): unsure at all n locations
agttaaggagtanctctagtttcgaacgtatgcgtagcgatgccgtaccggtccggaattcccgggtcgacccacgcgttcgcccacgcgttcgataatactctccattccattccattccatctcaaaggatagaataatgggcggtctctccaccaagcttttcgtggtcctcctactgctcgtttgttacaccgggacgcaaggcgggccggtgactatggtgtcggcgaggaagtgcgagtcgcagagcttncgcttcaagggaccttgctcgagggacgccaactgcgcaaacgtctgcctgaccgaaggtttcaccggcggcgtgtgcaatggcctacgccaccgctgcttctgcaccagggactgctagtactgcctcgcctcgtgtcctgcgtgtgcatatatagccgcagcggatcagtaaaacatgcatgcatgcgttaccaaatatttggcagtaccaacaagttaatgaattaaaatattaaataatatgtcatggaacatagcctgttttga

SEQ ID NO: 83647 - DNA, 504 bp, Zea mays
  unsure (1)..(504): unsure at all n locations
ggagggcgtcgtgtactgggctggtagctgtgcgactgccgtaccggtccggaattcccgggtcgacccacgcgtccggtcgaccagcacattcgctacttcctgcacgctgttgggcaatgttagaacaacgcaggcctcccagacagcggtgaagagcccttcgtctctaagcttcttcagccaagttacgaaggttccaagcctgaagacctccaagaaactggatgtctccgccatggctgtatacaaggtgaagcttgtcgggcctgaaggtgaagagcacgagtttgatgctccagacgacgcctacatccttgacgcagccgagactgccggtgtggagttgccatactcgtgccgtgctggggcttgctccacctgtgccggcaaaatcgagtctggttcggttgaccagtcggatgggtccttccttgatgacgggcagcaggaggaaggttatgtgctgacatgcgtctcctacccaaagtccgactgcgtcan

SEQ ID NO: 83648 - DNA, 511 bp, Zea mays
  unsure (1)..(511): unsure at all n locations
gaggaaagaggagtnactcgtagtattggatccggatgctgtagcgcatgccgtaccggtccggaattcccgggtcgacccacgcgtccgcggacgcgtgggacaactactaccattcagccagctagctggtgtgagccctgctaccttcttgacacaaccacagttgttgccgttctaccagcacgctgcgcctaacgctggcaccctcttacaactgcaacaattgctgccattcaaccaacttgctttgacaaacccagcagcattctaccaacaacccatcattggtggtgccctcttttagatttcttatgagttatagttcaataataaagttttttgtctgatgtttgtggcttcccagaaataagaaagtacatttctaaaaaaaaaaaaaaaagggcggccgctctagaggatccaagcttacgtacgcgtgcatgcgacgtcatagctcttctatagtgtcacctaaattcaattcactggccgtcgttttacaacgtcg

SEQ ID NO: 83649 - DNA, 499 bp, Zea mays
  unsure (1)..(499): unsure at all n locations
gagtngctgtgtactgagctggaaccgtacgcactgccgtaccggtccggaattcccgggtcgacccacgcgtccgcccacgcgtccgcgcaaattgcaccaagaaatccatcgagaggccgtcgacaggggaattaatggcgtcgtcgtctagcagcagccaccgccgcctcatcctcgcagccgccgtcctgctctccgtgctcgcggctgccagcgccagcgccgggacctcctgcgtgccggggtgggccatcccgcacaacccgctcccgagctgccgctggtacgtgaccagccggacctgcggcatcgggccgcgcctcccgtggccggagctgaagaggagatgctgccgggagctggcggacatcccggcgtactgccggtgcacggcgctgagcatcctcatggacggcgcgatcccggcgggcccggacgcgcagctggagggccgnctagaggacctgccggctgcccgcgggaggtgcagaggggt

SEQ ID NO: 83650 - DNA, 530 bp, Zea mays
agttttagttgtgtcgtggattgtaggactcgatagcactgcacgtaccggtccggaattcccgggtcgacccacgcgtccgggtgggttggcttctcctccccctccggttcgggttcgggttcgtgaggttctccggggttcgggttcgtgggtgagcggatcgagatggcggcgtcggatgttgagtaccgctgcttcgtcggcggcctcgcctgggccacggtcgaccactcccttcacaacgccttcagcacctacggcgaggtcctcgagtccaagatcatcctcgatcgggagacgcagaggtcccgcggcttcggcttcgtcaccttctccacggaggaggcgatgcggaacgccatctagggcatgaacggcaaggagctggacggccgcaacatcaccgtcaacgaggcccagtcccgcggcggccgtggaggcggcggcggtgggtacagtggtggccgtggaggcggcggctacagcggtggcgggcgccgtgatggcggtggcggctacggcggtgg

SEQ ID NO: 83651 - DNA, 526 bp, Zea mays
  unsure (1)..(526): unsure at all n locations
agttnttagtagtgtgtacntagctggatcctgtgcgatgccgtaccggtccgtaattcccgggtcgacccacgcgttcgtccacgcgttcgttctagatcgcgagcgccgccctttttttttttgaggtttttctttgtttgtttttttttttttttagaaatggactttcttatttctgggaagccaccaacattagataaaaaactttatttttgaactataactcatatgaaatctaaaagagggcaccaccaatgatgggttgttggtatgaacactgatgggtttgtcaaagcaagttggttgaatggcatcaattgttgcaattgttataaggtgccaagctttggcgcaacgtgctggttgaacgggcaccactgtggttgtctcaacaaggtttcagggcttacaccagctagctggctgaatggcgataattgttgctgctgtaaatcagccggagacttcaatgctgctaattgggtgaatggaagaaatttgttggggtaggcagctagtttct

SEQ ID NO: 83652 - DNA, 537 bp, Zea mays
  unsure (1)..(537): unsure at all n locations
ggttttgaggagtcgtcgtgcngtagccggacatcaatacgttagcacgtaccggtccggaattcccgggtcgacccacgcctcccggagccattggcgggtagcgtctttacaacaaccaatttcccagttgcaacaacaatccttggcacatctaacaatacaaaccatcgcaacgcatcagcaacaacaattgctaccaacactgggccacctagccatggtgaacccttgcgactacttgcaacagcagttgcttgcatcatacccacttgctctggcatacgtaattgcaaaccatccacacaaacagctgcaacagtttctggcagcgctcagtcaactagccatggtgaaccctgccgactacctacatcagcatcaactgcttgtatttagcccgctcgctggtgccaatgcacctacattactgtcacaacaaatggtggaacataatgtgccaaatattaattaacctagtgtggcaaaacctggttgctaacttgcacaagttgtttcatttcaaccactgactat

SEQ ID NO: 83653 - DNA, 508 bp, Zea mays
  unsure (1)..(508): unsure at all n locations
ggagtngctgtagtactaggctgcagaccgtcacgcactgccgtaccggtccggaattcccgggtcgacccacgcgtccgggaggatgcgtgtgctgaggcgccttctccgcaagtatcgtgaggccaagaagattgacaagcacatgtatcatgacatgtacatgaaggtcaaaggtaacgccttcaagaacaagagggtgcttatggagagtatccacaagtccaaggctgagaaggccagagagaagacactttctgaccagtttgaggccaagcgcgccaagagcaaggcgagccgtgagaggaagatcgctaggagggaggagaggttggcccagggtccacgagaaataacaccacctgtctcatccacagctccagctactggggcaccgaagaaagcaaagaagtgaagtattgaaataaagctgtagctttctagtccagtactgcactttcttttataagctctagtcaaattttggagcgcctgaactgttttgctg

SEQ ID NO: 83654 - DNA, 506 bp, Zea mays
agggagtatcgtgtagtattaagcacgcatgctcctgcgcactgccgtaccggtccggaattcccgggtcgacccacgcgtccgcccacgcgtccgggcgatgcggcgcgactcctatttcgtctatgatgactgtgaagcgatggtcgcgtggcccttcagccacccaaattggaaagcccgctgttcacatggctagcgttgacttgaaaggaaaagcatacgatgtgttgagacagaattcttccagctttttgttggaagatgtctacagaaacccaggcccgctccagtttgaaggaccaggtgccgattcaaagcctatttcattgtgcgttgaggatcaagactatatgggcagaataaaaaagttgcaggaatacttggagaaggtgaagaggattgtgaagcctgggtgctcgcaggatgttcttaaagcggcgctgagtgccatgtcttctgtgccggaaacactgaacatcatgacttcatcttctaccggcaga

SEQ ID NO: 83655 - DNA, 503 bp, Zea mays
  unsure (1)..(503): unsure at all n locations
agagtgcgtaaatattgaactgatacgtngcgactgccgtaccggtccggaattcccgggtcgacccacgcgtccgcactttggtgaaccctgctccaccgttccggtacttccgaaagctaaaggagacgagcagcctaaaaaccctagcccccgaatcagatcccaccgcccgccggaacgcggaaccctgcccacggccgccatggagatgagcgatgcggagcggatgatcttcttcgagatggcctgcaacaactccgaggtcgcgtacgagcagaaccccaacgacgccgacaacttgacgcgatggggcggagcgctgctggagctatcacagatgcgtaacggccccgacagcctcaagctcctccaagatgcggaagccaagctggaggaggcactgcaaattgatcccaacaagtctgatgcactctggtgctcgggaaatgctcagacttctcatggattcttcactccagacactgcaatggcaaatgatn

SEQ ID NO: 83656 - DNA, 528 bp, Zea mays
  unsure (1)..(528): unsure at all n locations
agtntttaggcgtgtgtacnaatctggattctatacgttgtcgtaccggtccggaattcccgggtcgacccacgcgttcggaccaactagcaacatagaaagcacaatagtgtaccaacaatggcagccaaaatattttgcttccttatgctccttggtctttctgcaagtgctgctaccgcgaccattttcccgcaatgctcacaagctcctatagcttcccttcttcccccatacctttcatcagcggtgtcttcagtatgtgaaaacccaattcttcaaccctacaggatccaacaggcaatcgcaacaggcatcttacctttatcacccttgttcctgcaacaaccgtcatccctattacagcagttaccctttggtgcatttgttggcacaaaacatcagggcacaacatctaccacaacttgtgctagcaaaccttgctgcctactctcagcaacagcagtttcttccattcaaccaactggctgcattgaactctgctgcttatttgcaacaacaactacc

SEQ ID NO: 83657 - DNA, 519 bp, Zea mays
  unsure (1)..(519): unsure at all n locations
ggtattaggggtgtagtgngaagtacgtaagtcgatangcatgcacgtactcgtcccgaatttccgggtcgacccacgccttccggggacttggggcatccttgaggtttgacggtcataaggggtgtctgggcttctttccggaggaaaagacctggaacacatattcaaagacctggatgcctttctctatcaatgggctcacctctctcagcacaggatgcagaacgtcttatggtactactctcacatcaaggctgaatggaagctatggataccgttttgccttcagtgtgctccaagaagcaactaacaatttcgaccagaactgggtcattggaagtggaggctttggaaaggtctacaagggggtgatgacggatgacagcaaggctccaatggaaccgtggatacccaaagtctcagcataggtctcaactagtttcatacaaagattgatccactctcacgtctgggctcacggcaattgggggcttagattgggcaccgtgattaaag

SEQ ID NO: 83658 - DNA, 523 bp, Zea mays
ggagggagtgtagtattaggctgtatgctgtagcgactgccgtaccggtccggaattcccgggtcgacccacgcgtccggcactatccgacactaggccaccaccagcgggcgggctccagtcgcaactcgcaacacagacgccgccgccgcccaaagaaagacgtcaactccaggagacaagatagtgagaactgaagagaaggatgggcttcgagaagcagatcctgagatccggcaccggccccaagccgataaagggccagaaggtcaccgttcactgcaccggctacgggaaggatcgtgatctgtccaagaaattttggagcaccaaggaccctgtgcagcagccattcagtttcagcattggtcagggttcagtgatcaaaggatgggacgagggagttatgaccatgcaagtgggtgaagttgctcgtatccagtgcacgcctgattatgcttatggagccggcgggttcccagcctggggaattcaaccaaactcagtgcttgtgttcgagatg

SEQ ID NO: 83659 - DNA, 533 bp, Zea mays
  unsure (1)..(533): unsure at all n locations
agtntaggagtgtgtanagtgctgttacgnatactgtacgcactgccgtaccggtccggaattcccgggtcgacccacgcgtccgtagcaacatagaaagcacaatagtgtaccaacaatggcagccaaaatattttgcttccttatgctccttggtctttctgcaagtgttgctaccgcaaccattttcccacaatgctcacaagctcctatagcttcccttcttcccccatacctatcaccagcggtgtcttcagtgtgtgaaaacccaattgttcaaccctacaggatccaacaggcaatcgcaacaggcatcttaccattatcacccttgttcctccaacaaccgtcagccctattacaagagttacctttggtccatttggtggcacaaaacatcagggcacaacatctacaacaacttgtgctagcaaaccttgctgcatactctcagcaacatcagtttcttccattcaaccaactggctgcattgaactctgctgcttatttgcaacaacaactaccattcagcc

SEQ ID NO: 83660 - DNA, 526 bp, Zea mays
gtatgaggagggctgtagtaactggatcttagctgtacgcctgccgtaccggtccggaattcccgggtcgacccacgcgtccggtggctcttgaactgcttcaagctggagtgatgtcgctgtggttcttttgtgactgatcatctctggagcttttgtgaatggtctagctagctatctgtaaatgatctacttgtgaatgatattataatcgcgatgctttcgtgaaaaaatacaaaaagaaaggtcggtcgttctagaggatccaagcttacgtacgcatgcatgctacgtcatagctcttctatagcgtcacctaaattcaattcactggccgtcgctctacaacgtcgtgactgacaaaaccctgtcgttacccaacttaatcgccttgcagcacatccaactttagccagctggcgtactagcgaacaggcccgcaccgatctgccttcccaacagttgctcagcctgaatggcgaatgggactcgccctgtagcggctcattaagcgcggcggatgtgg

SEQ ID NO: 83661 - DNA, 508 bp, Zea mays
agtatgtgtcgtggggtaattgattagcatgacggtacgcctgcagtaccggtccggaattcccgggtcgacccacgcgtccgctacgtgctgcatacaataaccccgagagagctatagactacctgtattctggaattcctgagaatgtggaggctcagcctgttgcccgagcacctgctgctggccaacaaacaaatcagcaggccgcatcacccgctcagccagcagttgcattgccagtgcagccatcacctgcctctgcagggcctaatgcaaatcctttgaacctttttcctcagggtgttccaagtggtgggtccaacccaggtgttgttccaggtgcaggatctggtgctcttgatgccttgcgacagcttccacagtttcaagcactccttcagttagtccaggctaatcctcaaatcttgcagccaatgcttcaagagctaggtaaacaaaacccacaaattctgcggttgattcaagaaaatcaagctgagtttcc

SEQ ID NO: 83662 - DNA, 543 bp, Zea mays
  unsure (1)..(543): unsure at all n locations
gggtctaagtagtgtgtgnatagctggatcgnatactgtgcgcactgccgtaccggtccggaattcccgggtcgacccacgcgtccgttcatgatatctgggaaatctcctctatccatccctctctatctatatctgtaataatgcagtaagacgacacacattatcatgtgtggtatgaccaataatatatgcatgatcataataaagttttggttttaaaaaaaaaaaaaaaaaaaaaaaaaaaaaaaaaaaaaaaaaaaaaaaaaaaaaatataaaaaaaaaaataaaataaaaattatatacaaatgtataaagttgagaatgatatcataatatatcgaattctaatgcaaaataataggggggccccgttcaaggagtccacactttaaattccccttcttatcagactataaatacttttatagggttcgcccaaatatgcaaaataggggccctatggtttaaacaaaatagatattgggaaaaaccctggggatttccccatactttaaactgtttgtgcaacaatccgcccg

SEQ ID NO: 83663 - DNA, 533 bp, Zea mays
  unsure (1)..(533): unsure at all n locations
agtttttgaggcgtgtagtcnngtagcttgaatagtatacgcttgcacgtaccggtccggaattcccgggtcgacccacgcgttcgcggacgcgtgggcggacgcgtgggttcagaaacacaccaagcgaagcgcactatcaacaacctaacaacaatggctaccaagatattatccctccttgcgcttcttgcgctttttgcgagcgcaacaaatgcgtccattattccacaatgctcacttgctcctagttccattattccacagttcctcccaccagttacttcaatggccttcgaacacccagctgtgcaagcctataggctacaacaagcgattgcggcgagcgtcttacaacaaccaattgcccaattgcaacaacaatccttggcacatctaacaatacaaaccatcgcaacgcaacagcaacaacagttcctaccagcactgagccacctagccatggtgaaccctgtcgcctacttgcaacagcagctgcttgcattcaacccacttgctctagcaaacgtagt

SEQ ID NO: 83664 - DNA, 527 bp, Zea mays
agttaggaggtgtgagtatcgaatcgtacccctgcagtaccggtccggaattcccgggtcgacccacgcgtccgcaacaagcaacatagaaagtggaatccagtagcaacaacagagcaacaatggcgaccaagatattttccctccttatgctccttgctctttctgcatgtgttgctaacgcgacaattttccctcaatgctcacaagctcctatagcttcccttcttcccccataccttccatcaatgatagcttcagtatgtgaaaacccagctcttcagccctataggctccaacaagcaatcgcagcaagcaacatacctttatcacccttgttgtttcaacaatcgccagccctatctttggtgcagtcattggtacaaaccatcaaggcacagcagctgcagcaactcgtgctacctgtgatcaaccaagtagctctggcaaacctttctccctactctcagcaacaacaatttcttccattcaaccaactgtctacactgaaccctgctgcttatttg

SEQ ID NO: 83665 - DNA, 524 bp, Zea mays
  unsure (1)..(524): unsure at all n locations
agtntaaggcggggtanaaagctggatgctgtaccctgccgtaccggtccggaattcccgggtcgacccacgcgtccgtggaaaattgcaaggatgaatttttgaagtttgatctggagtatgaccagattgttgtcctcgagacgaaaactgcaaaggctgctacccaggacattctgacgacgcactgtataccttctgcaacgtcggatgaccttaaggcctagtgggaggagaagggagcatgacgcagccctgggcctgagccagggccatcaggtgggccaatagtttgggccacaatttcggctgaattgattagcgcagcgtacgatccgtgatgaagaggaaccccaatgtttatctgtttaagttaaatatcttttgaagggttgtggatgtgagagtgctggctggtgtctaaagctccgccattatagaaggtttgagggactgtcactgtcagataacaataaactggagttgttacagacagagtcatcgtgaaaacgatagtgtctagt

SEQ ID NO: 83666 - DNA, 537 bp, Zea mays
  unsure (1)..(537): unsure at all n locations
agtttnttagtagtatcgtgtagtattagacctagtatgctgtgacgcctgcacgtaccggtccggaattcccgggtcgacccacgcgtccggaaaaatatccccaaaccctagctcccgatctcgatggcgaaccctcgcgtcttcttcgacatgaccgtcggcggcgccccggcgggccggatcgtgatggagctgtacgccaacgaggtgcccaagaccgcggagaacttccgcgcgctgtgcacgggcgagaagggcgtgggcaagtccgggaagccgctccactacaagggctccaccttccaccgcgtcatccccgagttcatgtgccagggcggcgacttcacccgcggcaacggcaccggcggcgagtccatctacggcgagaagttccccgacgagaagttcgtgcgcaagcacaccgcccccggtgtgctctccatggccaacgccgggcccaacaccaacggctcccagttcttcatctgcaccgtcgcgaccccttggctcgacggcaagcacgtcgtcttcggc

SEQ ID NO: 83667 - DNA, 499 bp, Zea mays
gtagtgtgtgaagtattgatatgcagctcgtacgcctgccgtaccggtccggaattcccgggtcgacccacgcgtccgccgttacccggcggctttaaaccctagttcccattccatcttcgtttccgctccgccgccgtcgatggagttctggggtctcgaggtcaaacctggatccactgtcaagtgtgagcctggacatggctttatcctgcacgtttcccaggctgcccttggggaatcaaagaaaagtgacagtgccttaatgtatgtcaaagttgatgacaagaagcttgccattggaacgctctctatcgacaaatacccacagatacaattcgatttggttttcaataaagagtttgagctgtcacacacatcgaaaactaccagtgtatttttctctggttacaaggttgagcagccaattgagggagatgaaatggatcttgattctgaggatgaagaggaggagctaaacattccagtaatcaaggaa

SEQ ID NO: 83668 - DNA, 498 bp, Zea mays
  unsure (1)..(498): unsure at all n locations
gtattgacatgtagactgtacgcctgccgtaccggtccggaattcccgggtcgacccacgcgtccgatttagaccaactagcaacatagaaagcacaatagtgtaccaacaatggcagccaaaatattttgcctccttatgctccttggtatttctgcaagtgctgctacggcgaccattttcccgcaatgctcacaagctcctatagcttcccttcttcccccgtacctctcaccagcggtgtcttcggtatgtgaaaacccaattcttcaaccctacaggatccaacaggcaatcgcagctggcatcttacctttatcacccttgttcctccaacaatcatcagccctattacagcagttacctttggtgcatttattggcacaaaacatcagggcacaacaactacaacaacttgtgctagcaaaccttgctgcctactctcagcaacagcagtttcttccattcaaccaactagctgcattgaactctgctccn

SEQ ID NO: 83669 - DNA, 514 bp, Zea mays
  unsure (1)..(514): unsure at all n locations
aggtgagggcgtgtgtcngatgctgctagcgtangctatgacgtaccggttcggaattcccgggtcgacccacgcgttcgcccacgcgtncggttttacttgatgtgtaaccatgggacgatgagactgacatggccaagcttgaggaagctgttaggagtgttcagatggaagggctgctctggggcgcatccaagcttgtcccagacggatatggtatcaagaagctgcaaatcatgatgaccatagtcgacgatcttgtctctgtcgacactctcattgaggactatctgtgcgctgagccagttaacgagtacgtccagagctgcgacatcgttgccttcaacaagatctaggcgtgactttcgatcagtccttcccctggggtgctggcgatggtggtggctgggcaatgcaccagcctaatttttccataactttatgtctgctttgtgttggccagtgatattgccgtgaggtattttggatcctattcgagtcgaatgtaccattt

SEQ ID NO: 83670 - DNA, 661 bp, Zea mays
  unsure (1)..(661): unsure at all n locations
agattnagagggcgtcgtattcaggctggattggtagccgtanagctatggcggtacncggtctcggaatatacccgggtcgacnccacgccgnntccgcaaggggtgctcaaccttaagaattggtggtcattttgtagtctgttgcttggctgaaggggtcganntatccgtgcatcctnntggtggtngnngtatgatnnctacacannttttatcaaggggcaccagggnnagtattcnntgttgnngaaaatcntnnctcgtcggaagagggataatnnactcgagccttcgcannnacttctctttannttgagaagggggcgaaggcataaagagggggtttcttcttttttgcgttctccacctggagtatttgtagtatgccggacccacagtttgtcagccccgatgccttgagtaagcaagaaattggtcccttgcnctacttgctatctnnnctgatgactngcgatnngggtcttgggatgttgtgcccttgattgccactcataaacccattctgacgaagccattgtgacactcaccccaagacttggtgtatttggaaccggcgcccatggggaagatgtttgagtttccaccaagttttgcagcttggcacccgaggcgaattgccaaagaagcttagcttgag

SEQ ID NO: 83671 - DNA, 509 bp, Zea mays
  unsure (1)..(509): unsure at all n locations
gggcagaggctcgtgtctcggcgactgangactggagnctncgtatgncgtaccggttcgggttgacccaggcgtccgggctggaggagctggtggcggaggtgtgtccgcctgcaggcggagaacgcggcgacgcaggcccgcaccgcggcgctggagcgcgacctgggcagggtggacggcgacaacgcggtgctgcgcgcccgccacgccgagctggccggccgcctgcagtcgctgggcggcgtcctcgaggggctccaaatggccggcgccgccgtcgacatcccggagatggtcaccgacgaccccatgctccgcccctggcagccggccttccccccgatgcagcccatcgggttctgagaatctgagccttagccggcgggagagagccaatttctgttcgcgtgcccgtggctatctcgtattgggatatctaatcataaatcatccttgtcatggtttgctcttccttgtcagtggtataaattggcttcttgataggg

SEQ ID NO: 83672 - DNA, 550 bp, Zea mays
  unsure (1)..(550): unsure at all n locations
tgggaaggacgcggagtacgtcatcaggaagtctatgatcatctcgtnacgnccgcaacggttcggaataaccgggctgacccacgcgtacgctttatactgtaataataaagttctcattctgatatgtgcaacttctcagtgataaaagatcagagatctatactaaaaatacacaagaaataataaaaaaatagaaaaaaaaaaaaaaaaaaaaagctatagaaaaaagaaaaaaaaaaaaaaagtaaaaaaaaaaaaaaacaaaaaaaaaaaaaagggggggcatcttttaaggatcccagattaagttacccgtcttgaaaagtcataagctcttttttggtgtaccctaatcaaactagaatgggcgctggtttaaaaaattatagaccgggaaaaccctcggggttacccaaattaatatggtatggacacaaaacaccctatttacataacgaggtttaatacgtataaggcctctaagaaatatacagcttataaaacattatcgcaaccctaagaggcaaagtgaaacccccccgttagg

SEQ ID NO: 83673 - DNA, 511 bp, Zea mays
tggttggaggaggtgctgtgttcgaaccgcagccgtagcactgccgtaccggtccggaattcccgggtcgacccacgcgtccggttcccgtctctccgccgcttccttggaagacgaagaaaccctcctccaccaccaacccgatccagctacatccgttgaggcccgtgcgtttcttccctgttctcccatcaatcgacctagccttacgccgaccaggggcttcctctaatcgatctggtgtctgttctgtggtcttttggtctgggtgcactccagggccaggagcagctagccgtcttcgttcgatccgttcgcatccccaacgcggttcgatttgaaggagcgtgatggccaagacgagctcgttcaagctggagcaccccctcgagaagaggcaatctgaggctaaccgtatcagagagaagtaccctgacagaattccagtgattgttgagaaggctgagaggagtgatattcctgacatcgacaagaaaaagtacctcgtcct

SEQ ID NO: 83674 - DNA, 532 bp, Zea mays
  unsure (1)..(532): unsure at all n locations
agagtagaggngtggtagtgcgatgaatagtaggactggatgacgctagtcacngccgtaccggtccggaattcccgggtcgacccacgcgtgcgcggacgcgtgggcggacgcgtgggcggacgcgtgggcggacgcgtgggcgcagcaggcatcttacctttatcacccttgttcctccaacaaccgtcagccctattacagcagttacctttggtgcatttgttggcacaaaacatcaaggcacaacaactacaacaacttgtgctaggaaaccttgctgcctactctcagcaacagcagtttcttccattcaaccaactggctgcattgaactctgctgcttatttgcaacaacaactaccattcagtcagctagctgctgcctacccccagcaatttcttccattcaaccaactggcagcattgaactctgctgcttatttacaacagcaacaactaccaccattcagccagctagctgatgtgagccctattgccttgttgacacaagaacagttgttggccgtct

SEQ ID NO: 83675 - DNA, 513 bp, Zea mays
  unsure (1)..(513): unsure at all n locations
agtcagagcgcggngtctgacgatgcaggactgagtcntgcggtaccggtccggaattcccgggtcgacccacgcgtacgggctggaggacctgttggcggaggttgtccgactgcatgcacttaacacgtccacgcctgaacggagtggctgggggaaaccagaaacagaatatactaaaaatggtcctggtgcacctggtgggcaatcatggacagttgaatggctgatgtttgataacagttacttcaaggatatcaaagagaaacgagatcaggatcttgtgtcctacctacagatgctgctttatatgaggacctccagttcaaggtgtatgccgtgaaatatgtgcaggaccaagaatcattgttaacagactctcatgacgctcatgctaagccgatctaattgggcgcgccgttgcatataccgtattggtatatttattcataaaatcatcggtccagaaccacagtccgtgaaacatgaaaaccctgttctctgaaaggaatg

SEQ ID NO: 83676 - DNA, 513 bp, Zea mays
  unsure (1)..(513): unsure at all n locations
agatagaggcggtctcagaggctggcagtcgangctatggcgtcncggttcggatttccgggtcggacccagccgtccggctgcaccgcagcaccgaacacgaactttggcataacgaagctgaagtagttcgctgtgaacccagtatggcaaacgcgccgaggatcctggccctcggactgctagcgctcctgtgcgctgccgccggaccggccgccgcgcagaactgcggctgccagccaaacttctgctgcagcaagttcggctactgcggcacgaccgacgcctactgcggcgacgggtgccagtcgggcccgtgccgctcgggcggcggcggcggcggcggcggcggcagaggcggctgaggcagtggcggtgcgaacgtggctaatgtggtcaccgacgcgttcttcaacggcatcaagaaccaagccgggagcgggtgcgagggcaagaacttctacacccggagcgcgttcctgagcgccgtcaacgcgtacccgggcttcgccg

SEQ ID NO: 83677 - DNA, 511 bp, Zea mays
  unsure (1)..(511): unsure at all n locations
aggtagagggcgtattcgtcggctgtcactcaggcgtgcgatgccgtaccggtccggattcccgggtcgacccacgcgtccgcccacgcgtccgcggacgcgtgggggatcacatacacttggaaggtccaggcctgaacggagtggctgggggaaaccagaaacaaaatatactaaaaatggtcctggtgcacctggtgggcaatcatggacagttgaatggctgaggtttgataacagttacttcaaggatatcaaagagaaacgagatcaggatcttctggtcctacctacagatgctgctttatttgaagacccaaagttcaaggtctatgcggagaaatatgcagaggaccaagacgcattcttcagagactacgctgaggctcatgctaaactgagcgaattgngtgcatagttccaaccaccgcagggattctctttggatgattagtgcggcaccagaaccacagttcgtgaaacaggaaaaccctgtcctttgaaaaggatc

SEQ ID NO: 83678 - DNA, 511 bp, Zea mays
gtttgaggaggactgtgcatcgagcgaacgctatggatgccgtaccggtccggaattcccgggtcgacccacgcgtccgagagttatagttcaataataaaggtatcagactgatgtttgaggcttaccagaaatcataaagtccatttctaaaaaaaaacaaaatgggcggccgctctagaggatccaagcttacgtacgcgtgcatgcgacgtcatagctctgctatagtgccacctaaattcaattcactggccgacgctttacaacgacgtgactgggaaaactctggcgtcacccaacttaatcgacttgcagcacatccccctttcgccagctggcgtaatagcaaagaggcccgtaccgatcgaccttactaacagttgcgcagcctgaatggcaaatgggacgcgctctgtagcggcgcattaagcgcggtgggagtagtggttacgcgcagcgtgaccgctacacttgccagtgccctagcgccccgttctttcgatatctt

SEQ ID NO: 83679 - DNA, 518 bp, Zea mays
  unsure (1)..(518): unsure at all n locations
agttagagcagggcttcgtggttgagacggtagctgtaggcactgcggtaccggtccggaattcccgggtcgacccacgcgtccggggcgataaaggtatgttgcttgcccttgttgtttcaacaatcgccagccctatctttggtgcagtcattggtacaaaccatcagggcacaacagctgcagcaactcgtgctacctctgatcaaccaagtagctctggcaaacctttctccctactctcagcaacaacaatttcttccattcaaccaactgtctacactgaaccctgctgcttatttgcagcaacaactattaccatttagccagctagctactgcctactctcagcaacaacaacttcttccatttaaccaattggccgcactgaaccccgctgcttatttgcagcagcaaatactactaccatttagccagctagctgcagcataccgtgcttacttcttgacacagcaacagttgctgcctttctaccagcagtttgcgggtaaccccgn

SEQ ID NO: 83680 - DNA, 516 bp, Zea mays
  unsure (1)..(516): unsure at all n locations
agggagaggaggntttnncactgagacttagccgctggactgccgtaccggtccggattcccgggtcgaccagcgtccggcaacatagaaagtggaatccagtagcaacaacagagctcaatggcgaccaagatattttccctccttatgctccttgctctttctgcatgtgttgctaacgcgacaattttccctcaatgctcacaagctcctatagcttcccttcttcccccataccttccatcaatgatagcttcagtatgtgaaaacccagctcttcagccctataggctccaacaagcaatcgcagcaagcaacatacctttatcacccttgttgtttcaacaatcgccagccctatctttggtgcagtcattggtacaaaccatcagggcacagcagctgcagcaactcgtgctacctgtgatcaaccaagtagctctggcaaacctttctccctactctcagcaacaacaatttctttcattcaaccaactgtctacactgaaccctgtt

SEQ ID NO: 83681 - DNA, 515 bp, Zea mays
  unsure (1)..(515): unsure at all n locations
agataggaggagtgtccgtagtagtangctgtagctgtagcgactgctcgtaccggtccggaattcccgggtcgacccacgcgtccggttggcttctcctccccctccggttcgggttcgggttcgtgaggttctccggggttcgggttcgtgggtgagcggatcgagatggcggcgtcggatgttgagtaccgctgcttcgtcggcggcctcgcctgggccacggacgaccactccctccacaacgccttcagcacctacggcgaggtcctcgagtccaagatcatcctcgatcgggagacgcacaggtcccgctgcttcggcttcgtcaccttctacacggaggaggcgatgcggaacgccatcgagggcatgaacggcaaggagctggacggacgcaacatcaccgtcaacgaggcccagtcccgcggcagccgtggaggcggcggcggtgggtactgcggtggccgtggaggcggcggctacggcggtggcgggcgccgtgatggcggtgg

SEQ ID NO: 83682 - DNA, 519 bp, Zea mays
  unsure (1)..(519): unsure at all n locations
agggggaggagtcgttctngactgagatggaagcgtcgcgactgccgtaccggtccggaattcccgggtcgacccacgcgtccggccacgcgttcgtccacgcgtccggcagccatcgctgacctccgccaggagatggcttcggatgacatcgagaagatcaaggccaagcttgaggctgccaacaaggctgtctcgaagattggtcagcacatgtcaggtggtggctctggcggctcgcagtcgggatctggacctcagggtggcggtgaccaggcgccggaggcagagtatgaagaggttaaaaagtgaggctgcgggaagttcaagcgaaattgtagtgacctgtttagaagtagctactcttttttgggaacacagatagtcagatgagatgtaaaacctgtgttgtaataatcgttggatttgcccccacttagtttccttctgcggcgatggaggtaacacgacatttcattgcttttggtgcatatgatgccttgatctggcatggatgcc

SEQ ID NO: 83683 - DNA, 518 bp, Zea mays
  unsure (1)..(518): unsure at all n locations
aggaagtgagcacgtgtccgtggactgaggctgnaggctgtagcgactgccgtaccggtccggaattcccgggtcgacccacgcgtccggtcatctgctccaagtgcaagggcaagggctcgaagtctggtgcctcaatgaggtgccctggttgccagggctcaagcatgaaagtcactattcgtcagctgggcccttccatgatacagcagatgcagcagccttgcaatgagtgcaaggggactggagagagcatcaatgagaaggaccgctgtccagggtgcaagggtgagaaggtcattcaagagaagaaggttctcgaggttcatgttgagaaggggatgcaacacaaccagaagatcaccttccctggtgaagctgatgaagcgcctgatactgtcactggagacattgtattcgtcctccagcagaaggatcactccaaattcaaaagaaagggtgaagatctcttctatgagcacaccttgtctctgaccgaagcactatgggggttccaa

SEQ ID NO: 83684 - DNA, 512 bp, Zea mays
  unsure (1)..(512): unsure at all n locations
cgttaaggctgtgtcgaggctgtagctanagcatgacgtaccggtccggaattcccgggtcgacccacgcgtccgcccacgcgtccgcccacgcgtccgcctaaaccctcgctacccggcggcggctacaagctcttcgtcggttcagcaccatgaggccaccggctagaggaggacgtggtgggagggtggcaggttcgatggcggcggccgtgggggcggcggcggcggccgtgggtttggcggtggtagaggcgggagaggggacaggggagggagaggtggcaggacccccagaggcggccgtggcggcggtggcaggggtggccgcggcggtggcatgaagggcgggagcaaggccgtcgtggtggcgcacaagcacgccggtgtcttcatctccaagtccaaggaggatgcgctctgcaccaagaacatggtcccgggagagtccgtgtacggagagaaacgtggctccgttcagaatgaggatggaacaaaagttgaattcaagg

SEQ ID NO: 83685 - DNA, 517 bp, Zea mays
  unsure (1)..(517): unsure at all n locations
agttgaggagggtctgtcgattgaagatgaaagctgngcgactgcggtaccggtccggaattcccgggtcgacccacgcgtccgcccacgcgtccgcggacgcgtggggagttgccaaggttaagattgttgtgtgaatcttacttgtgcaagcatatttctgtaaattccgtggcaactactctagcattggctgatcggcaccatgctatggagcttaaatccgtttgcctcaaatttgctgccgaaaacctgtcagctgtgatccggactgagggtttcgactatctcaaagacaactgcccatctctgcagtcagagatactgcggacagttgccgggtgtgaggagccatgtagcagcggcttgaaaagccagagcgtgtgggcgcagctctctgacggcggcgacaccagcgggcgcagggtgaggccaagggtctgagacgcaaaccccggaagcactgacctttgtaatcaaaagctgttgtggtgtaaatgggacggcttttcttaat

SEQ ID NO: 83686 - DNA, 519 bp, Zea mays
gggtgggagcagggtctcgtgttggaggctggaagctgtacgcactgccgtaccggtccggaattcccgggtcgacccacgcgtccggtgattaattgcatgccaagtatgctttatatcaatgcttcttttttgttgtcactgtcttctgctgatgaatctgaactaactgaaaacattaaccgagtttgtcatagtcttgaatttcattgctgttgtccttgttgtagtaagcttttaattctcgacaggctgaggatgatgatgaccttgatctttttggtgatgaaactgaggaggacaagaaggcagctgatgagcgtgctgccgctgccaaggcctcttctaaaaagaaagaaagtggtaaatcctccgtccttatggatgtaaaaccatgggacgatgagactgatatgaagaagctggaggaggctgtccgcagtgtccagatggagggtctgacttggggagcatcaaagcttgtgcctgttggatacggcatcaagaagatgactatca

SEQ ID NO: 83687 - DNA, 508 bp, Zea mays
  unsure (1)..(508): unsure at all n locations
agaaagtagctgtgttgtggctgaggctcacgcgtngcgatgccgtaccggtccggaattcccgggtcgacccacgcgtccggccacagcgtacggccacgcgtgcgtccactcgtacgaccacgcgtgcggccacgcatacgcatttgttcaggtgaagctggtagccgtgcaacttggagtaccaggacgagttggtgctgtggacggagagcggcgacgtgggcaagggcttcagatgcatgcgcatggtgaacaacatacgactgaacttcgacgccttatacggctacaagggccacagcgggttgctcgacggcaccaccgtggtgctgtgggagtgtgccaaaggcgacaaccagagctggaagatcctggcatggggcgacgaggactacgccgtgtgaggcagcagagacgtcaacgcgccctggttcgtggtggagggagagcccaacgttcgcatctactgcaaggccgacaaagtgatcagtgccacggttcagag

SEQ ID NO: 83688 - DNA, 520 bp, Zea mays
  unsure (1)..(520): unsure at all n locations
agtttagagtgctgttttcggcggctgctagccgacngcaatggcgaacncggttcggaattcccgggtcgacccacgcgtacgtgctaggctgaccattgatccaaataccaatccgtggaacacaaagctgcagaagatgactggctacaaagtttctgaactcaaggattgcatcgtagccatacatgacttgcagctcaacaggaaatgtccatcattaacggcaattcgagacaagtacaagcagcacaagttcaaatgcgtgtcattgatcctcgtgcctgtcgtgatccctacttcatactttgaagacttagctgagtagctgctctcggactgtaccgctgtaaggctaacaatctgagctctccttgagctcttagggacaagcagaaaataaccgtttgatgagctttcctctcatttaagtagcgtggtgaaagctattggtttgaggttctttaggattcgcgccgctgtgtcactcttagtgagaccaggcattctcttgcttggn

SEQ ID NO: 83689 - DNA, 513 bp, Zea mays
agggagatgctgtgtcggcttctgctatcgtatgcatgacgtaccggttcggaattcccgggtcgacccacgcgtccggtcaacactaacagtagacgaattctttagtttctttgcaagatatgggactgtggtggaccaccagattatgtttgatcatgaaaccaaacgttcccgaggctttggatttatagtttttgcttctgagcaagttgtagatgatttgttagcaaatggaaatatggttgaccttgctggttcaaaggtggagatcaagaaagcagaaccaaagaaatccttcaatgcaccgtcaccaccagtgcatgttagaaatgctatgtcagcatatgatagcggctctagagaccacccttcagctgacaactatggtggaatggccagtgcttatggaaacttacagggtggtgggatttgtcccttataggagcgacacaagattcagtgcttgggttagcatcttttgtggggtagttgattttgttgtgccatatg

SEQ ID NO: 83690 - DNA, 517 bp, Zea mays
  unsure (1)..(517): unsure at all n locations
tgttagaggagtacttcgtggttgagacggacgctgtnggactgcggtaccggtccggaattcccgggtcgacccacgcgtccgcccacgcgtccgcccacgcgtccgcctacgcgtccgcttcaaccctacaggatccaacaggcaatcgcagctggcatcttacctttatcacccttgttcctccaacaatcatcagccctattacagcagttacctttggtgcatttattggcacaaaacatcagggcacaacaactacaacaacttgtgctagcaaaccttgctgcctactctcagcaacagcagtttcttccattcaaccaactagctgcattgaactctgcttcttatttgcaacaacaacaactaccattcagccagctacctgttgcctacccccagcaatttcttccattcaaccaactggcagcattgaactctcctgcttatttacagcagccacaactactaccatttcacccgttaacctgtgtgaaccccggctaccttctga

SEQ ID NO: 83691 - DNA, 517 bp, Zea mays
  unsure (1)..(517): unsure at all n locations
agcttgaggagggcttgtgcatcgtacgnacgcatngcgactgcggtaccggtccggaattcccgggtcgacccacgcgtccgcccacgcgtccgattgagaccaactagcaacatagaaagcacaatagtgtaccaacaatggcagccaaaatattttgcctccttatgctccttggtctttctgcaagtgctgctacggcgaccattttcccgcaatgctcgcaagctcctatagcttcccttcttcccccgtacctctcaccagcggtgtcttcggtatgtgaaaacccaattcttcaaccctacaggatccaacaggcaatcacagctggcatcttacctttatcacccttgttcctccaacaatcatcagccctattacatcagttacctttggtgcatttattggcacaaaacatcagggcacaacaactacaacaacttgtgctagcaaaccttgctgcctactctcagcaacagcagtttcttccattcaaccaactaactgcattgaa

SEQ ID NO: 83692 - DNA, 508 bp, Zea mays
  unsure (1)..(508): unsure at all n locations
agggaggagcaggtgtcggcggctggagttgangctatgcgataccgttcggattcccggtcgacccacgcgtccggtcacggcgcgggagatcgaggacgatttccggatgtttggggttctgaggagtgtatgggttgctaggaaaccaccagggtttgccttcattgactttgatgaccgcagggatgcacaagatgccattcgtgaattggatggtaagaatggttggagggttgagctgtcaactaaagttggtggtggccgtggccgagaccgtaacggttctgatatgaagtgctatgagtgtggtgaagctggccactttgcacgtgaatgccgcttacggattggttcaagaggcttgggtagtggaaggcgtcacatccgaagtcctagatatcgcagtcgcagtcgcaaccgcagcccaagatatcgaaggagcccaagctatagcagaagcccgcgagatcggtctcctaggaggcgaaattacagcaggtcgcca

SEQ ID NO: 83693 - DNA, 498 bp, Zea mays
agggagagcagggtcgggtctgtgatcgagcatggcgaaccgttcggaatcccggtcgacccacgcgtacgctggcccggggcgaggccgaggctaggtccgcgcaggtgctcgtgcgcatgtacggcgcgggcgtcgaggtcttcttcgaccgcgccgacgaggtccgtaccttcgagtgcatgtcgcgccacggtcaggggccccgtctcctgagccgcttctgcaacggccgagtcgaggagttcatcaacgccaggaccctcttagctgaggatctgcgctacacggatatgtgcgcgctgattgccagcaagctgcgcgagttttacgatctccacatgcctggacctagggacatgtcattggggcagaggcttcaagcggaggattgttgaggctcgtaaaaggggtttagaggaatagtctaacgaattgagctgaataaactatgtgaggaaattttagtgttggaaaagacagtttcggggttacaaa

SEQ ID NO: 83694 - DNA, 514 bp, Zea mays
  unsure (1)..(514): unsure at all n locations
gaaagaggaggattgtgcatcgagcggacgctgtgcgactgcagtaccggtccggaattcccgggtcgacccacgcgtccgccctgttgatgctgtcttccataaggatgagatgattgacatcattggtgtgaccaaggggaaaggttatgagggtgtggtcactcgttggggtgtcacccggcttccccgtaagacccacaggggtctccgcaaagttgcttgtatcggtgcatggcatccggctagggtctcctatacggttgcccgtgctggtcaaaatgggtaccaccaccgcactgagatgaacaagaaggtttacaagatcggcaaggctggacaagagacccacgatgcctncacagagtttgacaggactgagaaggacatcactcccatgggtggcttcccccattatggtttcgtgaaaggtgactacctgatgatcaaaggctgctgggtggggtcaaaagaagagggtggtgacccttccgcagtcccttctgaagcagan

SEQ ID NO: 83695 - DNA, 457 bp, Zea mays
  unsure (1)..(457): unsure at all n locations
aggtagagcagggtcgtgtctgagcgtagctatgcaccggtcggaattcccggtcgaccacgcgtccgacaggtcgcaagccataatgataagacctgcatgctctctcttgaagtgaccagatcggtctgtgaccgagagttcgaagctgtcatgatgtccaagcgcgccggatggggaggatggcaagccacaagagtggcgagacagagacaccttcattgctgccgtttattggctggctacgggccaaatcagacgggagctcttggcggctgaaccctgccaaatccaccagttgtcagattgaggaaaacttggggatccctgtctaccctggcaaagtcaagggcccatggagcctacttaaaaggagaagtgggtatggtttatgtggagtttctatcttgtgttccttttggtccatggtttgacggcccaataaatgttggtctan

SEQ ID NO: 83696 - DNA, 512 bp, Zea mays
ggttgtaggctggggtcgtctgcgatgacgtcagcatggcgataccggtcggaattcccgggtcgactcacgcgtccggaggagctggcgaacctcgtgatcgttgccggtgaccacggcaaggagtccaagggcagggatgagcaggcggagttcaagaagatgtacagcctcatcgacgagtacaagttgaagggccatatccggtggatctcggcgcagatgaaccgcgttcgcaacggggaactgtaccgctacatttgcgattcgaaaggcgcatttcgtgccagctgcgttcttcgaaacggtcgggctgactgggatcgaatccatgacgtgcggtctgccaacgatcgcgaccttccatggtgggccctctgaaaatatcgtggactgggtatttggcctggacattgaccctttccacagcgacaaggccttggatattccggttaacgtttttgaccaatgcaatgcagattctagctactgggacaagaacttcctaggcg

SEQ ID NO: 83697 - DNA, 520 bp, Zea mays
  unsure (1)..(520): unsure at all n locations
ggtagaggagggactgtgcgttgagacggacgcagtngcgatgcggtaccggtccggaattcccgggtcgacccacgcgtccgcccacgcgtccgctttcctattcgcgccgccgccgctgctgcaagcgccagctcgccgtcgtccgaatagtacactctaacgccgccatggggcgtatgcacagccgcgggaagggtatctcgtcgtcggcgctgccgtacaagaggacgcctcctacctggctgaagaccgccgcctccgacgtggaggagatgatcacaaaggcagcgaagaagggacagatgccgtcgcagatcggcgtcctgctccgtgaccagcacggtatcccccttgtcaagagtgtcaccggcagcaaaatcctccgcatcctcaaggcccatgggctggcacccgaaatcccggaggacctgtacttcctcatcaagaaggcggtggcgataaggaagcaccttgagaggaacaggaaggacaaagactcttaattcagggttattct

SEQ ID NO: 83698 - DNA, 510 bp, Zea mays
  unsure (1)..(510): unsure at all n locations
gatagaggagcntttcgtgactgagctgaggctatggatgccgtaccggtccggattcccgggtcgacccacgcgtccgcaagtagctctggcaaacctttctccctactctcagcaacaacaatttcttccattcaaccaactgtctacactgaaccctgctgcttatttgcagcaacaactattaccattcagccagctagctactgcctactctcagcaacaacaacttcttccatttaaccaattggccgcactgaaccccgctgcttatttgcagcagcaaatactactaccatttaaccagctaggttgaacaaaacggggcttctttttgaacccacaaccggtgctggctttctaacaacaatttgggggttaccccggaacccttttaccactaccacaattggtggcctttggccaacttgctttgaccgacccaacgggcttctaacaacaacacatcattggtggtgcccttttttaaaatggttattaattggaatt

SEQ ID NO: 83699 - DNA, 520 bp, Zea mays
  unsure (1)..(520): unsure at all n locations
agaagaggagggagtgtatgctgagacgaaagctgtacgcactgcggtaccggtccggaattcccgggtcgacccacgcgtccgcccacgcgtccggagaaatcaacggaacacaacatatgtggatgctgtgatgacggttccgcttggtgccatgctgcctgtgagcgggataaatgttgcattcaaccgcgatgtgctggggcctgctatgttcccaggcctgcgtctacgaaacgaagggaagcacagatgggatacccttgaagacatatggaatggcttatgtgctaaagtagtctgcgacagcttgggatatggtgtgaagaccggactgccttatgtgatgagaagtgatgcagaagcaggtaaagctctggagagcttgaaagagtgggaaggggtaaaagtcatggatgatgttctcccattcttccagtcgctcaagctatcgaggactgcagttactgttgacgattgtgttaaagagcttgctggaattgtccgtgagaaactaagn

SEQ ID NO: 83700 - DNA, 515 bp, Zea mays
gctagaggccgtgtcgccgctgatgcttaggcagtgcgcactgcggtaccggtccggaattcccgggtcgacccacgcgtccggtgcgctccatcaccacccagttccaggccgtcgtcggcatctcgctgctggagatcctgtccagccactcctccgacgaggtgtacctcggccagcgcgacaccaaagagtggacgtcggacgccaaagcgcaagaagccgtcaagccggtccgcgccccgctgaaccagatcgaaaaacccctggaaggcatggaccaggacccgggcctcaagaaccggttccaggcgggccaagttccctacaacctggtttttcccaacaacttccacaagggccaccaccacggcgttaacggccagggcaatcccaaccagattttcaactgaatccaaccaattctggccaagcgttcaaccaaaaaaaccaaacctgccgtgaattccttaagcaaccgcgttaatttttacctgtgataaaaaccgggtaaa

SEQ ID NO: 83701 - DNA, 511 bp, Zea mays
agtagtatctgtagtcggaagctggagccgtagcgcactgccgtaccggtccggaattcccgggtcgacccacgcgtccgcgagtccaagatcatcctcgatcgggagacgcagaggtcccgcggcttcggcttcgtcaccttctccacggaggaggcgatgcggaacgccatcgagggcatgaacggcaaggagctggacggccgcaacatcaccgtcaacgaggcccagtcccgcggcggccgtggaggcggcggcggtgggtacggtggtggccgtggaggcggcggctacggcggtggcgggcgccgtgatggcggcggcggctacggcggtggcggcggctacggtggcggcggcggctacggtggtggtggcggcggctacggcggtggcaaccgtggcggcggctacggcaactccgacgggaactggaggaactgagcggtggggcccgcgcggccaagttatcctgttcgctgccgtgatgtttaccctagtccagagggtt

SEQ ID NO: 83702 - DNA, 509 bp, Zea mays
  unsure (1)..(509): unsure at all n locations
tggtagtaggtgntgtacancactgangactgaaccgtagcgactgccgtaccggtccggaattcccgggtcgacccacgcgtccgcggacgcgtgggtatctccaaggatggccagacccgtgagcatgctctccttgctttcacacttggtgtgaagcagatgatttgctgctgcaacaagatggatgctactacacccaagtattcaaaggcccgttatgatgagattgccaaggaagccccccagtacctgaatggggcttgaaccaccaacctggccaggccacctggcacaaccagcgcttgccgcgagcgtcttacaacaaccaattgcccaattgcaacaacaatccttgccacatctaacaatacaagccatcacaacgcaacagcaaccacagttcctaccagcactgagccacctagccatggtgaaccctgccgcctacttgcaagagcagctgcttgcatccaacccacttgctcttgcgaacgtagttgcaaacn

SEQ ID NO: 83703 - DNA, 519 bp, Zea mays
  unsure (1)..(519): unsure at all n locations
aggggaggtgctgtgttcgatgacgctagctanagcatggcgtaccggtctcgaattcccgggtcgacccacgcgtncgcaagcaacatagaaagtggcatccagtttcaacaacagagcagcaatggcgaccaagatattttccctccttacgctccttgctctttctgcatgtgatgctaacgcgacaattttgcctcaatgctcacaagctcctatagcttaccttctttccgcataccttacatcaatgctagctccagactgtgaaaacccagctcttcaatcctatacgctccaacaagcaatcgcagtacgctacatacctttatcacccttgttgtttcaacactgcggcagtcctatctgtggggcaacacattggtacgaaccatcacggcacactaactgcagcgactcgtgctacctgtgattaacacgagttctctgtcaaacctttctccctactctcagcaacaacactatcttccattcaaccaactgtctacactgaaccct

SEQ ID NO: 83704 - DNA, 516 bp, Zea mays
  unsure (1)..(516): unsure at all n locations
agggaggggctcgtgttcgatgatgccagctgangctatgacgtaccggttcggaattcccgggtcgacccacgcgtccggggaagtcataaaagctggagctacgtttctcaatatcccggacactgtcggatacaatcttccttatgaatttggaaagttgattgctgatataaaggcaaacactcctggaattgaaaaggctatcatttccactcattgtcagaatgaccttggtcttgcgactgccaacacactagcgggcgctcgtgcaggagcacggcagttagaggttactattaatggtattggtgaaagggctggaaatgcttctttggaggaggttgtcatggcaattaaatgccgcagagaactgttagatggtctctatactggaatcgattcccgccatatcactttgacgagcaaaatggtgcaagaacatagtggacttcacgtgcagccacataaagctattgttggtgccaatgcgttcgctcatgaaagtggaattca

SEQ ID NO: 83705 - DNA, 523 bp, Zea mays
gttgaggaggtgctgtgttctgatacgaacgtcagtagcccactgcggtaccggtccggaattcccgggtcgacccacgcgtccgcccacgcgtccgcgcaaattgctccaagaaatccatcgagaggccgtcgacaggggaattaatggctgcttcaagtgcggcgagcctggccacatggccagggactgctccagcggcggcggcggctacggcggtggcggcggcggtggtggtggcggctgctacaactgcggccaggccggccacatggccagggactgcccaagcggtggcggcggtggcggagggaggttcggcggcggcgggggtggaggcgaccgctcctgctacaactgcggcgaggccggccacatcgtccgcgactgtaccacgtgaggtgtgtccgcgttcgtacagccagccagatcggatcggatcgtttcaccacctgctggtctgatgtggccatcccgcttctagatcttgctttataatacatgctccttttagttgggtggg

SEQ ID NO: 83706 - DNA, 514 bp, Zea mays
  unsure (1)..(514): unsure at all n locations
gggaggaggctaggggtcgtcgtctgaggacttagtcattgcgactgcggtaccggtccggaatcccgggtcgacnacgcgtccggcaacagccgcaaagcggtcaggtcgtggagctgatggcggcgcagatagcgcagcaactgacggctatgtgcggcctgcagcagccgactccatgcccatacgctgctgccggcggtgtcccccactgaagaaactatgtgctgtagtatagccgctggctagctagctagttgagtcatttaccgtcgacgattgagtaataatgtgtcacgcatcaccatgagtggcagtgtcagtgtgagcaatgacctgaatgaacaattgaacgacaagaaaaagtattggtccaaataaaaaactaatcaatgtcagtgtgaacatagacatccaatcattaagatggtatagatcggaaggaaaactatgttaaggggcggctgttctagatgtcccaggcttcaaacgtggtgctgaaaaagtataagaa

SEQ ID NO: 83707 - DNA, 526 bp, Zea mays
  unsure (1)..(526): unsure at all n locations
agttaggggctcgtgttggacgactgaggactgnagacagtngcgactgccggtaccggtccggaattcccgggtcgacccacgcgtccggtcttcttcgacatgaccgtcggcggcgccccggcgggccggatcgtgatggagctgtacgccaacgaggtgcccaagaccgcggagaacttccgcgcgctgtgcacgggcgagaagggcgtgggcaagtccgggaagccgctccactacaagggctccaccttccaccgcgtcatccccgagttcatgtgccagggcggcgacttcacccgcggcaacggcaccggcggcgagtccatctacggcgagaagttccccggcgagaaggttcgtgccccaggacaacggccccggtgtgctcttcattggccaaggccggcccaaccaccaacggttccaagtcttcatctgcaccggcgcgaccccttggctcgacggcaagcacgttgtcttcggccaagtcgtcgagggcatggacgtcgtcaaagccatcgag

SEQ ID NO: 83708 - DNA, 518 bp, Zea mays
  unsure (1)..(518): unsure at all n locations
gagtaggaggagtgtctgtngttggaagctgctagctgtaggcactgccgtaccggtccggaattcccgggtcgacccacgcgtccgggtgggttggcttctcctccccctccggttcgggttcgggttcgtgaggttctccggggttcggtttcgtgggtgagcggatcgagatggcggcgtcggatgttgagtaccgctgcttcgtcggcggcctcgcctgggccacggacgaccactccctccacaacgccttcagcacctacggcgaggtcctcgagtccaagatcatcctcgatcgggagacgcagaggtcccgcggcttcggcttcgtcaccttctccacggaggaggcgatgcggaacgccatcgagggcatgaacggcaaggagctggacggccgcaacatcaccgtcaacgaggcccagtcccgcggcggccgtggaggcggcggcggtgggtacggtggtggccgtggaagccgcggctacggcgggggcgggcgccgtgatggcggc

SEQ ID NO: 83709 - DNA, 517 bp, Zea mays
  unsure (1)..(517): unsure at all n locations
tggagggaggagtgtctgtgatcgaacatggagctctagcgactgccgtaccggtccggaattcccgggtcgacccacgcgtccgcccacgcgtccgcccacgcgtccgacaaaacatcagggcacaacaactacaacaacttgtgctagcaaaccttgctgcctactctcagcaacagcagtttcttccattcaaccaactaggttcattgaactctgcttcttatttgcaacaacaacaactaccattcagccagctacctgctgcctacccccagcaatttcttccattcaaccaactagcagcattgaactctcctgcttatttacagcagcaacaactactaccattcagccagctagctggtgtgagccctgctaccttcttgacacaaccacagttgttgccgttctaccaacacgttgcgcctaacgctggcaccctcttacaactgcaacaattgctgccattcaaccaacttgctttgacaaacccagcagtgttctaccaacaacn

SEQ ID NO: 83710 - DNA, 516 bp, Zea mays
  unsure (1)..(516): unsure at all n locations
aggtagaggtagggtctcnncttggaaaatggaagctgngcgcctgccgtaccggtccggaattcccgggtcgacccacgcgtccgcaacaagctacatagaaagtggaatccactctcaacaatagagcatctatggcgaccaagatattttccctccttatgctccttgctctttctgcatgtgttgctaacgcgacaattttccctcaatgctcacaagctcctatagcttcccttcttcccccataccttccatcaatgatagcttcagtatgtgaaaacccagctcttcaaccctataggctccaacaagcaatcgcagcaagcaacatacctttatcacccttgtttcaacaatcgccagcctatctttggtgcagtcattggtacaaaccatcagggcacagcagctgcagcaactcgtgctacctgtgatcaaccaagtagctctggcaaacctttctccctactctcagcaacaacaatttcttccattcaaccaactgtctacatn

SEQ ID NO: 83711 - DNA, 517 bp, Zea mays
  unsure (1)..(517): unsure at all n locations
aggagaggtgctgtgtcngacactgctatcgatcagcactgccgtaccggttcggaattcccgggtcgacccacgcgtccgcccaattcttcaaccctacaggatccatcaggcaatcgcagcaggcatcttacctttatcacccttgttcctccaacaaccgtcagccctattacagcagttacctttggtgcatttgttggcacaaaacatcaaggcacaacaactacaacaacttgtgctaggaaaccttgctgcctactctcagcaacagcagtttcttccattcaaccaactggctgcattgaactctgctgcttatttgcaacaacaactaccattcagtcagctagctgctgcctacccccagcaatttcttccattcaaccaactggcagcattgaactctgctgcttatttacaacagcaacaactaccaccattcagccagctagctgatgtgagccctaatgcctttcttgacacagcaacagttgttgccggtctacctgcacgc

SEQ ID NO: 83712 - DNA, 517 bp, Zea mays
agggagagtgctgtattcggccgatgaagcctacgcactgccgtaccggtccggaattcccggctcgacccacgcgtccgaacaatttcttccattcaaccaactgtctacattgaaccgtgctgcttatttgcagcaacaactattaccattcagccagctagctactgcctactctcagcaacaacaacttcttccatttaaccaattggccgcactgaaccccgctgcttatttgcagcagcaaatactactaccatttagccagctagctgcagcaagccgtgcttccttcttgacacagcaacagttgctgcctttctaccagcagtttgcggctaaccccgcaacccttttacaactacaacaattgttgccctttgtccaacttgctttgacaaacccagcagcctcctaccaacaacacatcattggtggtgccctcttttaaatggcttattagtggaaatccataataaaagtttttggataatgtatgtggccaaccagaaataag

SEQ ID NO: 83713 - DNA, 519 bp, Zea mays
  unsure (1)..(519): unsure at all n locations
gggaggggcgtaagttcgtcggctgatgactcagncagtacgactcgcggtaccggttcgcggttcgacccacgcgtccgcgacggtgagccgtgcgtccctcgaccagaagctcgccctcgccaagcgttgctcccgagaggcgaccctcgccggagccaaggcggcagcggtggcgactatcgcctccgcgatccccaccctggccagcgtgcggatgctgccatgggccaaggccaacatcaaccccaccggccaggcgctcatcgtctccacggtggctgggatggcctacttcatcgccgccgacaagaagatcctgtcgctggcaaggcgccactcgttcgagcaagcccctgagcacctcaagaacacctccttccagggcaccggccgtccccacccggtcttcttcaggccgtgagaccagaccttcgtccagagctagctacctacctcttttttcagttgccaatgcaagcaccaaatgcccaccgatgcatgcctggaataactacg

SEQ ID NO: 83714 - DNA, 516 bp, Zea mays
agctagggagtgacgtcgtgcttgagacgaacgcgtcgcgactgcggtaccggtccggaattcccgggtcgacccacgcgtccgcgactgggcaggttcttgctgaagacaaccaatatgatatagtgaaattctgcaaaaatgagggccttgttcttctagctgatgaggtatatcaagagaacatctatgtggacaacaagaaatttaactctttcaagaagattgtaagatccatggggtatggcgaggatgatctccctctagtatcgttacagtctgtttccaaaggatactatggagagtgtggtaaaagaggagggtacatggagattactggcttcagtgctccagtaagagagcagatctacaagatagcttcagtgaacttgtgctccaatatcactggtcaaatccttgcgagccttgtcatgaatccaccaaaggcttgggacgaatcatatgcttactacaagggagagaaaggatggaacccttgagtctttagctcgtcgg

SEQ ID NO: 83715 - DNA, 524 bp, Zea mays
  unsure (1)..(524): unsure at all n locations
tgggtgtgatgttagtatcgtcgtgttagaacgatggtaagctgtnacgcctgccgtaccggtccggaattcccgggtcgacccacgcgtccgcggacgcgtgggctagcaacatagaaagcacaatagtgtaccaacaatggtagccaaaatattttgcctccttatgctccttggtctttctgcaagtgctgctacgacgaccattttcccgcaatgctcacaagctcctatagcttctcttcttcccccatacctctcaccagcgttgtcttcagtatgtgaaaacccaattcttcaaccctacaggatccaacaggcaatcacagcaggcatcttacctttatcacccttgttcctccaacaatcatcagccctattacatcaattacctttggtgcatttattggcacaaaacatcagggcacaacaactacaacaactcgtgctagcaaaccttgctgcctacgctcagcaacagcagttacctttggtgcaattgttggcacanaacatcagggcac

SEQ ID NO: 83716 - DNA, 510 bp, Zea mays
  unsure (1)..(510): unsure at all n locations
gggagagagggtgtccgagctgaaggctggagccgntgaactgccgtaccggtccggaattcccgggtcgacccacgcgtccgaagaaggcgaacttactttctgctgatgatgttgagccagcacttatcccatccaagaccattcctgaccctgatgacaagaagccggaagactgggatgagagagctaaaattcctgatccagatgcagtaaagcctgatgactgggatgaggatgccccgatggaaattgcggatgaggaagccaccaagcctgagggatggttggatgatgaacctgaggagattgatgatcctgaggcagccaagcctgaggactgggacgatgaggaagatggtgaatgggaggcgccaaagattgacaaccccaagtgtgaagaggcacctggatgtggcgagtggaagaggccaatgaagcagaatcctgtttcaagggcaaggtgcatgcacctatgatggacacccccaacttcaagggaatcggaaa

SEQ ID NO: 83717 - DNA, 527 bp, Zea mays
gttggttgtgtgttgactctgttagcgtacgctgccgtaccgtccgtattcccgggtcgacccacgcgtccgaagatattagccctccttgcgctccttttcctttcagtgagcgcaacaactgcattcattattccacaatgctcacttgctcctaatgccattattccacagttcctcccatcagttacatcaatgggcatcgaacaccctattgtgcaagcctataggctacaacaagcgcttgctgcgagcgttttacaacatccgtttgcccaattactacatcaattcttgtctacatttaaccatacttacctttttttctcatcttgtagctactgtttttctcctatttttgccatctatctctttggtacatctgtttttttcttttttatcttttgttttttttttatccttttttttttgctttttatttttatttttttttttttattttatttttttatttttttctttatttcttgttttctttattttctttttatttttttttttaattt

SEQ ID NO: 83718 - DNA, 529 bp, Zea mays
cgattagggtctgggcttgaagtcaggaatacgtacgcatgcagtaccggtccggaattcccgggtcgacccacgcgtccgcccacgcgtccgggcaaaccctgctgcctacttgcaacagctgcttccattcaaccaactgactgtgtcgaactctgctgcgtacctacaacagcgacaacagttacttaatccactagcagtgcctaacccattggtcactgccttcctacagcagcaacaattgctaccatacagccagttctctttgatgaaccctgccttgtcgtggcagcaacccatcgttggaggtgccatcttttagattacatatgagatgtaatcgataatggtgccctcataccggcatgtgtttcctagaaataatcaatatattgattgacatttatctcgaataaaaaaataaaaaagggcggccgctctagaggatccaagcttacgtacgcgtgcatgcgacgtcatagctcttctatagtgtcacctaaattcaattcactggcccgcgttt

SEQ ID NO: 83719 - DNA, 527 bp, Zea mays
ggttaggcagggttgtgtctgatacgtatgtgtacgcctgcagtaccggtccggaattcccgggtcgacccacgcgtccgcccacgcgtccggcaacatagaaagtggaatccagtagcaacaacagagcaacaatggcgaccaagatattttccctccttatgctccttgctctttctgcatgtgttgctaacgcgacaattttccctcaatgctcacaagctcctatagcttcccttcttcccccataccttccatcaatgatagcttcagtatgtgaaaacccagctcttcagccctataggctccaacaagcaatcgcagcaagcaacatacctttatcacccttgttgattcaacaatcgccagccctatctttggtgcagtcattgttacaaaccatctaggcacaacagctgcagctactcgtgctacctgtgatcaacctagtatctctggctaacctttcttcctactctcagcatcaacaattttttccattcaaccaactgtttacactgattcct

SEQ ID NO: 83720 - DNA, 515 bp, Zea mays
ttttgactacctacctctcagtacggcgtacggattcgcggttcgaggcacgcgtccggcgacgcgtgccggctaaccctgctgcttacttgtaacagctgcttccatttaaccaacgtgactgtgtcgaactcttgctgcgtacctacaactgcgacgacaggtacttaatgcactagcagggcctaacccattggtcactggctttctacagcagcaacaattgctatccatacagtcagttctctttgatgaaccctgccttgtcgtggcagcaacccaatcgtggaggtgccattttttagatttcctatttatatgttaatcgataatggtgcccttataccggcttggtgtttctctgtaattatctatttattggatgcctttaatcttgtagttattaatttaagggcctgccgttttatgagtgtcaagcttactttatggggccttctaatttttaatccattttttaggtgccttttaatttttatgatcttggtcttgttttg

SEQ ID NO: 83721 - DNA, 522 bp, Zea mays
ggttagggtgtttagttacgatcgtacgcatccgtaccggtccggaattcccgggtcgacccacgcgtccgattcaaccatataggcttcaacaagcaatcgcagcaagcaacatacctttatcgcccttgttgtttcaacaatcgccagccctatctttggtgcagtcattggtacaaaccatcagggcacaacagctgcagcaactcgtgctacctctgatcaaccaagtagctctggcaaacctttctccctactctcagcaacaacaatttctttcattcaaccaactgtctacactgaaccctgctgcttatttgcagcaacaactattaccatttagccagctagctactgcctactcttagcatcaacaactttttccatttaaccaattgtccgtactgaaccccgctgcttatttgcagcagcaaattctactaccatttaaccagcttgctgcagcaaaccgtgctttctttttgacacaactacagttgctgcctttctaccatcaatttg

SEQ ID NO: 83722 - DNA, 539 bp, Zea mays
gttttagtgcgtggggtggaccactgtattcgtacgcgtgcgtaccgttcggattcccgggtcgacccacgcgtccgatcgggatatcaaaggggctaatcttctaataactggtggtaagttgttaaaactcgcagattttggccttgcaaggctgttcactagagacggatctttaacaaatcatgtcatcactttatggtaccgaccttcttagttgctttttggtgccacaagttatgctgaacctgttgatattttggttgttatttgcatattttcagtatttttacttttgattactttttattccttttttttttgtttttgtgctattttttttttttttatattcttatatttattttatatctttgtttttttttttatatattttgttttgtttttttttattttattaattatttttcttttgttttttttttttattttattttttctttttgttatttttttataatttttttttattatttttaattttttgttattataattttttattattattttttttt

SEQ ID NO: 83723 - DNA, 554 bp, Zea mays
cggattggagttcgtggggtcgatctcagactacgtactgcgtctacgtaccggttcgggattcccgggtcgacccacgcgtccggttggcttatcctccacatacggttcggtttcgggttcgtgaggttctacggggttcgggttcgtgggtgagcggatcgagatagcgacagtaggatgttgagtaccgctgattagtcggcagtctctacagagtcacaaacgactacttacttcataattacttgagtacctacagccaggttatcttgtataatatcaaactcgattgttataacactttattgtttgactagtcattttataaattatctataattatataaaccatgatttatctaattttatgtacttatcttttgtgcagtaatattttcttaatcttaattggctcaataagctttaacatacttttgtttattgttattctattaagtaattttatgatatatattatttatataattttttaatatataataatttagtattaattatattataatgtttaaatatttaattcttcttgt

SEQ ID NO: 83724 - DNA, 526 bp, Zea mays
agggttaggcagtattgtgtacgatactgaagcgtacgcctgccgtaccggtccggaattcccgggtcgacccacgcgtccgcaacaagcaacatagaaagtggaatccagtagcaacaatagagcaacaatggcgaccaagatattttccctccttatgctccttgctctttctgcatgtgttgctaacgcgacaattttccctcaatgctcacaagctcctatagcttcccttcttcccccataccttccatcaatgatagcttcagtatgtgaaaacccagctcttcaaccctataggctccaacaagcaatcgcagcaagcaacatacctttatcacccttgtttcaacaatcgccagccctatctttggtgcagtcattggtacaaaccatcagggcacagcagctgcagcaactcgtgctacctgtgatcaaccaagtagctctggcaaacctttcttcctactcttagcaacaacaatttcttccattcaaccaactgtctacattgaaccgtgctgtt

SEQ ID NO: 83725 - DNA, 545 bp, Zea mays
  unsure (1)..(545): unsure at all n locations
aggggaggcgagtgtcgcgccatagaangcatggacgccgctgtaccggtccggaattcccgggtcgacccacgcgtccgcgtgccagctgcagggaacctgcggcgttggcagcaccccgatcctgggccagtgcgtcgagtttctgaggcatcagtgcagcccgacggcgacgccctactgctcgcctcagtgccagtcgttgcggcagcagtgttgccagcagctcaggcaggtggagccgcagcaccggtaccaggcgatcttcggcttggtcctccagtccatcctgcagcagcagccgcaaagcggccaggtcgcggggctgttggcggcgcagatagcgcagcaactgacggcgatgtgcggcctgcagcagccgactccatgcccctacgctgctgccggcggtgtcccccactgaagaaactatgtgctgtagtatagccgctggctagctagctagttgagtcatttagcggcgatgattgagtaataatgtgtcacgcattaacatgggtggcaatgttagttttagcaatgac

SEQ ID NO: 83726 - DNA, 549 bp, Zea mays
  unsure (1)..(549): unsure at all n locations
agagatgagggctgaggtgtcgtcgtcgaatcgaannaactgaagngcagtcacgcctgcacgtaccggtccggaattcccgggtcgacccacgcgtccgctcaagttcatcgacacatcgtccaaatttgggcacggtcgcttccagactaccgatgagaagcagaggttctttggcaagctcaaggcgtaaggtgctgcggtgcagcgaagtcccatttctcaaaatcatcaaactgtgatacttttgtttgtaaccttgctgtaccaagttttgtagccatggtccggtcgtctatggattgttccatgcttcagaactgcactgtctatgttttgtgctattttggttgtttaatgccccaatcattgcatataaaaaaaaaaaaaaaagggcggccgctctagaggatccaagcttacgtacgcgtgcatgcgacgtcatagctcttctatagtgtcacctaaattcaattcactggccgtcgttttacaacgtcgtgactgggaaaaccctggcgttacccaacttaatcgccttgcagcaca

SEQ ID NO: 83727 - DNA, 465 bp, Zea mays
ggttgaggtgggtcgtgttgtattaatgtcgtcgtacgcgtacggtttgcggtcgagcacgagtcagcgtcgacagcacataaagtttatccttagcaacaattagcacatggcgaccaggatatttcctcttatctcttgtcttctgcatgtgtgctaacgctacaattttcttaagctcacaagctctaagcttcttttttcccatacctttcatcaatgatagcttcagtatgtgaatactcacttttaactctatatgctctacagcaatccattagttacattaccttatcacccttgttttactattgactgtctatttttttgtagctatggtctaacattagtcttctcattttttcaactttttctctctttatatttcttttatcttgtcttctttatatatattttattttttccttttttatttttaattttttttttttttttatctactcg

SEQ ID NO: 83728 - DNA, 535 bp, Zea mays
agattaggtagtgctgtagtatgatacagtaccgtagcgatgccgtaccggttcggaattcccgggtcgacccacgcgtccgcccacgcgtccggcaacatacatagtgaagtacactagcaacatcttaacaccaatggcagccaatatatttgccctacttgccctaacttgctctttcagcaaacgttgctactcgcactattattgcacactgctcacaacaatacctctttccggtgacagccgcgagatttgaatacctatctatacaatcctacttgctacaataggccatcgtattaagcatcttacagtcgttagcatagactgtcctatatccatatgctctattttacatctattcttattgaatctttatcttcaaagtattgtaatatttcttctacttataactatagctttcaacattctatacatttttttttagtgatattttttgcttaactcctttattttaatatttatttttcatttctatcttttttctttttttgattccttgtttcttatg

SEQ ID NO: 83729 - DNA, 526 bp, Zea mays
  unsure (1)..(526): unsure at all n locations
cgtattaggcgtgggtcngcttcagtatgcgtacgcatgccgtaccggtccggaattcccgggtcgacccacgcgtccgccgtggagttctccaccctctaccacggtgttcccgggcacctacccaagcctgacgacgaagcctccgagtccattctcttccgggtgaagatggtctgccggatccacgggtcaggcgacgtggttctcgactacgaggtaaaccccaggagcgacctccctccccttccccgggtgggcgtcgtgttcagcgccgggaggtccctgagccacgtcacgtggtacgggcgcgggcccttcgagtgttacccggaccgcatggcggctgcgcacgtcggcgtgtacgagagcagcgtggaagagctgcacgtgccgtacattgcccccgtggagtgcggcgggcgggctgacgttaggtgggtggcactttcggacgctcgtcggctcggtctgtaccctttggcgctacggggtttcctgtgatgcatattatcgcgagcttctg

SEQ ID NO: 83730 - DNA, 535 bp, Zea mays
ggtttggaggtagtaatgtcgtgtattgaatacggtatgtcgtacgcactgcacgtaccggtccggaattcccgggtcgacccacgcgtccggaatgaagggattgtgccagggttgatgacctacggagcagtggtggatgggctggtgaagtgtgggagagtggaggatgcatggaaggtggctcaggaaatgggggggcagggactagcacccagtgagtttgtgttctccgctgtgatcaccgggttttgcaagtcaggagaggttgacagggcattgatggtgtgggagacaatggtggcagctagggtaaagccgaatgttgttttgtattcagtactgattgatggttttgcacggtctgggaggatgacagaatctgataagttatttgaagaaatggcttatgcgaaatgtatcttagatatttggacattcgttttaatgtgtctgttatttttttacttttttttttcatggttgtcttgttactttctgttatttgttattatatagtttgtttttttatcat

SEQ ID NO: 83731 - DNA, 519 bp, Zea mays
gtgggtctggttgcgtctctattccggagctgtcgcctgcagtaccgtccggaattcccggtcgcccacgcgtcggcaacaacatggtggagcaggagctgctggagcggctcctcggtaccagagcttctgtgctgctgaagacgctgtgctacctcgcccaaatctgtttccactgctttgacggcgagaacgtggagagtgctcctctcctatgaagaaggactacaaactggctaatcttctatgctgggaggaggaaccggatgccatggaggagaaggcgggagtgcttgatgagtaagacgggcttctggggtcgatttgcttctgagttgtttattttatatcgtcgcaatttcgtggttgtcgtttggttattctgtgaagcagccatgctctgctattgttatgaaattttgtcgtctgtaagcatgtgtactttctactttgccacatgcctgattctgtcttaataatttagtattcaattttttgtggtatttttgttttatcatg

SEQ ID NO: 83732 - DNA, 526 bp, Zea mays
gtatgagttagttattgtgttctgatacggtatgcgtacgcactgccgtaccggtccggaattcccgggtcgacccacgcgtccgcccacacagaaaaccctagccgccgccaccgaagcggcctcccaggtaagcaggagcgtccaccccgccgccgtcatgaagcgcaatccccgcgtcacgagctcccgccggaagtgccgcaaggcgcactttacggccccgtcctccgtccgccgcgttctcatgtccgccgggctgtcgacggagctccgccacaagtacaacgtgcgctccatcccgatccgcaaggacgacgaggtgcaggtcgtgcgcggcacctacaagggccgcgaggggaaggtggtgcaggtctaccgccgccgctgggtcatccacgtcgagcggatcacccgctagaaggtgtacggctccaccgtgaacgtgtgcattctccctttcaaggagatcgttcactatctgtaacttgactaggaccgtatggcgcttctgtaccttaagccg

SEQ ID NO: 83733 - DNA, 536 bp, Zea mays
ggttttagtcgtgtgtcggcctctgtattcgtatgcctacgtaccgctctcggaattcccgggtcgacccacgcgtccgcgagcggccgacctttttaattctatttttaagaatctaaaaatgtactatcttatctggggcaagccacaaacatcagacaaaaaactttattattgaactataactcataagaaatgtaaaagagggcaccaccaatgatgggttgttggtagaacactgctaggtttgtcaaagcaagttgtctgaatggcagcatatgttgcatttgttttacgattccatcttttatggacttcgatgtgtttgttatgcattatcttttttatgtttattttgtatataatttataatttttctatattttctttattgtattaatgctatttttttttaatatatattaattttatgcagttttttttggttaattatttgttattttttatttatatttttatttttttttttttattattttgtttctatttttttattttctttttattatttaatt

SEQ ID NO: 83734 - DNA, 543 bp, Zea mays
  unsure (1)..(543): unsure at all n locations
agaagtgcgtgtgtcacgccactggaagcatggacgcctgcagtaccggtccggaattcccgggtcgacccacgcgtccgccgacaactacatgttgcgtttgttctgcatcggcttcaccaagaggcgcccaaaccaagtcaagagaacctgctatgctcaggcatcccagatccgtcagatccgccgtaagatggttgagattatgatcaaccaggcttctacatgtgacctgaaagaacttgtttcgaagttcattccagaagttattggtaaggagattgagaagtctacctncagcatcttcccacttcaaaacgtcttcatccgcaaggtgaagatactcaaggcccccaagttcgatcttgggaaactcatggaggttcatggcgactacaaagaggatgttggtgtgaagcttgagaggcctgtcgagggagatgaggctgggcaggaagttgctgctgccgagtagtttgtttgctacttctgtatctaggctagtctggacattgagttgcttatgacctggacctattgagg

SEQ ID NO: 83735 - DNA, 540 bp, Zea mays
gtaaggctagtgttgtgcctacagtaatccgtatgtgtacgcctgcagtaccgtccgtattcccggtcgacccacgcgtccgcggacgcgtgggctcgccatacgcatggacaacctgtacctcgtgggcttcaggaccccgggcggggtgtggtgggagttcggcaaggacggcgacacccacctcctcggcgacaaccccaggtggctcggcttcggcggcaggtaccaggacctcatcggcaacaagggtctggagaccgtcaccatgggccgcgccgaaatgaccagggccgtcaacgacctggcgaagaagaagaagatggcgacactggaggaggaggaggtgcagatgcatatgcagatgctctatgcctctgatctggctgcttctgcatctgctgactcatatgctttcactatcagctagtctttgatctctttttttatttttttgcataattttgtattttcatttattttattagttctgtatattttgttattttaattatttaatattttttatcttattataat

SEQ ID NO: 83736 - DNA, 529 bp, Zea mays
ggtcttagggtagttatgtgtgtcagtatacgtagccgtacgcactgccgtaccggtccggattcccgggtcgacccacgcgtccggtcagtgctgtggacaagggttcagggaagaagcaggatatcacaattactggtgctagcactctgccaaaggacgaggtggagaggatggttggcgaagctgataagtttgcaaaggaggacaaggagaagcgagacgccattgacaccaagaaccaagccgagtcggtcatctaccagaccgagaagcaactgaaggaactaggggacaaggtcccaggtgacgtcaaggggaaagtcgaatcgaagcttcaagagcctaaggatgctgttgcttgtgcttcactctttctattaatgacgcatttgttctttttatctagtaagtcttgctaattgggcatgtccttttctatccaatatgttgtttctggccctggaccttgttctactttattcttttattttttgtttagccggttccttttttataatcttgggag

SEQ ID NO: 83737 - DNA, 536 bp, Zea mays
gtattaggtgagggttcgtgtctgacatcgtagcgtacgcacgcgtaccgtctcggattcccgggtcgactcacgcgtccgcccacgcgttcggacaactatcaacatagaaagcacaatagtgtaccaacaatggcagccaaaatattttgcctccttatgctccttggtctttctgcaagtgctgctaccgcgaccattttcccgcaatgctcacatgcttctatagcttcccttttttccccgtacctcttaccatctgtgttttcggtatgtgaatacccatatttttaaccctatatgattcaacaggcaatctcaactgtctttttatctagtttactattgtttttttaatatttatcatttttattacattattttctctttgttgcatttatttgtcttatttttttctttgttcatacatcttttttttctttttttttgttattctttttaatttttcttatttttatatttttatttttctaattaatttttattctatttcttatcatttttctatatttttt

SEQ ID NO: 83738 - DNA, 525 bp, Zea mays
aggcataatggctgtgtcggcttcagtatgcgtacgcgtgccgtaccggttcggaattcccgggtcgacccacgcgtccgaaacccaattcttcaaccctataggatccaacaggcaatcgcagctggcatcttacctttatcacccttgttcctccaacaatcatcagccctattacagcagttacctttggtgcatttattggcacaaaacatcagggcacaacaactacaacaacttgtgctagcaaaccttgctgcctactctcagcaacagcagtttcttccattcaaccaactagctgcattgaactctgctgcttatttgcaacaacaactaccattcagccagctagctgctgcctactcccaacaatttcttccattcaaccaactggcattattgaactcttctgcttatttacagcatcaacaactacttccattcagccagctagctggtgtgagccctgcttgcttcttgacacaacatcagttattgcctgtctatctgcacgctgcgcct

SEQ ID NO: 83739 - DNA, 528 bp, Zea mays
gtttttatgggtgggtccacctcagtaagctgaacgcatgcacgtaccggtccgggattcccgggtcgacccacgcgtccgcccacgcgtccgcccacgcgtccgcggacgcgtgggcaactagcaacatagaaagcacaatagtgtaccaacaatggtagccaaaatattttgcctccttatgctccttggtctttctgcaagtgctgctacgacgaccattttcccgcaatgctcacaagctcctatagcttctcttcttcccccatacctctcaccagcgttgtcttcagtatgtgaaaacccaattcttcaaccctacaggatccaacaggcaatcacagcaggcatcttacctttatcacccttgttccttcaacaatcatcagccctattacatcaattacctttggtgcatttattggcacaaaacatcaaggcacaacaactacaacaactcgtgctagcaaaccttgctgcctacgctcagcaacagcagttacctttggtgcaattgttggcacaaat

SEQ ID NO: 83740 - DNA, 535 bp, Zea mays
agtattttggcgggggtcgaagtactgaatctgtacgcctgcagtaccggtccggaattcccgggtcgacccacgcgtccgtgactagatttaaggacaatgaagaagatgatggaagcgatgaaaacgaggtgttcaatgacctaatagcagctggttatgaagaaaaagaagtagatcacgagaagcgtaatgaactccaccaaaagtggcttcaacaacaggatgctgctgaaacaaataatgttatccaaaggctgaagtttggtcaccgggagcaaaaagaatcagcatatgaagatgaagatgaagacgaagacgaagatgaagatgaagatgaagatgtagctgattgtgaggaaggatcacaaaatgaagatttaactccagcaaatattgtgcgacaaaattcagagaaggcaaaacagatgattgcaaagatgtttgaagatgacaatgatacttatgagcactcggatgatgaggaaatagaagagcatttggctcgtcagcgcattttaaagcgagatggttt

SEQ ID NO: 83741 - DNA, 540 bp, Zea mays
  unsure (1)..(540): unsure at all n locations
tgtaaggctagtgtcgtgtctttgatntcaggtagccgtacgcctgcagtaccggtccggaattcccgggtcgacccacgcgtccgcgatatgctgcggttgagtcaccatatcccgcaaaaggaaggtctgcctcaaagcttccagtgtctgcacctgggcgtgcagcgcttcctagtgccaccccgaatctaaacattgggatggacatttggaatgcttctcctgccttggctgtgcctgcagtgcagggggaagtgagtcctgggttggcacttgcccgacgtgatggcgttactcaactggacgaacgtgaaatgaagagaaggatcggcgttaaaatggtattgtgaagggagaggtttttaagcaaaatactgtaccgtcgttttgccatcgagtatatttgaccctcgattatatagatcacattaaatttttggagcatcaattttataaaataagggctgccgctctagaggatccaagcttacgtacgcttgcatgcgacgtcatagcttttttattagtgttacctag

SEQ ID NO: 83742 - DNA, 541 bp, Zea mays
gtggaggcgtgtgtcgtgccttcggatgtccgtagactgtcggaacgccgtaccggtccggaattcccgggtcgacccacgcgtccgcttgctccatacctctcaccagcggtgtcttcaatgtgtgaaaacccaattgttcaacgcctacaggatccaacaggcaatcgcaacaggcattttaccattatcacccttgttcctccaacaaccgtcagccctattacagcagttacctttggtccatttggtggcacaaaacatcaggtcacaacaactacaacaacttgtgctagcaaaccttgctgcatactctcagcaacatcagtttcttccattcaaccaactggctgcattgaactctgctgcttatttgcaacaacaattaccattcagccagctagttgctgcctacccacagcaatttcttccattcaaccaactagcagcattgaactctgctgcttatttacagcagcatcatcttctaccatttattcaggttgctgatgtgtagccctgttgtcttatttaactaatt

SEQ ID NO: 83743 - DNA, 531 bp, Zea mays
gttaggtagtattgtgttatgatacgttagtgtacgcactgccgtaccggtccggaattcccgggtcgacccacgcgtccgatcgagagctacggcgagcgcgagcaccgcagggccaaggtgcacctgaggtgcgcgcacgggcagtccatctccgcgatcagattcgcgagcttcgggacgcctgtgggcacctgcggcaacttccagcagggaggctgccactcggctagctctcacgctgtgctagagaagagatgcattgggctccagagatgcgtcgtcgccatcttccccgacaacttcggaggagacccctgcccgagcgtgacgaagagggtggcggttgaggctgtgtgcttttctgctgtttaagtttattctgtttttacgtcttattattttttgtctcatttttcggcgttattttttaggttgatttttatttttatttactagttgaacttgtatttatcttgctttttcttttcttttggaggttttagcttttttaagttttattatattatt

SEQ ID NO: 83744 - DNA, 537 bp, Zea mays
ggtgaggctggattgtattcagatacggtagtcgtacgtactgcggtaccggttcgggattcccgggtcgacccacgcgtccgcggacgcgtgggggctaccgccgccgttttacgccaggtgccgaggcctctctgtctgttcgccggcgacgatccaatagccagcagcagcaggaggacactatgaagcttgacgtgaatgcccttcgctacctcgccaaggacgacttccgcgtcctcaccgccgtcgagatgggcatgcgcaaccacgagattgttccagcagaacttgtctacaggatcgccagactgaagcatggaggcacatacaaagtgctgaggaatcttttgaagaacaagctagtgcatcatgatgccactaaatacgatgggtatagactctcctatctagtttatgacttttcttgccattaatattttggttatatttttttgtttttgcttaagttgttacgtttttttgtgtttatatttgtttattttgttatatttattatttttatttgattttttt

SEQ ID NO: 83745 - DNA, 526 bp, Zea mays
ggttgaggctgtgtcaaatacgaattcgtagcctgcacgtaccggtccggaattcccgggtcgacccacgcgtccgaaagtggaatccagtagcaacaatagagcaacaatggcgaccaagatattttccctccttatgctccttgctctttctgcatgtgttgctaacgcgacaattttccctcaatgctcacaagctcctatagcttcccttcttcccccataccttccatcaatgatagcttcagtatgtgaaaacccagctcttcaaccctataggctccaacaagcaatcgcagcaagcaacatacctttatcacccttgtttcaacaatcgccagccctatctttggtgcagtcattggtacaaaccatcagggcacagcagctgcagcaactcgtgctacctgtgatcaaccaagtagctctggcaaacctttctccctactctcagcaacaacaatttcttccattcaaccaactgtctacattgaaccgtgctgcttatttgcagcaacaactattg

SEQ ID NO: 83746 - DNA, 540 bp, Zea mays
  unsure (1)..(540): unsure at all n locations
aggaggtgcgtgtgtcngtttctgtagcctggacgcctgtcgtaccggtccggaattcccgggtcgacccacgcgtccgcccacgcgtacgcccacgcgtccgcaactagcaacatacatagtgaagtacactagcaacatcttagcaccaatgggagccaagatttttgccctccttgccctccttgctctttcagcaagcgctgctacctcgacttttattccacaatgctcacaacaatacctctctccggtgacagccgcgggatttcaatacccaactatacaatcctacatggtacaagaggccatccaagcaagcatcttacggtcattagcattaacccttcaacaaccatatgctctattgcaacagccatccttagtgcatctgtatctccaaagaatcgcggcacaacaactacaacaacagttgctaccaacaatcaatcaagtagttgcagcgaaccttgttgcttacctcgagcaacaaccagtttttccattcaatcaactagcttgggttgaccctgctttttg

SEQ ID NO: 83747 - DNA, 537 bp, Zea mays
agatggacgtgtgtgtgtctctgaagtcaggtagctgtacgcctgcagtaccggtccgggattcccgggtcgacccacgcgtccgggtgagaggtatgggggaagaagggaagctataggagcttgtgagcattgtgggaaaacccaattgttcaaccctacaggatccaacaggcaatcgcaacaggcatcttaccattatcacccttgttcctccaacaaccgtcagccctattacaagagttacctttggtccatttggtggcacaaaacatcagggcacaacaactacaacaacttgtgctagcaaaccttgctgcatactctcagcaacatcagtttcttccattcaaccaactggctgcattgaactctgctgcttatttgcaacaacaactaccattcagccagctagctgctgcctacccccagcaatttcttccatttaaccaactagcatcattgaactctgctgcttatttacagcagcaacaactactaccattcatccagcttgctgatgttagcccttgtttc

SEQ ID NO: 83748 - DNA, 547 bp, Zea mays
  unsure (1)..(547): unsure at all n locations
aggggagatggcgtcgtgttcncgtctcccgtatgcaattacgcctgctacgtaccggtccggaattcccgggtcgacccacgcgtccgctagcaacatagaaagcacaatagtgtaccaacaatggcagccaaaatattttgcctccttatgctccttggtctttctgcaagtgctgctaccgcgaccattttcccgcaatgctcacaagctcctatagcttcccttcttcccccgtacctctcaccagcggtgtcttcggtatgtgaaaacccaattcttcaaccctataggatccaacaggcaatcgcagctggcatcttacctttatcacccttgttccttcaacaatcatcagccctattacagcagttacctttggtgcatttattggcacaaaacatcaaggcacaacaactacaacaacttgtcctagcaaaccttgctgcctactcttacaacagcagtttctttcaatcaaccaactagctgcattgaactttgctgcttatttgcaacattcattatcctttattctggtatgttt

SEQ ID NO: 83749 - DNA, 542 bp, Zea mays
  unsure (1)..(542): unsure at all n locations
tgtgagtcgtgtgtcccgcctttgaagcaagganactgtcgcgcctgcacgtaccggtccggaattcccgggtcgacccacgcgtccgcggacgcgtgggtcgttgccattgctctcctggcgctcgctgcgagcgccgacttcagtacaagcggcggctgtggctgccagacaccaccgtttcatctaccgccttcgttctatatgccgcctccgttctatctgccgccgcagcagcagccgcagccatggcaataccccactcaaccaccgcagctaagcccgtgccagcagttcggatcctgcggcgtcagcagcgtcggcagccccgttccggtgccagtgcgtctagttcctggagcaccagtgcagcccggcggcgactccctacggctcgccacaatgccaggcgctgcagcaacagtgctgccaccagatcaagcaggtggagccattgcaccggttccaggccacatacggtgtggtcctgcagtcctttctgcagcattagtcgttaggcgagcttgcggtccttattgcga

SEQ ID NO: 83750 - DNA, 539 bp, Zea mays
  unsure (1)..(539): unsure at all n locations
agtttgaggcgaggtctcgagttactgatacgtaagccgtnacgcactgccgtaccggtccggaattcccgggtcgacccacgcgtccgcggacgcgtgggggcggcgcgggcggacaaggagcaggcggaggaggagctgtgccaagccacaatgggtatctcgcgtgactcgatgcacaagcgccgggccaccggtggaaagcagaaggcctggaggaagaagcgaaagtatgagcttggtcgccagccagccaacaccaagttgtcaagcaataagacagtgaggagggtccgtgttcgtggaggtaatgtgaaatggagggctcttcgccttgatactggtaactactcatggggaagtgaagctgttacccgcaagacccgtatcctcgacgtggtctacaatgcatcaaacaatgagcttgtgaggacacaaacccttgtgaagagtgccattgtgcaagttgatgctggctcattcaagcagtggttccttactcactatggagttgacattggtagggaagaaaaaaccct

SEQ ID NO: 83751 - DNA, 531 bp, Zea mays
gtttttagttcgtggtgtccgaccactgaaagcagtacgcctgcagtaccggtccggaattcccgggtcgacccacgcgtccgcccacgcgtccggaacgagcagttctgggtcatcggaggcgtttcggcgcatctgttcgcggtgttccagggcctgctgaaggtgttcgccggcatcgacacgagcttcaccgtgacgtctaaggccggggacgacgaggagttctcggagctgtacacgttcaagtggaccaccctgctgatacccccgaccacgctcctcctgctgaacttcatcggggtggtggccgggatctcgaacgcgatcaacaacgggtacgagtcgtggggccctctgttcgggaagctcttcttcgcgttctgggtgatcgtccacctgtacccgttcctcaagggtctggtggggaggcagaacaggacgccgaccatcgtcatcggctggtccatcctgctggcctcgatcttctcgctcctgggggtccgcgtcgaccccgttcttgccaaaagc

SEQ ID NO: 83752 - DNA, 553 bp, Zea mays
gggttaagttcgtgttttcggtatacagtatccgtatgcaattcgtacgcgcgttcgaattcccgggtcgacccacgcgtccgcccacgcgtccgcccacgcgtccgcccacgcgttcgctcaaggtctggtgatacgagcgagttgtcttcttcccccccggagaaaagtgcttccgagaataaatttttttccatcggaatgtctgaaactatgttgggtgtatcctagtggttggttgagcattaatggctcatattttgtcaggtctatgtgttgccgtgaaacttttaatcaaatcagttcactctatataataatatatattatttttatctattgttttttttttatttctttttttttttgttatttttcttttttatttatatttttttatttttttttttatatttattgttattattgtattgtgcttttttattttttttctatattttattatgatttattttatacatttatatatgagttacttttatttattctttttttaactctaattatattatgttgtttataatttatataa

SEQ ID NO: 83753 - DNA, 532 bp, Zea mays
ggagatggtgtgtccgttaatgatgccggagcctgtagtaccggtccggaattcccgggtcgacccacgcgtccggccaactagctgtggtgaaccctgtcgcctacttgcaacagcagttgcttgcatccaacccacttgctctggcaaacatagttgcataccaacaacaacaacaattgcaacagtttctaccagcgctcagtcaactagccatggtgaaccctgccgcctacctacaacagcaacaactgatttcatctagccctatcgctgtggttaatgcacctacatacctgcaacaacagttgctgcaacagattgtaccagctctgactcagctagctgtggcaaaccctgctgcctacttgcaacagctgcttccattcaaccaactgactgtgtcgaactctgctgcgtacctacaacagcgacaacagttacttaatccactagcggtggctaacccattggtcgctgccttcctacagcagcaacaatagttggcaataaaccagtgttttttgttaaa

SEQ ID NO: 83754 - DNA, 517 bp, Zea mays
ttgtacctggatacctgtacgcctgccgtaccggtccggaattcccgggtcgacccacgcgtccgcggacgcgtgggcggacgcgtgggttcagaaacacaccaagcgaagcgcactagcaacgacctaacaacaatggctaccaagatattagccctccttgcgcttcttgccctttttgtgagcgcaacaaatgcgttcattattccacaatgctcacttgctcctagtgccattattccacagttcctcccaccagttacttcaatgggcttcgaacacctagctgtgcaagccaacatgcaacaacaagcgcttgcggcgagcgtcttacaacaaccaattgcccaattgcaacaacaatccttgccacatctaacaatacaagccatcacaacgcaacagcaacaacagttcctaccagcactgagccacctagccatggtgaaccctgccgtctacttgcaagagcagctgcttgcatccaacccacttgctctggcgaacgtagttgcat

SEQ ID NO: 83755 - DNA, 530 bp, Zea mays
gatagtataggtattgtattctgtatcgcaggcgtgcagtaccgtccgcattcccgggtcgacccacgcgtccgcccacgcgtccgggggatttcgatgaataggaaatgtatgtgaagattccagctgatctcataataagttctgagaaggccaagtcaattgtacaggatattgcaaaggttaggttggagaactcccttgtccaggctattgcgttgcttcggcagaagaagagagatgatgtgctttcatctctgaatgacatgctcgcatgtgatgctgcggtccctgcatcacgacccttgtcatggcccacaccaggagagctagatgatctatttgccatctacctgtatagcatttttatatctgaaaagctattaaggttgctatacctgcatttgaattagcaactataatgctctcttgtatcattactcattcacttatgtgtttttttccttttcattttttatttatatcttttttattttttttatattttgtctgttatatttatattttat

SEQ ID NO: 83756 - DNA, 518 bp, Zea mays
ttgtaatcgaaaccgtacgcctgcagtaccggtccggaattcccgggtcgacccacgcgttcgctgactgcttggtcggacccttgggttataatcacacctaacgaagcgcactatcaacgacctaacaacaatggctaccaagatattatccctccttgcgcttcttgccctttttgtgagcgcaacaaatgcgttcattattccacaatgctcacttgctcctagtgccattattccacagttcctcccaccagttacttcaatgggcttcgaacacctaactttgctagccaacatgctacatcaagctcttgctgcgtgcgtcttacatcttccaattgtccatttgcaacaacaattcttgccacatctaacaattcaatgtattcacatcgcaatcatctctacagtttctaccattacttgattcttctatccatggtgaaccctgtcattttatttttgtatctcttgtttgcattttactcaatttttttggcatactatttttaatt

SEQ ID NO: 83757 - DNA, 537 bp, Zea mays
  unsure (1)..(537): unsure at all n locations
gggagtgcgtggtgtcnctccactgaaagctggacgcctgtggtaccggtccggaattcccgggtcgacccacgcgtccgcccacgcgtccgcttcaacagtggtataaataagatatttgtgatgagtcagttcaattctacttcgcttaaccgccatattcatcgtacataccttgaaggcgggatcaactttgctgatggatctgtacaggtattagcggctacacaaatgcctgaagagccagctggatggttccagggtacagcagactctatcagaaaatttatctgggtactcgaggattattacagtcacaaatccattgacaacattgtaatcttgagtggcgatcagctttatcggatgaattacatggaacttgtgcagaaacatgtcgaggacgatgctgatatcactatatcatgtgctcctgttgatgagagccgagcttctaaaaatgggctagtgaagattgatcatactggacgtgtacttcaatttctttgaaaaaccataaggtgcttttttggaatt

SEQ ID NO: 83758 - DNA, 540 bp, Zea mays
  unsure (1)..(540): unsure at all n locations
gatgggcgtgtgtgntgctactgaagcttttagactgtacgcctgcagtaccggtccggaattcccgggtcgacccacgcgtccgcgctagctcgctcgctctccttgcaactccagtgctgctcactgccactgccagcagatcgagctgctccgtctcacaaaccctcttgctttgctgctgcacctgcaagtctgcaaccgcgcacacagagatgtcgacgacggtgagccgtgcgtccctcgaccagaagctcgccctcgccaagcgttgctcccgagaggcgaccctcgccggagccaaggcggcagcggtggcgactatcgcctccgcgatccccaccctggccagcgtgcggatgctgccatgggccaaggccaacatcaaccccaccggccaggcgctcatcgtctccacggtggctgggatggcctacttcatcgccgccgacaagaagatcctgtcgctggcaaggcgccactcgttcgagcaagcccctgagcacctcaagaacaccttcttccagggcaccggtcggc

SEQ ID NO: 83759 - DNA, 536 bp, Zea mays
agtttgtgcgtgtgtctgtttactgaagctggacgccgtcgtaccggtccggaattcccgggtcgacccacgcgtccgcggacgcgtgggaccagccacaagttccccgtcctcaacctcgtacagatgagcgcggtgcgggtagacctgtaccaggacgccatcatgtcgccgttctggaacttcaacgcccacagcgccatgtacggcatcaggggcagtgcaagggtccaggtcgccagcgacaacgggaccacggtgttcgacgacgtgctccgtgcggggcagctgctcatcgtaccccagggctacctcgtcgccaccaaggcgcagggagaaggcttccagtacatcgccttcgagacgaaccctgacaccatggtcagccacgttgccgggaagaactccgtcctgagcgacttgccggccgtcgtcatcgccagctcgtatgccatcttcatggaggaagctgcaaagcttaagaacggtaggaagcatgaactggctgggcttaattctggtggcaatgtgcattt

SEQ ID NO: 83760 - DNA, 594 bp, Zea mays
atttatatgttattgttatatgatatatattgatatatattttattgtaaagtgagtgatgttataaattagtagacttgtacgctgcacgtaccggtccggaattcccggatcgacccacgcgttcttcaactagcaacatagaaagcacaatagtgtaccaacaatggtagccaaaatattttgcctccttatgctccttggtctttctgcaagtgctgctacgacgaccattttcccgcattgctcacaagctcctatagcttctcttctttccccatacctttcaccagcgttgtcttcagtatgtgaaaacccaattcttcaaccctacaggatccaatatgcaatcacagcaggcatcttaattttatcacccttgttttttcaacaatcattagtgctaattacataattacctttggtgcatttaatggcacaataaattatggtacaacatctaccacaacttgtgcttgcgtatcttgctggctacgctcaagaacatcagttacctttggtgcaattgttggcaccaaacatcatggctcaacaactacaacaacttgtgcttgtatttgtatgtgtctattg

SEQ ID NO: 83761 - DNA, 579 bp, Zea mays
  unsure (1)..(579): unsure at all n locations
attcnatgaatttaatatattttattatatgttattttgttagataagtttggaagttgaaactgtagccgtacgcctgcagtaccggtccggaattcccgggtcgacccacgcgtccggagaatgcaacatcgagcattctgtgattggagtctgctcacgtgtcagctctggatgtgaactcaaggactccgtgatgatgggagcggacacctatgaaactgaagaagaagcttcaaagctactgttagctgggaaggtcccagttggaataggaaggaacacatagataaggaactgtatcattgacatgaatgctaggattggggagaacgtggtgatcacaaacagtatgggcatccaagaggctgatcacccggaagaagggtactacataaggtctggaatcgtggtgatcttgaagaatgctccatatacgatgggattgtcatatagatcgtcttggatttgctttacaatacaagaacctacattggattgcatcgatggatcgtgtaaccttggtatggtaagagccgcttgacaggaagtagtgctttttgtgcttgtgnatcagta

SEQ ID NO: 83762 - DNA, 538 bp, Zea mays
  unsure (1)..(538): unsure at all n locations
gatatagtttagttgtgtgcctagtagccctgaagctgtacgcctgcagtaccggtccggaattcccgggtcgacccacgcgtccggaccaactagcaacatagaaagcacaatagtgtaccaacaatggcagccaaaatattttgcttccttatgctccttggtctttctgcaagtgttgctaccgcaaccattttcccacaatgctcacaagctcctatagcttcccttcttcccccatacctctcaccagcggtgtcttcaatgtgtgaaaacccaattgttcaaccctacaggatccaacaggcaatcgcaacaggcatcttaccattatcacccttgttcctccaacaaccgtcagccctattacagcagttacctntggtccattttgtggcacaaaacatcagggcacaacaactacaacaacttgtgctagcaaaccttgctgcatactctcagcaacatcaggttcttccattcaaccaactggcttcattgaactctgctgcttatttgcaaccactattaccattta

SEQ ID NO: 83763 - DNA, 554 bp, Zea mays
agtaggtgcgtgatgtcgtgcctactggaagcagggcagaccgtagcgccgctagtacacaggcccggaatgaccggatcgacccacgcgtgcgtccacgcgtccgaaggagggcatcccaccggaccagcagcgtttgatcttcgctggcaagcagctggaggatggccgcacccttgcggattacaacatccagaaggagagcaccctccacctggtgctccgtctcaggggtggtatgcagatctttgtgaagacactcactggcaagacaatcacccttgaggtggagtcttcggataccattgacaatgtcaaggccaagatccaggacaaggagggcatcccacccgaccagcagcgcctcatcttcgccggcaagcagctggaggatggccgcaccctggcggattacaacatccagaatgagagcactcttcaccttgtgcttcgtcttaaggggtggcatgcatatttttgtgaagactttgactggcaagaccattaccttgtaagtggagagctttgacactatgacatttttaaggccaaaa

SEQ ID NO: 83764 - DNA, 594 bp, Zea mays
  unsure (1)..(594): unsure at all n locations
attatattaatagaatatattattgtatatattttgtagaaagaagtgtggtgagtagctggtaagctgtacgcctgctagtaccggtcctgaattcccgggtcgacccacgctttcgagatgctttatgcaagctcaatccagaaattcaagagtggccttaatggcattcatgttgaactccaggccacagatgctagtgaaatcagcctcgatgagatcaaggatcgggcacgctaggcgcaccgtcatcgcgagtttcatggtcacgcatcatggactcgcctactactgtggatttgtacgccattatagacttggtgctgcgaaagactgctttggtgatttgtgggtatgatgctgtgtaaaaaggttgtatgtgcttttttaatacattgaatgtttggttctatcatgtaattccatgtgatttgataatgaatgatgtatctttggagttatgtagtgttttttttaagtatttatgtttttgttgtgagtatttaatttatgtgaggtattttttttattatttggttgaattataagaatatttatgttgtttattgttttatttttttatttgnagtttgt

SEQ ID NO: 83765 - DNA, 591 bp, Zea mays
  unsure (1)..(591): unsure at all n locations
attnttagaaatagttatatttaatattggatatagtgataaatgtttgtaaaggtgtgtgaagtagaattttggangctgtacgcctgcagttccggtccggaattcccgggtcgacccacgcgtccgtccactcgttcgtgccgaaggaaaacaatcctgaaaccaagccatgggtctgcaggaggaatttgaggagcatgctgagaaggcaaagaccttgcctgagaacacgagcaatgagaacaagctgatcctatacgggctctacaagcaagccacggttggagatgtgaataccgatcgtccgggcatattctaccaaaaggacagggccaattgggatgcctggaaggctgttgaatgcaaatcgaaggatgattcgatgaatgactacatcaccaaggtgaagcagctccaggaggaggctgccgccttttaaaagtcttgtaatagtgttgccaaacagctatttgtcagatgagctttgtgccatttccttaataggtgtatatcattcgatccattggggatctgtgaaccatgtacctgtttatgtaacttgtttatattgtattttgagtatttatg

SEQ ID NO: 83766 - DNA, 589 bp, Zea mays
  unsure (1)..(589): unsure at all n locations
atttaaggaattgtatatagtttattatatttgtaaagtaagggaagtagtgtgtagatagtaangctagnatgctgtnacgcctgcaggtaccggtccggaattcccgggtcgacccacgcgtccgcccacgcgtccgtggcaactataagccacgcactgatctgccaaatgtggtggagctgtacatgaaaaaggagctggaggtggagaagttcatcacgcacagcgtccctgtcgactagatcaacaaggcgttcgacctgatggccaagggggagggcatccgctgcatcatccgcatggagaactagatttcgctgtctagtttgagatgtggcctgggcttggggttaataaatgaggcaatgctagcctgtattttcgatggggaggtacatacacgctggcaatggaccgggcttgtgtgtcgcgtttagttagttgtttgccatggtgtaaggtagctttagtgtttggtaattatatgggttgaaggattagactttgtttattactggtatggacgtaagattcatatttcaactaactataactagtttgtgttttttttggattntgagtaatg

SEQ ID NO: 83767 - DNA, 546 bp, Zea mays
  unsure (1)..(546): unsure at all n locations
gctgagggtagtgtcgtgcctatgaangcaaggaagctgtacgcctgcagtaccggtccggaattcccgggtcgacccacgcgtccggccgtggtgaaccctgtcacctacttgcaacagcagctgcttgcatccaacccacttgctctggcgaacgtagctgcataccagcaacaacaacagctgcaacagtttatgccagtgctcagtcaactagccatggtgaaccctgccgtctacctacaactactttcatctagcccgctcgcggtgggcaatgcacctacgtacctacaacaacagttgctgcaacaaattgtaccagctctgactcagctagctgtggcaaaccctgctgcctacttacaacagttgcttccattcaaccaactggctgtgtcaaactctgctgcgtacctacaacagcgacaacagttacttaatccattggcagtggctaacccattggtcgctaccttcctgcagcagcaacaacaattgctgccatacaaccagttctctttgatgaaccctgccttgcaacag

SEQ ID NO: 83768 - DNA, 543 bp, Zea mays
  unsure (1)..(543): unsure at all n locations
gggagtgcgtgtgtgtgcctcaggatgccgtnagactgtacgtaccggtccggnattcccgggtcgacccacgcgtccgcccacgcgtccgcccacgcgtccgcggacgcgtggggtggtgtgtggaggatgaagtatcatcctagtattgcagatgttgtattggctgcgtgcatgcacaatgggtttgccattgtaaaagtaggttctggagatgctaccgtaatggaaacatattgcaagcatgagtccttagcatacggtgcagattggcagaaaagtgaagaggtggagcaaaatggaaattcttcagttgttgctacttgtgcgttttatgatcgccttctccgtgtgtggcaaccagagaatctagctgagctttaaagacctaaagctttttttgaattgaattcaagcatgactaggtcttgaatcttattccttgaatgaaccaatataatttcatttatgtagtttctatgtacttattctttactaatttctgtcttttaaggtattgctttttaccctattttgttcctt

SEQ ID NO: 83769 - DNA, 590 bp, Zea mays
  unsure (1)..(590): unsure at all n locations
agattaggaaagaaagagaaaagaggatagaagaagaagtaagaaaagaagtgtgagtttgacgctagnangacgttacgccgcagatccggtccggaattcccgggtcgacccacgcgtccgggcacaacaactacaacaacttgtgctatgaaaccatgctgcctactctcagcaacagcagtttcttacattcaaccaactggctgcattgaactctgctgcttattnagggcaacaactaccattcagtcagctagcgagtgcctaccctcagcaagttcatacattcaaccaactggcagcattgaactctgctgcttatttacaactgcaacagctaccaccattcatccagctagctgatgtgagccaaagtgcctaaatgacgcaacaacagatgttgacgttctacctgcacgctgcgcctaagggtggaaaactcttacagctgcaacaaattgcttgacaagaaaaccgaagtttggattgacaaaccgatcaacggtttaccaacaacccatcattggctgagccctcttttagattgcttatgagttatagattaagaaaggaagagtttagaggaa

SEQ ID NO: 83770 - DNA, 576 bp, Zea mays
  unsure (1)..(576): unsure at all n locations
tggtttcaaatttatttattttttattattttttttgtggtagtttgtgagtttgagttttgtagcgtacgcctgcagttccggtccggaattgccgggtcgactcactctttcgctagcattcgcagtttcccctctccttgatacgcatcttttttctaggagtaagtttgttcttttattgatatggcgaggtaggagaatgtctacatggccatgctggcatatttgtccgaaaggtatgaatagatggttgagtatatggagaatgtgtctaatactgtatatgtggaagtgctcactgttgaggagcgtaactttttgtttgtcgcatactagtttgttattggttttattgttctttatttttgtttgaattttttattgaactgtttgagttgtttatgttgatcttaaatcatgttttttttttttatgtatattttgttaatttttttttgttttttaatttattttatttattttttttttttttttttgtcattttattatatttttttatttattttgttgttcttattgtagtttatttttttttttttgattcnttttttn

SEQ ID NO: 83771 - DNA, 485 bp, Zea mays
tgtgaggtagttcgggtttgattctgtagcgtacgccgcggtccgtccggattcccggtcgcccacgcgtcgggaccgtgggtgaaactatagctggattacatggagaggcggcaatgagaccgtctggccccgccggagggagacggagacggagacgagacggatggcgcatgcatcggtgtggtggatcggcgcggcatgtgtgtgtgggctgtacatatacatctgtacatgattgtgcagtgcagggttttgtccttttttgatttgtattatctaaatgactattttttttatggcttgattgtctttttgttctgtttttgttggtttttatatatttttcttttttttttattttcttattctttatttttttttctgttttatttttgtgtatatttttataattatattttttgttattttttttcttttttttttttttattttttatttttttttattttttttttttttat

SEQ ID NO: 83772 - DNA, 554 bp, Zea mays
  unsure (1)..(554): unsure at all n locations
tgagtgaggggtcggtgtcgtgcttattgaangtccgtcaagccgtcacgcctgcacgtaccggtccggaattcccgggtcgacccacgcgtccgcaacaatttctaccagcactgagccaactagctgtggtgaaccctgtcgcctacttgcaacagcagttgcttgcatccaacccacttgctctggcaaacatagttgcataccaacaacaacaacaattgcaacagtttctaccagcgctcagtcaactagccatggtgaaccctgccgcctacctacaacagcaacaactgatttcatctagccctctcgctgtggttaatgcacctacatacctgcaacaacagttgctgcaacagattgtaccagctctgactcagctagctgtggcaaaccctgctgcctacttgcaacagctgctttcattcaaccaactgactgtgtcgaactctgctgcgtacctacaacagcgacaacagttacttaatccactagcggtggctaaaccaatggtcgctgcctttctacagtagtaacaattgctgtcatat

SEQ ID NO: 83773 - DNA, 593 bp, Zea mays
  unsure (1)..(593): unsure at all n locations
aggtnaagaaagagtttgagagtggattgagagatagatgtagaagtggagcggagtgaataaataggagactgtacgacagtcagtaccggtccggaatacccggatcgacccacgcgtgcaggcaggcagccagcagctgattacccgcaagaatcaggggcagtcaaccaactggcatcattgaactctccggcttatgtacagcagcaacaactactaccattcaggcagctaagtggtgtgagccctgctgccttcttgacacatcaacagttattgccgtgctaccggcacgctgcgcctaacgctggcaccctcttacaactgcaacaatttctgccattcaaccaacttgctttgacaaacccagcagcgtgggaccgacaacccatgagtggtggtgccctcagatagagatcttatgagttatagttgtatagtaagagtttagggctgatgttagtggcttgtgggggatattaagaggtcataggtgaaagagggggattgaggatttatagaaggggcggccgatttaaagggtccaagcctaacgacgcgtgaatgggatggtgtgtgaganagtatag

SEQ ID NO: 83774 - DNA, 590 bp, Zea mays
  unsure (1)..(590): unsure at all n locations
aggagtgcgtgtgttgtgtctcagttagtccgtnagcctgtcgtaccggtccggaattcccgggtcgacccacgcgtccggcgcgctccagtgccgaagtcatcaccctcaccgaagagaccttctccgacaagataaaggagaaggacacggtgtggtttgtgcaattctgcgtcccctggtgtaaacactgcaagaaccttggaacacttatgggaggactctgggaaagtngttatgtgaaaggttgccggatgaanatttgagaatttggggcaaagtttgacctggtgggttgtccaagccaaaacccaagtattggcctccaaagggtccggatattaccactttcttaacctcaacatttccaagggggttttatatgaaaggcnaaatgaatttattaaattttaaaggtatccattgtttaaccagttaaccatactttttaggcgaatgttccaactgaaaacctgtttggtcttctaagtttgtgccaaaacccctttattagccttttattgatttatctttcgaatgggaattggtgttttaaaaattgtaaagtaatttaatttaatattctatat

SEQ ID NO: 83775 - DNA, 589 bp, Zea mays
  unsure (1)..(589): unsure at all n locations
tgancattaattggatatattttatggatatattattaagtaagttgtgtagtgnataaatagaagctgtacgcctgcagtaccggtccggaattcccgggtcgacccacgcgttctgacctgcaatactggatggacgagaactacgtcttcgggtgcttttcgaacactggggaggttcaaaatgtgaagctcatccgtgacaagaattcagggcagcttcatggttattgttttgttgagtttacaagccgtgcagctgcagaacgagttcttcatacatacattggacaaatgatgccaaatgttgacttgacatttcggctgtattgttccagtgctggtgaaaagcgcgattatactcctgaatatactttgtttgttggtgatatgtgtgcagatgttatagattaacttgtaccagagacattttgtttatattatccgtctgtcaagggtgcaatattttgtattgataatttgacatttggctttagntggttattgatttgttgaaatttggggatcccacatatcaagtttctttcaaatgatttttattggatttttgtttgttttctgtcttatt

SEQ ID NO: 83776 - DNA, 592 bp, Zea mays
  unsure (1)..(592): unsure at all n locations
tggcntatggaagagttatatgattgatgttnatatattgattattatagtgtagtgaggtgntaaaatagaaagctgtacgcctgtcagtaccggtccggaattcccgggtcgacccacgcgttcgcccacgcgtccgcgcattcaagcccgtgccagctgcagggaacctgcggcgttggcagcaccccgatcctgggccagtgcgtcgagttcctgaggcatcagtgcagcccgacggcgactccctactgctcgcctcagtgccagtcgttgcggcagcagtgttgccagcagctcaggcaggtggagccgcagcaccggtaccaggcgatcttcggcgtggtcctccagtccatcctgcagcatcagccgcaaagcgggcaggtcgcggggctgttggcggcgcagatagcgcagcaactgacggcgatgtgcggtctgcagtagtcgacttcatgcccttacgctgcttgtcgcggtgtcctccactgaaggaactatgtactgtaggatagccgctggctagctagctagttgagtcatttaacggcaatgattgagtaataattggttatggatgtccatgggt

SEQ ID NO: 83777 - DNA, 578 bp, Zea mays
  unsure (1)..(578): unsure at all n locations
atttaagatatgtatatataatattatataatatgtatagaggtgtatgtgagttgaagttangtagctgtacgcctgcagtaccggtccggaattgccgggtcgacccacgcgtccgatgatttgattgttccaacatcctgccaatagcccgtaaaaatgcatgcctgcacacttggccctcactgagcagccttccaagtttgatttttacgatccaaaaacacctttcttcactgcaccccgatgcttgccttcgacgcaattggacaagtgcaagatgaaatatgcatttatctcagatggttgcttactgagagaatgcaacatcgagcattctgtgattggagtcggctcacgtgtcagctttggatgtgaactcaaggactccgtgatgatgggagcggacacctatgaaactgaagaagaagcttcatagctactgttagctgggaaggtcccaggtggaataggaaggaacacaaagataatgaactgtatcattgacatgaatgctaggattgtgaagaacgtggtgatcacatacagttagggctttcaatgagtagatcacccag

SEQ ID NO: 83778 - DNA, 528 bp, Zea mays
ggaggggtgtgtgtgtctcagtagtccgtagacgtcgtaccgtccgcattcccggtcgacccacgcgtccgacgggccgggctttgcacgattgactctgagggcaaggcaaggaaggttgtaggctgctcctgtgtcgtcgtcaaggactacggtgaataatctgagggccttaacataatgcaggagtatgtcaagtagcactagatgtgtgacatgtaccagtgatactcttgatttggacctgggcttaacattatgcttcagcatctggggctcgaataggcgattagaacatgctactagaatagccgaaccggatatgtatgaacaatgtgaacattagaacagcttttgcttatggtgctttcgtcgggtcttaatgccaatgcacaacagctccatcttattgtgctaggataccttgtctgtctacttttgacctctgcttttaatgattctgtcttaatgatttgtttttccttcgattattttttgtataattatcttttatttttatctttttct

SEQ ID NO: 83779 - DNA, 539 bp, Zea mays
agaatgggcgtggtgtcagtgtcatcgaaagcatggagactgtacgtaccggtccggaattcccgggtcgacccacgcgtccgtgctgccatacgctatggaactggttccattgctggttttttcagtgaggatagcgttacattaggtgatctggttgtgaaggatcaggaatttattgaagctacaaaggagccagggcttaccttcatggttgcaaaatttgatggcattcttgggctaggctttcaagaaatctctgttgggaatgcaacaccagtgtggtataacatggtgaaacaaggtctcatcagcgaccctgttttctctttctggtttaaccgacatgctgatgaaggagaaggtggtgaaattgtgtttggtggaatggattctagccactacaagggtgatcacacgtttgtcccagtcactcgttaagggatactggcaatttaacatgggtgatgtcctggttgatggaaagcccacttgttttgtaccggtggttttgcattcttttgaaaatttttgaaatt

SEQ ID NO: 83780 - DNA, 600 bp, Zea mays
  unsure (1)..(600): unsure at all n locations
atgacaaatgnataatgttatatgatatgtgtgtnatatgttatttattatgttgttgcgtgagagtgnnataaataggtagcctgtacgcctgctagtaccggtccggaattcccgggtcgacccacgcgttcggcccactcttggaggcacgcggattaagacccgcaagcggaatattgcagctcctttggaccctgcatcattctctgatgcaattgttcagatctatttggataatggtggagacctggaacttgtcgccaaaagtatcgagtcttcagacctcaacttctcacgttacggtgacaccttttttgaggtggtttttgttggagggcgcactcagtcaggctctgttaaacctgaagaaatggaccgccacccttatttggtgttagattgttcgtcacaacttgaagcaattttgcctttcgtactctatagttctgatgacatggctcattgagcctttttttattatagtattttgaaaatgttatgctttaattcttgtatcggttgagttctttgaagaaaattttaggaaaaaacttggcatatttacaggcttttgtttttgttttttgttattattgg

SEQ ID NO: 83781 - DNA, 586 bp, Zea mays
  unsure (1)..(586): unsure at all n locations
agtntagataggagagagaagggaggagagaaggggaagaaggagcaaggagtgcgaagctgtaagtctggaaagacggnacgcacgcagcaccggaccggaaggcccggggcgacccacgcgtccggccacgcgagcgagcagaaacacaccaagcgaagcacatgagcaacaaccgaacaacaaaggctaccaagagaggaacccaccgagcgcaactggcgcaaagtgcgagcgcaacaaaggcggtcaagaggccacaatgcacacacgctacaagctccaggatcacacagcacctcccaccagggacttcaaggggctgcgaacacccaggagggcaagcctataggcgacaacaggcaagggcggcgagagagggacaacaaccaaaggcccagtagcaacaacaatccggggcacatctaacgaaacaaaccaggggagcgcaacagcaacaacaagaccgacgagcagggagccaccgagccaagggggaaccagccggcgacatgcaacagcaggagctagcatcaaacccaattgctatggcaaaccgaaagggaagaaggaggagaaacagggg

SEQ ID NO: 83782 - DNA, 538 bp, Zea mays
tgttgaggctagtgtgtgttattgagtcagttagcagtacgcctgccgtaccggtccggattcccgggtcgacccacgcgtccgcggacgcgtggggacatcttacagcttctgccatccaagattcaggttggagtcttctctgctaccatgccacctgaagcccttgagattacccgcaagttcatggacaaaccagtgagaattcttgtgaagagagacgagctgacccttgagggtattaagcaggtctatgtgaatgtggacaaggaagactggaagctggacacactgagtgacctgtatgagaccctggccattatccagagtgtcatctatgtcaacacccgacgcaaggtggactggctcactgacatgatgaggagcatggaccacaccgtttctgtcactcatggtgtcatggactatatcactagatacatcattatgagggagttccggtctgtctccatctgtgtgctcattattattgactcttcttatttctgggtatgatcttttattattttatcttgta

SEQ ID NO: 83783 - DNA, 542 bp, Zea mays
agtaggtgcgtggtgtcgtgtccactgaaagctttacgcctgcggtaccggtccggaattcccgggtcgacccacgcgtccgcaacaagcaacatagaaagtggaatccagtagcaacaatagagcaacaatggcgaccaagatattttccctccttatgctccttgctctttctgcatgtgttgctaacgcgacaattttccctcaatgctcacaagctcctatagcttcccttcttcccccataccttccatcaatgatagcttcagtatgtgaaaacccagctcttcaaccctataggctccaacaagcaatcgcagcaagcaacatacctttatcacccttgtttcaacaatcgccagccctatctttggtgcagtcattggtacaaaccatcagggcacagcagctgcagcaactcgtgctacctgtgatcaaccaagtagctctggcaaacctttctccctactctcagcaacaacaatttcttccattcaaccaactgtctacattgaaccgtgctgcttattttgcagaacaac

SEQ ID NO: 83784 - DNA, 573 bp, Zea mays
  unsure (1)..(573): unsure at all n locations
tanaagactataatatattaatgntatatgttaatagagttgaatgtgaatttgtaattgtaacgtncgccgcagtaccggtccggaattcccgggtcgacccacgcgtccgataaacacaccaagcgaagcacattatcaacaacctaacaacaatggctaccaagatattatccctccttgcgcttcttgcgctttttgcgagcgcaacaaatgcgttcattattccacaatgctcacttgctccaagttccattattacacagttcctcccaccagttacttcaatgggcttcgaacacccagctgtgcaagcctataggctacaacaagcaattgcggcgagcgtcttacaacaaccaatgtaccagttgcaacaacaatccttggcacatctaacaatacaaaccatcgcaacgcaacagcaacaacaattcctaccagcactgaaccacctagtcatggtgaaccctgccgactattgcaacagcagttgcttgcatcaaacccacttgctctggcaaacgtaattgcaaaccagccacaacaacaattgaatagatgattgcaata

SEQ ID NO: 83785 - DNA, 516 bp, Zea mays
taggagggagtgtggcctatgatctgtagcgtacgcctgcagtaccgtccgattcccggtcgaactctcctgcttatttacagcacaacaactactaccattcaccagctagctggtgtgagccctgtacttttgacacaccacattgttgccgtctaccagccgctgcgcctaacgctggcaccctcttacaactgcaacaattgctgcattcaaccaacttgctttgacaaacctagcatgttctaccaacaacccatcattggtggtgccctcttttagatttcttatgagttatagttcaataataaagttttttgtctgatgtttgtggcttcccagaaataagaatgtacatttctataaaaataatttaatttattataaatgggcggtctgtctagaggatccaagcttactttctcctgcatgcgatgttttatcttttctatttggcatcttatttttaattattggcctatgttttacaatgttttgacttgttaatattttttt

SEQ ID NO: 83786 - DNA, 540 bp, Zea mays
aggagtgctagtgtcgtgctcagcatgtcaggtagcctgtcgtaccggtccggaattcccgggtcgacccacgcgtccgcccacgcgtccgcccacgcgtccgctcgcctcctctccctagtctccacgacgcaagggagagtgacggaaagcgacgcggcgcgagcgaggagggccaaggcgaagaggggaagcaccgcaccaggacccttgttcgccgccgccgcctctgatctccgcgaggttgtcaggattcaatatgtcgaccagcacattcgctacttcctgcacgctgttgggcaatgttagaacaacgcatgccttccagacagcggtgaagagcccttcgtctctaagcttcttcagccaagttacgaaggttccaagcctgaataccttcaagaaactggatgtctccgccatggctgtatacaaggtgaagcttgttggtcctgatggtgtatagcacgagtttgatgcttcagacgacgcttcattttttgacgcatctgattatgtctgttttgtattgacattatt

SEQ ID NO: 83787 - DNA, 542 bp, Zea mays
aggtgggtgtagtgtcgtgcctacaggatgtcgggagactgtcgtaccggtccggaagtcccgggtcgacccacgcgtccgaccacgcgtccgcccacgcgtccggccacggggctcgcaatcaagcactccctcggccagtcccacccggtcaagctcgcgcctttcagcccggaccaggaggacgcgtcggtgctgtggacggagagcaaggacgtgggcaagggcttccgctgcatccgcatggtcaacaacacccgcctcaacttcgacgccttccacggcgacaaggaccacggcggcgtgcacgacggcaccgtcgtcttgctctggtagtggtgcaaggtcgagtaccatatctgtatgatcctgactagatgtactgaggtcaatttcttgtttggtctgttttgattcctattatttttgtgtttctttatgttatatgttgtttatgattttcatattttcttatattttttatttgatatattgtatgtttttttatttttttttcttgtttttttttgatttttgattct

SEQ ID NO: 83788 - DNA, 575 bp, Zea mays
tgggatagttgtattgttttttgtattttattattgtggtgtatgtttattagtaacttgtactcgtagtaccggtccggaattcccgggtcgtcccacgcgttcgtccacgcgtccgatttataccaactagcatcatagaaagcacaatagtgtaccaacaatggcagccaaaatattttgcctccttatgctccttggtatttctgcaagtgctgctactgcgaccattttcccgcaatgctcacaagctcctatagcttcccttcttcccccgtacctctcaccagcggtgtcttcggtatgtgaaaacccaattcttttaccctacaggatccaacaggcaatctcagctggcatcttacctttatcacccttgttactccaacaatcatcatccctattacagcagttacctttgttgcatttatttgcacaaatcatcatggcacatcatctttttttatcttgtgctagcaaaccttgctgtctactctcagcaacagcagtttctttcattcaaccaaatagcttcattgaaattctgcttttattttgactacttctacttcttg

SEQ ID NO: 83789 - DNA, 542 bp, Zea mays
  unsure (1)..(542): unsure at all n locations
atggtgggatagtgtgtgtctattgatgtcagtatgctgtcacgcctgcagtaccggtccggnattcccgggtcgacccacgcgtccggctgctcatccggaagctgcccttccagcggctggtgcgtgagatcgcgcaagacttcaagaccgaccttcggttccagtcctccgctgtcgccgcgctgcaggaggccgccgaggcgtatctggtgggtctctttgaggacaccaacctctgcgccatccacgccaagagggtcaccatcatgcccaaggacatccagctcgcgcgccgcatcaggggcgagagggcctgattgctgctctgtcttcctgtttctgtaatgtctgaactaggctatggactctatcgcttcttgttctgcaatcgttgtaccgatgttcttggcatatctatctggctgtttaattaatatttattttgggctgccgttctagaggatccatgcttacgttcgcgttcatgcgactttatatctacttttatggtgttcctatattcatttcttctgtttttt

SEQ ID NO: 83790 - DNA, 534 bp, Zea mays
  unsure (1)..(534): unsure at all n locations
tggtaggtagttctgtgatgtaggctggangctgtacgcctgcagtaccggtccggaattcccgggtcgacccacgcgtccgccaggatctgagtcagtatcagaggtgggtgggccaaagaagagcatgctggttgtgtcagagtttattggctgctcgccgtcactgagtggtgctattagggtcaatccatggaatatagaggcaacagcagaggcgatgaatgaggccatttcaatgccagaacaggaaaaacagttgaggcatgagaaacattaccgttatgtcagcagccatgatgttgcttattggtcaaagagcttcatcctagacttggaaagggcttgtagggaccactttaagaggacatgttggggcatagggttgggttttggtttcagggtggtggccttggacgctcatttcagaaagcttaacatggattcaattgttaatgcttatgagatttcagggagcagggctatattgcttgattatgatggaacactggttccttaaaacttaatcaacat

SEQ ID NO: 83791 - DNA, 531 bp, Zea mays
  unsure (1)..(531): unsure at all n locations
aggttgaggctcgtgtcgatcgctgaaacctgaggcntgacgtaccgcttcggaattcccgggtcgacccacgcgtccgcacgtagatgctggaggaggatgtggaagttccagtctcatctgcaaatgaagctccaaacgatactatgaagatggacacagatgatgtgccaagtgatcctgctgctggatctgatgtgactatgcaggagcagcctcctgcagctggaaatggagcacaagataatgaggaaaagtctgtttcgatggaaactgatgcaaaggttgagccgtcaaaaaagaaagttaagaaaactactgttccggtccatgagttggtctatggggccttggctgcagctgacctgcagaaggctgtagagaaagagtatgagatggctcttcaagacagagtaatggaagaaacataggagaagaagaatgctgttgaagcttatgtgtatgacatgcgtaacaagctatatgacaagtacagtgattttgtcacacctgaagacaaggaaagtttgg

SEQ ID NO: 83792 - DNA, 542 bp, Zea mays
  unsure (1)..(542): unsure at all n locations
aggatagggagtcgagttcnaagtactgatgactcantctatatcnanctcgttcggaaatcccggggtcggacccacgcggtccgatccttctatcagtaccatcaatcatcattcatcttagtagtataggcaccaaatcaagtctgcggcatcaattatctaactccaaaaaccatgaagctggtgcttgtggctcttgctttcattgctctagtatcaagtgtttcttgtacacagacaggcggctgcagctgtggtcaacaacaaagccatgagcatcaacatcatgcacaacaacatcatccacaaaaacaacaacatcaaccaccaccacatcatcaccagcagcagcaacaccaacaacaacaagttcacatgcaaccacaaaaacatcaccaacaacaagaagttcatgttcaacaacaacaacatcaaccgcaggaccaccaccaccaacaacaacaacagcaccaacaacaacttcaatgtgaaggccaacaacagcatcaccaacaatcacagggccatgtgcaacaaca

SEQ ID NO: 83793 - DNA, 534 bp, Zea mays
  unsure (1)..(534): unsure at all n locations
gattagaggctaggtgtgtngactgaggctggcagctgtagcgatgccgtaccggtccggaattcccgggtcgacccacgcgtccggngaagtctaccatacttaatttaacttgccggtgatcttacccctactgaaggcgaggtaaggaggagccagaagctgaggattggacgatactcgcagcattttgttgacctactgacaatggaggaaaatgcagttcaatatttgttgaggcttcacccggaccaggagggaatgagcaaagcagaggctgtccgcgctaagctcgggaagtttgggttacctggacacaaccatctcacgccaatcgttaaactatccggcgggcagaaggcccgagttgtgttcacctctatatcaatgtctcagcctcacatactcctgctcgacgagccaacgaaccacttggacatgcaaagtatcgatgcattggcagacgcgctggatgagttcacaggaggtgtcgtcttggtcagccacgactcgcggttaatatcccggggctgn

SEQ ID NO: 83794 - DNA, 536 bp, Zea mays
  unsure (1)..(536): unsure at all n locations
agattagaggcgagggttcgtggattgangctgganctcgtagcgactgccgtaccggtccggaattcccgggtcgacccacgcgtccgcccacgcgtccggcgacatcccgcccaggggcctgaagatggcggggaccttcgtggggaactccacctccatccaggagatgttccgcagggtgagcgagcagttcaccgccatgttcaggcgcaaggccttcctgcactggtacaccggcgaggggatggatgagatggagttcactgaggccgagagcaacatgaacgatctggtcgccgagtaccagcagtaccaggacgccaccgccgacgaggagtacgaggacgaagaggaagaggagaacgtggcagaatagccatgacctccggtgccctttttcagggccaccgcattcgacaggttgtgtctctgtgaatgagtttgtttgtttcttttctctgcttctcgtggcttgcgtcatggattgttaattggttaagcttccgctggggttgcccctgtgcttcgactgg

SEQ ID NO: 83795 - DNA, 514 bp, Zea mays
  unsure (1)..(514): unsure at all n locations
agttttagtgcgtcgtttccactgctggatgcgttagcacgccgtaccggtccggaattcccgggtcgacccacgcgtccgctcccgaccgccgccgtcgccgcctcctctccccagcacccggagctcgaccgaacgccgctcaccatgatcatccccaagaagaaccgcaatgagatctgcaagtacctcttcaaggagggcgtgctgtatgccaagaaggactacaacctggcgaagcacccgcagatcgatgtgcccaacctccaggtgatcaagctcatgcagagctttaagtccaaggagtatgttagggagaccttctcctggcagtactactactggtatctcaccaacgatggcattgagcacctacgcaactacctgaacctnccgtctgagatcgtgcctgccacgctcaagaagtctgccaagccaccttgcccgcccatttggctctggccctcctggtgaccgtccaatgggcccaggccggtttgactgccacagtcat

SEQ ID NO: 83796 - DNA, 511 bp, Zea mays
  unsure (1)..(511): unsure at all n locations
agggaaatngagttctaggtcgtgnagttccggaattttanactactggcatgcgcgtccggtatcccaggttcggaccacgccgtcgcgtccggcgtagctacggttggaactccggcagacattgctccggaggtactctatcgccgggaatacgacggcaagatggcagacgtttggtcttgtggagtgactctttacgtgatgctggttggtgcatacccttttgaggaccccgatgatcccaagaatttcagaaaaacgattgggagaatagtgtcaattcaataccagataccagagtatgtccacatatcccaggattgcagacagctccttgctaggatcttcgtcgcaaatcctgcaaagagaataacaattaaggagattaggaatcacccctggttcctgaagaatttgcccagagagcttacagaagctgcgcaagcgaagtactacaaagaggacaacggtgcccccaccttctctgatcaaacagtcgaagagatca

SEQ ID NO: 83797 - DNA, 511 bp, Zea mays
  unsure (1)..(511): unsure at all n locations
agtttataggccgtgtagttcgacggttggagacttacagcgtggcgaaccgctccggattcccgggtcgacccacgcgtccgcgccgtctgccttctgcgcctacatttcggcctctgtcccttgcaagttcaatctcacctgcaaccatgggtaaagagaagtcccacatcaacattgtggttattggccacgttgactctggcaagtcgaccaccacaggacacctgatctacaagcttggaggcattgacaagcgtgtgatcgagaggtttgagaaggaggctgctgaaatgaacaagcggtccttcaagtacgcatgggtgctcgacaagctcaaggctgagcgtgagagaggtatcaccattgatatcgctctgtggaagtttgagaccaccaagtactactgcacggtcattgatgcccctggacaccgtgacttcatcaagaacatgatcactggtacctnccaggctgactgtgctgtccttatcattgactccaccactgg

SEQ ID NO: 83798 - DNA, 535 bp, Zea mays
  unsure (1)..(535): unsure at all n locations
agttttaggggctcgtgttcgaccgactgacacctgaggcnatacgaaccgctccggaattcccgggtcgacccacgcgtccgaagcgaagcacattagcaacaacctaacaacaatggctaccaagatattatccctccttgcgcttcttgcgctttttgcgagcgcaacaaatgcgttcattattccacaatgctcacttgctccaagttccattattacacagttcctcccaccagttacttcaatgggcttcgaacacccagctgtgcaagcctataggctacaacaagcaattgcggcgagcgtcttacaacaaccaatttcccagttgcaacaacaatccttggcacatctaacaatacaaaccatcgcaacgcaacagcaacaacaattcctaccagcactgagccacctagccatggtgaaccctgccgcctacttgcaacagcagttgcttgcatcaaacccacttgctctggcaaacgtagttgcaaaccagccacaacaacagctgcaacagtttctgccagcg

SEQ ID NO: 83799 - DNA, 532 bp, Zea mays
  unsure (1)..(532): unsure at all n locations
aggttataggctcgtgtcgtaggatggtacctgacgcaatccgaaccgcttcggaattcccgggtcgacccacgcgtccgcatttgaactcatctggaggaagttntgtccatatatccggatgatgtatgaaagtttctctggtgtgatgattcctgttctctatgtaatggaatgcgcaatttcagggaagattctatggtcattgacgttggagaaccaaccgactgggtgaaaatcaatgtgcggcagactaaagattgctttgaagtctatgcactagttcctggacttctacgtgaggaggtgcatgttcaatcaaatcctgctggacgtcttgttattacaggtgatccaaagcagcccgataatccctgtgagatcactccgttcaagaaggtggtcaacttgccatcaagaatcaatccttaccaaacatccgctgttgtcacgcttcatggtcagctgtttgtgcgtgccccattttggttattctgatatgtttaatttttaaactgtattttggctcccn

SEQ ID NO: 83800 - DNA, 530 bp, Zea mays
  unsure (1)..(530): unsure at all n locations
agggtgagggctcgtgtcgatactgatgttcgatgcatncgtaccgcttcggaattcccgggtcgacccacgcgtacgcccacgcgtccgcagaaacacaccaagttatacacattagcaacagcctagcaacaatggctaccaagatattatccctacttgcagcttcttgcgctttttgcgagcgcaacaaatgcgttcattattccacaatgctcacttgctccaagttccattattacacagttactaccaccagttacttcaatgggctacgaacacccacctgtgcaagcctataggctacaacaagcaattgatgagagcgtcttaccacaacctattttccagatgcaacaacaacacttggcacatgtaacattacaaaccatctcaacgcatcagtatcaacaattcctaccagcactgtaccacctagccatggtgaaacctgatgcctacttgcaacaacagttgcttgcattaaacccacttgctctggcaaacgtagttgcaaaccaggcacaatt

SEQ ID NO: 83801 - DNA, 535 bp, Zea mays
agttttagggctaggtgtgtctactgagacttaggtctgtagcgatgccgtaccggtccggaattcccgggtcgacccacgcgtccgccgtcgtcgtcgtcgttttcgttcccatcgtcacaagtccagtaccaaacgtgccagcgcgacgtcgacaggcacaacgtctgcgccatggaggtgaggcacagcgtcgaacggctggaccaggccgacgtctacagccctggggctgggaggatcacacgcctcaccagccacaagttccccgtcctcaacctcgtacagatgagcgcggtgcgggtagacctgtaccaggacgccatcatgtcgccgttctggaacttcaacgcccacagcgccatgtacggcatcaggggcagtgcaagggtccaggtcgtcagcgacaacgggaccacggtgttcgacgacgtgctccgggcggtgcagctgctcatcgtaccccagggctacctcgtcgccaccaaggcgcagggagaaggcttccagtacatcgcctttcgagacgaaccct

SEQ ID NO: 83802 - DNA, 534 bp, Zea mays
  unsure (1)..(534): unsure at all n locations
ggtaagagctagggttgtagcttgatgctgcaggtgtagcgactgccgtaccggtccggaattcccgggtcgacccacgcgtccggcgtcggcgacgccatcggccggatggcgcgcgacgagggcgtgcgcagcctctggcgcgggtcctcgctcaccgtcaaccgcgccatgatcgtcacggcgtcgcagctggccacgtacgaccaggccaaggaggccatcctggcgcgccgcggcccgggcgccgacggcctcgccacgcacgtggccgccagcttcaccgccggcatcgtcgccgccgccgcgtccaaccccgtcgacgtcgtcaagacgaggatgatgaacatgaaggtggcgcccggcgcgcccccgccctacgccggcgccgtcgactgcgccctcaagaccgtcaggtcggagggacccatggcgctgtacaaggggttcatccccaccgtgatgcgccaggggcccttcaccgtagtgctcttcatcacgctcgatcaggtgcccaaggtcttcaagggcgtn

SEQ ID NO: 83803 - DNA, 534 bp, Zea mays
  unsure (1)..(534): unsure at all n locations
gttatgagtctaggtgtgtngattgaagcatggagctctngcgcactgccgtaccggtccggaattcccgggtcgacccacgcgtccggcgccgggccaccggtggaaagcagaagacgtggcgcaagaagcgaaagtatgagcttggccgccagcctgctaacaccaaactgtctagcaataagacagtgaggagggtccgtgtccgtggaggcaacgtgaagtggagggctctccgattggatacaggtaactactcgtggggaagtgaggctcttacccgcaagacccgcatcctggatgtggtctataatgcatcaaacaatgagcttgtgaggactcagactcttgtgaagagcgccattgtacaagttgatgctgctccattcaagcagtggtacctcactcactatggagtggacatcggtaggaagaagaaggtgcctgttgctaagaaggatgcgactgagggacaagagggtgaggctatagctgaagaaacaaagaagaataacccttttcaaaaggaaaatn

SEQ ID NO: 83804 - DNA, 511 bp, Zea mays
  unsure (1)..(511): unsure at all n locations
tgtatataggcgtagggtgtgccgatgaatngctgnacgncgtacgtaccgctccggaattcccgggtcgacccacgcgtccgctagcaacatagaaagcacaatagtgtaccaacaatggcagccaaaatattttgcttccttatgctccttggtctttctgcaagtgctgctaccgcaaccattttcccacaatgctcacaagctcctatagcttcctttcttcccccatacctctcaccagcggtgtcttcagtatgtgaaaacccaattcttcaaccctacaggatccaacaggcaatcgcagcaggcatcttacctttatcacccttgttcctccaacaaccgtcagccctattacagcagttacctttggtgcatttgttggcacaaaacatcaaggcacaacaactacaacaacttgtgctaagaaaccttgctgcctactctcagcaacagcagtttcttccattcaaccaactggctgcattgaactctgctgcttatttgn

SEQ ID NO: 83805 - DNA, 504 bp, Zea mays
  unsure (1)..(504): unsure at all n locations
agaaaantaaggcgtgggttcncccatggagcctgnagacggtagctccggtcccggattccgggtcgcccaagcctccggtcagcaaaccggcatgcctaaagaggatcgtcgaccagaacagcatgaagatggtcatcgttctcgtcgtgtgcctggctctgtcagctgccagcgcctctgcaatgcagatgccctgcccctgcgcggggctgcagggcttgtacggcgctggcgccggcctgacgacgatgatgggcgccggcgggctgtacccctacgcggagtacctgaggcagccgcagtgcagcccgctggcggcggcgccctactacgccgggtgtgggcagccgagcgccatgttccagccgcttccgcaacagtgctgccagcagcagatgaggatgatggacgtgcagtccgtcgcgcagcagctgcagatgatgatgcagcttgagcgtgccgctgccgncagcagcagcctgtacgagccagctctgatgc

SEQ ID NO: 83806 - DNA, 508 bp, Zea mays
  unsure (1)..(508): unsure at all n locations
agtcttttaggcgtaggttgtgacggttggtactttacgacgtacgcaacggctccggaattcccggttcgaccaaggcgtccgcccacgcgtccgcccacgcgtccgagaaaatgagagagaaagtccaaaagatcatagctcacggaatcaactgtttcatcaacaggcagttgatctataacttccctgaggaactctttgctgacgctggcatacttgcaattgagcatgctgactttgagggcattgaacgtctggctcttgttactggtggtgagatcgcatcaacttttgataatccagattctgttaagcttggtcactgcaaggtaattgaagagattatgattggggaggacaggttaattcatttctctggggtcgcgatggggcaggcttgcaccattgtcctaaggggggctagtgagcatgtgcttgatgaggcagagagatccttgcatgatgccttgtgtgtgctgtcccagacagtaaatgatacccgtgn

SEQ ID NO: 83807 - DNA, 512 bp, Zea mays
  unsure (1)..(512): unsure at all n locations
agattattagaggcgtcgagttcgacggccggatgacttacgncagtacgaaccgctccggaattcccggttcgaccaacgcgtccgcgcaaattgcaccaagaaatccatcgagaggccgtcgacaggggaattaatggcgtcgtcgtctagcagcagccaccgccgcctcatcctcgcagccgccgtcctgctctccgtgctcgcggctgccagcgccagcgccgggacctcctgcgtgccggggtgggccatcccgcacaacccgctcccgagctgccgctggtacgtgaccagccggacctgcggcatcgggccgcgcctcccgtggccggagctgaagaggagatgctgccgggagctggcggacatcccggcgtactgccggtgcacggcgctgagcatcctcatggacggcgcgatcccgccgggcccggacgcgcagctggagggccgcctagaggacctgccgggctgcccgcgggaggtgcagaggggattcgccgccacct

SEQ ID NO: 83808 - DNA, 528 bp, Zea mays
  unsure (1)..(528): unsure at all n locations
aggtctactaggaggccgtagtggttcngaccggaaagaagaactcacgncaatagcgaacggctccggaattcccgggtcgaccaacgcgtccgaataaataaaaatgaagaagataaaaaaaagacaaagaaaataataaaaaaagataataaagaaaatagaaaatttagaaaaaagaaaaaaaaaactaaaaaaataaaaataaaaaaataggaaataaaagaaaaaatcaaaagaagaaaaatttaaagtcaagcaaaaagaatacagaaaaagaaataaaaaaatgaaaaataaaagaaaagagattgataaaaaataaaaaaaagaaaaaaagatagataaaaagatataaagataacaaataaagtaacaattcataaggaatttaaaaaataaaaataataaagaaaaatataataaacaagtaataaaagaaaaaaaaaaaaggaaaatgtgaaatataaacaagaaaaaataagaaaaaaataaaatcaataaaaaaaaggaaaaaataataataaa

SEQ ID NO: 83809 - DNA, 517 bp, Zea mays
  unsure (1)..(517): unsure at all n locations
gatttataataggcgtggtgttcgnaccatcgaagcctgnagncagtagcgtacgggtccggatttccgggttggaccaagccgtccgatccgaattttccttgaagatggacaccaaattggatgtgctcagtcatacccaaagaacatgggactttatggacaaagagcaggatgcctgagtattttgtgtgaggatgagatgcaagcagttgctgtcaagagccaactgcaacagatcgcaagaccaatgtacagcaacccacctgttcatggtgcactggttgtttctataatcctcagtgatccagaattgaagagtttgtggttaaaagaagtcaagggtatggctgatcgtatcattggaatgcggaaggcacttaaggaaaatcttgaaaagctaggttcacctttgtcatgggatcatatcactaatcagattggaatgttctgctacagtgggatgacacctgaacaagttgaccgtttaacaaatgaataccacatttacatgacc

SEQ ID NO: 83810 - DNA, 536 bp, Zea mays
aggtatgaggcgagggtgtgtgtctgagacttacgctgtagcgactgccgtaccggtccggaattcccgggtcgacccacgcgtccgcggacgcgtgggcgcttgcgaggtggtatgcagatctttgtgaagaccttgactggcaagaccataaccctggaggttgagagctccgacaccatcgacaacgtgaaggcaaagatccaggacaaagagggcatcctccagctgcttgccagcgaagatcagacgctgctggtctggggggatgccctctttgtcctggatctttgctggcaagcagctggaggatggccgcaccctagcagactacaacatccagaaggagagcactctccacctggtgctccgcctccgtggtggtcagtaagccatggttcatttaagctgctgctgtacctgggtatctgcgtcgtctggtgccctctggtgtacctctatatggatgtcgtcgtctaataaacatctgtggtttgtgtgtcatgaatcgtggttgttgcttcgttgtgttaatg

SEQ ID NO: 83811 - DNA, 535 bp, Zea mays
  unsure (1)..(535): unsure at all n locations
gttttagaggggaggtgtgtngattgaggctggacgctgtagcgcactgccgtaccggtccggaattcccgggtcgacccacgcgtccgggcacatcttccatcattacaagattatcagaatatgcatactcatggaatataccttcagtcctttgccttttccaacaagttgggttaacacttgagatatcatcatttaattgggaagggccatcgtctaaccacttataactgtcattttcaggataatgcatttgcttataccctaacttgtaatcaataccggcaacattgtcatccaggcggcatgaattagtgatccttccagagaaacatactatgcaaaacaaatgtcatattaataatctagaaacaactttgagatgggttttatctattgatgaggaacctgttaagaaatgtttgattcgcctgtagctgcaaggaatgctaactttnttttggttggtctctgcggaggatgccattgtcagttgtaaatattggcagcatattaggaaacatattatccc

SEQ ID NO: 83812 - DNA, 532 bp, Zea mays
ggtttgaggggagtgtgtgtgtactgatacgtaagtctgtagcgactgccgtaccgtccggattcccgggtcgacccacgcgtccgacatgccatttactcgtggtgagaaacgttcagttgaggttgtgaaggtcacagatgagatgaattcatctgctgcctatggcaagctccgccttgagcggatgaacaagaaacatcttggtgcccgccagaagaaggcagctgatgcagataaggaagataagaagtgaagcggctgaagatagtaccctgatacggtctattcagtcattagtgaatgctactacttaaagtgcttgttctatgcatactttgcggtaatggagatagatccctgacatacattcagctgtcctactgtttgatgccatggactagtaagctaactcaaatttttaatgtgttatgggatttttgcgtatgttcactattttttggtagatctctgtgtaagatgctctttgttattgttattattgtttgattttatgtaacttttattcttt

SEQ ID NO: 83813 - DNA, 538 bp, Zea mays
agacttaggaggggagggtgtcgtgattgaagctggaactcgtacgcactgccgtaccggtccggaattcccgggtcgacccacgcgtccgcccacgcgtccgcccacgcgtccgcgtcaagacacttgttgaggctgttgcagacagttgcccagaggcgttcatccatatcatcagcaacccggtgaattccacggtgccaattgcagctgaggttctgaagcagaagggtgtctacaatcccaagaagcttttcggggttaccaccctggatgttgtcagggccaacacatttgtggcgcagaagaagaaccttaagctcatcgatgttgatgtcccagttgttggtggccatgctggaatcacaattctgccactgttatcgaagaccaggccatctgtcaccttcacagatgaggaaactgaggagctgacaaagaggatacagaatgccgggacagaggtggtggatgccaaagctggtgctgggtctgctaccctgtccatggcctatgccggtgccagattcgttgagtc

SEQ ID NO: 83814 - DNA, 506 bp, Zea mays
  unsure (1)..(506): unsure at all n locations
ggattattgaggcgtgtattcgaccgatgcagactgaagacatagcaacggctccggaattcccgggtcgaccaaggcgtccgctggctaccaagcttccaaggatgacttggctgtctacacttcgttttcgtctgctccctcgtccaagtatatcaacgtagcaaggtggtttaatcacattgatgcgctcgtgaggctgagcggaattactgcagagggccaaggtgtgaaggttgaatcgtcagcagttccttcagccccaactccagatgttgctgaagcacaggccccagttgctgaggaggacgacgacgatgatgttgacctttttggtgaggagaccgaagatgagaagaaggctgctgaagagcgtgctgcagctgccaaggcttctggcaagaagaaagaatctgggaagtcatcagttttacttgatgtgaagccatgggacgatgagactgacatggccaagctcgaggaagctgttaggagtgtccagatgn

SEQ ID NO: 83815 - DNA, 522 bp, Zea mays
  unsure (1)..(522): unsure at all n locations
tgggtatattgaggcgtcggggtgcganggcttggaggactcnagncagtacgtccggctccggatttccgggtcggcccaagccgtcggtccacgcgtcggtccacgcgtccgcccacgcgtccgctgctcttccatcgcgccagtgttttgagaagctggtcggcgctcctagatcccttcgcctctctcgcgttcgaggctaggtagccgtcaccatgagccgctcggggcagcctccggatctcaagaagtacatggacaagaagcttcagattaagctgaatgcaaaccgtgttgttattggcacacttcggggattcgaccagttcatgaatctggtgatcgacaacactgtggaggtcaatggaaatgacaagacagatattggaatggtggttatcaagggaaacagtgttgtcatgatcgaggcacttgaaccaggtgccaaatcgcagtgaatccttatttttcaactgatattgtcgcaacctggaaaccggtgtgaatgcgcttagaggg

SEQ ID NO: 83816 - DNA, 530 bp, Zea mays
  unsure (1)..(530): unsure at all n locations
aggtctagagcgtgtgtcngatgactgagactgagcgcatacgtaccgcttcggaattcccgggtcgacccacgcgtccgcgaagatattcttaggtgtatgaagaaagtcacaccaatggacttgaagcagactgttcaagtagataaagaccttgtgatccgtgcctattatgctggacatgttataggggctgccatgatttatgcaaaagttggggatgctgctatggtatacactggggattacaatatgacaccagatagacatcttggggccgcacagattgatcgtctgaagttggatgtattgataacagagtccacatatgctaaatctatacgtgactcaaagcctgtccgagagagggagtttttaaaagcggtacataaatgtgtttctggtggaggtaaagttctaattccaacgtttgctctgggaagagctcacgaactatgtatgttactggatgactattgggagaggatgggcttgaaagttcctatttatttttcaactggtttaaccat

SEQ ID NO: 83817 - DNA, 531 bp, Zea mays
aggtatgagtgctcgcgtcgaaggactgagactgacgtcatccgaaccgcttcggaattcccgggtcgacccacgcgtccgcttcgcacgcgaaaaccctagcagttcggtagtccctctcctctcgaggtattagcagtcgaccggttcctcggagcacgatgaagtttgctgctgcctacctgcttgctgtactcgctgggaacgccagcccctgcggtgacgatttgactgccattctggagtcagttggctgtgaagctgacaatgaaaagatggaactcctgctgtcccaactgagcggtaaggacatgaccgagcttattgccgcgggcagggagaagtttgcttcagtcccatgtggtggcggcggtgtcgctgttgcggcagctgcacctgctgctggcggagctggtcctgcagctgatgcagagaaagaagagaatgtggaagagaaagaataaagcgatgatgatatgggcttcagcctcttccactaggctgaacagccatcacagtattgttttgggc

SEQ ID NO: 83818 - DNA, 535 bp, Zea mays
  unsure (1)..(535): unsure at all n locations
gtanntgaggggaggtgtcgtgattgatcatggaactcgtacgcactgccgtaccggtccggaattcccgggtcgacccacgcgtccgagcctttatccattcttgtgtttctcgattggattgttgttaaacactattgctatcttctaccgatcattagcagctataccatttggcacaatggttgtcatgtttattctttgggctttcatctccttcccgttggttctattggggactgtagttggtagaaattggagtggtgctcccaacaacccgtgtcgtgtgaaaacgatcccgcgcccaattcctgaaaagaagtggtaccttacaccttctgttatttcactgatgggtggacttctccccttcggcagcatcttcattgagatgtacttcgtattcacttccttctggaactacaaggtgtactacgtctatggtttcatgttgctggtgtttgtcatcctcataatagtcaccatatgtgtcactattgtgggtacttatttcttggtgaatgctgaaaactat

SEQ ID NO: 83819 - DNA, 515 bp, Zea mays
  unsure (1)..(515): unsure at all n locations
gggctttgagggtaggtttgccgatgcatgactcacgacatngcgacggctctggattccggggtcgcaccaggcgtccgagcggcgccgcaggctgacgaggaggcggagtagagtggccggactacctcgacacctgcactgcaaccatgggtatctcacgtgattcgatgcacaagcgccgggccaccggtggaaagcagaagacgtggcgcaagaagcgaaagtatgagcttggccgccagcctgctaacaccaaactgtctagcaataagacagtgaggagggtccgtgtccgtggaggcaacgtgaagtggagggctctccgattggatacaggtaactactcgtggggaagtgaggctcttacccgcaagacccgcatcctggatgtggtctataatgcatcaaacaatgagcttgtgaggactcagactcttgtgaagagcgccattgtacaagttgatgctgctccattcaagcagtggtacctcactcactatggagtggacatg

SEQ ID NO: 83820 - DNA, 532 bp, Zea mays
aggtttggtgcgtggtttggattatgaaacgtaggcaatacgtaccgcttcggaattcccgggtcgacccacgcgtccgcccacgcgtccggcgcctcccggcgggcaagtccaaggagggcggcgagggcaagaaggggaaaaagaaggcgaataagtccgtggagacctacaagatctacatcttcaaggtgctgaagcaggtgcaccccgacatcggcatctcgtacaaggccatgtccatcatgaactccttcatcaacgacatcttcgagaagctcgcggccgagtccgccaagctggcgcgctacaacaagaagcccaccatcacctcccgcgagatccagacctcggtgcgcctcgtcctccccggcgagctcgacaagcacgccgtctccgatggcactaaggccgttacgaagttcacctcgtcttaggatccttgtaatggtcatgtgggcgtcagcagtaggcgtggctcaatttatgtgatactgctagcgatggatgatgatgaactgcgtgtaaatag

SEQ ID NO: 83821 - DNA, 532 bp, Zea mays
  unsure (1)..(532): unsure at all n locations
agggttgaggtgtcgtgtgngattctgtatcgtatgcatgacgtacccgttcgtaattcccgtgtcgacccacgcgtccgcggacgcgtgggtggtgctgctgaagagtcaataagatatcttccaccatctgcaattggtgaagcaagtggttttgatgcgaagggttttgcggttgaaaataaaggcaagagtttggaggccattgttgaacaagtacgcgatggcagtactgttcgtgtgtatttagtccctagttttcagtttgtccagatatatgttgctggagtacaggccctatcaatggggagacgcccatctgcacctactgtaattgctgaaactgatgatactgctaatgacactaacggtgaagattttgagggaacacctgtccaactgactacagcacaaagacttgttgcatctgcagcttctgctgaaatttcaccatataggtatggaagataagcctatgcactttacataggctatagttttcaacatatatttgcgtattgtggtggtaggg

SEQ ID NO: 83822 - DNA, 524 bp, Zea mays
  unsure (1)..(524): unsure at all n locations
agttttaggggtaggttcgaggactgaaacttgagcntncggaccgcttcggattcccggtcgacnacgcgtccgcaacaacttgtgctagcaaaccttgctgcctactctcagcaacagcagtttcttccattcaaccaactagctgcattgaactctgctgcttatttgcaacaacaactaccattcagccagctagctgctgcctacccccaacaatttcttccattcaaccaactggcatcattgaactctcctgcttatttacagcagcaacaactactaccattcagccagctagctggtgtgagccctgctgccttcttgacacaacaacagttattgccgttctacctgcacgctgcgcctaacgctggcaccctcttacaactgcaacaattgctgccatttaaccaacttgctttgacaaacccagcagcgttctaccaacaacccatcattggtggtgccctcttttagattgctcatgagtcatagatcaatgatacagttatcagtatgag

SEQ ID NO: 83823 - DNA, 533 bp, Zea mays
ctttaagggtaggtgcgtgatagagactgcagctgtacgcactgccgtaccggtccggaattcccgggtcgacccacgcgtccgcgtgtatttccgcggtttattctatgacactgcaaatgatcctgagggtggttactatgcaaggggcgcccgtgcatcagtctgggagaacttcaagaacaacccgctcttcgacatctcaacggaccacccacccacgtactacgaggacatgcagcgtgccgtcttctgcctgtgcccgctgggctgggccccgtggagcccccgtctggtggaggcggtggtgttcggctgcatcccggtgatcatcgccgacgacatcgtccttcccttcgcggacgcgatcccgtgggaggagatcggtgtcttcgtggccgaggacgacgtcccgaggctggacaccatcctgacgtccataccgatggaggtgatcctccggaagcagaggctgctcgcgaatccgtccatgaagcaagccatgctgtttccgcaacccgcccaagctgggg

SEQ ID NO: 83824 - DNA, 530 bp, Zea mays
tgtataaagcgtagtttcgtgaactgagccttacgcgtagtatgccgtaccggtccggaattcccgggtcgacccacgcgtccgttgcaatcacaacgaacaaaagctctcgatctcaccgacaccgaggaagaagagatcaatggcgtccgagcagggagtcgtgatcgcgtgccacagcaaggctgagtttgacgcccacatgaccaaggcccaggaagccggcaagctggtggtcattgacttcactgccgcctggtgcggtccatgccgcgccatcgccccactgttcgtcgaacacgccaagaagttcactcaggtcgtgttcctgaaggtggacgtggacgaagtgaaggaagtcaccgcggcctacgaggtcgaggcgatgccgaccttccacttcgtcaagaacggcaagacggtcgcgaccatcgtgggtgccaggaaggacgagctcctggcccagatcgagaagcatgctgcgcctgcgcctgcgtctgcgtctgcctaaaggagatcagatcaatcgt

SEQ ID NO: 83825 - DNA, 535 bp, Zea mays
agttatagggtcaggtgtcgtgatagaggctggacgctgtagcgactgccgtaccggtccggaattcccgggtcgacccacgcgtccgcgtcgagacccaaccataccagcggcgccgcaggctgacgaggaggcggagtagagtggccggactacctcgacacctccactgcaaccatgggtatctcacgtgattcgatgcacaagcgccgggccaccggtggaaagcagaagacgtggcgcaagaagcgaaagtatgagcttggccgccagcctgctaacaccaaactgtctagcaataagacagtgaggagggtccgtgtccgtggaggcaacgtgaagtggagggctctccgattggatacaggtaactactcgtggggaagtgaggctcttacccgcaagacccgcatcctggatgtggtctataatgcatcaaacaatgagcttgtgaggactcagactcttgtgaagagcgccattgtacaagttgatgctgctccattcaagcagtggtacctcactcactatggag

SEQ ID NO: 83826 - DNA, 507 bp, Zea mays
  unsure (1)..(507): unsure at all n locations
ggaatatgaggcgtgtattcnacgatgcatgcctcaaggcaagtactaccggtccggaattcccgggtcgacccacgcgtncgaaaaatatgaattcatgacatctgatcaccagtatatttcccggaaacatgaggaggataaggtgattgtgttcgaaaagggagatttggtatttgtgttcaacttccactgcaacaacagctattttgactaccgtattggttgtcgaaagcctggggtgtataaggtggtcttggactccgacgctggactatttggtggatttagcaggatccatcacgcagccgagcacttcaccgncgactgttcgcatgataataggccatattcattctcggtttatacaccaagcagaacatgtgtcgtctatgctccagtggagtgataaccgggtactcgttgctgcgcggcatgtgtggggctgtcgatgtgaggaaaaaccttcttccaaaacccgcagatgcatgcatgcatgctacaata

SEQ ID NO: 83827 - DNA, 508 bp, Zea mays
  unsure (1)..(508): unsure at all n locations
ggnaatttaggcgtgtgttcaacgctgaatgcctaacggcgtagcgtaccggtccggaattcccgggtcgacccacgcgtccgcccacgcgtccgcaaaacatcagggcacaacaactacaacaacttgtgctagcaaaccttgctgcctactctcagcaacagcagtttcttccattcaaccaactagctgcattgaactctgcttcttatttgcaacaacaacaactaccattcagccagctacctgctgcctacccccagcaatttcttccattcaaccaactggcagcattgaactctcctgcttatttacagcagcaacaactactaccattcagccagctagctggtgtgagccctgctaccttcttgatacaaccacagttgttgccgttctaccagcacgctgcgcctaacgctggcaccctcttacaactgcaacaattgctgccattcaaccaacttgctttgacaaacccagcagcgttctaccaacaacccatcan

SEQ ID NO: 83828 - DNA, 517 bp, Zea mays
  unsure (1)..(517): unsure at all n locations
gatttttaaggtgtcgtgtccgaggactgagcatgnacgcgtactaccggttcgaatttccgggtcgacccaagccttcgggaacccaaattcgttcaagtggatgcttcaaaattcaatgtaccggccacaacttccgggttttcttaagaacattggtggatcttctgatcaatgggataacccaattcttgatcaacttgagaactttgaacctaacaatccaaaaatgccgcagcaatttgcgcaaagtggcatgacttccgaggaagtggtatcgaaaataatggcaaacccagatgtagctgtcgcattccagaatccaaaaatacagacagccatcatggactgctcgcaaaaccctcttaacattgtaaagtaccaaaacgacaaggaagtcatggatgttttcatgaagatatcacagatcttnccccaaatcaacggctagctggtcttcactgcggngttgcagtcttgattntttttgtgggcccatcatcccctgtgtctggag

SEQ ID NO: 83829 - DNA, 532 bp, Zea mays
  unsure (1)..(532): unsure at all n locations
aggtttaaggcgtgtgtcngatgactgagtcgtaggcaatacgtaccgcttcggaattcccgggtcgacccacgcgtccggtcaagaagtgcgttgagctgttttttgagattgcggagaacaaggaggactacaacaggttctatgaggtcttctccaagaacctcaagcttggcatccacgaggactccacgaacaggaccaagattgctgagctcctgaggtaccactcgaccaagagcggggatgagctgaccagcctcaacgattatgtgaccagcatgaacgagggccagaacgacatcttctacatcactggtgagagcaagaaggctgtggagaactacccgttccttgagaaactgaagaaagagggctatgaggtgctgttcatggtggatgccattgacgagtattctattggacagctgaaggagtttgagggcaagaagctcgtctctgccaccaaggagggcctgaagctggacgagagtgaggatgagaagaagcgcaaggaggagctcaaggataa

SEQ ID NO: 83830 - DNA, 531 bp, Zea mays
  unsure (1)..(531): unsure at all n locations
ggtataagtctaggtttgtcgactgaagctgnaggncngtacgtaccgctccggaattcccgggtcgacccacgcgtccgtagcaacatagaaagcacaatagtgtaccaacaatggcagccaaaatattttgcctccttatgctccttggtctttctgcaagtgctgctacggcgaccattttcccgcaatgctcacaagctcctatagcttcccttcttcccccgtacctctcaccagtgttgtcttcagtatgtgaaaacccaattcttcaaccctacaggatccaacatgcaattgcatcaggcatcttacctttatcacccttgttcctccaacaatcatcagccctattacagcagttacctttggtgcatttattggcacaaaacatcagggcacaacaactcgtgctagcaaaccttgctgcctactctcagcaacaacagttacctttggtgcatttgttggcacaaaacatcagggcacaacaactacaacaactcgtgctagcaaaccttgctgcctact

SEQ ID NO: 83831 - DNA, 534 bp, Zea mays
  unsure (1)..(534): unsure at all n locations
gttttagggctagggtgcgtgtactgattctgatgncntncgtaccgcttcggattcccgggtcgacccacgcgtccgccgtcgtcgtgggctcccgtcgctggagacaccaatgggtgtactgggtggggcccatggtcggcgccggcctctccggcgtcgtctacgagcacctcgtcgccggcccggccgccgaggaggaggagcccgcgccgagctgcggcgaccgccgtcgtgcgtagaggactacatgcatgcaagagcagcaggacgtcgtcgtcgtccccgctcctcggaatcttctgaataaaaaaaacagcttgcatgcgtgctcaattgttgtgtgtcgtggtcgatcatgagtagaattaatggtttcatgcctgcacctcttaccggttttaacttatgtgcctgggttgcttcaataatctggcttgtgcgctggggggtaaatcgaatcgacaaaaataaaatgttgtaatattcttttgtttacttatttctagagttttatataggtgttttattgag

SEQ ID NO: 83832 - DNA, 540 bp, Zea mays
  unsure (1)..(540): unsure at all n locations
aggattgtaggtggaggnctcgtgaaaggaagctggacactgtaggcactgccgtaccggtccggaattcccgggtcgacccacgcgtccgggtgttttgaaggaagccagggttttcaaggaactggtggtagcaccaacatcaaaggctcttgtccatgttttctttgcacaacgttccacgacaaaggtgccaggtgtaactgatgttcaactgaaaccaaggccaattagaaaagttgctgttattggtggtggtctgatgggctctggaattgctacatcacttcttgttagcaatatttctgttgtgctcaaggaagtgaaccctcagtttctgcaaaggggagagaaaatgatagcaggtaatcttgagggcctgataaaaaaaggttcactaacaaaggataggatgcacaaggccatgtcgcttttcaagggcgctttggattattcagatttcaaggatgttgatatggttattgaggctgttattgagaagattcctttgaagcaatcgatattttctgacattgaaaa

SEQ ID NO: 83833 - DNA, 532 bp, Zea mays
  unsure (1)..(532): unsure at all n locations
gattagagctaggttcnncgactgagccctgaactctaggcactgccgtaccggtccggaattcccgggtcgacccacgcgtccggcctgacatagttgtagcaacccctgggcgcataatagatcatctgcgcaattctctttctgttgggcttgaagatctagctgttgtgatccttgatgaggctgatcgcttgcttgaattgggcttcagtgctgaaattcaagaactgattcgtatgtgtcctaaaaggaggcaaactatgcttttctctgctacaatgacagaagaaattgatgaacttgtaaagctttcactaaacaagcctgtacgccttgaagctgatccttctctgaaacggcctgcaacattgactgaagaggttgttaggatacgacgagcacgtgagtcaaatcaagaagctgttcttcttgcactcttgttgaagactttcaagcgaagtgttatcatttttagtgggacaaagcaatctgcacacaggttaaaaataatatttggtctctctggcan

SEQ ID NO: 83834 - DNA, 539 bp, Zea mays
  unsure (1)..(539): unsure at all n locations
agatttaagttttaggncgtgtngttcgaagctcgatgctcgtagcgactgccgtaccggtccggaattcccgggtcgacccacgcgtccggggcgcggccggggtggcggtgcccacgtactcgccggacccgcacgccgacttcctccggtccatggaggagatggccgcggcgctgcggctggacgcgcggcgccgcggcgacagggcgcgcctccacgagctgctgctctgctacctcgcgctcaacgacaggcgcgcgcacaagtacgtcgtcagcgccttcaccgacctcctcctccgcctcaccgccgccgccgcagccgccaacctcagcgacgacgaccggcacgagtaaccgccttttttttcacggtcatggccgtgcgtacggacagaatttcgggtacggcggaggctcaaaaatcctcgacagcatgagcgagcgttccaagatcacccagagctgtacatactgcctccagctccagatcgagctccgtagctagaaatctgttcgtgtgcgcagcattttggn

SEQ ID NO: 83835 - DNA, 535 bp, Zea mays
aggtgaagggtaggtttgtgaactgagaactgaggcgtcgcgactgccgtaccggtccggaattcccgggtcgacccacgcgtccgcggacgcgtgggcggacgcgtgggaccatgagggtgttgctcgttgccctcgctctcctggctctcgctgcgagcgccacctgcacgcatacaagcggcggctgcggctgccagccaccgccgccggttcatctaccgccgccggtgcatctgccacctccggttcacctgccacctccggtgcatctgccaccgccggtccacctgccggcgccggtccacctgccaccgccggtccatgtgccgccgccggttcatctgccggcgacaccatgccactaccctactcaaccgccccggcctcagcctcatccccagccacacccatgcccgtgccaacagccgcatccaagcccgtgccagctgcagggaacctgcggcgttggcagcaccccgatcctgggccagtgcgtcgagtttctgaggcatcagtgcaacccgactgcgag

SEQ ID NO: 83836 - DNA, 511 bp, Zea mays
  unsure (1)..(511): unsure at all n locations
agggtaattgaggcgtcgtgtcnaacgctggagacgttagcacgtactaccggtccggaattcccgggtcgacccacgcgtccgtagcaacatagaaagcacaatagtgtaccaacaatggcagccaaaatattttgcttccttatgctccttggtctttctgcaagtgttgctaccgcaaccattttcccacaatgctcacaagctcctatagcttcccttcttcccccatacctctcaccagcggtgtcttcaatgtgtgaaaacccaattgttcaaccctacaggatccaacaggcaatcgcaacaggcatcttaccattatcacccttgttcctccaacaaccgtcagccctattacagcagttacctttggtccatttggtggcacanaacatcagggcacaacaactacaacaacttgtgctagcaaaccttgctgcatactctcagcaacatcagtttcttccattcaaccaactggctgcattgaactctgctgcttatttgg

SEQ ID NO: 83837 - DNA, 523 bp, Zea mays
  unsure (1)..(523): unsure at all n locations
agtntaaaaggctgaggtcgtgcccatcgaagccatgnagnacgtacgtaacggctcggaattcccgggtcgacccacgcgttcgattttgagcattcagaaacacaccaagccgaacgcactagcaacaacctaacaacaatggctaccaagatattattcctccttgcgcttcttgcgctttttgcgagcgcaacaaatgcgtncattattccacaatgctcacttgctcctagttccattattccacagttcctcccaccagttacttcaatggccttcgaacacccagctgtgcaagcctataggctacaacaagcgattgcagcgaacgtcttacaacaaccaattgcccaattgcaacaacaattcttggcacatctaacaattcaaaccatcggaacgcaacagcaacaacagttcctaccaacactgaaccacctaaccatggtggaccctgttgnctacttgcaacaacaactggtttgattcaaaccaatttgtttaacaaacgtaatttgaa

SEQ ID NO: 83838 - DNA, 525 bp, Zea mays
  unsure (1)..(525): unsure at all n locations
gttntagggctcgtgtcgatcactgaaactgacgcntacgtaccgctccggattcccggtcgacccacgcgtccgctccctcaggtttagtgttcgcaatggcggccttcaacaagcttggtggccttctaaggcacagtgctctggtgagcggtatcactggtggctcttctcctgcagtgttcaatgctgcacggctcatgtctaccaagctatttattggtggtcttgactggggtgttgatgacgtgaaactaagagaagcatttagcagctttggagaggttactgaagcgagggtgatcacagacagggagactgggaggtcaagaggctttggctttgtgaactactccgacagtgatgctgccaaggaagctatttctgcaatggatggcaaggaaattgatgggcggcaggtacgtgtcaacatggctaatgagagacctgctgggaaccgtggtggtggcggctatggtggcggcggctatggaggtggtggctacggaggtggtggcggctccn

SEQ ID NO: 83839 - DNA, 529 bp, Zea mays
  unsure (1)..(529): unsure at all n locations
aggtcaggcgtgtgtccgatgactgagcctgagacgtcgtactcgcgcgcggttcccgggtcgacccacgcgtccgcgcaaattgcaccaagaaatccatcgagaggccgtcgacaggggaattaatggcgtcggcgtctagcagcagccaccgccgcctcatcctcgcagccgccgtcctgctctccgtgctcgcggctgccagcgccagcgccgggacctcctgcgtgccggggtgggccatcccgcacaacccgctcccgagctgccgctggtacgtgaccagccggacctgcggcatcgggccgcgcctcccgtggccggagctgaagaggagatgctgccgggagctggcggacatcccggcgtactgccggtgcacggcgctgagcatcctcatggacggcgcgatcccgccgggcccggacgcgcagctggagggccgcctagaggacctgccgggctgcccgcgggaggtgcagaggggattcgccgncaccctcgtcacggatgccgagtgcaacccggg

SEQ ID NO: 83840 - DNA, 530 bp, Zea mays
  unsure (1)..(530): unsure at all n locations
agatgaggctaggtgtgtntcagtatactgtatcattcgtatgccgtaccggttcggaattcccgggtcgacccacgcgtccgaccacgcgtccggggtcggcttctcctccccctccggctcgggtccgggttcgtgaggtcctccggggttcgggttcgtgggtgagcggatcgagatggcggcgtcggatgttgagtaccgctgcttcgtcggcggcctcgcctgggccacggacgaccactccctacacaacgccttcagcacctacggcgaggtcctctagtccaagatcattctcgatcgggagacgcataggtcccgcggcttcggcttcgtcaccttctccacggatgaggcgattcggaacgccatcgagggcatgaacggcaaggagcttgacggtcgcaacatcaccgtcaacgaggcccattcccgtggcggtcgtggatgcggcctcagtgtgtacagtggtggccgtggatgcagctgctactgcattggccggcgccttgatttcttgttgcgtg

SEQ ID NO: 83841 - DNA, 530 bp, Zea mays
aggtttaggttagggttgtgtttgaaaatgaactatgtaagccgtaccggtccggaattcccgggtcgacccacgcgtccgcccacgcgtccgcagaaacacacctagcgaagcgcactagcaacgacctaacaacaatggctaccaagatattatccctctttgcgcttcttgccctttttgtgagcgcaacaaatgcgttcattattccacaatgctcacttgctcctagtgccattattccacagttcctccctccagttacttcaatgggcttcgaacacccagctgtgcaagcctacaggctacaacaagcgcttgcggcgagcgtcttacaacaaccaattgcccaattacaacaacaatccttggcacatctaaccatacaaaccatcgcaacgcaacagcaacaacaatttctaccagcactgagccaactagctgtggtgaaccctgtcgcctacttgcaacagcagttgcttgcatccaacccacttgctctggcaaacatagttgcataccaacaacaa

SEQ ID NO: 83842 - DNA, 512 bp, Zea mays
  unsure (1)..(512): unsure at all n locations
gggtataaggctcaggtctgngactgaggctgatgctgtcgtacgccccgaattcccggtcggaccacgcgtccgtgctgatggcaacggcaccatcgatttcccagagtttctcaaccttatggctcgcaagatgaaggacaccgactctgaggaagagctcaaggaggccttccgtgtgtttgacaaggaccagaacggcttcatctcggccgccgagctccgccatgtcatgacaaatcttggtgagaagctaactgatgaggaggtggacgagatgatccgtgaggctgatgtcgatggtgatggccagatcaactacgaggagtttgtcaaggtcatgatggccaagtgagccacagaaccataatctgaaggcagagaagattatgcattgcatattagtcaagatgcaactttttattccatcgacttctagtgaaacattctgctagttgtagttgctgaaaaaggcaatgtagttcctgctttgttctttcctccaaagtgtt

SEQ ID NO: 83843 - DNA, 527 bp, Zea mays
  unsure (1)..(527): unsure at all n locations
aggttgagtactcgtgtgcgcctgctgcagtcatnagtcatgccgtaccggtttcggaattcccgggtcgacccacgcgtccggcaacatagaaagcacaatagtgtaccaacaatggcagccaaaatattttgcttccttatgctccttggtctttctgcaagtgctgctaccgcaaccattttcccacaatgctcacaagctcctatagcttcctttcttcccccatacctctcaccagcggtgtcttcagtatgtgaaaacccaattcttcaaccctacaggatccaacaggcaatcgcagcaggcatcttacctttatcacccttgttcctccaacaaccgtcagccctattacagcagttacctttggtgcattttgttggcactaaacatcaaggcacaacaactacaacaacttggtgctaagaaaccttgctgcctactttaagcaacagcaagtttcttccattcaaccaactggctgcattgaactctgctgcttatttgcaacaacaactaccatg

SEQ ID NO: 83844 - DNA, 514 bp, Zea mays
  unsure (1)..(514): unsure at all n locations
ggttaagtctggtcgcgctgagactgagacgtacgaagccgtaccggtccggaattcccgggtcgacccacgcgtccggagacgaccgccgccgcatcggaccgtgcccgagccccccttctcctcgctgactcggctcccctcctccgccgtcgccggaggcgaagcaagtggggaccacagaagcattagctgggtgaacccactcaaagggggcagggaattgtgtgctagtttgaatggctgctacaaagcttcaggccctttggaaccacccggctggccccaaaaccattcatttctgggcgccaacattcaaatggggcatcagcattgccaacatagccgactntgctaaaccacctgaaaagatatcttaccctcagcaagttgctgttgcatgcactggactcatttggtcaaagtacagctnggttatcacacccgagaaactgaaccttttcagtgttaacggtgcaatggccggtaccagcctggattaacttttacggag

SEQ ID NO: 83845 - DNA, 520 bp, Zea mays
ggtttggtgcctcgtatgcgtcgactgatgacttaggctgtagcgaacggcgttcggaattcccgggtcgacccacgcgtccgggcaagtgggaggcatcaccagaggatgatataagacattggtccaagttcccatcatttatgcctcttctgagtcagattgagacagacggtggcaagtctctggactttagcaactatccttacatatttatgagatggaaagaacagtattttgtcaatgttggagttgactgtgggttaaccatcgctggtttctactacgtctgcttttcttgtagcgatggctccatcagtggattttattatgatccaaatagcagtccatttcagaagctcgaattgaagtgtaccaatgagaaaagttctggattcaccttttcatcctatgagctgcagtgacagggccagatgcatatagtgtgtactgaactcatactcgcctaatgctgctgtattgaaagaaacgagtggtggtttatgcaacacttcgtttg

SEQ ID NO: 83846 - DNA, 514 bp, Zea mays
  unsure (1)..(514): unsure at all n locations
aggttatgaggctcgggtcgacggctcatgactgacgcntgacgtaccgctccggaattcccgggtcgacccacgcgtccgcggacgcgtgggcgcacgcatgcgaggacaggtacaacaagtccaagctcgtgcactccatcatgcgccacgtcgccgagacgctcgaggtcgacctcgagccgctctaccagcggattggctggccgctctaccgcaagtacggtcacgccttcgaggccttcaagctcatcgttgcggaccctgacgctatcctcgacgtactcacctatgaggaaaaggaggtcggcccagatggccaggaggtggctaaggtggtgcctgctgtcacccctgaggttaaggattcactggtgaagaacataaggaggaggatgacaccgcagccactcaagatccgtgctgatatagagatgaagtgcttncagtttgatggagtgctccatattaagcaagctatgaagaaagctgaagctggggcaatgataattgc

SEQ ID NO: 83847 - DNA, 520 bp, Zea mays
  unsure (1)..(520): unsure at all n locations
gttttntaaggcgtgttttcnaaggatggagactgaacgcctcacgtaccggtccggaattcccgggtcgacccacgcgtccggcggcgatgattgagtaataatgtgtcacgcatcaccatgggtggcagtgtcagtgtgagcaatgacctgaatgaacaattgaaatgaaaagaaaaaagtattgttccaaaaaaaaaaaaaaaaaaaaaaaaaaaaaagggcggccgctctagaggatccaagcttacgtacgcgtgcatgcgacgtcatagctcttctatagtgtcacctaaattcaattcactggccgtcgttttacaacgtcgtgactgggaaaaccctggcgttacccaacttaatcgccttgcagcacatccccctttcgccagctggcgtaatagcgaagaggcccgcaccgatcgcccttcccaacagttgcgcagcctgaatggcgaatgggacgcgccctgtagcggcgcattaagcgcggcgggtgtggtggttacgcgcagcgtgn

SEQ ID NO: 83848 - DNA, 514 bp, Zea mays
  unsure (1)..(514): unsure at all n locations
gattatgaggcttagnttntnnaaattgaacaatggatactgtacgcactgccgtaccggtccggaattcccgggtcgacccacgcgtccgcggacgcgtgggtagctgcattgaactctgcttcttatttgcaacaacaacaactaccattcagccagctacctgttgcctacccccagcaatttcttccattcaaccaactggcagcattgaactctcctgcttatttacagcagcaacaactactaccattcagccagctagctggtgtgagccctgctaccttcttgacacaaccacagttgttgccgttctaccagcacgctgcgcctaacgctggcaccctcttacaactgcaacaattgctgccattcaaccaacttgctttgacaaacctagcagtgttctaccaacaacccatcattggtggtgccctcttttagatttcttatgagttatagttcaataataaagttttttgtctgatgtttgtggcttcccagaaataagaaa

SEQ ID NO: 83849 - DNA, 512 bp, Zea mays
  unsure (1)..(512): unsure at all n locations
tgtataataggcgttgtgtcncgccctcgtaacatgnatactgtacgcactgccgtaccggtccggaattcccgggtcgacccacgcgtccgggcaaagattacatatatgccgtcacccccttacttgaagatgctttaatggatagagatctggttcaccggcagactgctgcatctgctgttaagcacatggctctaggtgttgctggcttgggttgtgaggatgctcttgttcatctgcttaactatgtttggcccaacatatttgagacatctccccacgttataaatgctgtcatggaggcaattgaggggatgagggtcgcactaggtgcggctgtgattttaaattattgcctgcaaggtctcttccatccagcaaggaaagtacgagaagtgtattggaagatatacaactctttgtacatcggcgcgcaggatgcacttgttgcttcttatcctgccctggaagacgatggggataacatctttagtcgtccagagttggca

SEQ ID NO: 83850 - DNA, 525 bp, Zea mays
  unsure (1)..(525): unsure at all n locations
agggctatggtaggcntgaggtcgtggagttggatcgactgnatnncttagtnagatcgtaccggtctcgaattcccgggtcgacccacgcgttcgggcaaagattacatatatgccgtcacccccttacttgaagatgctttaatggatagagatctggttcaccggcagactgctgcatctgctgttaagcacatggctctaggtgttgctggcttgggttgtgaggatgctcttgttcatctgcttaactatgtttggcccaacatatttgagacatctccccacgttataaatgctgtcatggaagcaattgaggggatgagggtcgcactaagtgcggctgtgattttaaattattgcctgcaaggtctcttccattcagcaaggaaagtacgagaagtgtattggaagatatacaactttttgtacatcggcgcgcatgatgcacttgttgcttcttatcctgccctggaagacgaaggggataacatctttagtcgtccaagagttgcaaaggttgtn

SEQ ID NO: 83851 - DNA, 516 bp, Zea mays
  unsure (1)..(516): unsure at all n locations
ggttttgagttagtgctgtngttgaagatggatacgtacgaatgccgtaccggtccggaattcccgggtcgacccacgcgtccgcgcattcctcccatctcccaagacctcctcagacccgagaagcgcagctgcggccatggacgccaccggcactggagctggagggaaggcgaagaagggagcggccggtcgcaaggccggcgggccgaggaagaagtcggtgacgaggtccgtgaaggccgggctccagttccccgtcggccgcatcgggcgctacctcaagaagggccgctacgcgcagcgcgtcggcagcggtgcccccgtctacctcgcggccgtcctggagtacctcgccgctgaggtcctggagctcgccggcaacgctgccaaggacaacaagaagacgcgcatcgtcccgcgccacgtgctgctggcgatccgcaacgacgaggagctcgggaagctgctgaccggcgtgaccatcgcccacggcggcgtgttgcccaacatcaa

SEQ ID NO: 83852 - DNA, 517 bp, Zea mays
  unsure (1)..(517): unsure at all n locations
gcattggaggttaggactgtcgatgaagctggatgcgtncgactgccgtaccggtccggaattcccgggtcgacccacgcgtccggtctgactcagctagctgtggcaaaccctgctgcctacccccagcaatttcttccattcaaccaactggcagcattgaactctgctgcttatttacaacagcaacagctaccaccattcagccagctagctgatgtgagccctgttgccttcttgacacaacaacagttgttgccgttctacctgcacgctgcgcctaacgctggcaccctcttacaactgcaacaattgctgccattcaaccaacttgctttgacaaacccaacaacgttctaccaacaacccatcattggcggtgccctcttttagattgcttatgagttatagttcaataatgaagttttttggatgatgtttgtggcttcccagaaataagaaagtacatttctagattctaaaaaaaaaaacaaaaaacaaacacaaaaaaaaaaaa

SEQ ID NO: 83853 - DNA, 522 bp, Zea mays
cggtttatagtgctggtgtgcgacggctgcagactaaggcattcacgtaccggttcggaattcccgggtcgacccacgcgtccgcccacgcgtccggcaacatagaaagtggaatccagtagcaacaacagagcaacaatggcgaccaagatattttccctccttatgctccttgctctttctgcatgtgttgctaacgcgacaattttccctcaatgctcacaagctcctatagcttcccttcttcccccataccttccatcaatgatagcttcagtatgtgaaaacccagctcttcagccctataggctccaacaagcaatcgcagcaagcaacatacctttatcacccttgttgtttcaacaatcgccagccctatctttggtgcagtcattggtacaaaccatcagggcacagcagctgcagcaactcgtgctacctgtgatcaaccaagtagctctggcaaacctttctccctactctcagcaacaacaatttcttccattcaaccaactgtctacg

SEQ ID NO: 83854 - DNA, 517 bp, Zea mays
cgggtttgaggcgtgtgtcagaggctggatgctgaaggcatgacgtaccggtccggaattcccgggtcgacccacgcgtccgtggagctctctcgcaagctcttcacggccgtcctcctcgtcatgctgctgctgctgtccgcagaggtcgggccggtggcggtggcggaggcgcggacgtgccagtcgcagagccacaggttccggggcccctgcctccgccggtccaactgcgccaacgtctgcaggaccgaggggttccccggcggcaggtgccgcggcttccgccgccgctgcttctgcaccacgcactgccactgattcgctcgcccagcggccggctggcgtcgccgtcgatcgcgcgcgtcgcgaccagtccatggctccatgcatgaataacaagggtgtgcggtttgtgatgccaaattgtatcctctcgtcgtgtgttgaagcgttcgatcgtcggtctagtagtgtgcctgtgagcagcggcgtgctgttgtacgtacgtctgcct

SEQ ID NO: 83855 - DNA, 533 bp, Zea mays
gatatataggtgtggggtcgccggactgaagcttacgcatgcacgtaccggtccggattcccgggtcgacccacgcgtccgggtaatttttctacagatgaaccactgctagcacagtagtgatccaacaactgctgacaagatatttagcctccttaggcttattggtctgctgcggacatgctgatagcacaaccattatcacggagtgctcagaatctgctatagcaaccgtgctaactccgtacctatcacgagagacgtcttcggtatgtgaaaacccatttgttgaaccttataagatccaacacgctgtcctagatggcttgttacctttatcacctcgcgttccttcaacaaagatcacgtcctattacaggcaattgccttcgtgcgcatattatcggcgcgaaaacatcattgggacgacaaacttctataactatgggctagcataccatgcttgcctaactgttagctacagcaggttcctgtcatccaaccaaatactttgattcgaacttttttgtttg

SEQ ID NO: 83856 - DNA, 506 bp, Zea mays
  unsure (1)..(506): unsure at all n locations
tggctgaggtcgtgnagttgganngctggagcctgtacgcactgcacgtaccggtccggaattcccgggtcgacccacgcgtccgcccacgcgtccggaaatcgcgggaagcaaggacaccgtggggcagtacgagtcccacatcgcgttcactcttcctgggctctaccgtgtcgtccatggcatcgatgttttcgatcccaagttcaacattgtctcccctggagcagacatgagtgtttactacccgtatacggaaaccgacaagagactcactgccttccatcctgaaatcgaggagctcatctacagcgacgtcgagaactccgagcacaagttcgtgctgaaggacaagaagaagccgatcatcttctcgatggcgcgtctcgaccgcgtgaagaacatgacaggcctggtcgagatgtacggcaagaacgcgcgcctgagggagctggcgaacctcgtgatcgttgccggtgaccacggcaaggagtccaaggacaggg

SEQ ID NO: 83857 - DNA, 512 bp, Zea mays
gggatttaaggttaggtgtgtatttgaacatggaactgtacgcactgccgtaccggtccggaattcccgggtcgacccacgcgtccgcccacgcgtccgcccacgcgtccgctccgtccctcgaagcttctctggtttcagacgcaaccccgcgggtcgcgggatcaaggagccagagagcgggacgcagcgagcgttccgccggagatcgagaccgtagctagggtttgaggcgccgggctgcggtggacgagatgtcgacgccggcgaggaagcggctgatgcgggacttcaggcgcctgcagcaggacccgcccgccgggatcagcggcgcgccgcacgacaacaacatcatgctctggaacgccgtcatattcgggccggatgatacgccgtgggacggtggcacgttcaagcttaccttgcagtttacagaagattacccaaacaagccaccaactgttcgatttgtctctaggatgtttcatccaaatatatatgctgatggaagc

SEQ ID NO: 83858 - DNA, 507 bp, Zea mays
  unsure (1)..(507): unsure at all n locations
tgaattagagggttaggcgtgnagtggaacatggagctctacgcatgccgtaccggtccggaattcccgggtcgacccacgcgtccgcggacgcgtggggcagcagccgcagccatggcaataccccactcaaccaccgcagctaagcccgtgccagcagttcggatcctgcggcgtcggcagcgtcggcagcccgttcctgggccagtgcgtcgagttcctgaggcaccagtgcagcccggcggcgacgccctacggctcgccacagtgccaggcgctgcagcagcagtgctgccaccagatcaggcaggtggagccgctgcaccggtaccaggcgacatacggtgtggtcctgcagtccttcctgcagcagcagccgcagggcgagctcgcggcgctgatggcggcccaggtagcgcagcagctgacggcgatgtgcggtctgcagctgcagcagccaggtccctgcccttgcaacgcagctgccggcggtgtctactactgagg

SEQ ID NO: 83859 - DNA, 527 bp, Zea mays
  unsure (1)..(527): unsure at all n locations
ggatttagagggnaggttcgtgtngaattgaaggctggaagtcggtgcgcacgccgtaccggtccggaattcccgggtcgacccacgcgtccgaaccgtcccggcctcagcctcatccccagccacacccatgcccgtgccaacagccgcatccaagcccgtgccaacttgaaggaacctgccgcgttggcagcaccccgatcctgggccagtgcgtcgagttcctgaggcatcagtgcagcccggacggcaacgcctaattgttggcttaatggccggccgtgccggagcaatgtttgcaggaacttaagccagttgagcccgcagcaccggtaccaggcgatcttcggcttggtcctccagtccatcctgcagcagcagcgtaaagcgggcaggtctcgtggctgttggcggcgcacatagcgcagcaactgacagcgatttgcgggctgcatcattcgactctatgcgcttactcctgtgtcggcggtgttctccactgtagaaactatgtgctgttgtatagc

SEQ ID NO: 83860 - DNA, 518 bp, Zea mays
ggtttagagttgtggggtcgccggatggagactgacgcatgccgtaccggttcggaattcccgggtcgacccacgcgtccggtgccttctcatgtcatgtcatcaactatgtttacaagtgtgaaaggtccagttgcctctgcttctgagacaactaactcccaacaacgcaacagtaacgctaaaagctgtcagtttccaggatgtgtgaaaggagcaagaggggcatcagggcgttgcatagcacatggcggcggtaggcgttgccagaaacctggttgtgagaagggcgctgaagggaggacaatctattgcaaggcccatggtggaggcaggagatgtcaatttctcgggtgtacaaagagtgctgaagggcgcacagaccactgcatagctcatggtggtggccgccgctgcagccatgaaggttgctcccgagctgctcgtggaaaatctggcctgtgtatcaagcatggtggtggcaaaaggtgtcagaaggagaactgtaccaaaagtgc

SEQ ID NO: 83861 - DNA, 517 bp, Zea mays
agggaatgaggcgtgtgtcgcctgctgtgtaacgatgtcatacgtacggcttcggattcccgggtcgacccacgcgtccggtgccttctatgtcatgtcatcaactatgtttacaagtgtgaaaggtccagttgcctgtgcttgtgagacaactaactcccaacaacgcaacagtaacgctaaaagctgtcagtttccaggatgtgtgaaaggagcaagaggggcatcagggcgttgcatagcacatggcggcggtaggcgttgccagaaacctggttgtgagaagggcgctgaagggaggacaatctattgcaaggcccatggtggaggcaggagatgtcaatttctcgggtgtacaaagagtgctgaagggcgcacagaccactgcatagctcatggtggtggccgtcgttgcagccatgaaggttgcttccgagctgctcgtggaaaatttggccctgtgtatcaagcatggtggtggcaaaaggttgtctgatggagaactgtaccaaaagtt

SEQ ID NO: 83862 - DNA, 517 bp, Zea mays
  unsure (1)..(517): unsure at all n locations
ggttttaggctggggtcgtcggatggcaactanggcatgcacgtaccgcgttcggaattcccgggtcgacccacgcgtccgaggaagtgggcaagtggtgaatggtgacaagaatgttgcatacacccataagaaccttcgcttacaatgaggctgtttttgtgcttgatcaggattcgtgtctatccagtgatgtttgatagtttcatcaggcaggagcatagaatggtgaatcttttcgattgaggactgtgaatccatggatgttcagtcattgtttgtgtagacattgtggtgagcttggaggccaccccacctactcaataaagcagtgctgggagtaatagagcactgatgtactgagggtgcctaggttaaacacgaggaaccggttatatttgtttcgcggtcgaacacaatcaattttttgttggtgacttgtttcttatgattctacatattttaaggtttatgtgctgtcctaaccgtggtctttgataccggttattttggatac

SEQ ID NO: 83863 - DNA, 519 bp, Zea mays
  unsure (1)..(519): unsure at all n locations
cggtttatnaggctcgttttcgacggctgcaaatcgtaggcactgccgtaccggtccggaattcccgggtcgacccacgcgtccgctcatcgactccagattggagaactcgacaccatgaaggtgctgatcgttgcccttgctctcctggcgctcgctgcgagcgccgcctccagtacaagcggcggctgtggctgccagacaccaccgtttcatctaccgcctccgttctatatgccgcctccgttctatctgccgccgcagcagcagccgcagccatggcaataccccactcaaccaccgcagctaagcccgtgccagcagttcggatcctgcggcgtcggcagcgtcggcagcccgttcctgggccagtgcgtcgagttcctgaggcaccagtgcagcccggcggcgacgccctacggctcgccacagtgccaggcgctgcagcagcagtgctgccaccagatcaggcaggtggagccgctgcaccggtaccaggcgacatacggtgtggtcctg

SEQ ID NO: 83864 - DNA, 513 bp, Zea mays
  unsure (1)..(513): unsure at all n locations
ggtttatgaggnttagttcgtgnattttgaaaactgtatgcgtacgcctgcacgtaccggtccggaattcccgggtcgacccacgcgtccgcctgaatcaagtgagaagttggcaatgggtgaattttttgggataaaacctcctgtgaagaaggttgatatcgatattgcaacacatatagttgttgaagacgacgggccaaaaagaagcatgctttacatagagacagccgatcggcctggcctacttcttgagataatcaagatcatcgcggacacaaatattgatgtggagtcagctgagatcgatactgaaagtttggttgcaaaggacaagtcccatgtgagtttacaagggtgcataacctaaacagttccttatctaaggtgttggatcaatagtctgctttattactttctatggccttatccagatgaatacggctttttacttgtgtgtttgtgaactttctaggtctaatttaatactcgttttttaaaatttaggctttg

SEQ ID NO: 83865 - DNA, 519 bp, Zea mays
  unsure (1)..(519): unsure at all n locations
gggaatatgaggctcaggttgtgnngatgtaaccctgnagncagtacgcatgccgtaccggtccggaattcccgggtcgacccacgcgtccgcccacgcgtccgcccacgcgtccggcactgttttatgtggtcttcatgctgtcagcctgtgctctgttctcaaagacatggattgaagtttctggttcatcagcaaaggatgttgctaagcagctcaaggaacaacaaatggtgatgccaggccatcgtgagtcaaacttgcagaaggaacttaaccgatacatccccactgccgctgcatttggtggtgtatgcattggcgcattgaccgtcctggctgatttcatgggtgcgattggttcaggaactggtatattgctcgctgtgacaatcatataccaatacttcgaaacctttgagaaggaaagggcgactgagcttggtttctttggtttttgattagtagctgtggaaccttaacttggctatagctgaattttcttgtaagtccctgtag

SEQ ID NO: 83866 - DNA, 524 bp, Zea mays
  unsure (1)..(524): unsure at all n locations
gtatattgaggttaggtctcgtcgttcgaagatgaatactgtngcgactgccgtaccggtccggaattcccgggtcgacccacgcgtccgcaaggcacaacaactacaacaacttgtgctaggaaaccttgctgcctactctcagcaacagcagtttcttccattcaaccaactggctgcattgaactctgctgcttatttgcaacaacaactaccattcagtcagctagctgctgcctacccccagcaatttcttccattcaaccaactggcagcattgaactctgctgcttatttacaacagcaacagctaccaccattcagccagctagctgatgtgagccctgttgccttcttgacacaacaacagttgttgccgttctacctgcacgctgcgcctaacgctggcaccctcttacaactgcaacaattgctgccattcaaccaacttgctttgacaaacccaacaacgttctaccaacaacccatcattggcggtgccctcttttagattgcttatgagt

SEQ ID NO: 83867 - DNA, 517 bp, Zea mays
gaaattaaggcgtggagtcgccggctggtagctgaacgtatgacgtaccggttcggaattcccgggtcgacccacgcgtccggcagtgcgtagagaggatcgtcgaacagaacagcatgaagatggtcatcgttctcgtcgtgtgcctggctctgtcagctgccagcgcctctgcaatgcagatgccctgcccctgcgcggggctgcagggcttgtacggcgctggcgccggcctgacgacgatgatgggcgccggcgggctgtacccctacgcggagtacctgaggcagccgcagtgcagcccgctggcggcggcgccctactacgccgggtgtgggcagccgagcgccatgttccagccgctccggcaacagtgctgccagcagcagatgaggatgatggacgtgcagtacgtcgcgcaacagctgcagatgatgatgcagcttgagcgtgccgctgccgtcagcagcaatctggacgagcctgctttgatgcaacatcatcaggaattgctggg

SEQ ID NO: 83868 - DNA, 518 bp, Zea mays
aggaatgaggcgtgtgtcgacgatgctagctgacgtcatccgtaccgcgtctcggattcccgggtcgacccacgcgtccgcccacgcgtccggttcattattccccaatgctcacttgctcctagtgccattattccacagttgctccctccagttacttcaatgggctttgaacacccagctgtgcaagcctacaggctacaacaagcgcttgcggcgagcgtgttacaacaaccaattgcccaattacaacaacaatccttggcacatctaaccatacaaaccatcgcaacgcaacagctacaactatttgtaccagcactaaaccaactagctgaggtgaaccctgtcgcctacttgctacagcacttgcttggattcgacgcacttgctctggcaaacataggtgcattccaacaaccaccacaatttgcaccagttctaccagcgcttaaatcaattggcctggagaaccctggcggctatcttccaacaggttcagctggatttatttatcc

SEQ ID NO: 83869 - DNA, 513 bp, Zea mays
ggtatgagagttttaggacgctgtgtttgaagatggatacctgtggcatgccgtaccggtccggaattcccgggtcgacccacgcgtccgttcaaaacttcgacatgctcctagtgtccactttcaagagagagttcctgacacagaaatacctgagcaagatgaagaccaagatgatccagatgaacgacatgatcctgactctgatatggaagtggatgatcacaaggctgtggaagagtcatcgaggaggagcattctaggtataaaaatcaagagagaatttggtgaaaatgcgaccagagtacaggatggtggcagagtcgcatctgaacatagaggactggaacccatggcagaagacatcggttcctccaagcaagctcctgcagatgccagtgcaatggccatcgatgaaccaagcaatgtcaagaatgaacctgagagctcaactaaattgcaaggccaagcagctgcgtaccacaagccatagctgcgaccatcaagagttgc

SEQ ID NO: 83870 - DNA, 538 bp, Zea mays
  unsure (1)..(538): unsure at all n locations
agaatttaaaggttnaggtgtgtngctggaggctggatgctgtacgcactgccgtaccggtccggaattcccgggtcgacccacgcgtccgcccacgcgtccgactgtatgcattgctagtgtagtattctgtgacaaaaccaataatcaaaccagcccacagacctgtgcaagatgatccagatgaacgacatgatcctgactctgatatggaagtggatgatcacaaggctgtggaagagtcatcgaggaggagcattctaggtataaaaatcaagagagaatttggtgaaaatgcgaccagagttcaggatggtggcagaatcgcatttgaacatagaggactggaacccatggcagaagacatcgggttcttcaagcaagcttcttgcagatgccagttcaattggccattggatgaaccaagccaatgtcaagaatggaccttggaagcttaaactaaattggtataggccaaacagcttgcgtcccaaaagcccattaatttcgaacaatcatataattgtctggggttttt

SEQ ID NO: 83871 - DNA, 508 bp, Zea mays
  unsure (1)..(508): unsure at all n locations
gtataatggaggngtagttgtgnagatcgangctggatgctgtcgcctgcacgtccgtccggattcccgggtcgacccacgcgtccggatcagcaaacggcggtgcgtagagaggatcgtcgaacagaacagcatgaagatggtcatcgttctcgtcgtgtgcctggctctgtcagctgccagcgcctctgcaatgcagatgccctgcccctgcgcggggctgcaggtcttgtacggcgctggcgccggcctgacgacgatgatgggcgccggcagactgtacccctacgcggagtacctgacgcagtcgcagtgcagcccgatgtcagcagagccctactacgccgattgtggacagcctagcgccatgttagagcggttctggcgacaccactgccatgagcatattaggatcatgcactgtcaagactgaaccgtggaagctgaactagattgtacgggcaagcacttgcgttcgacatgcgataactgctatcattaatagttt

SEQ ID NO: 83872 - DNA, 520 bp, Zea mays
  unsure (1)..(520): unsure at all n locations
gtaataaaagtcttaggtctgagctggaggctgntagcgtacgcactgccgtaccggtccggaattcccgggtcgacccacgcgtccgacaacaactcgtgctagcaaaccttgctgactactctcagcaacaacaggttctgccattcaaccaactagctgcattgaactctgctgcttatttgcaacaacaactagtactaccattcagccagccagctgctgcctacccccagcaatttcttccattcaaccaactagcagcattgaactctcctgcctatgtacagcagcaacaactactaccattcagccagctagctgctgtgagccctgctgccttcttgacacagcaacaattgttgtcgttctacctgcacgctgcgcctaacgttggcaccctcttacaactgcaacaattgctgccattcaaccaacttgctttgacaaacccagcagcgttctaccaacaacccatcattggtggtgccctcttttagattgcttatgagttatagtn

SEQ ID NO: 83873 - DNA, 520 bp, Zea mays
ggattggaggttaggacgtcgtgtttgaagcatggaactcgtacgcatgccgtaccggtccggaattcccgggtcgacccacgcgtccgcccacgcgtccgctatatttctagcgggtccaccacttgtaaaggctgctacaggagaggagatatctgctgaggaccttggtggagcatcagtacattgcaaggtatcaggagtctcagatcattttgcacaagatgaaattcatggacttgagttggggcgaaacattgtgaagaacctgcacttagctgctaaaggaacaaatattcagagttctgcttgtggttaccaagagccattgtacgatgtagaggaacttcgctccattgcaccagctgatgtgaaacagtccttcgacattcgttcaataatagcccgtattgttgatggaagtgaatttgatgagttcaaaaaattgtatggaacaacactagtgactggttttgcaaggatatgtgggcaaccagttggaattattggaaacaatggc

SEQ ID NO: 83874 - DNA, 529 bp, Zea mays
  unsure (1)..(529): unsure at all n locations
agttctatgaggcgaggtcgtgtngaattgaaggctggaaagtgtngcgcactgccgtaccggtccggaattcccgggtcgacccacgcgtccgaaaaaacaaacgatatataaatagcagaaatacaaaaatagaaaaggctgatacaaggagaggagatatctgctgaagaccttggtggaacatcagtacattgcaaggtatcacgagtctcagatcattttgcacaagatgaaattcatggacttgagttggggcgaaacattgtgaagaacctgcacttagctgctaaaggaacaaatattcagagttctgcttgtggttaccaagagccattgtacgatgtagaggaacttcgctccattgcaccagctgatgtgaaacagtccttcgacattcgttcaataatagcccgtattgttgatggaagtgaatttgatgagttcaaaaaatcgtatggaacaacactagtgactggttttgcacggatatgtgggcaaccagttggaattattggaaacaatggtg

SEQ ID NO: 83875 - DNA, 566 bp, Zea mays
ggtattgaggctgtgtcgaagctgacactgacgcatccgtaccgcttcgggattcccgggtcgacccacgcgtccgtgccctcttttagattgcttattagatgtaattcaataataaagttttttggatgatgtatgtggccaaccagaaataaaaagttacatttccaaaaaaaaaaaaaaaaaaaaaaaaaaaaaaaaaaaaaaaaaaaaaaaaaataaaaaaaaaagcacaaaatataaaaaaagaagcctcctaaaataaaaactatggtctctgctattacagaataagcctattctacattatgatgggccattataagtgcacattgatattatacgttgatatgcccatttcctggactgtcaaaaatactgaatagggatgcaatatcttgaaggactgtatgtaactgatcagtaaactttctccctaggaagtcatgcatccttacacatagactcataactgaaatggcttatctatttgaaacattattagatagcacatgaactgttataatttgtactaacatacatacttaactaactttatatcaccg

SEQ ID NO: 83876 - DNA, 522 bp, Zea mays
gttatatgagggtaggacgtcgtgattgaagatggatgctgtacgcactgccgtaccggtccggaattcccgggtcgacccacgcgtccggtgtgtgcacaggattcttgatcatttcttggcaatggaccaagcaaatggtggcgagtccccatgcttggatgatgtcatggcatccccatccttgacaccgatcacaagtgttgccaagctaattgacggctatcttgcagaaattgcaccagatatcaatttgaagcctcctaagttccaagctctggcctctgctattcctgaatatgcccggccactggatgatggcctttatcgtgccattgatatatacttgaaggctcattcctggctgtcagaagctgaaagggagcagttctgccggctgttggactgccagaagctctccctggaagcatgcacccacgccgcccagaacgagaggctgccgttgcgcgtggtggtgcaagtcctcttcttcgagcaactccagctaagaacctcgatcgc

SEQ ID NO: 83877 - DNA, 528 bp, Zea mays
  unsure (1)..(528): unsure at all n locations
aggttattaaagtcctagagttcgtcgattgaagcatggagactcgnacgcactgccgtaccggtccggaattcccgggtcgacccacgcgtccgggcggatgtggagaaggcgctgtgggcccagatcggcatcttgcatggcggtggcggcctggtcggggacagcagctacggggcgcaggaggaactcgacgaggaagaggccaaggagatcgacagcgcccgcgcgcggcgccggaaggcggcctacgagatggccatcgcctcaggcggcgccagctcgctcatcctgtccaactacgcgcagctcctgtacgagatcgacaaggacatcgagagggcggagatgtacttcaagcaggcggtggccgccgagccggcggacggcgaagcgatgcggaggtacggcatgttcctgtggcacgcccgcggcgacacgggcggcgcggaagacatgttcaccggcgccattgacgcggagcccgagagcagccaccaccggagcagctacgcgtggttcctatgg

SEQ ID NO: 83878 - DNA, 524 bp, Zea mays
gcattatgaggctaggacgtcgtgattgtaagctgaaagctgtaggcaatgccgtaccggtccggaattcccgggtcgacccacgcgtccgaaaacatcagggcacaacaactacaacaacttgtgctagcaaaccttgctgcatactctcagcaacatcagtttcttccattcaaccaactggctgcattgaactctgctgcttatttgcaacaacaattaccattcagccagctagttgctgcctacccccagcaatttcttccattcaaccaactagcagcattgaactctgctgcttatttacagcagcaacaactactaccattcagccagctagctgatgtgagccctgctgccttcttgacacaacaacagttgttgccgttctacctgcacgctatgcctaacgctggcaccctcttacaactgcaacaattgctgccattcaaccaacttgctttgacaaactcaacagtgttctaccaacaacccatcattggtggtgccctcttttagattgc

SEQ ID NO: 83879 - DNA, 520 bp, Zea mays
ggatttatagcctagattcgtgatcgagctagtagctctacgcactgccgtaccggtccggaattcccgggtcgacccacgcgtccgcccacgcgtccgcggacgcgtggggaagggtgtatacttaaattttcttaactttctcataaatgatagcatctatcttcttgacgagagtttgaacaaaattcttgaactgaaagaaatagaggctgaaatggctaacatagttgagtgggagcgcagacctgctcaagaaagagaggagcggctgcgtgtatttcatcagtgggaaaatattgttcgttttgacatgaggctagccaatgaggatgttggaatgcttgcattcactctgaacaaattccagcacctttccttctccctgaaatggtggaaagggttgccagcatgcttaattacttcctcttgcaacttgctggtccccagaggaaatctttgactgtaaaggatccggagaagtacgagttcaagccgaagcagcttttgaaacagattg

SEQ ID NO: 83880 - DNA, 518 bp, Zea mays
ggttcttaggcgtgtgtcgactccctatacgtacgcatcgcgtacccttcgggattcccgggtcgacccacgcgtccgcccacgcgtccgccgcaccaacccctgtggcgtctccgctgccattccgccctactactgattcatgatatttgggaaatctcctctatccatctctctctatctatatatgtaataatgcagtaagacgacacacattatcatgtgtggtatgaccaataatatatgcatggtcataataaagttttggttttaaaaaagaaaatacacgattaaataaagggcggccgctctataggatccaagcttacgtacgcttgcatgcgacttcatatctcttctatagtgtcacctatattcaattcacttgccgttattttacaacgtctagactggtaaaaccctggcgtttcccaacttattcttcatttagcatatctcttcttttgactctggtgtaatagcctaataggcccttaactgtttcatctttttatacc

SEQ ID NO: 83881 - DNA, 517 bp, Zea mays
  unsure (1)..(517): unsure at all n locations
aggcatagaggctcgtgtcggcggctgtagctgangtcntgacgtaccgcttcggaattcccgggtcgacccacgcgtccgatcttttagtaacctttcaataggcgtcccccaagaactagtaaacatggcaaaactgttgagcctgttcttagccctctcctttgtagcagctatgtttgccataggctctcatgctgatggagactgtgagaatgacctccaaagcctgataagtgactgcaagacatacgtgatgttcccagctaatccaaaggtccctccttcggatgcttgctgtggtgtcatcaagaaggcaaacgtttcttgcttgtgctccaaggtcaccaaagaaactgagaaggttgtgtgcatggagaaggttgtgtatgttgctgagcagtgtaagaggccatttgagcatggcttccagtgcggaagctacaaggttccagcaaactgatgatatcgcaagatggaagcgcttgacgtagtctttagatttcaattgttgcag

SEQ ID NO: 83882 - DNA, 508 bp, Zea mays
ggatgagaggctaggtgtgtgtttgaggctgctagcgttggcatgctcgtaccggtccggaattcccgggtcgacccacgcgtccgcttgtgtccatcgacactctaattgaggaccaccttacgcaagagcccatcaatgagtacgtccagagttgcgacattgtggctttcaacaagatctagagttcagtttctgagtttgggcaacggcagcggctcagctcgtcaagtttgtgctgggatgccagtttatcccttctagtctattacagaaacgttgttcggagctgagtctattataaacatcttggtctgagtttattgttgagtggtgccagtttttttcaatatacatttatcttaaaaacagcggtactgatgtttttttgtctaaagttaatgagtttgcaaaacaaatgctaaaaaaaaagggcggccgctctagaggatccaagcttacgtacgcgtgcatgcgacgtcatagctcttctatagtgtcacctaaa

SEQ ID NO: 83883 - DNA, 518 bp, Zea mays
  unsure (1)..(518): unsure at all n locations
gatnaagaggttagggctgtcgatcgaacatgaactctncgcaatgccgtaccggtccggaattcccgggtcgacccacgcgtccggccagtcaactatttacgctgggataagaaggaagaacaatcctctgatttgtacagattctgccgtctcatgaccaaattccgcaaggaatgtgaatctcttggccttgaggacttcccgacttcagaacggttgaaatggcacgatcatcagcccgggaagcctgactggtcagaggcaagccgattcgttgccttcaccatgaaggacgaaaccaaaggcgacatctacgtggccttcaacaccagtcaccttccggtggttgtcgggcttccagagcgctctgggttccgatgggagccggtggtggacaccggcaaggaggcaccatatgacttcctcaccgatggcctaccagatcgtgctgtcaccgtataccagttctctcatttcctcaactccaatctgtatcctatgctcagctactcctg

SEQ ID NO: 83884 - DNA, 519 bp, Zea mays
  unsure (1)..(519): unsure at all n locations
gtttatataggcgtgtgtcncacgctgacgactgaggcatgccgtaccggttcggaattcccgggtcgacccacgcgtccgcggacgcgtgggcggacgcgtgggcggacgcgtgggcgcggcgaagaagccggcggaggaggagcccgcggccgagaagacgaccgccgggaagaagcccaaggcggagaagcgggtccccgcgggcaagtccgccggcaaggagggcggcgagggcaagcgtggcaagaagaagggcaagaagagcgtggagacgtacaagatctacatcttcaaggtgctgaagcaggtgcacccggacatcggcatctcctccaaggccatgtccatcatgaactccttcatcaacgacatcttcgagaagctggccggcgaggccgccaagctcgcgcgctacaacaagaagcccaccatcacctcccgcgagatccagacctccgtgcgcctcgtgctccccggcgagctcgccaagcacgccgtctctgagggcaccaaggt

SEQ ID NO: 83885 - DNA, 513 bp, Zea mays
  unsure (1)..(513): unsure at all n locations
aggatangaggcgtgtgttcngcggctgcagactgaggcctccgtaccgtccggattcccgggtcgacccacgcgtcggtctacgagttctacaaagcacggtggagcgggtcacggccccgcgcaccgtctccgcgttcctcgagaagggcgtcctctccgtccccgagttcattctcgccggcgacaacctcgtcgccaagtgccccacctggtcctgggaagcgggcgatccaagcaagaggaagccgtatctccccgccaataagcagttcctcgtcacccgtaatgtgccctgtttaagacgtgccatctcggttgaggaagagtatgatgcagcaggagcagaggtggttctcgatgaggatggcgaaggctggcttgcaacacatggagtgcaagcatcaaagacagaagaggaggaagacattccctctatggacaccttggacatagggagatctgatggaataaagtctatcccctcttactttagcggtggcaaggatgaaa

SEQ ID NO: 83886 - DNA, 516 bp, Zea mays
  unsure (1)..(516): unsure at all n locations
agttattagggtgntttcgcgcctgaggctgacgcgtacgtacgcttcggattcccgggtcgacccacgcgtccggccggctgctgtcaagttccatctgtttgctatcgcagacatgtatggccgcggcaagggaggcaaggacctgagtaacggcggcgcgaaacgccaccgcaaggtgctccgcgacaacatccaaagcatcacgaacccggccatccagaggctggttcgaaagggcagcgtgataagcatctccaggctcatctaccatgagacctacggcgtgctcaagatctatatcgagaacgtcatccgagacgccgtaaactacacggagcacgcccggcgcaagaccgtcacagccatggacgtcgactacgcgctcaagcactatggtcgcacactatactgcttcacggctagggcgctagactaggccatgctcgaccttgacacggactctccagtatggcgtactcactggcatcttgacctttttgctattaaggaagg

SEQ ID NO: 83887 - DNA, 509 bp, Zea mays
  unsure (1)..(509): unsure at all n locations
agtataaggtctaggtgtgngactgancatgnaancgctggacgccgtaccgtccggattcccggtcgacccagcgtccgtcttgcgtatcctctgatgcctctgttagagcaattgaaacaaatctgctgtggatgatcagcaatggctcacgtactgggtgctgtactcatttatcactctattcgagctcacctttgctccggtactcgaatggcttctttctggtcttatgcaaagctgttcttcaattgctggttagtattgccacagttcaatggagctgcacatgtatatgagcattttgtgaggccaatgattgtaaatcagcaagttgtaaacatctggtatattccaaagaaggatgaatcaagtagacctgatgatgtaatttcagctgcacagaggtacattgagcaaaatggatcaaaagcgtttgagaatcttgttaacaagtttaagagttcgaacccaaggcgctcaattctggangaggtagaggttgaaag

SEQ ID NO: 83888 - DNA, 524 bp, Zea mays
  unsure (1)..(524): unsure at all n locations
ggttagagggctggtgtagacgctgatgactgangtcgtacgcatgacgtaccggttcggaattcccgggtcgacccacgcgtccgctgtagcgtgggtactacaaacacaccgagcgaagcacattatccacaacctaacaacattggctaccaagatattatgagtacttgcgcttcttgcgctgtttgcgagcgcaacaaatgcgttcattattgcacaatgctcacttgctacaagttcaattattacacagttcttcccaccagttactccaatgggcttcgaacaccgagctgtgcaagcctataggctacaacaagcaattgcggcaagcgttttacaacaaccaatttcccagttgcaacaacaatccttggcacatttaacattacaaaccatcgtaacgcaccagcaacaacaattcttaccagcattgagccacctagccatggtgaaccctgccgcctacttgcaacagcaattgcttgcatcaaacccatttgctctggcaaacgtatttt

SEQ ID NO: 83889 - DNA, 524 bp, Zea mays
  unsure (1)..(524): unsure at all n locations
gggtagtagaggctagtttggcatagagttatgagcacttaatgaacgctcgttccgttctgaacccacgcgtgcggaggaaactacagaaccaaatgtttgcctgagtgatgatatagagacaaatgagtgtgtgaatgacagcggttgctgctggcaagacaaatctgctaatgtaacagcctgtagggacaccttccgtggtagagtgtgtgaatgccccactttcaatggcgtacaatttaaaggcgatggctacagcaattgtgaacctgctggaccaggaaaatgcttgataaaccatggaggatgttggcatgaaactcgcaacggaaaaacattctctgcttgccaggaatctggagatgggaaatgcctgtgcccagctggtttccgaggggacggcgttaaaaaatgtgaagacattgatgagtgcaaggagaaaaaagcttgtcagtgtcctgaatgcaactgcaaagatacatggngtggctatgactgcacttgcagtggtgaccttttgt

SEQ ID NO: 83890 - DNA, 535 bp, Zea mays
  unsure (1)..(535): unsure at all n locations
agagaanctactgagttggtgtcacttagcatcgaagtatngccttcgctcagttccgaattcccgggtcgacccacgcgtccgcggacgcgtgggcggacgcgtgggcggacgcgtgggggaaaagggacaagggcaagtgaagagataggcgtcgtcgtttgatctgctgccggagtgcgaagaggaagaggaagaggaagaggagcgccggagttgtaaagatgttcctggtggactggttctatggggtgctggcatcgcttgggctgtggcagaaggaggctaagatcctcttccttggcctcgacaacgccggcaagaccaccctcctccacatgctgaaggacgagcggctcgtacagcaccagccaacgcagtaccccacgtcagaagagttgagcatcggcaggatcaagttcaaggcgttcgaccttgggggccaccagatcgcccgccgcgtctggaaggactactacgccaaggttgatgctgttgtgtacttggtggatgctgntgacaaggaacgttttgt

SEQ ID NO: 83891 - DNA, 541 bp, Zea mays
  unsure (1)..(541): unsure at all n locations
ngggttgttgagatggctcagtgtgtgaaatagaagattatagcgcgacttattgcaaggctgcttccgcttcgggacccacgctcgacccagacactccatctgctggagggtctttaggtccttacttaggaggcacgttgtctctgaagctgacagcttcgtgaccaccactggcaacaaggatatcatcatggttgaccacatgaggaagatgaagaacaatgccattgtctgcaacattggccactttgacaatgaaattgatatgctcggccttgagacctaccctggcgtcaagcgcatcaccatcaagccccagactgaccgctgggtgttccccgagaccaacactggcatcattgtccttgctgagggtcgcctgatgaaccttgggtgtgctactggccatcctagctttgtcatgtcctgctcattcactaaccaggtcattgcccaacttgaactgtggaaggagaagagctctggcaagtatgagaagaaggtgtatgtgctccccaagcaccttgatgagaaggtt

SEQ ID NO: 83892 - DNA, 532 bp, Zea mays
  unsure (1)..(532): unsure at all n locations
agagttnntttagaggctcactgatctctaaaagaaatgactgtatngctcgtaccggttcggaattcccgggtcgacccacgcgtccgattgatcagacgcctgccatggcggatcagttcgtggattcggcgaagaatgtgatcgttgaggaggtgaacaagggcctgaacccaggaatggtggttctgcttgtggttgcaagcttcctgctgctcttctttgtggggaactatgcgatgtatgtgtatgcgcagaagacgctcccgccaaagaagaagaagccggtgtcgaagaagaagctgaagagggaaaagctgaagcagggggtctctgcgccgggagagtaaacggccatgctgccgatcctcccgtccagagctcctattcacatgattattaaagaaaaaaatttatatatatataccagctggagccgtagtgttggagtaactttgttctgtagatgctctgtctttaatggtacatctgtattggagactttaatggcctgagccgagctagtatgctt

SEQ ID NO: 83893 - DNA, 513 bp, Zea mays
  unsure (1)..(513): unsure at all n locations
gtttatggtaaggagaggatctacggtcgcatcgagcctcacnatcccgtcccattcccattcgacccacgcgtccgcgttcagcattcagaacacaccaagtcgaagcgcactatcaacgacctaacaacgggggctgtcaagatattagccatccttgcgcttcttgccctttttgtgagcgcaacaaatgcgttcattattccacaatgctcacttgctcctagtgccattattccacagttcctcccaccagttacttcaatgggcttcgaacacctagctgtgcaagccaacatgcaacaacaagcgcttgcggccagcgtcttacaacaaccaattgcccaattgcaacaacaatccttgccacatctaacaatacaagccatcacaacgcaacagcaacaacagttcctaccagcactgagccacctagccatggtgaaccctgccgcctacttgcaaaagcagctgattgcattcaaccccattttttttgggaaaataattttt

SEQ ID NO: 83894 - DNA, 523 bp, Zea mays
  unsure (1)..(523): unsure at all n locations
agtttatgctgcatcngctgcttgtacccgtcacatcgcaccgctgttcgaattcccgggtcgacccacgcgtccgagccaaaatattatgcctccttatgctccttggtctttctgcaagtgctgctacagcgaccaggttcccgcaatgctcacaagctcctatagcttcccttcttcccccgtacctctcaccagtgttgtcttcagtatgtgaaaacccaattcttcaaccctacaggatccaacatgcaattgcatcaggcatcttacctttatcacccttgttcctccaacaatcatcagccctattacagcagttacctttggtgcatttattggcacaaaacatcagggcacaacaactcgtgctagcaaaccttgctgcctactctcagcaacaacagttacctttggtgcatttgttggcacaaaacatcatggcacaacaactacaacaactcgtgctagcaaaccttgctgcctactctcagcaacaacagtttctgtcattcaaaccaac

SEQ ID NO: 83895 - DNA, 522 bp, Zea mays
  unsure (1)..(522): unsure at all n locations
agagggctcnagtttggctcagtatatagtatcctacgccagntccgaattcccgggtggacccacgcgtccgctgatgtcttatctgagtcgagcctgtttgtctacccgtacaagattgtgatcaagagctgtgtaagtacaaagcgtctgctcgctattccgaggatccttgaacttgctgaagagctcctgttgccactcgctgcagttaaatactcccgtggaacgttcatattccctgaagcacaaccttccccacacaagaacttcgctgacgaggttgccttcctgaatcgcttcttcggtggcctcaagtccggtggcaatgcttatgtgattggtgactctgcgaagcccgggcagaagtggcacgtctactacgccgctgagcaccctgaggagcctgttgttactctagagatgtgcatgactgggctggacaagaagaaagcttctgtcttcttcaagaccactgctgatggttactcgctgtgcgccaaggagatgaccaagctctct

SEQ ID NO: 83896 - DNA, 537 bp, Zea mays
gttaggtaggggctcagatgggttagtgaagaatgtaagggagagttaataccattcctcgaattcccgggtcgacccacgcgtccgccgacgcgtccgcccacgcgtccgcattcagaaacacacctagcgaagcgcactagcggcgacctaacaacaatggcttccaagacattatccctccttgcgcttcttgccctttttgtgagtgcaacaaatgcgttcattattccacaatgctcacttgctccgagtgccattattccacagttcctccctccagttacttcaatgggcttcgaacacccagctgtgcaagcctataggctacaacaagcgcttgcggcgagcgtcttagaacaaccaattgcccaattacaacaacaatccttggcacatctaaccatacaaaccatcgcaacgcagcagcaacaagcactgagccacctagccgtggtgaaccctatcgcctacttgcaacaacagctgcttgcatccaacccacttgctttggcaaacgtagctgcataccaacaa

SEQ ID NO: 83897 - DNA, 531 bp, Zea mays
agagggctcggtgtgtgacctagctcataacgtatcccttcgcagttccgaattcccgggtgcgacccacgcgtccgccgacgcgtccggtaattccttgttatctgccaattatgtatggactatggacatgtgttgcgctgggcaacttactactacaaataagtaatcgatatgttcccttccaaaaaaaaaaaaaaaaaaaaaaaaaaaaaaaaaaaaaaaaaaaaaaaaaaaaaaaaaaaaaaaaaaagaaaaaaaaaaaaaaaaaacaaaacataaaaaaaaaaaacataaaacgtcatacattttcaatagagtaacctaaattaaataaactggccactgttaaacaactttcggactcaaaaaaacttgcctttacccacctaaatttccttgcagcacattcaattttccccagttgacgaaatatcaaacaggccaacaccaatccactttcaaaacaattggaaaccctcaattgccaatggcactacccctttaaaatcgcattaaaccccccagttt

SEQ ID NO: 83898 - DNA, 543 bp, Zea mays
  unsure (1)..(543): unsure at all n locations
ggatagtgtagaganctcggtgtgagctttagaaggtgtacaggacactttatcgtatnactcctaccggttcggaattcccgggtcgacccacgcgtccgaacgaaacccagctgcaccagcaacttctgccagcagacccaacgacggaagcttttgttttctttcttttcatcgccgccgctcggggttcaaggttcagcgcgtccccgaatgacgggcacgtacgaggccttcgaccgtcctgctcctcccaactccgccggctaccggaccgacaaagtccggcgaaagcggctgacggcgcagaagaggaaagagatcaaggaggcgttcgacctcttcgacatcgacggctccggcaccatcgatgcaagggagctgaacgtcgcgatgagagcccttggattcgagatgacacctgagcaaatcgggcagatgatcgcggaggtggacaaggacggcagctgcaccatcgacttcgacgagttcgtgcacatgatgacggacaagatgggcgagcgggacgcccgtgacgagctc

SEQ ID NO: 83899 - DNA, 528 bp, Zea mays
  unsure (1)..(528): unsure at all n locations
agaggnctcnagaggctcactgactctctcagctcactccgcaactgctgtaccggtccggaattcccgggtcgacccacgcgtccgggcctgttcacctttacggctgcatacttaccatgggtcctattgggcttctctatcgtggtgggaagcagcacatgggttgatctcttgggtatgattgctggacatgtgtactactttctggaagatgtatacccacggatgactggccgccgtccgctgaagacaccgtccttcatcaaggcgctatttgctgatgacaatgttgtggtggcacagccacccaatgctgggattggtgctggtgcaaggtttggtgctatgggtctagatccccaggctcaatgatatgaattactttcagtgacctgaggctgtgactgatctgagatgcggcagtctgttcctctgcgcaagttgcggaactgtacaagtcattgttcttgtatttatacaggctagatgagaattcttgtgcataaaaaaaaaaaaaaaaaaaaa

SEQ ID NO: 83900 - DNA, 521 bp, Zea mays
  unsure (1)..(521): unsure at all n locations
gagttagagcgggtctgcctatgataggagagtagctgcaacncgttcggaattcccgggtcgacccacgcgtccggcgacgcgtccggaactctcctgcttatttacagcagcaacaactactaccattcaggcagcgagctggtgtgagccctgctaccttcttgacacaaccacaattgttgccgttctaccagcacgctgcgcctaacgctggcaccctcttacaactgcaacaattgctgccattcaaccaacttgctttgacaaacccaacagcattctaccaacaacccatcattggtggtgccctcttttagatttcttatgagttatagttcaataataaagttttttgtctgatgtttgtggcttcccagaaataagaaagtacatttctagattctaaaaaaaaaaaaaaaaaagggcggccgctctagaggatccaagcttacgtacgcgtgcatgcgacgtcatagctcttctatagtgtcacctaaattcaattcactggccggggt

SEQ ID NO: 83901 - DNA, 525 bp, Zea mays
aggggctctagtgtggccctgcctgtgacgtatgcgtacgccattctgaattcccgtgtcgacccacgcgtccgaggacgcctacatcccgctcaccacctacctccgcacctacaagatcggcgactactgctacattagggagaacggcaccgtccacaaggcgatgccgcacaagttctaccacggccgcaccggtcgcgtctggaacgtcaccaagcgcgccatctgcgtctagataaacaagcacgtgaatggtcgcatcatcaggaagcgtatccatgtccgcgtggagcatgtgcagccgtcccgctgcacacaagagttccgcctgaggaaggtgaagaatgaccagctgaaggcggatgcaaaggagcgcggccaggtcatcagcaccaagaggcagccgttgggccccaagcctggcttcatggttgaggggactaccatcgagaccgtcactcccattccgtacgatgtggtcaatgatcttaaaggctgatactaagttgttgtttggtcttt

SEQ ID NO: 83902 - DNA, 532 bp, Zea mays
  unsure (1)..(532): unsure at all n locations
ntatatgaaggggctcaagtgggtttatgaatatacagtagtcgtgcgccagttccgaattcccgggtcgacgccacgcgtccgccgacgcgtccggtgaaaagattggtgcaacagcccgtttctggcgattttctgctggttcttatcgagaccttatagaggcattaccaaaaaaaccgcttacatctgtaaataagacagtgaatggcagttttgttcgaccatccaatgctgggggcgatgtttatcctgtggaatcttacgagagctcagctaaccaagtacttgatgctcactggggtgttctggatgatgatgatgcaactggactttgctcgcataccctctccatccttgtgaatgattgtcctggtgttctcaacattgtaacaggagtctttgctcgcaggggctacaatatacagagccttgctgttggctcagctgagaaggaaggcatttcacgtattacaacagttgttcctggtacttgtgaatccattgggaaattagttcagcaactttacaa

SEQ ID NO: 83903 - DNA, 526 bp, Zea mays
aggggctcggtgtgtggcctagctatgacgtatgcctaacgcatctcgaattcccgggtggacccacgcgtgcgggctcatggtcgtgtaatatttgccagtggcagtccatttgaccctgtggagtacgaggggaaggttgttgtacctggacagtcgaacaacgcctacattttccctggatttggcctcggtcttgttatctctggagccatccgtgtccacgaggacatgcttcttgccgcctcggaagcactagctgctcaagccacacaggagaacttcgacaagggatcaatcttcccgcccttcaccaacattagaaagatctctgcgcgcattgccgcagccgtggctgcaaaagcttatgaactcggtttggcgacccgtctgccttccccaaaggacctggtgaaatatgcacagagctgcatgtacactcctgtctaccgtaactaccggtagtgctgctgggatcaattctgcagtaataaaatatgtcgacgcagatgatcctgcaatgttt

SEQ ID NO: 83904 - DNA, 508 bp, Zea mays
  unsure (1)..(508): unsure at all n locations
agttatggttgtctgtcctcactcgtatgtatgctcaacncgtccggaattcccgggtcgacccacgcgtccgcggacgcgtgggcggacgcgtgggtagcaacatagaaagcacaatagtgtaccaacggtggcggccaaaatattttgcttccttatgctccttggtctttctgcaagtgctgctaccgcaaccattttcccacaatgctcacaagctcctatagcttcctttcttcccccatacctctcaccagcggtgtcttcagtatgtgaaaacccaattcttcaaccctacaggatccaacaggcaatcgcagcaggcatcttacctttatcacccttgttcctccaacaaccgtcagccctattacagcagttacctttggtgcatttgttggcacaaaacatcaaggcacaacaactacaacaacttgtgctaggaaaccttgctgcctactctcagcaacagcagtttcttccattcaaccaactggctgcattgaac

SEQ ID NO: 83905 - DNA, 513 bp, Zea mays
  unsure (1)..(513): unsure at all n locations
ggtaggagaggatcggagctccactcgtatgtatggctatcncgtccggaattcccgggtcgacccacgcgtccggtttagtttcgaaaaaatctgaaaaaaaattctggtcgaggggaggaggcgatgtcggcgcgagtggcggtggtgcctaatgggggcccgggcgctgtccccgcggtggtgtcgccgggagctgtcggcgtggctcagcctctcccgaccacgtcgctctacgtgggcgacctggagggggccgtctcggactcgcagctgtacgaactcttcagccaggcggggcaggtggtgtcggtgcgcgtctgcagggatgtcacctcgcgccgctcgctcggatacgcctacgtcaactacagcaatcccttggatgctgcgagagcattggaagtgctgaactttgctgctcttaacaacaagcctatccgggtgatgtattcaaaccgtgatccaagcagccgcaggagtggatctgctaacattttcataaaaaatctt

SEQ ID NO: 83906 - DNA, 509 bp, Zea mays
  unsure (1)..(509): unsure at all n locations
nagttaggcgtattngtctcacctcgatgtatgctcataccgttcggaattcccgggtcgacccacgcgtccgcccacgcgtccgcccacgcgtccgcggacgcgtgggttgagcgggtgagacatttgaggagagtccgaggtgttagcaaagatctggggtgtagctgggttgagctctacaaccgagttcatgtgtttgttgttggggaacaacaacatcctgaagcggaaaatataaatgtagagttgataaggctagcgaagcatatgaaggacgaagagtgtttcctgtttgatgacgaaaaggatgaactaggagattctcatgaaggtgaacaaatggaattgatatcaacaacatattactgagttcgcaagagattgatcccatgatgtcagacaaacaccctgttaaagcaatgtgtgacatccgtgatttggggttattntatgttgtattttcttttcctgacaaattcaacccttctggttttgacaagtgtgag

SEQ ID NO: 83907 - DNA, 530 bp, Zea mays
  unsure (1)..(530): unsure at all n locations
agagagctcgagatgggtttatcggatataaggagagacatagtgctatttctcgaattcccgggtcgacccacgcgtccggagcgacaaagctagctctctccagggtatcggattctgatcaccatgccgtccacccgtaactccgggtccctcgaccagaaccttgagctcgccaagcaatgctcgcgagaggccgccctcgcagggttcaaggcagcagctgtctcgaccgtcgcctctgcagttcccaccctggttagcgtcaggatgctgccatgggccaaggccaacatcaaccccgctggccaggccctcatcgtctccacagttgctggcatggcgtacttcatcgcggcggacaagaagatcctctcgctggcgaggcagcactcgtacgagaacgcgccggagcacctcaaggacacctncttccagggcaccggccgtccgcacccagggttcttcaggccttgagcgagagaccatcaaactaccgncctagctagctggacgcactagttcgtcaa

SEQ ID NO: 83908 - DNA, 527 bp, Zea mays
agagggctcgagtggctcatgatcttaaagaaatgatgcaatgctcgtaccggtccggaattcccgggtcgacccacgcgtccggcaacatagaaagtggaatccagtagcaacaatagagcaacaatggctgccaagatagtttccctccttatgctccttgctctttctgcatgtgttgctaacgcgacaattttccctcaatgctcacaagctcctatagcttcccttcttcccccataccttccatcaatgatagcttcagtatgtgaaaacccagctcttcaaccctataggctccaacaagcaatcgcagcaagcaacatacctttatcacccttgtttcaacaatcgccagccctatctttggtgcagtcattggtacaaaccatcagggcacagcagctgcagcaactcgtgctacctgtgatcaaccaagtagctctggcaaacctttctccctactctcagcaacaacaatttcttccattcaaccaactgtctacattgaaccgtgctgcttattt

SEQ ID NO: 83909 - DNA, 536 bp, Zea mays
  unsure (1)..(536): unsure at all n locations
agaggnnctcggagatggtgtccctccgcctctccagtctcacttcgctactgctgtaccggttcggaattcccgggtcgacccacgcgtccgcggacgcgtgggcggactcgtgggcaactacaacaattgttgcccttggtccaactggctttgacagacccagcggcctcctaccaacaacacatcattggtggtgccctcttttagattgcttattagttgtaattcaataataaagttttctggaaatgtaacttcttatttctggttggccacatacatcatccaaaaataagaagttacatttccagaaaaaaaaaaaaaaaaaaaaaaaaaaaaaaaaaaaaagggcggccgctctagaggatccaagcttacgtacgcgtgcatgcgacgtcatagctcttctatagtgtcacctaaattcaattcactggccgtcgttttacaacgtcgtgactgggaaaaccctggcgttacccaacttaatcgccttgcagcacatccccctttcgccagctggcgtaatagct

SEQ ID NO: 83910 - DNA, 522 bp, Zea mays
  unsure (1)..(522): unsure at all n locations
agaggnctcgagtttgtcctagttatgaagtagccgtcgctagtactgaattcccgggtcgacccacgcgtccgcccacgcgtccggctttacctcccaggtcatcatcatgaaccaccctggccagatttgcaatgtctgtgccccagttctggactgccacacctcacacattgctgtcaagtttgctgagctcgttaccaagattgataggcgatccggcaaggagctggagaaggagcccaaatttctcaagaacggtgatgctggtatggtgaagatggttcccactaagcccatggtggtggagaccttttctcagtatcctcctcttggtcgatttgctgtccgtgacatgaggcaaacggtggctgtcggagtcatcaagagtgtggagaagaacgacccaactggagccaaggtgacgaaggctgctgccaagaagaaatgatctatctgtctggtgctgtgcttgcttgttggttacctcgtggaagcttaaaatatctcgtcttgttgaca

SEQ ID NO: 83911 - DNA, 522 bp, Zea mays
  unsure (1)..(522): unsure at all n locations
cgagggctcgaggttgtcctagttctgaaagaaaggtcgcaatgcctgtccgtccggaattcccggtcgacccacgcgtccgggacgagcaagctgatcaagtcggtgaccggcctggagctgccggtgcggccggtgggcacgctcatctgctactggaaggtgaggcccgggcgcgagcaggagctcaccccggaggccgggttcccgacgttcgccagctacggcgacccctacatctacagcacgccgtcgatggagttcccggggctgatcaagatcgccatgcacggcggcccgccgtgcgacccggacggcagggactggtccacgggcgcgggcgacctggtggagccggtggcccggtggatcgacgccgtcatgccgggccacgtcgacaccgccggcgggcccgtcgtccgccagtgctgcatgtactccgtgacccccgacgacgactacgtcgtcgacttcctcggcggngagttcgggaaggacgtcgtcatcggcgccgggttctct

SEQ ID NO: 83912 - DNA, 519 bp, Zea mays
  unsure (1)..(519): unsure at all n locations
gggttagttagtcgtttctgatccctacncctacgctatacgaactcgttcggaattcccgggtcgacccacgcgtccgcctctacctaccggagcagggagcacgccacacgagccctttccgccgccgccaaaggggtgagcgttcctaagaccaagaagacctactgcaagaacaaggagtgcaagaagcacactctccacaaggttactcagtacaagaagggtaaggatagcctgtctgcccagggaaagcgccgttatgaccgcaagcagtcaggatatggtggccagaccaagcctgtcttccacaagaaggccaagaccaccaagaaaatcgtgttgaagctgcagtgccagagctgcaagcactactcacagcacgcaattaagaggtgcaagcattttgagattggtggagacaagaagggcaagggaacatctctcttctaagtttctcatcgcccatctcgatgttggatcgaagctatgggtctactactgttctaaaaaatcgtg

SEQ ID NO: 83913 - DNA, 519 bp, Zea mays
  unsure (1)..(519): unsure at all n locations
tggctagggggtgtgngtcatgcacgtatgtcangccatanctgtccggaattcccgggtcgacccacgcgtccgcgaatccctcgcatcgcattcgcagcctttgctgcatcacaccaccgcgaaaccccggcaggcgcatcgatggcgcctaaggcggagaagaagccggctgcgaagaagccagcggaggaggagcccgctgccgcgaaggccccggcggggaagaagcccaaggccgagaagcgcctcccggcggccaagtcgtccggcaaagaaggcggcgacaagaagggtaagaagaaggcgaagaagtcggtggagacctacaagatctacatcttcaaggtgctgaagcaggtccacccggacatcggcatctcttccaaggccatgtccatcatgaactccttcatcaacgacatcttcgagaagctcgccggcgaggctgccaagcttgcgcgctacaacaagaagcccaccattacctctcgggagatttaaacctctgtgcgcccc

SEQ ID NO: 83914 - DNA, 524 bp, Zea mays
  unsure (1)..(524): unsure at all n locations
nagagggctcgggtgtgtatgcgggtggaggagaccctgcgccagttccgaattcccgggtcgacccacgcgtccgcccacgcgtccgattcacgtgcagctgtcgggagcaggcaatggcgccggatctaagggaactcggggccgccgctccagcccgtggcgcctacctcgccggcgtcggtgtcgcggtcctcctcgctgcctccttcctcccagtagccgagtcgtcctgcgtgcgagataactcattggtgagagacataagccaaatgccgcaaagcagctatgggattgaaggattgtcacatataacagttgctggtgcgctcaatcatgggatgaaggaggtggaagtgtggcttcagacaataagtccaggtcaaaggacgccaatccacaggcattcctgtgaagaagttttcactgtcctcaaagggaagggtacgctcttgatgggatcaagctcactaaagtacccagggcagccacaggaaattcctttctttcagaataccacattt

SEQ ID NO: 83915 - DNA, 524 bp, Zea mays
  unsure (1)..(524): unsure at all n locations
gagaggnctcggagtgtgtcactgaattgaagtagcctacgcagtccctgattcccgggtcgacccacgcgtccgggagattcagatccacacacatccgcatccctctctcctcggtttcctctcccaccaggaacccccggatcgcagcgatctccgccgccgccctctctgggattccgcgcgacaaagtcaggcgtagaggctccaggaggaggagggaggcgcagcagggcgggtgggggagatgttcctctgggactggttctacggggtgctggcctccctcggcctgtggcagaaggaggccaagatcctcttccttggcctcgacaacgccggcaagaccacgctgctccacatgctcaaggacgagcggttggtgcagcaccagccgacgcagcacccgacgtcggaggagctcagcatcggcaagatcaagttcaaggcgttcgacctcggcggccaccagatcgcgcgccgcgtgtggaaggattactacgcanaggttgatgctgtagtat

SEQ ID NO: 83916 - DNA, 525 bp, Zea mays
  unsure (1)..(525): unsure at all n locations
agtgtttttnagtggatcatgatcctcacgcancctaagcgattccgaattcccgggtcgacccacgcgtccgcagaaacacacctagcgaagcgcactatcaacgacctaacaacaatggcttccaagagattatcccgccttgcgcttcttgccctttttgtgagtgcaacaaatgcgttcattattccacaatgctcacttgctccgagtgccattattccacagttcctccctccagttacttcaatgggcttcgaacacccagctgtgcaagcctataggctacaacaagcgcttgcggcgagcgtcttagaacaaccaattgcccaattacaacaacaatccttggcacatctaaccatacaaaccatcgcaacgcagcagcaacaagcactgagccacctagccgtggtgaaccctatcgcctacttgcaacaacagctgcttgcatccaacccacttgctttggcaaacgtagctgcataccaacaacaacaacagttgcaacagtttctgccagcg

SEQ ID NO: 83917 - DNA, 528 bp, Zea mays
  unsure (1)..(528): unsure at all n locations
agaggnctcggagtggctcatgtactctaaagaatatattgtattgctcgtaccggtccggaattcccgggtcgacccacgcgtccgcaccgtggggcagtacgagtcccacatcgcgttcactcttcctgggctgtaccgtgtgatccatggcatcgatgttttcgatcccaagttcaacattgtctcccctggagcagacatgagtgtttactacccgtatacggaaaccgacaagagactcactgccttccatcctgaaatcgaggagctcatctacagcgacgtcgagaactccgagcacaagttcgtgctgaaggacaagaagaagccgatcatcttctcgatggcgcgtctcgaccgcgtgaagaacatgacaggcctggtcgagatgtacggcaagaacgcgcgcctgagggagctggcgaacctcgtgatcgttgccggtgaccacggcaaggagtccaaggacagggaggagcaagcggagttcaagaagatgtacagcctcatcgacgagtacaagtt

SEQ ID NO: 83918 - DNA, 528 bp, Zea mays
  unsure (1)..(528): unsure at all n locations
ggagggctcgagtgggtcatgatgctcaacgatcacttcgtattgctgtaccggtccggagttcccggctcgacgccacgcgtccgagcaacatagaaagcacaatagtgtaccaacaatggcagccaaaataggttgcctccgtatgctccttggtctttctgcaagtgctgctacggcgaccattttcccgcaatgctcacaagctcctatagcttcccttcttcccccgtacctctcaccagtgttgtcttcagtatgtgaaaacccaattcttcaaccctacaggatccaacatgcaattgcatcaggcatcttacctttatcacccttgttcctccaacaatcatcagccctattacagcagttacctttggtgcatttattggcacaaaacatcagggcacaacaactcgtgctagcaaaccttgctgcctactctcagcaacaacagttacctttggtgcatttgttggcacaaaacatcagggcacaacaactacaacaactcgtgctagcaaaccttgn

SEQ ID NO: 83919 - DNA, 532 bp, Zea mays
aggggctcgagatggtcctagctcatacacagaatatgatagtattgcccgtaccggtccggaattcccgggtcgacccacgcgtccgcggacgcgtgggcggacgcgtgggctggctctgtcagctgccagcgcgtctgcaatgcagatgccctgcccctgcgcggggctgcagggcttgtacggcgctggcgccggcctgacgacgatgatgggcgccggcgggctgtacccctacgcggagtacctgaggcagccgcagtgcagcccgctggcggcggcgccctactacgccgggtgtgggcagacgagcgccatgtaccagccgctccggcaacagtgctgccagcagcagatgaggatgatggacgtgcagtccgtcgcgcagcagctgcagatgatgatgcagcttgagcgtgccgctgccgccagcagcagcctgtacgagccagctctgatgcagcagcagcagcagctgttggcagctcagggtctcaaccccatggccatgatgatggcccagaacatgccg

SEQ ID NO: 83920 - DNA, 517 bp, Zea mays
gagtaaggcgggtcggtgctcactcgtatgtatggctgatccgtccggaattcccgggtcgacccacgcgtccgtggacatcctgcagaaggtgttctaccgctccaacgcggcgcgcgaggccttcgttgagatgtgcgccgacgactacgtgcagaagatgaccttcgacagctacctctacaagcgcgtcgtgccgggcaacccgctcgacgacatcaagctcgccgtcaacaccatcggcagcctcgtcagggccaccgcactgcgccgggagatggagaaggtcaccttgtgagccgccgcccgcgacgtcattgccgtcgaaatggtgtcgcagctgatcggccggtgtattagtagagatttgcggctgatcgggttaatttaggccaacatgcgtgggcagtgggcgcggagaggaagagaaacaagttgtgcaagtgcagcaagtagatcaaaagtgctgcctgtttgtatcgatggatcctgcaacatatagcatatggggatgttt

SEQ ID NO: 83921 - DNA, 515 bp, Zea mays
  unsure (1)..(515): unsure at all n locations
ggtagaatggtgtagccggtatcgttgcctcagcgaacccgnttcgaattcccgggtcgacccacgcgtccggcaggctatccgcccggtcagcaagaagatggctttcgtcgtgctgcgccagagcaggagcagcgtgcagtgcgtgctcgttgccagcgccgacgccggcgtcagcacgcaaatggtgcgcttcgccaccgccttaagcaaggagtccatcgtcgacgttgagggcgtcgtgtccctccccaaggagcccctcaaggccaccacgcagcaagttgagattcaagtcaggaagatctattgcatcaatagggctatcccaacccttccaattaaccttgaagatgcagctcggagtgaggcagattttgagaaggctgaactggctggagaaaagcttgttcgtgttggtcaagatacccgcttgaactacagagctattgatctacgaacaccctcgaatcaagccatattccggatcccaagttaaatttaaaacacatttt

SEQ ID NO: 83922 - DNA, 526 bp, Zea mays
  unsure (1)..(526): unsure at all n locations
agaggnctcggagtgggtcctagttatataagtagcagtacgccagtcccgaattcccgggtcgacccacgcgtccgcccacgcgtccgctcaaaggctcatgcggcaagtcgctcgcgccgttcccgcaagggtgcttctactgcaacgccctcggagggctcaagtgctacgagaaccccaagcacaaggtcaccgctgtccccgccgacgaagaagagatctgcggtgccactttcaaggtggtggaagggtctactgtcctgacggcgctgcactgatctatcatcatcaggcggaggcgatgcgatgatgatgcagaactttgtacatgcgttggtggatggtggtgtaacatagtggctgccaacaagtcatgctcatgcaaaccgatgaatctatctctgtatcatcgatctcggttgcttgctagtccagactccagacatggctatatatatatagctggtgctaataaataggagtataatcgtcatatcgatcggttgcgtgtggaatgccaatc

SEQ ID NO: 83923 - DNA, 520 bp, Zea mays
  unsure (1)..(520): unsure at all n locations
agttataaaggtgaggagtgtgtctgatcctacntcgatgtatggcgatctcgtccggaattcccgggtcgacccacgcgtccgccttcacattgactgttataatggcaactaatcgggcagacactctagatcctgctgtgttgggtcctggtagacttgacaggaaaattgagttccctctgccagaccggcgtcagaagaggcttgtttttcaagtttgcactgccaaaatgaacctcatcgctcaggttcattttggcagtgcaaacttgaacctgagcgatgaggttgatttggaagattatgtttccagaccggataagatcagtgctgctgatattgctgctatctgccaagaggctggcatgcatgctgtccgcaaaaaccgatatgtcatcctccccaaggactttgaaaagggctaccgaaccaacgtgaagaagcccgagacagactttgatttctacaaatgagtcaacccagaatgttgaactcgtttctttctgcaaatgaaacg

SEQ ID NO: 83924 - DNA, 519 bp, Zea mays
  unsure (1)..(519): unsure at all n locations
cgttattaggtaggagtgtgtctgtgccagtccgacgcatgcctaacccgtccggaattcccgggtgcgacccacgcgtccgcgcaaattgcaccaagaaatccatcgagaggccgtcgacaggggaattaatggcgtggtcgtgtagcagcagccaccgccgcctcatcctcgcagccgccgtcctgctctccgtgctcgcggctgccagcgccagcgccgggacctcctgcgtgccggggtgggccatcccgcacaacccgctcccgagctgccgctggtacgtgaccagccggacctgcggcatcgggccgcgcctcccgtggccggagctgaagaggagatgctgccgggagctggcggacatcccggcgtactgccggtgcacggcgctgagcatcctcatggacggcgcgatcccgccgggcccggacgcgcagctggagggccgnctagaggacctgcccggcctgcccgcgggaggtgcanaaggggattcgccggcaacccttttaaagg

SEQ ID NO: 83925 - DNA, 520 bp, Zea mays
  unsure (1)..(520): unsure at all n locations
agtttagagatggtcntagcatgcatccagtcaatcctcactcttccggattccgggtcgactcacgcgtccgcccacgcgtccgcccacgcgtccgcccacgcgtccgcccacgcgtccggcacaatagggtaccgacaatggcagccaaaatattttgcctccttatgctccttggtctttctgcaagtgctgctaccgcgaccattttcccgcaatgctcacaagctcctatagcttcccttcttcccccgtacctctcaccagcggtgtcttcggtatgtgaaaacccaattcttcaaccctataggatccaacaggcaatcgcagctggcatcttacctttatcacccttgttcctccaacaatcatcagccctattacagcagttacctttggtgcatttattggcacaaaacatcagggcacaacaactacaacaacttgtgctagcaaaccttgctgcctactctcagcaacagcagtttctttcattcaaccaacttgctgcattgaaatc

SEQ ID NO: 83926 - DNA, 523 bp, Zea mays
  unsure (1)..(523): unsure at all n locations
tgaggnctcgagtgggtctagttatgacgtatcctaagccatcccgaattcccgggtgcgacccacgcgtccgcccacgcgtccgcggacgcgtgggtgtacgccaacgaggtgcccaagaccgcggagagcttccgcgggctgtgcacgggcgagaagggcgtgggcaagtccgggaagccgctccactacaagggctccaccttccaccgcgtcatccccgagttcatgtgccagggcggcgacttcacccgcggcaacggcaccggcggcgagtccatctacggcgagaagttccccgacgagaagttcgtgcgcaagcacaccgnccccggtgtgctctccatggccaacgccgggcccaacaccaacggctcccagttcttcatctgcaccgtcgcgaccccttggctcgacggcaagcacgtcgtcttcggccaggtcgtcgagggcatggacgtcgtcaaggccatcgagaaggtgggcacccgcaacggctccaccttcaaggtggtcaaggtcg

SEQ ID NO: 83927 - DNA, 527 bp, Zea mays
  unsure (1)..(527): unsure at all n locations
agaggnctcnnggtgtgtctacgaattacagtagtcctacgccagttccgaattcccgggtgcgacccacgcgtccgcccacgcgtccgcccacgcgtccgcgcaaattgcaccaagaaatccatcgagaggccggcgacaggggaattaatggcgtcgtcgtctagcagcagccaccgccgcctcatcctcgcagccgccgtcctgctctccgtgctcgcggctgccagcgccagcgccgggacctcctgcgtgccggggtgggccatcccgcacaacccgctcccgagctgccgctggtacgtgaccagccggacctgcggcatcgggccgcgcctcccgtggccggagctgaagaggagatgctgccgggagctggcggacatcccggcgtactgccggtgcacggcgctgagcatcctcatggacggcgcgatcccgccgggcccggacgcgcagctggagggccgcctagaggacctgccgggctgcccgcgggaggtgcagaggggattcgccgccaccct

SEQ ID NO: 83928 - DNA, 521 bp, Zea mays
  unsure (1)..(521): unsure at all n locations
agaggctcgagagtgtcttagctatgaaagcaataatgtatgccgtaccggtccggaattccggtcgacccacgcgtcgcacagcacatagaagtgaaatccataccaccaccgaaccacggattgcctacganaaattgttcccttctttacccccttggctctttctcaatggttgctaacccaaaaattttccttaaaggtcacaagaatctcatatagttcccttttttcccatatacctcacataaatgatctctacagtttgaaaacccccatctcttcagccctataggctccaacaagcaatcgcagcaagcaacatacctttatcacccttgttgtttcaacaatcgccagccctatctttggtgcagtcattggtacaaaccatcagggcacagcagctgcagcaactcgtgctacctgtgatcaaccaagtagctctggcaaacctttctccctactctcagcaacaacaatttcttccattcaaccaactgtctacactgaaccctgtc

SEQ ID NO: 83929 - DNA, 537 bp, Zea mays
  unsure (1)..(537): unsure at all n locations
nagagtncnctcaagatcgctccatcatnctcatagaagatatatatgtattgctcgtaccggtccggaattcccgggtcgacccacgcgtccggccttcttcttcaaggtgctcaagcaggtgcacccggacattggtatgtcgtccaagggcatgtccatcatgaactccttcatcaacgacatcttcgagaagctggctgccgaggccgccaagctcgcccgctacaacaagaagcccaccataacctcccgggagatccagacttcggtgcgcctcgtccttcctggcgagctcgccaagcacgccgtctccgagggcaccaaggccgttaccaagtttacttcctcttagatcgccgccgcacggagcgacggctctgtttcgtttcctcgtacttttaggccagtgctaataggttgctcgaggaacaatgtagtgtggaaatttctaatatattccaaattgtgctgaaaaaaaaaaaaaaaaaaaaaaaaaaaaaagggcggccgctctagaggatccaagcttacgta

SEQ ID NO: 83930 - DNA, 533 bp, Zea mays
  unsure (1)..(533): unsure at all n locations
agttatattaagtttgagggagctggtgtttngatgcctccagcctcgtatgctattagcgatcncggttcggaattcccgggtcgacccacgcgtccgggtcctccaacaatcatcagccctattacatcagttacctttggtgcatttattggggcaaagcatcagggcacaacaactacaacaacttgtgctagcaaaccttgctgcctactctcagcaacagcagtttcttccattcaaccaactagctgcattgaactctgcttcttatttgcaacaacaacaactaccattcagccagctacctgctgcctacccccagcaatttcttccattcaaccaactggcagcattgaactctcctgcttatttacagcagcaacaactactaccattcagccagctagctggtgtgagccctgctaccttcttgatacaaccacagttgttgccgttctaccagcacgctgcgcctaacgcttgcacccttttacaactgcaacaattgctgncattcaaacaactttgtt

SEQ ID NO: 83931 - DNA, 521 bp, Zea mays
  unsure (1)..(521): unsure at all n locations
nagtagagtgattctcggtggcgtcacgctcgatagcatcacattccggaattcccgggtcgacccacgcgtccggatgattttttggcctctctcccagagaatgactgccgatatgcgctgtatgatttgcatttggttactgttgagaatgtgcagaaaagcaagattttcttcattgcctggtccccatcgacatcccgcatacgtgctaagatgctgtactccacgtcgaaggaccgcatcaagtacgagcttgacgggttccactacgaaatccaggctaccgacccatcggaggtggacatcgaggttctccggaagcgggctcactgaagctggttctccttttgaagggacctgtgaagggccgtgaaccttcagccagatgcaaattcaattatcaacgatgaagctcccgccgtggtgtttgttaataagttcctgtaagcatatcatttagtcgctatgcatgacactagctgaagcgctatctaagctctattgggatgaggtctggc

SEQ ID NO: 83932 - DNA, 516 bp, Zea mays
  unsure (1)..(516): unsure at all n locations
gtattaagtaaggagtggatcnggcccgcatcgtctgcctcagcgatatctttcggaattcccgggtcgacccacgcgtccgctgtttttacacagcaacaaaaggtcccatggctcccagaagaccatgaaggttcgggtctatgatgtaattccttgttatctgccaattatgtatggactatggacatgtgttgcgctgttcaacttactactacaaataagtaatcgataatgttcccttcccaaaaaaaaaaaaaaaagggcggccgctctagaggatccaagcttacgtacgcgtgcatgcgacgtcatagctcttctatagtgtcacctaaattcaattcactggccgtcgttttacaacgtcgtgactgggaaaaccctggcgttacccaacttaatcgccttgcagcacatccccctttcgccagctggcgtaatagcgaagaggcccgcaccgatcggccttcccaaagttgcgcaaactgaatgggnaatgggaccccccttttt

SEQ ID NO: 83933 - DNA, 522 bp, Zea mays
  unsure (1)..(522): unsure at all n locations
atgtatatagagagggcttagagtctgcaatgatncttctatctctttatgcaatgccgtaccggttcggaattcccggctcgacgccacgcgtccgcccacgcgtccgcccacgcgtccgcccacgcgtccgaaagctagctctcggcananatgggattctgatcaccatgccgtccaccgtgaactccgcgtccctcgaccagaaccttgagctcgccaagcaatgctcgcgagaggccgccctcgcagggttcaaggcagcagctgtcgcgaccgtcgcctctgcagttcccaccctggttagcgtcaggatgctgccatgggccaaggccaacatcaaccccgctggccaggccctcatcgtctacacagttgctggcatggcgtacttcatcgcggcggacaagaagatcctatcgcttgctaaggcacacttcttccgaaacccccccgaaccacctaagggccacttccttccagggaaccggccgtccgaacccagggttctcaaggccttgg

SEQ ID NO: 83934 - DNA, 515 bp, Zea mays
  unsure (1)..(515): unsure at all n locations
tatttgttagggtgttgctggtgaaaaccatgatncaatcgtatgccgtaccggttcggaattcccgggtcgacccacgcgtccgctgctatgtttgctggaccgcagttcattcccattggtggaaacatcatgggtcatgcgtcaaccacaaggcttgctcttcgcaaggggcgaggggaggaacggatctgtaaagtaataagctctccctgccttgctgaagccgaagcaaggtttcagttagcttctgaaggtattgcagatgttaaggattgagaccatacctgctttacaggcatcttcagatccattggtctgctatttgctttgtcattccttgggccaactttcgtgttacctcaccttgatgtacaaaacggtttcgttcacatatgtgaatgcacgcctgttactgatttaagcgtcctgttgtaaataaaacgatgcctgttgccctgttgtgtgttgcatgtaatcgacaactctacatatcacaaaataaaaaaaaaaag

SEQ ID NO: 83935 - DNA, 517 bp, Zea mays
  unsure (1)..(517): unsure at all n locations
atgtaaaagtaagggctcagagtcgtgaactgatnctttatgtccctacgctatgncgtaccggtccggaattcccgggtcgacccacgcgtccggatggttccaaggttggtgtctatggaaagcctgcaaatgaagattttggggcagatagtgcccactggaaacgggttgtaagtaaatcgtatgtgaatggcatgggaattgactggtccaaagtgagaaatgtcatggacatgagagctgtctatggaggttttgctgcagctctgagggaccaaaaggtctgtgtcatgaatatcgtgccgatcgattcaacagacacgctgcccatcatctacgatcgcggattgtttgacatgtaccatgactggtgcaagtctttcagcacttacccaaaaacttatgaccttctgaactcggaccatctgttctcaaagctcagaaagagattcaaactggctgcanttttcgccgaggtcgaccgtgtactgaggccacatggcaagctgatcgt

SEQ ID NO: 83936 - DNA, 537 bp, Zea mays
  unsure (1)..(537): unsure at all n locations
taggttaagactcatcttgntgtgatgaatnacctaagncagtngcgannnctntnccggttcggaattgccgggtcgagccacgcgtccgggagcagctagggttccgtcctcgatccgatccgccgagtgcacaccacctgtcccgctccgatcgaatcgatggccgccgagggcgagaagaagatgataaccctcaaaagctccgatggcgaggagttcgaggtggaagaggcggtggcgatggagtcgcagaccatccgccacatgatcgaggatgactgcgccgacaacggtatccctcttcctaacgtcaactccaagatcctatccaaggtaatcgagtactgcaacaagcacgtacatgccgccgccgccgccgccgccgcctcgaaggccggttccgacgacgtgggtgccgcctccgccaacagcaccgccgcctccggtgaggacctcaagaactgggatgcggacttcgtcaaagtccaccaggccacgctttttcgaactcaaatttggctgtgaaaccttttt

SEQ ID NO: 83937 - DNA, 513 bp, Zea mays
agttattaagataggaggggttcacgatcgcttcgtgcctcgcattacgtcccattcccattcgagccacgcgtccgcgttcaggattatacaactcaccaatccatgcgcactaccaacaacctaacaacaagtgctggtaatatattagccctgcttgcgcttcttgcccttattgtgagcgcaacacatgcgttcattattccacaatgctcacttgctcctagtgccatcattacacaggtcctctcaccagttacttcaatgggcttcgaacacctagctgtgcaagccaacatgcaacaacaagcgcttgcggcgagcgtcttacaacaaccaattgcccaattgcaacaacaatccttgccacatctaacaatacaagccatcacaacgcaacagcaacaacagttcctaccagcactgagccacctagccatggtgaaccctgccgtctacttgcaagagcaagtgattgcattcaacccacttgcttttggcaaacttaatttt

SEQ ID NO: 83938 - DNA, 531 bp, Zea mays
  unsure (1)..(531): unsure at all n locations
agtttaggcgtggtatcttcgcctcggtgatcgtatgcctcagcnagtactgtaccggttcggaattcccgggtcgacccacgcgtccgattcaaaaacacaccaagcgaagcgcactagcaacgacctaacaccaatggcgaccaggatattagccctccttgcgcttcttgcccttttagtgagcgcaacaaatgcgttcattattccacagtgctcacttgctcctagtgccagtattccacagttcctcccaccagttacttcaatgggcttcgaacatccagccgtgcaagcctacaggctacaactagcgcttgcggcgagcgccttacaacaaccaattgcccaattgcaacaacaatccttggcacatctaaccctacaaaccattgcaacgcaacaacaacaacaacagtttctgccatcactgagccacctagccgtggtgaaccctgtcacctacttgcaacagcagctgcttgcatccaacccacttgctctggcgaacgtagctgcataccaacaacc

SEQ ID NO: 83939 - DNA, 513 bp, Zea mays
  unsure (1)..(513): unsure at all n locations
nagtctagagggtgtctnccaatgctcatgtccgtcgctatactgtaccggtttcggaattcccgggtcgagccacgcgtccgtgttcctccaacaaccgtcagccctattacagcagttacctttggtgcatttgttgggacaaaacatcaaggcacaacaactacaacaacttgtgctaggaaaccttgctgcctactctcagcaacagcagtttcttccattcaaccaactggctgcattgaactctgctgcttatttgcaacaacaactaccattcagtcagctagctgctgcctacccccagcaatttcttccattcaaccaactggcagcattgaactctgctgcttatttacaacagcaacagctaccaccattcagccagctagctgatgtgagccctgttgccttcttgacacaacaacagttgttgccgttctacctgcacgctgcgcctaacgctggcaccctcttacaactgcaacaaatgctgccattcaaaccaatttg

SEQ ID NO: 83940 - DNA, 527 bp, Zea mays
  unsure (1)..(527): unsure at all n locations
atgtgaatagataggtaatagtatgctngaaagaaaactcatgcaaccctaccgtatgtctgtaccggttcggaattcccgggtcgacccacgcgtccggtcagtgtgagcaatgacactgccacccatggtgatgcgtgacacattaggactcaaggatcaccatgggtggcagtgtcagtgtgagcaatgacctgaatgaacaattgaaatgaaaagaaaaaagtattgttccaaaaaaaaaatataagggcggccgctctagaggatccaagcttacgtacccgtgcattgctcgtaatacttttctataggggcaccttaattgaaattaattggctttagtattacaatgttatgctttggaaaaccttgctgtttcctaattaattgccttgcaatacattctccttttatcagcttgcttaatagcgaagaggcccgcaccgatcgcccttcccaacagttgcgcatcctgaatggcgaatgggacacgccctgtagcagcacattaaacgcggaggata

SEQ ID NO: 83941 - DNA, 516 bp, Zea mays
tgtgtattgtaaggatatagggtggtgtttagttctgaagtatctctcgacacggtccggaattcccgggtcgacccacgcgtccgcccacgcgtccggaagaacgaacctgagtttgctaagaagctaacttctgtcgctgaggtttatgtgaatgatgcgtttgggcacgggacacagagctcatgcttcaaccgaaggagttaccaagtttttgaaacctgctgttgctggcttcctcatgcagaaagaacttgactacctttgttggagctgttgccaacccaaagaagccatttgccgctattgttggtggatccaaggtctcaagtaagattggtgtcattgagtcgttgctggcaaaggtcgatatcctcatccttggtggtggtatgatctacacattttacaaggcacaaggatattctgttggaaaatctctcgtggaagaggataaacttgagctcgcaacttctcttattgagaaggcggaagtcaagggggtttctcttttgt

SEQ ID NO: 83942 - DNA, 506 bp, Zea mays
atatatagatagaactaggttgacccacgccctcgcaacctctcaaggtccggattcccggtcgacccacgcgtccgcaactagcacatagaaagcacatagtgtaccaacaatggcagccaaaatatttgcgtccttatgctccttggtctttctgcaagtgctgctaccgcgaccattttcccgcaatgctcacaagctcctatagcttcccttcttcccccgtacctctcaccagcggtgtcttcggtatgtgaaaacccaattcttcaaccctataggatccaacaggcaatcgcagctggcatcttacctttatcacccttgttcctccaacaatcatcagccctattacagcagttacctttggtgcatttattgccacaaaacatcagggcacaacaacttcaacaacctgtgctaaccaaacttggctgctaattttaacaacaacaatttcttccattcaaccaactagctgcattgaactctgctgcttatttgcg

SEQ ID NO: 83943 - DNA, 522 bp, Zea mays
  unsure (1)..(522): unsure at all n locations
agatagagtgggtcnacggttgctgtacgctcacatacnactactgtaccggtccggaattcccgggtcgacccacgcgtccggagaccaccaccgctctgcctcgcctcgcctcacctcacctcacctcacctggccgagtagggttttgtaccgccgtggatctcgccgtccccgccatggacgtctcgcacgcgggatcctccgtcgccggcgaggctccgaccaccggggagcaccggatggggactaccatcgtcggggtctgctacgaaggcggcgtcgtcctgggcgccgattccaggaccagcactggaatgtatgtagccaaccgtgcttcagacaagattactcaactgacagacaatgtgtatgtctgtcgctctggatctgctgctgatacacaagtcatttcggattatgtacgctatttccttcaccaacacacaatccagcttggacaaccagctaccgttaaagttgcaaccaacttgattagggtgctagcttattcaaacaaga

SEQ ID NO: 83944 - DNA, 527 bp, Zea mays
  unsure (1)..(527): unsure at all n locations
atagtatatatgtaatggancgtaggagtgctncaactgaaacttttagctcagtancgctatgtctgtaccggttcggaattcccgggtcgacccacgcgtccgaagcaacatagaaagtggaatccagtatcaacaacagagcaacaatggcgggcaagaggttttccctccttatgctccttgctctttctgcatgtgttgctaacgcgacaattttccctcaatgctcacaagctcctatagcttcccttcttcccccataccttccatcaatgatagcttcagtatgtgaaaacccagctcttcagccctataggctccaacaagcaatcgcagcaagcaacatacctttatcacccttgttgtttcaacaatcgccagccctatctttggtgcagtcattggtacaaaccatcagggcacagcagctgcagcaactcgtgctacctgtgatcaaccaagtagctctggcaaacctttctccctactctcagcaacaacaatgtcttccattcaaccaactg

SEQ ID NO: 83945 - DNA, 515 bp, Zea mays
tgttagtatggcataagatggtccatgatcttcatgtactacgctatgccgtaccggtccggaattcccgggtcgacgccacgcgtccgcccactcgtccgcggacgcgtgggtgataaggacggtggggtttctatggtgaagtcgtggtcatggacaatttgtgattttttctcctttatgccatgttttggaatttttgtagctgcctaggccttgtggtaatgtgctgctgtgggggttcattagtgtgaagaggaagacgctgctggcgctgagtctttttctctttattagtattttgtttaaaactatgtatgaccgaatggtggtatttatttgtgtcatccttgactcttattctgctgcaaaataaaaaaaaaaagggcggacgctctagaggatccaagctttactacgcgtgcatgctacgtcatagctctcctatagtgtcacctaatttcatttcattggccgtcgttttacaacgtctttcctggaaaaaccttgccgtt

SEQ ID NO: 83946 - DNA, 516 bp, Zea mays
atgtttagatggtgctagagttgaccctcccgctccgtaacctcgtacaaggtccggaattcccgggtcgacccacgcgtccgaccatccaggtgctggtgggctactgtgccgtgtacatattcatgcagacgttcatggtcccagtggccattttcatgtccctgcttgccggggccctctttgggcagctcggtggtctagccctggtgatctttgctgccactgccggtgcttcttcctgttatttcctgtccaagctagtagggaaaccactggtcttctcgttgtggccagacaagctcacgttcttccaaaagcaggttgcaaaaagaagagagaagctgctgaattacatgcttttcctgagagtcactccaacactgcccaatactttcatcaatttttcttcacctatagtgggtgtgccataccatactttcttctttgcgacggccattggcctcgtaccagctgcctatgtgactgtcaaggctggaattggcttgagcgacg

SEQ ID NO: 83947 - DNA, 515 bp, Zea mays
atatagaaagggctcagtgttgccctagccgtacgtatccatctgcaggtccggaattcccgggtggacgccacgcgtccggtgcctgaggcagccgcagagcagccctttggcggctgcgccctactacgccgggtagaggcatggtagcgccatgtaccatccgctccggcaacagtgctgccagcagcagatgaggatgatggacgtgcagtccgtcgcgcagcagctgcagatgatgatgcaacttgagcgtgccgctgccgccagcagcagcctgtacgagccagctctgatgcagcagcagcagcagctgttggcagctcagggtctcaaccccatggccatgatgatggcccataacatgccggccatgggtggactctaccatgaccagctgcccatctaccttacaacttcttgtggcgtttccgttacatttcagcctaattctggatcatgatttttgggaaaatctctctatccattcctctatatctataactggaataatg

SEQ ID NO: 83948 - DNA, 530 bp, Zea mays
  unsure (1)..(530): unsure at all n locations
nagttaagaggtgggtcatgggttggcgtcatgtcacatcggactgcctgtaccggtccggaattcccgggtcgagccacgcgtccgcccacgcgtccgggaaaccctagccgtcatatctcacgatccactcgagcacgaancgtagggaaggggaggagcgatggcgcgcggcgtggtgtcggcgaaaggcggcgcggtagcgggcaagaagaaggggtcagtttccttcacgatcgactgcaccaagccagtggaggacaagatcatggaagtcgcctcgctcgagaagttcctgcaagagcgcatcaaggtcgccggcggcaaggctggcaacctcggcgactccgtcaccatctctcgcgagaagaccaaggtcaccgtcacctctgacggacccttcttcaagaggtacctgaagtacttgaccaagaagtacttgaagaagcacaacgtgcgggattggctacgcgtggttgctgccaacaaggaccgcaacgtctattaacttccgttactttaacattgtt

SEQ ID NO: 83949 - DNA, 513 bp, Zea mays
agttaggaggctcgtgagttgttcagttcactcgctactgtgtaccggtccggaattcccgggtcgacccacgcgtccgcaacaagcaacatagaaagtggaatccagtagcaacaatagagcaacaatggcgaccgagatattttccctccttatgctccttgctctttctacatgtgttgctaacgcgacaattttccctcaatgctcacaagctcctatagcttcccttcttcccccataccttccatcaattatagcttcaatatgtgaaaacccagctcttcaaccatataggcttcaacaagcaatcgcagcaagcaacatacctttatcgcccttgttgtttcaacaatcgccagccctatctttggtgcagtcattggtacaaaccatcagggcacaacagctgcagcaactcgtgctacctctgatcaaccaagtagctctggcaaacctttctccctactctcagcaacaacaatttcttccattcaaccaactgtctacact

SEQ ID NO: 83950 - DNA, 528 bp, Zea mays
  unsure (1)..(528): unsure at all n locations
gaggtatagagatggctcntcgttaaggggaattgcccactacgctactaccagtaccggttcggaattcccgggtcgacccacgcgtccgctgaaccccgctgcttatttgcagcatcaaatactactaccatttagccaggtagctgcagcaagccgggcttgcttcttgacacaacaacagttgctgccgttctaccagcagtttgcggctaaccccgcaaccctcttacaactacaacaattgttgccctttgtccaacttgctttgacaaacccagcagcctcctaccaacaacacatcattggtggtgccctcttttagattgcttattagatgtaattcaataataaagttttttggatgatgtatgtggccaaccagaaataaaaagttacatttccagattctaaaaaaaaaaaaaataaaaaaaaaataaataaaaaaaaaaaaaaaaaaaatataataaaaaataaaaataaattaatataaaaattataaaattttttttttttaaaaaaaaaatc

SEQ ID NO: 83951 - DNA, 527 bp, Zea mays
  unsure (1)..(527): unsure at all n locations
atattattatggtaggtaatagagtgctgaactgaaattttattaagcttagtacttctgtaccggtccggaattcccgggtcgacccacgcatccgcggactcgtggtcggacgcttgggcaacaattgctgccattcaaccaacgtgcttttgcaaacctaacagcattctaccaacaacccatcattggtggtgccctcttttagatttcttatgagttatagttcaataataaagttttttgtctgatgtttgtggcttcccagaattaagaaagtacatttctaaattaaaaaaaaaaataaaaaaaaatattaaatatatattttncatatataaattnanattttatanagataattaattaatttattatttttaaaatattgattaattttagggtgcaaatatatttattcaataacatttcttcataatattataaaattatatttaattataatcgtatgattattttattttaataatttttatatatatttaagtataattttatatttaaat

SEQ ID NO: 83952 - DNA, 528 bp, Zea mays
  unsure (1)..(528): unsure at all n locations
tgtttagttagggcataaggagggtnaatgaattctcttatcgtcagtaccgctactggcagtaccggtccggaattcccgggtcgacccacgcgtccgcggactcgtgggctggtctccatctctatcagagagctccgtccgtcacgttcccctggttccattcatggagaatatgctccacctagccccgtcgtcgtcccaggcattggccttggaccgctcctccgtcttctcgcgtgagcacgtgccgccggccgtctccgctgtcacctccctgccagttatcgacatgtctcgcagccgcgacgaggtccgccgcgctatcctcgactccggcatggagttcggcttcttcctggtggtggagcacagcatcccagatgaggtgatgcgcgacattctggaggtgtgcgaggagttcttccagctgccggcggctagcaaggcgtacatgtacttggaggacagtcataagcccaaccggatctttttcggcacaacctactacacggtccgcgaccaggg

SEQ ID NO: 83953 - DNA, 529 bp, Zea mays
  unsure (1)..(529): unsure at all n locations
atatatttagtaatggactagagtcgtgcactgagnggctgcnngcttagtatgtgtgtaccgtccgnattcccggtcgacgccacgcgtccgtccagttctctttgatgaaccctgccttttcgtggcaacaacccatcatgggaggttgcatcttttagatgacatatgagatgtaatcgataatggtgccctcataccggcatgtgtttcctagaaataatcaatatattgattgacatttatctcaaaaaaaaaaaaaaaaataaaaaaataaaaaaaaattttttataaaaaaataaaaaaaaataataaaaaaattaataaaaatatataataatcaaataaaaatttaatagaaatatttttatatatgtttaatatattaaattattacagtgtatgataatttttatataattttanaatatatgatttaattttaaattatattattatatattattcaaattatgtataaattatatttatttaaaaattttattatattataattaaaaattgatag

SEQ ID NO: 83954 - DNA, 521 bp, Zea mays
  unsure (1)..(521): unsure at all n locations
atgtaagatagtncttaagagggtnaactgaactctcacgtcgtacgctatgncgtaccggtccggaattcccgggtcgacccacgcgtccgaaagatttgtgagggtgatccgcgctgagaagagatggctaagatcgcgggggcggcgtcagctgcgctgtgcttcgcggccctggtggccgtggccgtctgccaaggcgaggtcgagcggcagaggctcagggacctgcagtgctggcaggaggtccaggagagcccgctcgacgcgtgccgccaggtcctcgaccggcagctaaccggcggcggcggcggcggcggcgttggcccgttccggtggggcaccgggctccggatgcggtgctgccagcagctccagtacgtgagccgcgagtgccgctgcgccgccatccggagcatggtcaggggctacgaggaagccatgccgccgctggagaaaggctggtggccatgggggcggcagcagcagccgccgtcgctaggaggaaggaggaggacatt

SEQ ID NO: 83955 - DNA, 504 bp, Zea mays
  unsure (1)..(504): unsure at all n locations
ttttatgtgggcttggtggaccctgccgtacgtatctctgtaccggtctcggaattcccgggtcgacccacgcgtccgagaagccgtggattcgggtttgtgaccatgtcttcggtcgaagaggttgaggtggctggtgaccagtttaatggctatgtgcttgatggaagaagtttgagggtgaactctgggccgncaccacccagagatcggtcatcaccgtcaccgcaaagacccaggggtgatgccaacagggtctacgtgggtaacctttcctggggagttgacaattcagctctcgcaaacctgttcagtgagcaaggtgaggtactggaagcaaggatcatctatgacagggagagtggaaggtcaagggggtttggttttgtcacgtacggttccgccgtagaggttgagaatgcaatatctaatctcgatggcgctgacttggacggctgacagatccgtgttacggtagcatagtcgaatccaactaggcatcta

SEQ ID NO: 83956 - DNA, 513 bp, Zea mays
  unsure (1)..(513): unsure at all n locations
gagttaggtgggactcagatggctctactgctcatgcanncatcgcaggtccggaattcgggtcgacccacgcgtccgtcttcattcactcactctcttcgatcactgtactgaagataccatggccaagtcgacggcgatgtgtgtagccgccctggccctggtggtggtgatggcgacgacgagcacaggcggtggcagggcggcagcggcgtgcgatcccaagccgctggtggtgtgcgatccggcgttcatggacggagcgaaacccgcggcagcatgctgctccaccctgcgtgcgcaggaggcatgcttgtgcgtgtacgccaaagaccccaagtttgcaaaatacatcaacaaccccaacaccgtcaaaacctttacctcgtgcggcatagccatccccaaatgctaagcaagcgctctgcgtcgtcgcttcgcttgctcttgctcttgtgtgtaacatatccagcttatgaataaattatgtggatcaggtaataaaaaaaagaa

SEQ ID NO: 83957 - DNA, 521 bp, Zea mays
  unsure (1)..(521): unsure at all n locations
tagtaagtagtggttcntccatgctgaacgggcactcgctacgacagtaccggttcggaattcccgggtcgagccacgcgtccggaggttctccggggttcgggttcgtggtgtgagcggatcgagatggcggcgtgggatggtgagtaccgctgcttcgtcggcggcctcgcctgggccacggacgaccactccctccacaacgccttcagcacctacggcgaagtcctcgagtccaagatcatcctcgatcgggagacgcagaagtcccgcggcttccgcttcgtcaccttctccacggaagaagcgattccgaaacgccatcgaaggcattaaccggcaagaacttgaccggcccaaccttacccgccaccagggccaaacccggggggggccttgaagccgtcgccgttggtaccggtgttgcccttgaagccgcgggtttcgcggttgcccgccccccgaaaggccttgccggtttacggcgtcccctgttttccggtgccagggggtttccggtt

SEQ ID NO: 83958 - DNA, 510 bp, Zea mays
  unsure (1)..(510): unsure at all n locations
tgttaggaggctctcggttggtcagctcactcgctactgtgtaccggtccggaattcccgggtcgacccacgcgtccggtcgctaacaaagttttcaccagtatggggaaaactattgggtacaagatcggaacgatgattgagattcccagggcagctctagtggctgacgagatcgcggagcaggctgaattcttctcctttggaacgaacgacctcacgcagatgacctttggctacagcagggatgatgtggggaagttcatccccatttatctggctcagggcatcctccagcatgaccccttcgaggttctcgaccagagaggagtgggcgagctggttaagcttgctacagagaggggccgcaaagctaggcctaacttgaaggtgggcatttgtggagaacatggtggagagccttcatcggttgctttcttcgccaagactgggctggattacgtttcttgctcccctttcaaggtcccgatcgctatgctagctgcaacn

SEQ ID NO: 83959 - DNA, 519 bp, Zea mays
  unsure (1)..(519): unsure at all n locations
gtttaggaggngtcntgcctcgggtcatgttcacttcgctactgctgtaccggtccggaattcccgggtcgacccacgcgtccggaaagacataggcttgcggaaacactggactttgagattaagcgctgggctgctgggaaagaaggcaatttgcgtgcattgctatcaactttacaatatgttctttggccagaatgtgggtggcaacctgtatccctcactgatttgatcactgctgctgctgttaaaaaagtgtacagaaaagcaacactgtgtatccatcctgacaaggtgcagcaaaagggtgcaaatctccaacagaaatatatcgctgagaaggtttttgatctccttaaggaggcgtggaacaaactcaactctgaagagctcttctaaacagcctcacgactgaacatagcgtcgcccctcagggtctgcacaaggtactctcggaagaaactcacaagctggagtggcttgaggttggtcggggggaaaccgtgaaacgaccaaacc

SEQ ID NO: 83960 - DNA, 515 bp, Zea mays
  unsure (1)..(515): unsure at all n locations
ttttaggtgtgnctgagatgcaaaatgattctttactccctacgtattncgtaccgttccgattcccgggtcgacccacgcgtccgcggacgcgtgggtgctggcatgcattttttcccgccctggacagtgtgggcgttctggggggttcatccttgagggtaaagagcttgagttctacatgaagaagctacagaggaagaagggcaagagcgctgtagcttagagcattctcatggattgtcttgcaccgaaatgtgtgtcctgatgagtacactttttttggttagtcgtctcaagttcagagcgttatgccatgtattcagacctgattagtacactcttttctaaaagcgattgagctctattcctatgtattgataatataataaaataaatgatttaagaattatttttataatttnataaataaaggtgcgtccattttaaaggatccaaattatattaaagctgctttcaaggtataaacttttgaaatgtgtccctataattaa

SEQ ID NO: 83961 - DNA, 640 bp, Zea mays
  unsure (1)..(640): unsure at all n locations
atgttatataaggtagaggggcattagagtgtgaccccaacgccgctccgaatncnccgntaccggtctcggaattcccgggtgcgacgccacgccagtccgactcgattcctccgcaacaaccactctcnngcctgcgatcgttcgtagccctccgtcagcagtcgagcagcngatcagtgtcggctctacnntgcggaaagtaccaaggatgagccctcatcaagaatgccctgcctacattggcatcccccggcaangggtatttccttgctgctgatgaagtccaaactggcaccatnntggcaagcgccctttccaaagcatcaatgttcgagatacgnnttgaggagaactctgccgtgccccttccgttgagccctcctaaattctagctgcnncctggtagcctcatcccaagtaccattcaagcgagtagtgaatccctctatacgagggaagaccccctgtacnctagaaagaacccaaggtaattggcanagcccttatgtgtntggatagtcccctcaagnngaggngaaggcccgtcctttcccttggcattcaaaggtttgacaatggtgcactncattganagttngttgagcacctgataaaggaagactcaaccatcccaaat

SEQ ID NO: 83962 - DNA, 524 bp, Zea mays
  unsure (1)..(524): unsure at all n locations
atataggtgtagnctgagagttgaccctcgcactacgtaagcatgtgacaggtccggaattcccgggtcgacccactcgtccgcccacgcgtccgtgcttgtttttctctttgttgttcaaacactttacacccaaataaggaacttcagtgacattaattttggctgcaccaaagttacatgaactgaaaaaaaaaaaaaaaaaaaaaaaaaaaaaaaaaaaaaaaaaaaaaaaaaaaaaaaaaaaaaaaaaaaaaaaaaaaaaaaaaaaaaaaaaaaaaaaaagggcgaccgttttaaaggatccaagtttacttacccttgcttgcaacttcaaattttttttatagggaaacctaaattaaattcattggccgtcatttaaaaacgtagtaactggaaaaaccctggatttaccaaattaaatcgccttgcaaaaaatcccctttttgcaagttggcgtaataccaaaaagtgcccaacaaatagccttttcaaacaattaacaatcttaaaagggaaac

SEQ ID NO: 83963 - DNA, 509 bp, Zea mays
tggaggaggactcagatgtgcatgatctcatgtatctctcgcagtcggattcccgggtcgacccacgcgtccgggcggttctggcggtggtggtggcttcggcgctggcggctacggtggtggcttcgggggcgccttggggaacggaggcgccgctggtggttttgatggagaagctggcaacggcggcggtggaggaggaaacggtggcggtgacggcgctggtggtggttacggcagctccggtgctggcgatgagcttcatggcgtatctggtagtggcgacggaggcgaggctgggtataatggcaagggaccctccagcggtggactctggagcaagcgtggccatttccgcgggttggaggtcggcgcacagagactgtggcgggaacaactaacgtgaactttttgcgatgtaatataatgcattcatggctaggtgttaacaagcccgcgacttgtcgattggcatggctcacaagtgtccagtttgagctggatgatgg

SEQ ID NO: 83964 - DNA, 525 bp, Zea mays
  unsure (1)..(525): unsure at all n locations
aggatagggagtggnctcatcgaaagccgaatcggggccatcgcnactagacagtaccggtccggaattcccgggtcgagccacgcgtccgcgcacgcgtccgcggacgcgtgggcgttacgcgtgggcagcacctcaagaaggtgcaggccttatcaaagtggaacgtgctctcctgtaatgggcggtgcgccgatccatcacgatgtccagatggctgatggtgccccagatgacttcgccttcgggagcagcagcaacggcaacaacgagtcgcctggtctcgtgaaggcatgggagggggaacggatacacgaggagtgcgcctcggacgagcatgagctggagctcacccttgggagctcaaagactcgtgcagatccttcctgatcatgctgcaagagacaagtctttgagctcccaagcatgagctggagctcaccctcgtcagctgagcgactcgtgcatatcctttcttatcatgctgcaatacacagaccttaacctattttttattagtacctt

SEQ ID NO: 83965 - DNA, 514 bp, Zea mays
aaaattagtagggaatagaggtgcatgagtcttcgttccctacgtcatgccgtaccggtccggaattcccgggtcgacccacgcgtccgcaccagttacttcaatgggcttcgaacatccagccgtgcaagcctacaggcgtacaactggcgcttgcggcgagcgccttacaacaaccaattgcccaattgcaacaacaatccttggcacatctaaccctacaaaccattgcaacgcaacaacaacaacaacagtttctgccatcactgagccacctagccgtggtgaaccctgtcacctacttgcaacagcagctgcttgcatccaacccacttgctctggcgaacgtaactgcatacaatcaacaacaacatctgcaacagtttatgctagtgctcagtcaactagccatggtgaaccctgccgtttacctacaactactttaatctagcccgttcccggtggccaatgcacctactaacctacaacaacaagtgctgaacaaaattgaccg

SEQ ID NO: 83966 - DNA, 513 bp, Zea mays
  unsure (1)..(513): unsure at all n locations
atgattagaagtatagagagggtgcctgagnctctgttccctacgtaatgncgtaccggtccggaattcccgggtcgacccacgcgtccgcattcagccagccagctgctgcctacccccagcaatttcttccattcaacgaactagcggcattgaactctcctgcctatgtacagcagcaacaactactaccattcagccagctagctgctgtgagccctgctgccttcttgacacagcaacaattgttgtcgttctacctgcacgctgcgcctaacgttggcaccctcttacaactgcaacaattgctgccattcaaccaacttgctttgacaaacccagcagcgttctaccaacaacccatcattggtggtgccctcttttagattgctaatgagttatagttcaataataaagtttttttgatgaaaaaaaaataaatataaaaaaagggccggccgttttagagaatcccagcttacgtccgcttccttccaacttgatacttttatt

SEQ ID NO: 83967 - DNA, 514 bp, Zea mays
agtagtagtagtgtcggtatgatcactgatgcttttatgtcctacgtatgccgtaccggttccggattcccgggtcgcccactctccgggaaacccattgttcaacctacagtaccacaggcaatcgcaacgggcatctgacattatcacccttgttcctccaacaaccgtcagccctattacagcagttacctttggtccatttggtggcacaaaacatcagggcacaacaactacaacaacttgtgctagcaaaccttgctgcatactctcagcaacatcagtttcttccattcaaccaactggctgcattgaactctgctgcttatttgcaacaacaattaccattcagccagctagttgctgcctacccccagcaatttcttccattcaaccaactagcagcattgaacttctgctgcttatttacagcagcaacaactactaccattcagccagctagctgatgtgagccctgctgccttcttgacacaacaacagttgttgccagtct

SEQ ID NO: 83968 - DNA, 510 bp, Zea mays
  unsure (1)..(510): unsure at all n locations
tagaatagagaggatctcggatgtggctactgcctcgcaactacgtacaggtccggaattcccgggtcgacccacgcgtccgggaaaacattcactgactgttttaactgcttgccagtgtcagcattgatagacgaaaggatcctctgtatgcatggtggtctatctccagagttgaacaagctcgaacaaatacttaatctgagtcgccccacagacgtgcctgatactggattgctctgtgaccttctttggtctgatccttctaatgaagcaacaggatgggccataaatgatcgaggtgtttcatatacatttggtcctgataaagtttctgaattccttgataagcatgatttggacctcatctgccgagcccatcaggttgtcgaaaaatgatatgagnttttcgctagccggcaaactgttaccatgttttcaagcccttactactggggagaatttgataacgcttgtgccatgatgagtgtagatgagacattgttgtgc

SEQ ID NO: 83969 - DNA, 534 bp, Zea mays
  unsure (1)..(534): unsure at all n locations
atatagaagtatatntaaagaatgctcggttgattacgttcagctnngtagangtaggtcntgaattcctgtatcgacccacgcgtccgtctgattgtctaaaacctataattggtgtaatggtttcgtagtggttggttgaacaggggatgacgcatattttgtcaggtctatgtgttatcgttaaacttttaacggtcattctatttcaaaagttttgcattttgcaaaaaaaaaaaaaaaaaaaaaaaaaaaaaaaaaagggcggccgctctaaaggatccaagcttacatactcatacatgctacgtcatagctcttttatagattcacctaaattcaatttacttaccaatcatttacaaagtattatactggtaaaactctgtcgttacccaacttaatcaccttgcaataaatagatatttataccatcttgcataaatagcaaaaaagcccttacactattcgccttcctataattttctgcaacctgaatgtcaaaatggaactagcacttatactgatcattan

SEQ ID NO: 83970 - DNA, 520 bp, Zea mays
  unsure (1)..(520): unsure at all n locations
attagaagtatatntaagaagggtccctccgctgtcactncctacgcacgtccggaattcccgggtcgacccacgcgtccgcccacgcgtccgcagaaacacacctagcgaagcgcactagcaacgacctaacaacaagggctaccaggatattatccctctttgcgcttcttgccctttttgtgagcgcaacaaatgcgttcattattccccaatgctcacttgctcctagtgccattattccacagttcctccctccagttacttcaatgggcttcgaacacccatctgtgcaagcctacaggctacaacaagcgcttgcggcgagcgtcttacaacaaccaattgcccaattacaacaacaatccttggcacatctaaccatacaaaccatcgcaacgcaacagcaacaacaatttctaccagcactaagccaactagctgtggtgaaccctgtcgcctacttgcaacagcagttgcttgcatccaacccacttgctctggcaaacataattgcatg

SEQ ID NO: 83971 - DNA, 525 bp, Zea mays
  unsure (1)..(525): unsure at all n locations
gagtttagggagatgggtttcgtggtccgcgccatcgcccccttcgcnactgccggtaccggtccggaattcccgggtcgagccacgcgtccgtgcagatccgcgtctagatccatcgcccggggtccgccatgatcccgacggggtccgcgcaggcgtcgttccgcgaccgcaccaacgagttccgcgccgccgtcgagagagcgcgccgccacgccgtaccttcctcgtcgtcagcccccgccgcgccgagtagcagctctaccgggcccctcgacgggttgatcgcagccacgtcggctcgctcggagttcaacaaccgcgcgtccaagatcgggctcgggatccaccagacctcacagaagctatcccgccttgcgaaattggcaaagagaacatctgtttttgatgaccctacagtggagattcaagagttgactgcagtcattaagaaggatatcacggctttgaattctgctgttgtagacctacaagctctctgcaattcacaaaatgagagtggct

SEQ ID NO: 83972 - DNA, 530 bp, Zea mays
  unsure (1)..(530): unsure at all n locations
gttatagttagtngagtagaggtttcagcggttggttccacgctcactacgctaatgccagtaccggtccggaattcccgggtcgagccacgcgtccgcgcacgcgtccggatgccctgaggtcctcttccagccatccatgattggtagggagggtgccggaatccatgagacaacatacaattcaatcatgaagtgcgacgtggatatcaggaaggacctctacggcaacattgtgctcagtggaggttcgactatgttcccgggaatcgctgatcgtatgagcaaggagatcacttcccttgcaccaagcagcatgaagatcaaggtcgttgcaccgcctgagaggaagtatagtgtctggataggagggtccatcctagcctcgctgagcactttccaacagatgtggatatctaaagaagagtacgatgagtctggcccggcaattgttcacaggaagtgcttctaggcttcgcaagttcctcatcgttgcctagtctcaagttatgtccccttcatttctcaaa

SEQ ID NO: 83973 - DNA, 518 bp, Zea mays
  unsure (1)..(518): unsure at all n locations
tagttaaggaggtttgatcatgtagtagagcctcagcatgctgtaccgtccggaattcccggtcgagccacgcgtccgcattcaaccaacttgtcaggagccctgctgccttcttactgcagcaacaggtgttggcattccatctacaagttgtggcaaacattgctgctttcttgcaacaacaacaattgctgccattttacccacaggttgtgggaaacattaacgccttcttgcaacagcaacagttgctgccattctacccacaggatgtggcaaacaatgtcgccttcttacaacaacaacaattgctgccatttagccaacttgctttgacgaatcctaccaccttattgcagcagcccaccattggtggtgccatcttctagattttttatgctttatactgtaataataaagttctcatactgatatgtgcaacttctcagtaataaaagattagagatctatattntaagttcaaaaaaaaaaaaaaagggctgccgctctagaggatc

SEQ ID NO: 83974 - DNA, 512 bp, Zea mays
  unsure (1)..(512): unsure at all n locations
aggaatagaagtnatatagagtgtgaatgagctttatgtcctacgctatgncgtaccggtccggaattcccgggtcgacccacgcgtccggagccaactagctgtggtgaaccctgtcgcctacttgcaacagcagttgggggcatccgacccacttgctctggcaaacatagttgcataccaacaacaacaacaattgcaacagtttctaccagcgctcagtcaactagccatggtgaaccctgccgcctacctacaacagcaacaactgatttcatctagccctctcgctgtggttaatgcacctacatacctgcaacaacagttgctgcaacagattgtaccagctctgactcaactagctgtggcaaaccttgctgcctactggaaccacctgcttcaattaaccaaactaattgtgtcgaactttgttgctaacctccaccagcaacaccagtacctaattcaattaccggtgcctaaccattgggtcgttactttctacaacatca

SEQ ID NO: 83975 - DNA, 521 bp, Zea mays
taggtagatactcgaggtggtgcatgatctcatgtatcctccgtaatgcctgtaccgttcggaattcccgggtcgacccacgcgtccgcccagctcttcaaccatataggcttcaacaagcaatcgcagcaagcaacgtacctttgtcgcccttgttgtttcaacaatcgccagccctatctttggtgcagtcattggtacaaaccatcagggcacaacagctgcagcaactcgtgctacctctgatcaaccaagtagctctggcaaacctttctccctactctcagcaacaacaatttcttccattcaaccaactgtctacactgaaccctgctgcttatttgcagcaacaactattaccatttagccagctagctactgcctactctcagcaacaacaacttcttccatttaaccaattggccgcactgaaccccgctgcttatttgcagcagcaaatactactaccatttagccagctagctgcagcaaaccgtgcttccttcttgacacaacaacag

SEQ ID NO: 83976 - DNA, 517 bp, Zea mays
  unsure (1)..(517): unsure at all n locations
atgtaatagaagtnataatagagtctgcatcgannctttatttccctacgctatgccgtaccggtccggaattcccgggtcgacccacgcgtccgcgaaaagctaagcagagagaacaagcttaccaaatcatcagtcatggtcactgctggtgcaaatcaggcttttgtgaacttggtcctcactctttgtgatgctggtgattccgttgtcatgtttgcaccgtattatttcaatgcctacatgtcattccagatgacaggtgttactgacatattagttggtggctgcgatcccaagacacttcatcctgatgttgattggttggagaaggttctgaaagaaaatgagcctatccctaaacttgtcactgttgtgaatccggggaacccctgtggagcttttatttcaaggcctatgcttgagagaatttcagatctgtgcaaaaatgctggtgcatggcttgtggttgacaatacctatgagtactttatgtatgatggaatggagcactact

SEQ ID NO: 83977 - DNA, 507 bp, Zea mays
  unsure (1)..(507): unsure at all n locations
atgtataagggagggactcagagttgacccacgccctcgaatcacggacaggtccggattccgggtcgacccagcgtccgcggacgcgtgggcaactatcgcgttctctctacttccggtcttccaaaatccggagttgagaaccagcagagcatgcctcttctttggcatgggtgcatctggcgtgatacctgttcttcacaagctagtactcttctggcaccaaccggaggcattgcacacgaccggatacgaaattctgatggggctcttctacgggctgggagcattggtatatgcggcacgggtacctgagcgctggatgcctgngaagtttgacatcgccgggcacaaccaccagctgtttcacgtcttggttggtgcccgagcctacacacactaccacgcagggcttgtgtacctcaagtggagagacctgcaaggctgctgaaaggtactgcatcgttgaggatgtggatagattgtagattccgggaattcaggctg

SEQ ID NO: 83978 - DNA, 518 bp, Zea mays
  unsure (1)..(518): unsure at all n locations
caggaaggtgctgagagttgcnccatccgctgctactgcgctacgcaggtccggaattcccgggtcgacgccacgcgtccgagaaatccatcgagaggccgtcgacaggggaattaatggcgtcgtcgtctagcatcagccaccggggcctcatcctcgcagccgccgtcctgctctccgtgctcgcggctgccagcgccagcgccgggacctcctgcgtgccggggtgggccatcccgcacaacccgctcccgagctgccgctggtacgtgaccagccggacctgcagcatcgggccgcgcctcccgtggccggagctgaagaggagatgctgccggaagctggcggacatcccggcgtactgccggtgcacggtactgagcatcctcatggacagcgcgatcccgcctggcccggacgcgcagctggagggccgcctagaggaccttccaggctgcccgcgtgaggtgcaaaggggattccgcgtcacccttttcacgtaagcccaattcaaccct

SEQ ID NO: 83979 - DNA, 523 bp, Zea mays
gagtaaggaggtctgtgctggcattgtagcctacgcgactgctgtaccggtccggaattcccgggtcgacccacgcgtccgcagcaaggcacctaagatccaacggcttgtgacacccttgaccctccagaggaagcgggctagaatcgctgacaagaagaagaggataactaagaagaagtctgaggctgctgagtaccagaagcttcttgcccagaggctgaaggaacagagagaccgccggagcgagagcttggccaagaggaggtccaagctttctgccgccgccaaggcttctgctgccacctctgcttaagaatgttcagtgttttgggatctttgtaaggtctatcttgtaacggcaaaagtgttttgggatctttgtaagctccatagttcacatcacttaagtgtttctgctagtagtggatccacaactatttgcttgcttggctctgagtcacacctgaccgatcaatgcaggtgtcactttgcttttaactggttacatataaagagtccg

SEQ ID NO: 83980 - DNA, 523 bp, Zea mays
  unsure (1)..(523): unsure at all n locations
agataggggctcgaggttttccctactgctcacgnancgtacgtaatgccgtaccggtccggaattcccgggtcgacccacgcgtccggattggagaactcgacaccatgaaggtgctgatcgttgcccttgctctcgtggcgctggctgcgagcgccgcctccagtacaagcggcggctgtggctgccagacaccaccgtttcatctaccgcctccgttctatatgccgcctccgttctatctgccgccgcagcagcagccgcagccatggcaataccccactcaaccaccgcagctaagcccgtgccagcagttcggatcctgcggcgtcggcagcgtcggcagcccgttcctgggccagtgcgtcgagttcctgaggcaccagtgcagcccggcggcgacgccctacggctcgccacagtgccaggcgctgcagcagcagtgctgccaccagatcaggcaggtggagccgctgcaccggtaccaggcgacatacggtgtggtcctgcaatccttcctgan

SEQ ID NO: 83981 - DNA, 518 bp, Zea mays
  unsure (1)..(518): unsure at all n locations
atggtgtagtaggnacttagagtctacactgatgacctcgacgtccctacgctatgccgtaccggtccggaattcccgggtcgacccacgcgtccgcttctcctccccctccggttcgggttcgggttcgtgaggttctccggggggcggtttggggggttagcggatcgagatggcggcgtcggatgttgagtaccgctgcttcgtcggcggcctcgcctgggccacggacgaccactccctccacaacgccttcagcacctacggcgaggtcctcgagtccaagatcatgctcgatcgggagacgcagaggtcccgcggcttctgcttcgtcaccttctccacggaggaggcgatgctgaacgccatcgagggcatgaactgcaaagaactggacggccggaacaattacagtaacgaagcccaataccgtagcgggccttgaagccgtcgctgttggtaccgttgtagtccttgaagccgttggtccgtggttgacgtccccagtatagccgctn

SEQ ID NO: 83982 - DNA, 528 bp, Zea mays
  unsure (1)..(528): unsure at all n locations
taggaggtactcagtgtaagacaactgaagccttgnatncatacagtacttccgtaccggntcggaattcccaggtctacccacgcgtccggtcttcagtatgtgaaaacccaattcttcaaccctacaggatccaacatgcaattgcagcangcatcttacctttatcacccttgttcctccaacaatcatcatccctattacagcagttacctttggtgcatttattggcacaaaacatcatggcacaacaactcgtgctagcaaaccttgctgcctactctcagcaacaacatttacctttagtgcatttgttgtcacataacatcagatctcaacaactacaacaactttttctagcaatcctttctaactactctcaataacaacaagttctgtcattcaaccaactatcttcattaatctatactacttatttgcaacacaactagtactacaatttattcaaccatctgttacctacccccatcaatttcttacattcaatcaattatcatcatttaactt

SEQ ID NO: 83983 - DNA, 520 bp, Zea mays
atgtatataggtagggatctgagtgtgtgccccaggcccctccgctatctacgtacaggtccggaattcccgggtcgacccacgcgtccgcagaaataaaatcaataatagagagagatgaggtagcaacaccggctgcttaatctctgcttttccgtcctctttatctccagcgcatcgtaaagggaggagcggagcggcgaattcttgtggtttcccaagatgtcttctccaagcaagcgccgggagatggacctcatgaagctgatgatgagcgactacaaggtggatatggtgaacgatgggatgcaggagttctttgttgaatttcgtgggcctaacgaaagcatttatcaatgatggatttggaaggtttgaagagaactggcaaattcctgttcttaccaattcccattgattgggttcattaataagatatattacccaaatgtcgatgaaatgtctggttcagtctgtttggatgtcattaaccagacatggatcccaatgtttgatcttt

SEQ ID NO: 83984 - DNA, 520 bp, Zea mays
  unsure (1)..(520): unsure at all n locations
agttagatgtatgtgtttagagggggaagaggagtaggcatctctcggtccggaattcccgggtcgacccacgcgttcggccggtgctctttgctttaagactgtatccagttcgagctgttgccgcacttcaagaggtggagcagcgcatccaacaagtttggagcacgctgatctgtacgatctttcctgatgctatctggtccagtcggcgatttattgctgagatagagcatgtacggcaccagaatgagtttttttgtatctcgtagaagtgatttagctgatgtcgttgactgtttacttggcttgatgtaattgagtgaagttattcaaaaaaaaaaaaaaaaagggcggccgctcgcgatctagaaccgggttcgtgaggttctccggggttcgggttcgtgggtgagcggatcgagatggcggcgtcggatgttgagtaccgctgcttcgtcggcggcctcgcctgggccacngacgaccaactccctcacaaaggcctttagaaactata

SEQ ID NO: 83985 - DNA, 513 bp, Zea mays
gggtgagggctcgtgctagatgagaagtatgtagactctaccggtttcgaattcccggcgggacccacgcgtccgcggacgcgtgggcggacgcgtgggcggacgcgtgggcggacgcgtgggcgggggcgtgttggtcgtcatgtccatggctgacgtcccgctcgggttcggcattgcggcgaggtcggcgcaggattgcaggaaggccgacaccaacgccgtggtcgtgctgcaccagtcggacgccggggagtacctccgcaaggaggaggagctcatgtgaggtgagcgcataggcttggctggttaggtcatattcatgagtgaattatggaagattgtgccttactgttgtgtgttccaaggcttggggcatatatatatgtactgaatgattaatcactggttatgagatgcgattattgctgttgccaaaaaaaaaaaaaaaaaaagggcggccgctctagaggatccaagcttacgtacgcctgcatgcgacgttataacttt

SEQ ID NO: 83986 - DNA, 535 bp, Zea mays
tgagtatgaggagtacttatcgtgcctggtacgtacgcgctacgtcagtactgtaccggttcggaattcccggctcgacccacgcgtgcgcggacgcgtgggcaaaggtgaagcaaacatatcatatatatgttcacgttatggccggtctccatagctcatatgtggggcaactgagtacacaacatcaattgatatttggtcagctggatgtgttcttgctgagctgcttcttggccagcctctcttccctggtgaaagtgctgtggatcagcttgttgagataataaaggttcttggtaccccaacgcgcgaggaaatccgatgtatgaatccaaactacaccgagtttagatttcctcagatcaaagctcacccatggcacaagattttccacaagcggatgcctccagaagctatagatctcgcttcacgcttgctccaatattcaccaaatctaagatgcactgctcttgaagcgtgtgcacatccattctttgaacaatttcgagaaacccattcaaagttgccaaat

SEQ ID NO: 83987 - DNA, 509 bp, Zea mays
  unsure (1)..(509): unsure at all n locations
nagagtgttttgtcntcgcatccagataatgactcatcctctaccggtccggattcccgggtcgacccacgcgtccgcggacgcgtgggcggacgcgtgggcaacaagcaacatagaaagtggaatccagtaggagcgaatagagcaacaatggagaccaagatattttccctccttatgctccttgctctttctacatgtgttgctaacgcgacaattttccctcaatgctcacaagctcctatatagttccctttttccccatatacttcacatcatttatagcttcagtatgtgaaaacccatctcttcaaccatataggcttcaacaagcaatcgcagcaagcaacatacctttatcgcccttgttgtgtcaacaatcgccagccctatctttggtgcagtcattggtacaaaccatcagggcacaacagctgcagcaactcgtgctacctgtgatcaaccaagtagctctggcaaacctttctccctactctccgcaacaacan

SEQ ID NO: 83988 - DNA, 520 bp, Zea mays
gagatgagatgttgtgtgctagcagaaagagtatgctactacctggtctcggattcccgggtcgacccacgcgtccggcgaagcggcagtgcgtagagaggatcgtcgaacagaacagcatgaagatggtcatcggtcgcgtcgtgtgcctggctctgtcagctgccagcgcctctgcaatgcagatgccctgcccctgcgcggggctgcagggcttgtacggcgctggcgccggcctgacgacgatgatgggcgccggcgggctgtacccctacgcggagtacctgaggcagccgcagtgcagcccgctggcggcggcgccctactacgccgggtgtgggcagccgagcgccatgttccagccgctccggcaacagtgctgccagcagcagatgaggatgatggacgtgcagtccgtcgcgcaacaccttcagatgaagatgcagcttgaaccgtccgcttgccgcagcaacaacctgttccaaccagctttgaatcagcaccttcatatacttctgtt

SEQ ID NO: 83989 - DNA, 523 bp, Zea mays
  unsure (1)..(523): unsure at all n locations
agagttgaagttatgtgtgnttttacctctcgtacgctactactggtctcggattcccggtggacccacgcgtccgccgcatcgtccgcggacgcgtgggcgatcccttcatcagcaccgactacatgacctagatggttatagtacgacactgtacacggacagtggaagcaccatgaagtcaaggtgaaggactccaaaacccttctctttggtgagaaggaggttgctgtgtttggctgcaggaaccctgaggagatcccgtggggttcggttggtgctgaatatgttgttgagtctactgttgttattacttacctgtaataatcctgcatcttactttaaattctatcctacaatgttacaatctttttgggggggggggttccttcctattttttctttattataatcttatatttttcaatttttatattaacatattatttaatagttatttcttcaatctactgataatttatctattattaatatcttttatttctattttgtattttttatt

SEQ ID NO: 83990 - DNA, 525 bp, Zea mays
  unsure (1)..(525): unsure at all n locations
tgggatagggggtttgtccatgcaagagatgtattgtatgctcgtaccggtccggaattcccgggtcgacccacgcgtccgagtttcacagacagcatccattccacagtcaccagagcactagagcagagcagcaacggacaagagcagagcgagatcgtcgtcagcgagctcagcagagagccagatacgagagagaggatggcggacatcgcgttgctggtggcggagcagttcgagaagacggcaaggcgaggcgcccccggcggggacggcggcagcggcagcgggaccggcggcgagacgaggaacttcggggccgtggccaaagtgtggagctcgtgggtggagtccgcctccgccgccgcgtccggggtcagattcaccgtcgcggtgcagctggagcccaagaccgggctcgcgctggccgncgccgacggcctcttcttcgcctagcttcctgcctgctttcatgtctttctcctgagcaatgcccgtgatctatcaagtcctgttcttgaaccc

SEQ ID NO: 83991 - DNA, 527 bp, Zea mays
gttagagtgcttttgtgctagtaggcaggagagttatgctactgctcgtaccggtctcggaattcccgggtcgacccacgcgtccgatgttgtcagaattcacccctgagcagcagcatgcgttctgccagtttgtaacgtgtgctcctcggcttccacatggtggattggctgcccttagccccaagcttactatagttaggaagcatccttcaagtgctgtgaatacttcaaattcaactggggcagtagagtccgctgatgatgatttgcctagtgtgatgacgtgcgccaattatctgaagctgcccccctactccacaaaagaaatcatgcgcaagaagttgctttatgcgatcctggaaggccgaggatcatttgatctttcataagaaatatacaatatccgaactaacatacaggggtcagttttattctggagatttagtttcttggtccatgtataacactgagttgaggttaccagctcactcagcaaacggctttaaaggccagagccccaatcc

SEQ ID NO: 83992 - DNA, 511 bp, Zea mays
  unsure (1)..(511): unsure at all n locations
nggggagagtntatattcngatacagaaacagtacagtacgctctaccggtccggaattcccgggtggacccacgcgtccgcggacgcgtgggagagtttgtaccccttgctgaacttcctcaaggctcataactacaagggcacgacgatgatgttgaatgacagaatccaaagccttcgtggtctccaatcatccctgagaaaggcagaggagtatctactgagtgttcctcaagacactccctactcggagttcaaccataggttccaagagcttggtttggagaagggttggggtgacactgcgaagcgtgtactcgacacactccacttgcttcttgaccttcttgaggcccctgatcctgccaacttggagaagttccttggaactataccaatgatgttcaatgttgttatcctttctcctcatggctacttcgctcagtccaatgtgcttggataccctgacactggcggtcaggttgtgtacattctggatcaagtccgtgc

SEQ ID NO: 83993 - DNA, 503 bp, Zea mays
  unsure (1)..(503): unsure at all n locations
gagagtcctttttctnnnccattttncnagtacgtcgcggttcttattcccgctcgagccactcgtcctccgagcgtccgcaactagcaacatattattcacaatagtgtaccaacaatgtcagccagaatatttttcctccttatgctccttggtctttctgcaagtgctgctactgctaccattttcccgcaatgctcacaatctcctatagcttcccttcttcccccttacctttcaccagtgttgtcttcattatgtcaaaacccaattctttaaccttacatatatccatcaatctaatttctatatgcatctctatctttattactctacttcttacaattatcattattcctattatatcatttaggtgtttttcatttacttttacatttcttcatttcttcacttttcttttaaattttttctttattctttctttctttatctttttttattttttatttttttattttttattatttttttatatatatatt

SEQ ID NO: 83994 - DNA, 511 bp, Zea mays
gagttgagtgtttggtgctacgcaaagaagtatgctctacggtctcggtttcccgctggacgcacgcgtccgcgccctctcctccagccgcttcacagcgccgccgctcgcctctccgactgccgccggagggccgttcaagaggttcgtggagatcgggcgcgtggcccttgtgaactacggcaaagactacggccgcctcgtcgtcatcgtcgatgtggtcgaccagaacagggcacttgtggacgcccctgatatggtcaggtgccagattaacttcaaacggctctcacttaccgacatcaagattgacatcaaacgtgtccccaagaagtcaaccttgatcaaggctatggaggaagctgatgtgaagactaagtgggagaacagctcatggggcaagaagctgattgtccagaagaggagggctgcactcaatgactttgacaggttcaaggtcatgctggcaaggatcaaaaagggtggtgctatcaagcagactttttcagct

SEQ ID NO: 83995 - DNA, 520 bp, Zea mays
  unsure (1)..(520): unsure at all n locations
agtgaaggggtgtgtgcctcaccgcccggatcgcatgccgtaccggtccggnattcccgggtcgacccacgcgtccggcatgtacacgggccagttcgtctactgcggtcgccgcgccaccctctccatgggcggcgtgctgcccctgcgcgggatccctgagggtgccgtcgtctgcaacgtcgagcaccacgtcggtgaccgcggtgtcttcgccagggcctctggggactacgccattgtgatcagccacaaccctgacaacggcacatcgaggattaagctgccctctggcgccaagaagattgtccccagcagctgccgtgctatgattgggcaggttgctggtggaggcaggactgagaagccgatgctcaaggctggtaacgcgtaccacaagtaccgtgtgaagaggaacagctggcccaaggtgcgtggtgtggccatgaaccctgtggagcatccccacggatgaagttacccccaacacatttgttacgccttttatgtttctccagat

SEQ ID NO: 83996 - DNA, 524 bp, Zea mays
gggtttgagatgctcttttgcatgatagaatagtatagtactgctcgtaccggtccggaattcccgggtcgacccacgcgtccgatcacggcgggcgccgacgtgctggtgatgccctcccgcttcgagccctgcgggctggaccagctctacgcgatggcatacggcaccgtccctgtggtgcacgccgtgggcgggctcagggacaccgtggcgccgttcgacccgttcagcgacgccgggctcgggtggacttttgaccgcgccgaggccaacaagctgatcgaggcgctcaggcactgcctcgacacgtaccggaactacgaggagagctggaagagtctccaggcgcgcggcatgtcgcaggacctcagctgggaccacgcggctgagctctacgaggacgtccttgtcaaggccaagtaccagtggtgaacccttcgcccttcgcatcaatatcttcggtttgatcccattgtacatcgcgcgtttgacggtctcggtgaagaacttcatatgcagtt

SEQ ID NO: 83997 - DNA, 506 bp, Zea mays
  unsure (1)..(506): unsure at all n locations
ngagatgttatattgtgatatagaatatgatgtaccgctcgtaccggtccggaattcccgggtcgacccacgcgtccgcgcaattgaggctgctggcacagcatttcagctctacagctcgggtatcttcactgggggctgtggaacagcgctggaccatggtgtcacggccgtcggctacgggacagagaacggcaaggactactggatcgtgaagaactcatggggcagcagctggggcgagtccgggtacgtgaggatggagcgcaacatcaaggcgtccagcggcaagtgcggtatcgcggttgagccgtcatacccgttgaaggagggcgccaacccgccgaaccctggccccagcccgccgtccccgaccccggcgcccgccgtgtgcgacaactactactcgtgccctgacagcaccacctgctgctgcatctacgagtacggcaagtactgcttcgcctggggctgctgcccgctcgagggcgccacctgctgcgaca

SEQ ID NO: 83998 - DNA, 506 bp, Zea mays
  unsure (1)..(506): unsure at all n locations
gagagtgtatgttgagnctaacgcatcacagtgacgtctcgtctcggaattcccggtcgacgctcacgcgtccgaatagaccactgatttcacaatgaaaagtgagacaatgccttcatggctagaactgtttgttgcaacacaattctttacgacttgtgctaaccatcttcttgctagtcgcaatgaatgtaacctattttgcacccagtgtgagaccaaaccagctgctttctgtaactattgtcgttcaagtgatcattccacccaccgtgtaatccagataaggcgttcatcgtaccatgacgttgtgagggtgtccgagattgaggatatccttgatgtcagcgatgtgcaaacttatgtaatcaatagtgcaaggattgtattcctgaatgagcggccacaactgcgtgcttctagtgtccccatttgttaggcacctacattatcaacacatagctgtgaaacatgtatccctgtgctacttgattcattttgctttt

SEQ ID NO: 83999 - DNA, 502 bp, Zea mays
agatgttttgtgcgcatagacgacatacgtaacgctctaccggtccggaattcccgggtcgacccacgcgtccgcccacgcgtccgcccacgcgtccggtacgagggcaatgttgaggccactggtgaggagtgctctgttgagccagctgatgagaggaggcctttccgtgctctcttggatgttggccttatcaggactacaacagggaaccgtgtctttggtgccctcaagggagcattggatggaggcctggatattcctcacagcgagaagaggtttgctggattcaagaaggacgacaagcagttggatgctgatacccaccgcaggtacatctatggtggccatgttgctgactacatgaagaaccttgctgaagaggagccagaaaagtaccagagccacttcagtgcgtacattaagaagggagttgaggctgatgaaatagaagcgctgtacaagaaggtccatgctgccatccgtgccgatccttccattg

SEQ ID NO: 84000 - DNA, 524 bp, Zea mays
  unsure (1)..(524): unsure at all n locations
tggtttagaggcctgtgtgtataggggagagatatgtctctctcggtccggaattcccgggtcgacccacgcgtccgctggccaagctctcggtcgtgcccgtcaggaggggctactggggaaacaagatcggcgagcgtcacactgtgccctgcaaggtcaccggcaagtgccggtccgtcaccgtgcgcatggtgcccgcgcccaaggggttccggattgtcgcttgccgcgttcccaaaaaaggccctcaagtcggccgcattgaagatggctttacctcgntccgtggctccaacaagacactcggtaacttcgtcaaaggaaccctttgattgtctgatgaagacctacggcttcctcactcctgagttctgggccgagaccaagtatgccaagaccccgttccaggagttcaccgacctcttggctaagccgacaaagggtcttctgatcgaggctcccaccgagacagtggaaacttgaacgtcttagtttactgttcccaatgtttccaaaaaagt

SEQ ID NO: 84001 - DNA, 521 bp, Zea mays
gagaatagaggttgtgtgctagcggaagatgtatgctctactcggtccggaattcccgggtcgacccacgcgtccgggtgatgcgacgcccgtcccgttccaagtcctgacaaccgagcgtacgctgagctggagtgaacggcgctggctaccggaagagccgagccggaccaagtctcctcgtccctcacctcgtcgccgatggagggcggcgactcgtccggcgccggcgccggcggcgccgtgggccgcggcggccaagtggcggagcgacgcgtcgcgggcgttccagtactacctggaccgctcgacgcctcacgccacggggcggtggctcggcacgctcgccgccgcggccatctacgcgctgcgggtttacatggtgcaaggcttctacatcgtcacctacgggctcgggatctaccttctcaacctcctcatcggtttcctctcccccatggtcgaccccgagctcgacccttccggcggcttcgaagggcccgcgcttgccaaccgggggt

SEQ ID NO: 84002 - DNA, 693 bp, Zea mays
  unsure (1)..(693): unsure at all n locations
aggtaggagagagccttctgttgcctccattctgcgatgttatggtactgctcgtactcggtctcggaattcgccgggtgcgacgccacgccgtcgcgatgtgtactccactctnactggtggnnttttgagtgcnttggtattctcctaagnngatggccccagacgccntggagnncatgtctctccgttgcggtgtcaactttcttggaaagtgaagcnnagatgatttntngctgctgctaactaanngatggatgcccaacgacctcnnccaaataccctccataggcngnctgttatgaaaatgagaaattgtgtaaggnaaatgtctcaatcncttaactctgcaagaaaaaagttcggtgttaccatactctnctgaattaaagaaatttgcactatttgtcgccacaatcttcttggatatttgaagcggctgaccaacccgatgatttgaagaaggtctcactcgaacttctttaacttggtaccaataggctcgcgacgcgctagcttagaaggcttttctatgaccatgaatcatctcgtagcctcaagaagactctttcgtgacaatagcaccctgctgtcatcctcccttgcaatgatgttgtaccaagattggtgcgtaattggaacttgtacccggtttagtcttattggataactggttttttaataaaatccttt

SEQ ID NO: 84003 - DNA, 524 bp, Zea mays
  unsure (1)..(524): unsure at all n locations
gagtggaatggtttgtgcctgcacgtctagangtcactgctgtactcggtctcggaattcccgggtcgacccacgcgtccgctttatcgtccttgttgtttcaacaattgccagccctatctttggtgcagtcagtgtgacaaaccatcagggcacaacagctgcagcaactcgtgctacctctgatcaaccaagtagctctggcaaacctttctccctactctcagcaacaacaatttcttccattcaaccaactgtctacactgaaccctgctgcttatttgcagcaacaactattaccatttagccagctagctactgcctactctcagcaacaacaacttcttccatttaaccaattggccgcactgaaccccgctgcttatttgcagcagcaaatactactaccatttagccagctagctgcagcaaaccgtgcttccttcttgacacagcaacagttgctgcctttctaccagcagtttgcggctaaccccgcaacccttttacaactacaacaattt

SEQ ID NO: 84004 - DNA, 505 bp, Zea mays
  unsure (1)..(505): unsure at all n locations
gagtgtgtgtgagccctagccggatcgcagtactgtcncggtccggaattcccgggtcgacccacgcgtccggcgcttgttgtgtcaacaatcgccagccctatctttggtgcagtcattggtacaaaccgtcgggtcacaacagctgcagcaactcgtgctacctgtgatcaaccaagtagctctggcaaacctttctccctactctccgcaacaacaatttcttccattcaaccaactgtctacactgaaccctgctgcttatttgcagcaacaactattaccatttagccagctagctactgcctactctcaacaacaacaacttcttccatttaaccaattggccgcactgaaccccgctgcttatttgcagcagcaaatactactaccatttagccagctagctacagcaagccgtgcttccttcttgacacaacaacaattgctgccgttctaccagcagtttgcggctaaccccgcaaccctcttacaactacaacat

SEQ ID NO: 84005 - DNA, 508 bp, Zea mays
  unsure (1)..(508): unsure at all n locations
ngagtatgtctgttgtggttatgtaggaagagggaatgtatcgctctaccggtccggaattcccggatcgacccacgcgtccgcaacaagcaacatagaaagtggaatccagtagcaacaatagagcaacaatggcgagcaggatattttccctccttatgctccttgctctttctacatgtgttgctaacgcgacaattttccctcaatgctcacaagctcctatagcttcccttcttcccccataccttccatcaattatagcttcaatatgtgaaaacccagctcttcaaccatataggcttcaacaagcaatcgcagcaagcaacatacctttatcgcccttgttgtttcaacaattcgccagcctaatttttggtccagccatggttccaaccattaaggcacaacaacttcagcaactttggctaacctttgtccaaccaagtgcttctggcaaacctttttccctactttcagcaccaacaatttcttccattcaaccaac

SEQ ID NO: 84006 - DNA, 522 bp, Zea mays
gagattagaggtatgtgtgttagagacaaagagtatgctctactggtccggaattcccgggtcgacccacgcgtccgcagctagcaacatagaaagcacaatattgtaccaataatggcagccaaaatattttggctcgttatgctccttggtctttctgcaagtgctgctacggcgagcattttcccgcaatgctcacaagctcctatagcttcccttcttcccccatacctctcaccagcgatgtcttcagtatgtgaaaatccaattcttctaccctacaggatccaacaggcaatcgcagcaggcatcttacctttatcacccttgttcctccaacaatcatcagccctattacagcagttacctttggtgcatttattggcacaaaacatcagggcacaacaactacaacaactcgtgctagcaaaccttgctgcctactctcagcaacagcagttacctttggtgcatttgttggcacaaaacatcatggcacaacaacttcaacaactcttgctt

SEQ ID NO: 84007 - DNA, 518 bp, Zea mays
  unsure (1)..(518): unsure at all n locations
agtagagatgttttgtgctagggaaagatgtacgctactcctgtccggaattcccgggtcgacccacgcgtccggcaaagcggcagtgcgtagagaggatcgtcgaacagaacagcatgaagatggtcatcgttcgcgtcgtgtgcctggctctgtcagctgccagcgcctctgcaatgcagatgccctgcccctgcgcggggctgcagggcttgtacggcgctggcgccggcctgacgacgatgatgggcgccggcgggctgtacccctacgcggagtacctgaagcaaccgcaatgcaacccgcttgcggccgcgccctactacgccgggtgtgggcagccgaacgccatgttccagccgctccggcaacagtgctgccagcaacagatgaggatgatggacgtgcagtccgtcgcgcagcagctgcagatgatgatgcagcttgagcgtgccgctgccgncagcagcagcctgtacgagccagctctgatgcagcagcagcaacaacttcttgcc

SEQ ID NO: 84008 - DNA, 520 bp, Zea mays
gagaggtgttttgtgctatgaaacacagtacgcatctaccggtccggaattcccgggtcgacccacgcgtccgaaaaacacaccaagcgaatcgcactaccaacgacctaacaccaatggctaccaagatagtaggcctccttgcgcttcttgcccttttagtgagcgcaacaaatgcgttcattattccacagtgctcacttgctcctagtgccagtattccacagttcctcccaccagttacttcaatgggcttcgaacatccatccgtgcaagcctacaggctacaactagcgcttgcggcgagcgccttacaacaaccaattgcccaattgcaacaacaatccttggcacatctaaccctacaaaccattgcaacgcaacaacaacaacaacagtttctgccatcactgagccacctagccgtggtgaaccctgtcacctacttgcaacaacagctgcttgcattcaaaccacttgctcttgccaaacgtatcttgataccagcaaccaccacagc

SEQ ID NO: 84009 - DNA, 522 bp, Zea mays
  unsure (1)..(522): unsure at all n locations
gtgggagatgcctgtgtgctcatggcaaagagtatgctactactggtccggatattcccggctcgacccacgcgtccggcgaagcgcactagcaacaacctaacaacaatggctaccaagatattatccctcctgcncgtcttgcgctttttgcgagcgcaacaaatgcgtccattattccacaatgctcacttgctcctagttccattattccacagttcctcccaccagttacttcaatggccttcgaacacccagctgtgcaagcctataggctacaacaagcgattgcggcgagcgtcttacaacaaccaattgcccaattgcaacaacaatccttggcacatctaacaatacaaaccatcgcaacgcaacagcaacaacagttcctaccagcactgagccacctagccatggtgaaccctgtcgcctacttgcaacagcaactgcttgcatccaacccacttgctctagcaaacgtagtttcaaaccagcaacaacaacaactgcaacaattttttc

SEQ ID NO: 84010 - DNA, 535 bp, Zea mays
  unsure (1)..(535): unsure at all n locations
agagtgatgtgtgtctgtctnnnccctttgaagcatagncagtgatgtatcggatattccaattctgcgacgctacccacgcgtggctaaggaccttcgtctcccgttcattatctcacatcttcccgagcgagttcttggtgtacgttttcctcttcggaccagctccaatgctcttggtgtatcttgccactctcaccaatcaagttttcatgtctgatctctacattcatatcccaactgccttcgatcccttctctgaatccaattcttgtcactcttttgcatcatcattgtcaaaggactacgttcacgttctcattcatcatctttattttttctattatccttaccacttttcttttattgaactattttttcatttttctgcttgtatctttacttcctttatttttttttcttttatatatctctttttatctttattcttatttcttcttttctatatatatctattttatttctaaccttattattttttttattttttctctttattctattttatctattt

SEQ ID NO: 84011 - DNA, 512 bp, Zea mays
  unsure (1)..(512): unsure at all n locations
agagtatgtgtattcgtgagcccccagctccgacgncagtactgtcgcggtccggaattcccgggtcgagccacgcgtccgcccacgcgtccggtgcgtagagaggatcgtcgaacagaacagcatgaagatggtcatcagtctcgtcgtgtgcctggctctgtcagctgccagcgcctctgcaatgcagatgccctgcccctgcgcggggctgcagggcttgtacggcgctggcgccggcctgacgacgatgatgggcgccggcgggctgtacccctacgcggagtacctgaggcagccgcagtgcagcccgctggcggcggcgccctactacgccgggtgtgggcagacgagcgccatgtaccagccgctccggcaacagtgctgccagcagcagatgaggatgatggacgtgcaatccgtcgcgcaacagcttcagatgatgatgcagcttgagcgtgccggttgcgtcagcaacatcctggacgaacccactctgatgcatcaacaat

SEQ ID NO: 84012 - DNA, 504 bp, Zea mays
  unsure (1)..(504): unsure at all n locations
tgagtgtgtgtgaattagataatangtgatgctcgtcccggtccggaattcccgggtcgacccacgcgtccgcccacgcgtccggcgctcaagttctcgcgcccacagccaaatttttctccactcaatgggggcataagctgcactgcagccatggacgccagcggagccggtagcaaggcgaagaagggggcggctgggcgcaaggctggcggccccaggaagaagtcggtgtcgcggtccgtcaaggccgggctgcagttccccgtcggccggatcgggcgctacctcaagaaggggcggtacgcgcagcgcgtgggcaccggcgcccccgtctatctcgccgccgtgcttgagtacctcgccgccgaggtgctggagctggccgggaacgcggcgaaggacaacaagaagacgcgcatcgtcccgcgacacttgctcctggcgattcgtaacgacgttgagctcggcaagctgctgtctggcgtcaccatcgngcacggc

SEQ ID NO: 84013 - DNA, 514 bp, Zea mays
  unsure (1)..(514): unsure at all n locations
ggtaggggtggtataagagaaggatgtatgctctaccggtccggaattcccgggtcgacccacgcgtccgcccacgcgtccgatatgaaacacatgtcggaatgagtagcccggaaccgaagataaagacagatgtaaactttagggatgaagtcctcccaagaataaaaaaacttggatacaatgcagtgcaaataatggcaatccaagagcactcatattatggaagctttggataccatgtaactaatttttttgcgccaagtagtcgttttggtaccccagaagaattgaagtctttgattgatagagcacatgagcttggtttgctagttctcatggatgtggttcatagtcatgcgtcaagtaatactctggatgggttgaatggttttgatggtacagatacacattactttcacagtggtccacgtggccatcactggatgtgggattctcgcctatntaactatgggaactgggaaattttaagatttcttctctccaatgctac

SEQ ID NO: 84014 - DNA, 522 bp, Zea mays
  unsure (1)..(522): unsure at all n locations
nggtggaggggtttgtgtagagggaaggagagtaggcactactcggtccggaattcccgggtcgacccacgcgtccgcggacgcgtgggatgacgttcaagcggaggaacggcggacgcaacaagcacgggctgtgcgacgtcaagtacatacgctgctccaactgcgccaagtgctgtccaaaggataaggctatcaagcggttcttggtgaggaacattgttgagcaggctgctgtgagggacgtgcaggaggcttgtgtgcatgatggtatcatagtcgcccttattagttgcataatttagtcggatgatctatttataggttatctagagaaacccgccttaatatcttcaattgcacaggatatgttcttnccaaattgtacgcaaaggttcatcactgtgtcttatgcgcaatccatgcacacattgttcgtgtccgctttcgtgagaacaggaggaaccgtgagcccccgcagcgcttaggcgccgggattatggcccaaggcacagtcagggc

SEQ ID NO: 84015 - DNA, 533 bp, Zea mays
  unsure (1)..(533): unsure at all n locations
aggaagacagagattgtgtcccctgcagtggaagcatgattgtcattgctcgtaccggtccggaattcccgggtcgacccacgcgtccggttggcttctcctccccctccggttctggttcgggttcgtgaggttctccggggtgggggttcgtgggtgagcggatcgagatggcggcgtcggatgttgagtaccgctgcttcgtcggcggcctcgcctgggccacggacgaccactccctccacaacgccttcagcacctacggcgaggtcctcgagtccaagatcatcctcgatcgggagacgcagaggtcccgcggcttcggcttcgtcaccttctccacggaggaggcgatgcggaacgccatcgagggcatgaacggcaaggagctggacggccgcaacatcaccgtcaacgaggcccagtcccgcggcggccgtggaagcggcggcggtgggtacggtggtggccgtggaggcggcggctacggcngtggcnggcgccgtgatggcngtggccgctaccgccgttgc

SEQ ID NO: 84016 - DNA, 504 bp, Zea mays
  unsure (1)..(504): unsure at all n locations
gaggagtgtgtgtggattgagggtatgtatactcccccggtccggaattcccgggtcgacccacgcgtccgtattttgagcattcagaaacacaccaagcgaagctacctagcaacgacttaacaacaagtgtctaccaagatattagccctccttgcgcttcttgccctttttgtgagcgcaacaaatgcgttcattattccacaatgctcacttgctcctagtgccattataccacagttcctccgaccagttacttcaatgggcttcgaacacctagctgtgcaagcctacaggctacaacaagcgcttgcggcgagcgtcttacaacaaccaattaaccaattgcaacaacaatccttggcacatctaaccatacaaaccatcgcaacacaacagcaacaacagttcctaccagcactgagccaactagatgtggtgaaccctgtcgcctacttgcaacagcaggtgcttgcatccaacccacttgctctggcaaacgtn

SEQ ID NO: 84017 - DNA, 503 bp, Zea mays
ggatgttatattgacctcgataagtactccatactcgctccgtccggaattcccgggtcgacccacgcgtccgcggacgcgtgggtagcaacatagaaagcacaatagtgtaccaacaatggcagccaaaagatttgcctccttatgctccttggtctttctgcaagtgctgctacggcgaccattttcccgcaatgctcacaagctcctatagcttcccttcttcccccgtacctctcaccagtgttgtcttcagtatgtgaaaacccaattcttcaaaccctacaggatccaacatgcaattgcatcaggcatcttacctttatcacccttggtccttcaacaatcatcagccctattacagcagttacctttggtgcatttattggcacaaaacatcaaggcacaacaactcgtgctagcaaaccttgctgcctactctcagcaacaacagttacctttggtgcatttgttggcacaaaacatcagggcacaacaactac

SEQ ID NO: 84018 - DNA, 511 bp, Zea mays
  unsure (1)..(511): unsure at all n locations
nggagagctgtgtgtgagcctagtaacatcgcactgactgtcccggtccggaattcccgggtcgacccacgcgtccgagaccattagctttatctactccagagcgcagaagaacccgatcgacaccatgagggtggggctcgttgccctcgctctcctggctctcgctgcgagcgccacctccacgcatacaagcggcggctgcggctgccagccaccgccgccggttcatctaccgccgccggtgcatctgccacctccggttcacctgccacctccggtgcatctcccaccgccggtccacctgccgccgccggtccacctgccaccgccggtccatgtgccgncgncggttcatctgccgncgncaccatgccactaccctactcaaccgncccggcctcagcctcattcccagccacacccatgcccgtgccaacagccgcattcaagcccgtgccagcttgcaggaacctgcggcgttggcagcaccccgatcctgggccaatgg

SEQ ID NO: 84019 - DNA, 526 bp, Zea mays
  unsure (1)..(526): unsure at all n locations
ngtatagagtctttctgtatatagtggggaagacagtattgctcntctcggtccggaattcccgggtcgacccacgcgtccgcccagctcttcaaccatataggcttcaacaagcaatcgcagcaagcaacatacctttgtcggccttgttgtttcaacaatcgccagccctatctttggtgcagtcattggtacaaaccatcagggcacaacagctgcagcaactcgtgctacctctgatcaaccaagtagctctggcaaacctttctccctactctcagcaacaacaatttcttccattcaaccaactgtctacactgaaccctgctgcttatttgcagcaacaactattaccatttagccagctagctactgcctactctcagcaacaacaacttcttccatttaaccaattggccgcactgaaccccgctgcttatttgcagcagcaaatactactaccatttagccagctagctgcagcaaaccgtgcttncttcttgacacagcaacagatgcttgcttc

SEQ ID NO: 84020 - DNA, 536 bp, Zea mays
tgaggtggaagtgcttgtgttcctccatgccctacgtatgctactacctgtccggaattgaattcgcgggtgcgagccacgcgtgcggaagtcgccggcgccgccgcgacaggatgaaggagcagcagcggcagcggaggcccggcgatctcgtctgctgcgtgcggcgagggagtaaccggagccgcgacaggatgcactcctttgggcaccgcgccaacgcggtggcaacgttcgcggtcaccatactggccgcgatttgcttcgccgcctccttctccgacaacttcaacaccccgacacccactgcctccgttaagatcttgaatctaaactggttccagaaggaggccaacggcaacgacgaggttagcatgacgctgaacatttcggccgacctttcgtctcttttcacgtggaacacaaaacaggtgtttgtttttgtggcagcagagtatgagactccacagaatgcttttgatcaaagtttcctttggggatggcattataccttgcaaaggaaccatgccaatttt

SEQ ID NO: 84021 - DNA, 525 bp, Zea mays
  unsure (1)..(525): unsure at all n locations
gagttgaagtgctcngttcatgacacagaaatattgtactactggtccggaattcccgggtcgacccacgcgtccgctttcaacaggaaaatcctctgagaaaactgatgtatttggctatggaattactctggtagggcttattacaggacaacgtgccttcgatctagctcgtcttgctaatgatgatgatgtcatgcttcttgactgggtcaaggggttgctcaaggagaagaaactggagagtctggtcgacgaagatctagaccacaactacatcgatgtcgaggtggaatctctgatccaggtggcgctcctctgcactcagagcaaccccatggaacgtcctaagatgtcggaggttgtgaggatgcttgaaggcgatggtctcgccgagaggtgggaggagtggcagaaggtagaagtggtacggcaagaggttgaactaagccctcatcgaacctcggaatggattctcgacttcaccggcaaccttcacgcttaacaactgtcatggccgtagtt

SEQ ID NO: 84022 - DNA, 509 bp, Zea mays
  unsure (1)..(509): unsure at all n locations
ngaggggtgtgttgtcaccatcccgaatacctacagtactcncgcggttcggaattcccgggtcgacgccacgcgtccggtggaatttgctttgaggtatgtgatgtcgttcttcatgctgatgctatccacagggntgatggtcaggtcattcccactgccaggagggtcatctatgcctctcagctcacggccaagccaaggctgctggagccagtctacctggtggagatccaagccccagaaaatgcacttggtggtatctacggtgttctgaaccagaagagaggtcatgtctttgaggagatgcagaggccgggtaccccgctctacaacatcaaggctttcctccctgtcatcgagtcctttggtttctccagccaacttgaggccgcaaccttctgtcaggcgttcccccagtgtgtctttgaccattgngacatgatgggctcagatcctttggagccggcttccaagctgctcagctggtgcttgatatccgcaaaaan

SEQ ID NO: 84023 - DNA, 516 bp, Zea mays
  unsure (1)..(516): unsure at all n locations
gaggaagtcatgntactatgtcaagacagtaggctctactgctccggaattcccgggtcgacgcacgcgtccgcccaggtgatgcagagattctgttttcagagactactaaagcagagagggagcttaagtgggaagcaaaatacggtattgaagagatgtgccgcgaccaatggaactgggccagcaagaacccttatggctatggatcacctgactctatcaagcagaatggtcaccaaacaaacggatccgctgactcctccaagcagaatggccaccgcacaaacggttcaactgactcacccaagcggaacggccaccatgcgtatgggtctgctgactcacccaagcgcaacgggcactgcgtttttggatcatcagacctcaagccgaatggtaatggccacctgcgctgaacagaactgtttggcctgtgagctccctgtacattcngttgcgatgtgagctccctgcacgttcggtcgaagtctatcgtgaacccactattccaga

SEQ ID NO: 84024 - DNA, 535 bp, Zea mays
  unsure (1)..(535): unsure at all n locations
agggagaagaggcttgtgtcttatgaatgaacgatgtattgctattactcgtaccggttcggaattcccgggtcgacccacgcgtccgcccaacaccacctcgcctgcgatcttcgtagcctccgtcgcgtcgagcatcgagtcaggtcggcctactgcggaaagtacaaggatgagctcatcaagaatgctgcctacattggcacccccggcaagggtatccttgctgctgatgagtccactggcaccattggcaagcgcctttccagcatcaatgtcgagaacgttgaggagaaccgccgtgccctccgtgagctcctattctgctgccctggtgctctccagtacatcagcggtgtgatcctcttcgaggagaccctgtaccagaagaccaaggatggcaagccttttgttgatgtcctcaaggagggaggcgtcctccctggcatcaaggttgacaagggcaccattgangttgttggcactgataaggagaccaccacccaaggccatgacgaccttggcaagcgtttcc

SEQ ID NO: 84025 - DNA, 523 bp, Zea mays
gagtgaaggctttgttgactcccagctcagtacgtactgctgtactcggtctcggtattcccgggtcgacccacgcgtccgcaggatccaacaggcaatcgcagcagggttgaagaattgggtattcacatactgaaggcccgctggtgagaggtatgggagaagaaaggaagctataggatcttgcaagcattgtgggaaaatggtctacgacaccttacatattataaacacgatctatactcatagaaacaacaatttcttacattcaaccaactggctgaattgaactctgctgattatttgcaacatcaactaccattcagtcagctagctgatgcctacccccagcaatttctttcattcaaccaactggcaggattgaactctgctgcttatttacaacatctacaactaccaccatttagccatcttacttatgtgagccctattggcttcttgacacacttacatttttttgcctttttaccttgtaatctttttcttaagtcttctacctttt

SEQ ID NO: 84026 - DNA, 509 bp, Zea mays
  unsure (1)..(509): unsure at all n locations
ggtttagggtgtgtgtgaccctccgcctacgctatgccgtcaccggtccggaattcccgggtcgacccacgcgtccggtgatggtgctgaatatccatgcgatactgagtctcttgatgacgatctagatgatagaggtaaggaagatgaatttggagattcaactatcaggaagtctttcagttatgggtctctgcaatctgacaactatgttggtggcctagtttatgcccatgcaaagattgttggggagcatgaggaccggatatattatagtaaccgaaaaactgatgtcagtttccatgtagagaaaggattgccatcaaccacagagaatgggttgctaactgctaagcgcagtatacttccttggagaaagaggaaactgagtttacggtcgctgaaggctaaaggtgaacctctcttgaaaaaggcatatggggaagagggaagtgatgatattgaatatgatcgacgcttgctaacatcatttgatgaaatctgttcan

SEQ ID NO: 84027 - DNA, 496 bp, Zea mays
  unsure (1)..(496): unsure at all n locations
gagatatatgtggtcatcgaaattgatgactctctcggtccggattcccggctgcgacgccacgcgtccgccgacgcgtccgcggacgcgtgggttatctaccacggcaccgncagcccgggcggctatgaagactatgcccatcgcgaaatcgacggcgatgaagaagaccagttcccctctcctgatcgtcctgttcctcacagcagcagccatggcggccgagccggagaagcaggcggcccccgcggcacaggagacggccgtgcacatcgtgtacgttgaccgccccgaggacgccgaccctgaggagttccacatccgcaccctcacccccgtcctcggcagcgaacagaaggccatggacgcagtgctctaccactacaagaacgccgtcagcggcttcttcgccaagctcaccctccagcatgtcaaggatctcaacgagcaaccaactcatctccattttgtgccatacccaacttgccagatactg

SEQ ID NO: 84028 - DNA, 502 bp, Zea mays
  unsure (1)..(502): unsure at all n locations
gggagaggcnncatctatgctacgcactcacgttactctactaccgcttcggaattcccgggtcgacccacgcgttcgnccacgcgttcgaacaacaatggctaccaagatattaaccctccttgcgcttcttgcgctggttgtgatcgcaacaaatgcgttcattattccacaatgctcacttgctcctagtgccattattccacagttcctcccaccagttacttcaatgggcttcgaacacctaactttgcaagccaacatgcaacaacaagcgcttgcggcgagcgtcttacaacaaccaattgcccaattgcaacaacaatccttgccacatctaacaatacaagccatcacaacgcaacagcaacaacagttcctaccagcactgaaccacctagccatggtgaaccctgccgcctacttgcaagagcaactgcttgcatacaacccacttgcttctgcgaacgtattttcaaaccagcaacatcaacagcttcaa

SEQ ID NO: 84029 - DNA, 505 bp, Zea mays
aggtggtattgttgtgtattgcggggggagggttagtatcgctcgtaccggtccggaattcccgggtcgacccacgcgtccgatcaatgctgctgagttggccagttatgatcaagtcaagcagtcaattttgaaacgtcgctgggttcaaagatgatgtggtcacccacctttttgctggtcttggtgctggcttctttgctgtttgtgttggttccccagttgatgtggttaagtcgagaatgatgggtgactcagcctacaaaagcactctcgattgttttgtgaagacgctaaagaatgatggccctttggcattttacaaaggcttcctgccaaactttgcaagactgggatcttggaatgtgattatgttcttgacattggagcaggttcaaaagctgtttgtgaggaaagcgacaagctgaagatagagtttttgcagtcaggtggcgtacaattgacgcacagggtttttcttctatagacaaaaggtgagaaatgt

SEQ ID NO: 84030 - DNA, 501 bp, Zea mays
  unsure (1)..(501): unsure at all n locations
nggagagtntatgattgtcagcgcgcgaagatagtatcactctaccggtccggaattcccggggggacccacgcgtccggggttggcttctcctccccctccggttcgggttcgggttcgtgaggttctccgggggtcggtttcgtgggtgagcggatcgagatggcggcgtcggatgttgagtaccgctgcttcgtcggcggcctcgcctgggccacggacgaccactccctccacaacgccttcagcacctacggcgaggtcctcgagtccaagatcatcctcgatcgggagacgcagaggtcccgcggcttcggcttcgtcaccttctccacggaggaggcgatgcggaacgccatcgagggcatgaacggcaaggagctggacggccgcaacatcaccgtcaacgaggcccagtcccgcggcggccgtggaggcggcggcggtgggtacggtggtggccgnggaggcggnggttacgggnggnggngggcgccgttg

SEQ ID NO: 84031 - DNA, 497 bp, Zea mays
  unsure (1)..(497): unsure at all n locations
cgatgtgttttgctaagcgggggagaaagtatcgctctaccggtccggaattcccgggtcgacccacgcgtccgcggacgcgtgggtattcctggacgggcaacaggtgcatatagtcacagtcagggtgatgaaaggattgcgtgatgcaattgctgctgggatcacctcacgtgacggattccctgcaaatgcagatgacattttcattacagacggagcaagtcctggggtccacatgatgatgcaattactgattaggaatgagaaagatggcattctgtgcccaattcctcagtaccccttgtactcggcctccatagctcttcatggtggagctcttgtcccctattaccttgatgaaaaaactggngtggggtttggagatctctgatcttaagaaacaactcgaagatgctcggtcaaaaggcattgatgttagggccttggtggttatcaatccaggaaatccgactgggcaggttcttgcttgaaac

SEQ ID NO: 84032 - DNA, 508 bp, Zea mays
  unsure (1)..(508): unsure at all n locations
agaagggtatatcgtgagccatgcnagtacgctatgactgcccggtccggaattcccgggtcgacccacgcgtccgcgcactggtatgcctctatgccggatttcactccaatcacctgccggagcagctcgaggggaggctgacgatatagaaaacgaagcaaacgagcttatccgcatcaagaactatctctatggcaagctcgcggggcacacaggccattctgtcgagaagatccatgaggacctgtctagggtgaagcgcttcgacgccgaaggggctctcgagtacgggatcatcgaccgtattgtcaggccgtctaggatcaagaaagagggctccactgctcaaaggagggacatgcggaatctgggacttggctaataatagacgatcgaaatcctgttgtatcagaattttttgtgcaaaggatgcgcttattatgggagagcgagcgatgcactgttccaagctctacgcccgcgtaggtgttttgttgtgtcagcn

SEQ ID NO: 84033 - DNA, 505 bp, Zea mays
gggagagtgtgtgtgacatagatagtactcagtacttcccggccggaattcccgggtcgacccacgcgtccgcccacgcgtccggtttgttccaaaattgttgctcattttttggaatctagaggtatggggggagaggctcttgagatagccacggatgctgactacaagtttgacctagctgtgcagcttggaaaattagatgttgcaaaggctatcgtcatagaagcacagagtgaatctaaatggaagcagttgggtgaactcgccatgtccacaggcaagctagagatggcggaggaatgccttcttcaagcgaaggatttaagtggcttgttgctattgtactcatctcttggagatgctgaaggaattgaaaagcttgcttctttggcaaaagaacatggaaaaaacaatgttgctttcctctgccttttcatgcttggtaaaatggaaagattgcatacaggtgcttgtagacagtagccgtatacctgaagctgca

SEQ ID NO: 84034 - DNA, 501 bp, Zea mays
  unsure (1)..(501): unsure at all n locations
tagtattatattcttccgcccaccgaacatagaatggcatctcncggttcggaattcccgggtcgacccacgcgtccggtggtctcgatagaaatacttctcttacagtattttttgatgtctcaccgagtgaactagcnatccatccaggaaacgaaaatccccttatgtatatacaatttgtgacaagttaccaacacccagaaggtcaaatgaggataagagttactacgatatgcaggaaatgggtagatggttccactaataccgaggaattagttgaaggttttgaccaggaaactgcagctgttgtgttggcaagatacatctctttgaaaatggagatggaggaagagttcgatgcaacccggtggcttgatagatctctcatacgtctttgttcaagatttggggattaccggaaggatgatccctcttcatttagcctgcattcaaatttctcattgttccctcagtttatgtttaatcttcggcgttcac

SEQ ID NO: 84035 - DNA, 507 bp, Zea mays
  unsure (1)..(507): unsure at all n locations
agagtctggtatgtgagcctacgacaaggatagttgngactcgtctcggtctcggaattcccgggtcgacccacgcgtccgcagctctgctccccgccgctcctctccgcgccccttcatcccggatctcggcatgggcgcggccaccaccaacggctcggcggagcaggcgtccgcgcccgtgccggcgctcaagttcctcatctacggccgcacgggctggatcggggggctgctgggcggcctctgcgccgcgcgcgggatccccttcgtctacggcgccggcaggctcgagaaccgcgcccagctcgaggccgacatcgacgccgccgcgcccacccacgtgttcaacgccgcgggcgtcacgggccgncccaacgtcgactggtgcgagacgcaccgcgccgagaccatccgcgccaacgtcgtgggcacgctcacgctcgccgacatctgccggggccgaggggtcctgctcatcaactaccccacgggctgcatcttctg

SEQ ID NO: 84036 - DNA, 500 bp, Zea mays
cggagctcatcgtcggttccccgcatcactgatgctacgcctgtaccggtccggaattcccgggtcgacccacgcgtccgatgtctctggtgtttctttgttttccaattgcaaatgctctcattgcaaagatcaaggatgtgagtcctttagttgatgagcttgttctgctgctgctttattgtgcatatacagtgggtctctacctgcacctcgctgtgtcggttgtgcatgaaatcaaggatgcccttggaatctattgcttcaggataactagaaaggaggcttgaactttgtagtgaagatatattattattacttcacaagtgctagcgaggagcaacacagttcgtcaccgtgcacgctgggagtgtgtgtgcccctggaaatgccacagccatctgattgtattgcgcagttatcttggtcatataacaatatagcagtgtgatgtacactgtagtagggtcgttagaagatatactgtgataaacttgctt

SEQ ID NO: 84037 - DNA, 501 bp, Zea mays
  unsure (1)..(501): unsure at all n locations
tgatctatcatcgnctactgcaacgatgaaagcatgcgctctaccggtccggaattcccgggtcgacccacgcgtccggaatggccgagataaccctagagccgagtgatcttatggcgcaaacaaacaaaaaagtantgccaaagttcactgaaatcttccccgtggaggacgcgaactacccttacagcgccttcatcgcgtcggtccggaaagacgtgatcaaacactgcaccgaccataaagggatcttccagcccgtgctgccaccggagaagaaggtcccggagctatggttctacacagagctcaaaactaggaccagctccatcacgctcgccatacgcatggacaacctgtacctcgtgggcttcaggaccccgggcggagtgtggtggcagctcaatggcgactgggacacccacctttatcggctacattcaacgcggcgcttgctgtggctacacgtaccatgaccttatcgttacaagtttcttaatg

SEQ ID NO: 84038 - DNA, 507 bp, Zea mays
  unsure (1)..(507): unsure at all n locations
nagtagtgtagtgtgagatacgcatgtacattgatactcctccggtccggaanttcccgggtcgacccacgcgtccgcccacgcgtccgcccacgcgtccgcccacgcgtccgctcagatacagctggaggcagttgtgtgnggaattgggactgcgcttggtgagctccctccttattttatatcacgagcagctcgcttatcaggaagcgagtcaaaagctgttcaggagcttgatgcagctacttccaaagaagatgggccagtagcatcatcccttaatcgaaccaagcgttggcttctctctcactcccaacatctcaacttcttctctatcttgattcttgcttcggttccaaatccactctttgaccttgctggtattatgtgtgggcaatttggtgtgcctttctgggagttcttggttgctactttgattgggaaagccatcatcaagactcatattcagacactatttatcgtgtccctgtgcaacaatcagctctn

SEQ ID NO: 84039 - DNA, 493 bp, Zea mays
agatgttatgtgtaaggggaggaggatagactctcccggtccggaattcccgggtcgacccacgcgtccgatgttcatacctttcgggcttctttgtctccaaacttcaaatcatattgcagaaatcgtctgaccgctatgatgttgactgtgtgcctgatgcttacagaggaaataggcaagcttatattaaggacagctcgatttctaagaactgtactctggaagcgaaggttctggaatacatgagagcaccaatttatgtttattatgaacttgagaatttctatcagaatcaccgcaggtatgtcaaaagtagaagcgataaacagctgcgttttggggcaaaatacacggccgactcgtgcagtcctgttgagtgggataataatggttccccaattgttccctgcggcttgattgcctggagcttattcaatgatacatatggttttactcgtgggtccaaggaaataaaggtcaacaggaaaaa

SEQ ID NO: 84040 - DNA, 493 bp, Zea mays
  unsure (1)..(493): unsure at all n locations
gactatatgatcgttttcgcactcgcctgatcacgcggttcggtattcccggctcgacccacgcgtccgggtgggttggcttctcctccccctccttttcgggttcgggttcgtgaggttctccgnagttacttttcaaaaatgagcggatcgagatagcatcatacaatgttgagtaccgctgcttcttcagcagcctcgcctgtgccacagactaccactcacttcacaactccttcagcacctacagcaaggtcctctagtccaaaatcattctagatcggcaaacacaaaaatcccacgtcttctacttctttaccttcttcacatatgaatctattcctaacaccaactatttcattaatctcaagtgactatatttactataacataccttcaattaatcccattttcttaaattactctttatcatataattttatctataactttttcattttaaattataatattaatattatatcaattaatt

SEQ ID NO: 84041 - DNA, 503 bp, Zea mays
  unsure (1)..(503): unsure at all n locations
naggaggttttgttccgcaccccgccacactgataagtatcgctcgtaccggtccggaattcccgggtcgacccacgcgtccgctttcaagatggacgacaagttcaaggagatcgttgtggaccaggtcggggatggcggtaccagctacgaggacttcacaaacagcctccccgagaatgactgccgatacgcgatctatgatttcgactttgtcactgcagaagatgtccagaagagcaggatcttctatatcctatggtccccatcctccgccaaggtgaagagcaagatgctttatgcaagctcaaaccaaaaattcaagagtgggctcaatggcattcaggtggaactgcaggctactgatgcaagtgaaatcagccttgatgagatcaaggatcgggctcgctaggcatcatgatcatgcatcatggactcggcctactactgtggatttgtatgccattatagactnggtgctgtgaaagactgcttgatgattt

SEQ ID NO: 84042 - DNA, 500 bp, Zea mays
ggtgctatattgccctcccgcactatgatagctatcgctcgtaccggtccggaattcccgggtcgacccacgcgtccgcccacgcgtccgcccacgcgtccgcccacgcgtccgcggacgcgtgggggcgtgcagattatggcacctaatgctggtgagatcatccacgaagctgtcgtcgccttgcagtatggagcatccagtgaggacgttgctcgaacatgccacgcacaccctaccgtgagtgaagccctcaaggaggcttgcttgcaaaccttcgataaagcaatccacatataatttctcattttttgtgtccaaactccaaagtttgtggtaattttgggtctgttggaaaaaaggcccctgattgtcattttgtttttgtcggccatactgtgaattgaccctttgagttgtccatcttagcggggttttgtgcttgcttggcttggtttatccatccaaataataacctgatactatggtttacattttat

SEQ ID NO: 84043 - DNA, 497 bp, Zea mays
  unsure (1)..(497): unsure at all n locations
ggatgtatatgncctccgcaacaagatagcatgcgctctaccggtctcggaattcccgggtcgacccacgcgtccgcccacgcgtccgcccacgcgtccgcatagtcatgcgtcaagtaatactctggatnnggtnaatggttttgatggtacagatacacattactttcacagtggtccacgtggccatcactggatgtgggattctcgcctatttaactatgggaactgggaagttttaagatttcttctctccaatgctagatggtggctcgaggaatataagtttgatggtttccgttttgatggtgtgacctccatgatgtacactcatcacggattacaagtaacatttacggggaacttcaatgagtattttggctttgccaccgatgtagatgcagtggtttacttgatgctggtaaatgatctaattcatggactttatcctgaggctgtaaccattggtgaagatgttagtggaatgcctacatttg

SEQ ID NO: 84044 - DNA, 496 bp, Zea mays
cggaggtgttgtggaactagcggaggatggaagatatctcccggttcggaattcccgggtcgacccacgcgtccgaagaaatagaagaggggaatgcgtctggactaattgctgtggctcccgagtcagaagggatgatgatgccccatttatagatggaaaccaagcagagggtggtgcactgtgggatatttttcgacgggaagatgtgagcaaactgcatgattatctaatgaagcatgctgatgagtttagacattgcaactttgagccagtgaagcaggttactcatcctatacatgatcagtgtttttatctaacaattgagcacaagagaaagcttaaggaagaatatggagtcgagccttggacatttgaacagaagctaggtgaggcagtatttatcccggcaggatgtccccaccaggttagaaatttgaagtcttgcataaaggttgcactagattttgtttctccggaaaatgtccgagagtgg

SEQ ID NO: 84045 - DNA, 498 bp, Zea mays
  unsure (1)..(498): unsure at all n locations
gaggatgtatgtgagccaccagaacaagtatnactctctcggttcggaattcccgggtgcgagccacgcgtccgcagcatcaggaagcgtatccatgtccgcgtggagcatgtgcagccgtcccgctgcacagaagagttccgcctgaggaaggtgaagaatgaccagctgaaggcggatgcaaaggagcgcggcgaggtcatcagcaccaagaggcagccgttgggccccaagcctggcttcatggttgaggggactaccatcgagaccgtcactcccattccgtacgatgtggtcaatgatcttaagggcggatactaggttgttgtttggtctttctacctgttctacatctgtgttactctagtgcgtacaatgttgctcacactgagcagtagtatgaacctattgtgtgttcatgttgaaatttttcccgttctgtgcaaaataaaaaaaaaagggcggtccttctagaggatccaagcttacgtacgcgtt

SEQ ID NO: 84046 - DNA, 500 bp, Zea mays
  unsure (1)..(500): unsure at all n locations
cgaatatcatcgttgagttaaggcacgatccgatcntactgtcncggttcggaattcccggctcgacccacgcgtccggcgcaagttgttgtagttgttgtgctatcaaaccttgctgcctactctcagcaacancggtttcttccattcaaccaagtagctgcattgaactctgctgcttatttgcaacaacaactaccattcagccagctagctgctgcctacccccaacaatttcttccattcaaccaactggcatcattgaactctcctgcttatttacagcagcaacaactactaccattcagccagctagctggtgtgagccctgctgccttcttgacacaacaacagttattgccgttctacctgcacgctgcgcctaacgctggcaccctcttacaactgcaacaattgctgccattcaaccaacttgctttgacaaacccagcagcgttctaccaacaacccatcattggtggtgcccctttttagatttc

SEQ ID NO: 84047 - DNA, 494 bp, Zea mays
gaggctgtatgtgggaaacgcagtaagtaggctctcaccgttcggaattcccgggtcgacccacgcgtccgcatccttgagggtaaagagctcgagttctacatgaagaagctccagaggaagaaggggaagggtgttgcatcttagagcattcttttagctagaactgcaaaatatcttctacttgggggattttgttgttagtctttatgcatatcatttgcggacctgatgaacacttcataagtgaatcaactctcgattctaagaattgataattttcacatgcggtggttgtaattgtgatatttaggtttgctatttattgaaacttcttgtctaaaaaaaaaaaaaaaaaaaagggcggccgctctagaggatccaagcttacgtacgcgtgcatgcgacgtcatagctcttctatagtgtcacctaaattcaattcactggccgtccgtttacaacgtcgtgacctggaaaaccctggcgttacc

SEQ ID NO: 84048 - DNA, 506 bp, Zea mays
  unsure (1)..(506): unsure at all n locations
gagagtagtgtattgtgaggnnccagctccacgccagtacgccccggttcgtaattcccggctcgacgccacgcgtccgctagcaacatagaaagcacaatagtgtaccaacaatggcagccaaaatattttgcctacgtaggctccttggtctttctgcaagtgctgctacggcgaccattttcccgcaatgctcacaagctcctatagcttcccttcttcccccgtacctctcaccagtgttgtcttcagtatgtgaaaacccaattcttcaaccctacaggatccaacatgcaattgcatcaggcatcttacctttatcacccttgttccttcaacaatcatcaaccctattacagcaattacctttggtgcaattaatggcaccaaaccttaaggcaccaccaccttttccaacaaaccttgcttgccaactttatcaacaacagttacctttggtcatttgttggcacaaaacataatggcacaacaacttccacaacttt

SEQ ID NO: 84049 - DNA, 514 bp, Zea mays
gagaggaggcctgtattgtgcatacagaaacatgatagtatcgctgtaccggtccggaattcccgggtcgacccacgcgtccgcaattgcccaattacaacaacaatccttggcacatctaaccatacaaaccatcgggacgcaacagcaacaacaatttctaccagcactaagccaactagctgtggtgaaccctgtcgcctacttgcaacagcagttgcttgcatccaacccacttgctctggcaaacatagttgcataccaacaacaacaacaattgcaacagtttctaccagcgctcagtcaactagccatggtgaaccctgccgcctacctacaacagcaacaactgatttcatctagccctctcgctgtggttaatgcacctacatacctgcaacaacagttgctgcaacagattgtaccagctctgactcagctagctgtggcaaaccctgctgcctacttgcaacagctgcttccattcaaccaactgactgtgtcgaactctgtt

SEQ ID NO: 84050 - DNA, 503 bp, Zea mays
  unsure (1)..(503): unsure at all n locations
gagagttgtttgttgttcncctctggaataagacattatcgctctaccggtccggaattcccgggtcgacccacgcgtccgaaggaccttcggcgcccgttcaggatccacatcttcccgagcgagttcttggtgggcgtcttcctcttcggaccacctccaaggctcttggtgtagcttgccactctcaccaatcaagttttcatgtctgatctcgacattcagatcccaactgccttcgatcccttcgctgaggccaatgctggggactctggtgcggcagcagggtcaaaggactacgtacacgtgcgcatccagcagcgtaatggtcgcaagagcctgaccaccgtccagggattggaaaaagaagtcaacctccggcaggtccctcaaaatcttaagaaagaattcttcttcaatggtacagtggtccaagacccagaacttggacaggtcattcagctccaaggtgatcagaggaaaaacgtctcgaatttcctcgn

SEQ ID NO: 84051 - DNA, 496 bp, Zea mays
ggagatttatgtcgaaagtcagagaaggaagatatcctccggtccggaattcccgggtcgacccacgcgtccggaaagtggaatccagtagcaacaatagagcaacaatggcgaccaagatattttccctgctgatgctccttgctctttctacatgtgttgctaacgcgacaattttccctcaatgctcacaagctcctatagcttcccttcttcccccataccttccatcaattatagcttcaatatgtgaaaacccagctcttcaaccatataggcttcaacaagcaatcgcagcaagcaacatacctttatcgcccttgttgtttcaacaatcgccagccctatctttggtgcagtcattggtacaaaccatcagggcacaacagctgcagcaactcgtgctacctctgatcaaccaagtagctctggcaaacctttctccctactctcagcaacaacaatttcttccattcaaccaactgtctacactgaa

SEQ ID NO: 84052 - DNA, 500 bp, Zea mays
  unsure (1)..(500): unsure at all n locations
ggagatgtatgtgagccaccgaacattgaatnactctcccggttcggaattcccggctcgacccacgcgtccggacgatggtgctcctcgagcccctgaatactttaacggccctgtcaatgctcatgctaanggancctacctncgacataaggctgggcagcctcagcataccgaaaggcaacgggatcgccatacccgtcccgttcctccaccgagacagagaggtctggggcgacaacgccaatgacttcgatccgttgaggtttcagaacggggtcacgaacgcggccaagaccccgcaggctcttctgtcgttctcgatcgggccgagggcatgcatcggccagaacttcgcgatgctggaagcgaagtcggtgatggccatgatcatgaagaagttctccttcacgctttccttgagctacgtgcacgctcctgaggatcatatcacgctccatcctaagtatcgccttaacttagacataggagcaatcctt

SEQ ID NO: 84053 - DNA, 492 bp, Zea mays
  unsure (1)..(492): unsure at all n locations
ggagatgtatttacactgaaagaagtaggctctcccggtccggaattcccgggtcgacccacgcgtccgcggacgcgtgggcggacgcgtgggaccaactggcatcattgaactctcctgcttattgacggcagcaacaactactaccattcagccagctagctggtgtgagccctgctgccttcttgacacaacaacagttattgccgttctacctgcacgctgcgcctaacgctggcaccctcttacaactgcaacaattgctgccattcaaccaacttgctttgacaaacccagcagcgttctaccaacaacccatcattggtggtgccctcttttagatttcttatgagttatagttcaataataaagttttttgtctgatgtttgtggcttcccagaaataataaagtccatttctaaaaaaaaaaaaaaaagggcggccgctctagaggatccaagcttacgtacgcgtgcatgcgacgtcatacn

SEQ ID NO: 84054 - DNA, 506 bp, Zea mays
aggaggagcctatcttctgccaccagcaacaacgacatgctgcgctcgtaccggtccggaattcccgggtcgacccacgcgtccgtgcattctctctacacaagcgactgacaaagcaattaccaaagtcaacaacagaacgtcaatggccaccaagatattttccctccttatgctccttgctctttctgcatgtgttgctaacgcgacaattttccctcaatgctcacaagctcctatagcttcccttcttcccccataccttccatcaatgatagcttcagtatgtgaaaacccagctcttcagccctataggctccaacaagcaatcgcagcaagcaacatacctttatcacccttgttgtttcaacaatcgccagccctatctttggtgcagtcattggtacaaaccatcagggcacagcagctgcagcaactcgtgctacctgtgatcaaccaagtagctctggcaaacctttctccctactctcagcaacaacaatttt

SEQ ID NO: 84055 - DNA, 500 bp, Zea mays
gggagagctgtgtgtctattgaaatagtgacagtatcgctcgtaccggtccggaattcccgggtcgacccacgcgtccggttctagatcgcgagccgccgcccttctctaggtgcccaggtcttcgccggtccggtggccgcctcttcgccgccgatgagcaccagccaggaagaaaagaagctgaaccatggggaagagaaagtcagctgctaagccacctcctaagaagcggatggacaagcttgacactgtcttttcctgcccattctgcaaccacgggagtagtgttgagtgccgaattgacatgaagaatctgattggcgaagcatcttgtagaatctgtcaggaaaacttcagcacaactgttaatgcactcactgagcctattgatatatatagtgaatggattgacgagtgtgagcgtgtcaacactgttgaaggcgacgatgatgcgtgagcttgccccatgcgatgaaactgttacctaccatcgtaatg

SEQ ID NO: 84056 - DNA, 501 bp, Zea mays
  unsure (1)..(501): unsure at all n locations
nggagaggtatgtcacctcgaatgaactcagtacgacgtaccggtccggaattcccggtggacccacgcgtccggtgcaagcgccactagtgcgacccatattccagggcacttgccaccagtcatgccatgtngtaccatgaacccatgcatgcagtactgcatgatgcaacaggggcttgccagcttgatggcgtgtccgtccctgatgctgcagcaactgttggccttaccgcttcagacgatgccagtgatgatgccacagatgatgacgcctaacatgatgtcaccattgatgatgccgagcatgatgtcaccaatggtcttgccgagcatgatgtcgcaaatgatgatgccacaatgtcactgcgacgccgtctcgcagattatgctgcaacagcagttaccattcatgttcaacccaatggccatgacgattccacccatgttcttacagcaaccctttgttggtgcttcattttatattgaaatatttgtggt

SEQ ID NO: 84057 - DNA, 497 bp, Zea mays
  unsure (1)..(497): unsure at all n locations
agaggtattgtcggctaccgaacattgcatnactctcccggttcggaattcccgggtcgagccacgcgtccgtagcaacataaaaagcacaataatggtccaacaatggtaggccaaataattttgcctcctgatgctccttggtctttctgcaagtgctgctacgacgaccattttcccgcaatgctcacaagctcctatagcttctcttcttcccccatacctctcaccagcgttgtcttcagtatgtgaaaacccaattcttcaaccctacaggatccaacaggcaatcacagcaggcatcttacctttatcacccttgttcctccaacaatcatcagcctattacatcaattacctttggtgcatttattggcacaaaacatcagggcacaacaactacaacaactcgtgctagcaaaccttgctgcctacgctcagcaacagcagttacctttggtgcaattgttggcacaaaacatcagggcacaacaact

SEQ ID NO: 84058 - DNA, 502 bp, Zea mays
  unsure (1)..(502): unsure at all n locations
gatctatttatgnnnccagttttngcagngacancgtcgcttcgtaattcccggctcgacccacgcgtccggcagatttgggtggttttgatggggattcttattacgacaacaatgtggaactagatagtaagctatatcctgttaatgggacctactatctctggtaaaactttacttgcaaagacattatctcgttttgtgaatgtaccatttgtaattgctgatgcaactacattaacccatgcaggttatgtattataggatttataatctatattatacaatttactcactttttcatattttaatgtacaagcatttcatcattttatattttacatatactatttttataatatcataatataagtttgaatatttaactttattataaacttatctttttaattttttatattattctttttataataatcttttaattctattaatattatatattactatattatttatttaattatattttcctcctctt

SEQ ID NO: 84059 - DNA, 502 bp, Zea mays
  unsure (1)..(502): unsure at all n locations
gggagagctatgttggccacgaacacgacgtcacgnctgtaccggtccggaattcccgggtcgacccacgcgtccgagcagctcaggcaggtggagccgcagctccggtaccaggcgatcttcggcttgntcgtccagtccatcctgcagcagcagccgcaaagcggccaggtcgcggggctgttggcggcgcagatagcgcagcaactgacggcgatgtgcggcctgcagcagccgactccatgcccctacgctgctgccggcggtgtcccccactgaagaaactatgtgctgtagtatagccgctggctagctagctagttgagtcatttagcggcgatgattgagtaataatgtgtcacgcatcaaaaaaaaagagagaaaaaaaaaaaaaaaaataaaaaaaaataaaaataaaaattaataaaaattaaaaaaaattaaatataaaaatggaaaaaaaattatataaaaaaaaaaaggggcggcctttttaaaggtt

SEQ ID NO: 84060 - DNA, 498 bp, Zea mays
ggagaggtatgtcgccaccgaaatacgacagtatcgctcgtaccggtccggaattcccgggtcgacccacgcgtccgggcggcggctgatgtggagtaccgttgcttcgtcggcgggcttgcctgggccacgagcaacgagtcgctggagaatgccttcgcctcctacggcgagatcctcgactccaaggtcatcaccgaccgggagacggggaggtcccgcggcttcggcttcgttaccttctcctccgagaactccatgctcgacgctatcgagaacatgaacggcaaggagctcgacggccgtaacatcaccgttaaccaggcccagtcccgtggcggtggcggtggcggcggtggctacggcggcggtcgcggcggcggcggcggttatggtggcgggcgccgtgacggcggttatggcggcggtggcggctacggcggtcggcgcgaaggtggcggcggcggctacggaggcggtggcggctacggcggtcgg

SEQ ID NO: 84061 - DNA, 508 bp, Zea mays
  unsure (1)..(508): unsure at all n locations
ngagatgcctatcttcggctcattgaaaagaatgaaagtatcgctcgtaccggtctcggaattcccgggtcgacccacgcgtccgcccacgcgtccggaccaactagcaacatagaaagcacaatagtgtaccaacaatggcagccaaaatattttgcttgcttatgctccttggtctttctgcaagtgttgctaccgcaaccattttcccacaatgctcacaagctcctatagcttcccttcttcccccatacctctcaccagcggtgtcttcaatgtgtgaaaacccaattgttcaaccctacaggatccaacaggcaatcgcaacaggcatcttaccattatcacccttgttcctccaacaaccgtcagccctattacagcagttacctttggtccatttggtggcacaaaacatcagggcacaacaactacaacaacttgtgctagcaaaccttgctgcatactctcagcaacatcagtttcttccattcaaccaactggctgg

SEQ ID NO: 84062 - DNA, 598 bp, Zea mays
  unsure (1)..(598): unsure at all n locations
ngagtagtgtaagtttgtgccatcagaatacattagcgaatnntctagtanccggttccggaatttcccgggtgcgacgccactgcgtctccgttgcttacccagaggttaatggggtcttgagntagtattnnntccaattgcatttattattttatttaaatgtccacactcctaagtgatctgctgtttatttnnngtcaattaagggtcacttagtcaanngcttgcagccnnttaaagggaccctcgatgcaaggctttanngggagatnccgaagnnctatttggnnatcttgtaattgatcgggaagcttcccatctgaatcatcgaaatttntgtactcattttgcaggatgtnnctttaatctccttccaaattntgaactgtaaatgagccctaattaaagccttttgcagtgaaaacataacgaccatgatgtttggtgaatataacctgtctttctctgatcccggaagcgtcatttgcgccttctnacaatttaatcanacaattaagatgcttaaacaaaggagcatcgagaaaggccgaggggattcgaaaccataccgnncattcctacttgctgccggaan

SEQ ID NO: 84063 - DNA, 508 bp, Zea mays
  unsure (1)..(508): unsure at all n locations
cgtattgtctttcttcgtcaccgaacgcagaaggacagctatcactcgtaccggttcggaattcccggctcgacccacgcgtccgaattacagtcatgtcattcttcctgttggccccggtaaccttacttacagaaggtgggaaagttagtccagcaggtttgcagtctgctggtttgaacttgaaacagatatacacaaggtcattgattgctgcatgctgcttccatgcataccaacaggtgtcatacatgatcctcgccagggtatccccagtcacacattcagtgggcaattgcgtcaagcgtgtggtggtcattgtgacctcggttctgttcttcaggacccctgtttctcccatcaactcactcggtaccgggatcgctcttgctggagttttcctatactcgcaattgaagaggcttaagcccaagcccaaggctgcttgatcatagacctttgcaggtccatccaatagaacttttgaagttatgctatgccattggan

SEQ ID NO: 84064 - DNA, 511 bp, Zea mays
  unsure (1)..(511): unsure at all n locations
agaggagtctgtattgcccctccgaataacatagnaccgctgtaccggtccggaattcccgggtcgacccacgcgtccgcccacgcgtccgcaatgatgggttgttggtagaacactgctgggtttcttatgaggtgtagttcaataataaagtgttttatctgatgtttgtggcttcccagaaataagaaattacatttctaaaaaaaaaaaaaaaaaaaaaaaaaaaaaaaaaaaaaaaaaaaaaaaaaaaaaaaaaaaaaaaaaaaaaaaaaaaaaaaaaggggcggccgttctaaaggatccaagcttacttccccttccatgcaacgtcatagctcttctatagtgtcacctaaattcaattcactggccgtcgttttacaacggtctgactgggaaaaccctggcgttacccaactaaatcgccttgcagcacatccccttttcgccagctggcttaataccaaaaaggcccgaacctatcgcccttcccaacaattgcccaacc

SEQ ID NO: 84065 - DNA, 508 bp, Zea mays
ggaggggtctgtagtgcgtcagagaagaatgatgtaccgctcgtaccggtccggaattcccgggtcgacccacgcgtccgctactatactatactctaggaagcatggacaccaccgccatggcagccaagatgcgggcattgttcgctctcctagctctttgtgcaagcgccactagtgcgacgcatattccagggcacttgccaccagtcatgccattgggtaccatgaacccatgcatgcagtactgcatgatgcaacaggggcttgccagcttgatggcgtgtccgtccctgatgctgcagcaactgttggccttaccgcttcagacgatgccagtgatgatgccacagatgatgacgcctaacatgatgtcaccattgatgatgccgagcatgatgtcaccaatggtcttgccgagcatgatgtcgcaaatgatgatgccacaatgtcactgcgacgccgtctcgcagattatgctgcaacagcagttaccaatcatgttcaa

SEQ ID NO: 84066 - DNA, 504 bp, Zea mays
  unsure (1)..(504): unsure at all n locations
agagtctntattggaagcggcggtactcagtactctcncggttcggaattnnngnnngggtggagccacgcgtccgaagagttcttcagcgccttcgaggaggagatggaggtcaagcggcggctcgagcaggggcaggcggcgctcgagggcgccactgaagacatggacctcatgggccggctcctcgatgagctcgacctgctgcagcgccgctcccaggacgtggacctcgacatggtggacgtcaaggtgcagaagctcatgccagagctcgggttcatgcctgaggacgccgaccgcctcgtcgcctccttcagcggtgggtggaaaatgaggatgtctctaggcaagatacttcttcaggaccctgatttgcttttgcttgatgagcctacgaaccatgtcgatttagataccattgagtggctggagatgtatctcaagacgcaggatgtgccgatggtcattatatctcatgacagggcgttccttgatcaantg

SEQ ID NO: 84067 - DNA, 499 bp, Zea mays
ggagagtatatgtgataagtgggaggatggtagatatcctccggtccggaattcccgggtcgacccacgcgtccgcggacgcgtgggcggacgcgtgggattgagaccaacaagcaacatagaaagcggaatggaggagcaacaatagagcaacaatggcgaccaagatattttccctccttatgctccttgctctttctacatgtgttgctaacgcgacaattttccctcaatgctcacaagctcctatagcttcccttattgccccataccttccatcaattatagcttcaatatgtgaaaacccagctcttcaaccatataggcttcaacaagcaatcgcagcatgcaacatacctttatcgcccttgttgtttcaacaatcgccagccctatctttggtgcagtcattggtacaaaccatcatggcacaacagctgcagcaactcgtgctacctctgatcaaccaagtagctctggcaaacctttctccatactc

SEQ ID NO: 84068 - DNA, 497 bp, Zea mays
  unsure (1)..(497): unsure at all n locations
cgagtntatgtgagncctgaccgcntgnagtacgtcncggtttcggaattcccgggtggacgtcacgcgtccgctgcggggttcgggttcgtgggtgagcggatcgagatggcggcgtcggatgttgagtagctgtgcttcgtcggcggcctcgcctgggccacggacgaccactccctccacaacgccttcagcacctacggcgaggtcctcgagtccaagatcatcctcgatcgggagacgcagaggtcccgcggcttcggcttcgtcaccttctccacggaggaggcgatgcggaacgccatcgagggcatgaacggcaaggagctggacggccgcaacatcaccgtcaacgaggcccagtcccgcggcggccgtggaggcggcggcggtgggtacggtggtggccgtggaggcggcggctacggcggtggcgggcgccgtgatggcggtggcggctacggcggtggcggcggctacggtggccgcggcggctn

SEQ ID NO: 84069 - DNA, 484 bp, Zea mays
  unsure (1)..(484): unsure at all n locations
atgatgatgacgcttttacanccccnnnnggtcggaattcccgggtcgacccacgcgtccgagccttgccgaacctgcggcgttggcagaaccccgatcctgggccagtgcgtcgagtgcctgangcatcagtgcagcccgacggcgacgccctactgctcgcctcagtgccagtcgttgcggcagcagtgttgccagcagctcaggcaggtggagccgcagcaccggtaccaggcgatcttcggcttggtcctccagtccatcctgcagcagcagccgcaaagcggccaggtcgcggggctgttggcggcgcagatagcgcagcaactgacggcgatgtgcggcctgcagcagccgactccatgcccctacgctgctgccggcggtgtcccccactgaagaaactatgtgctgtagtatagccgctggctagctagctagttgagtcatttagcggcgatgattgagtaataatgtgtcacgc

SEQ ID NO: 84070 - DNA, 503 bp, Zea mays
gaggaggtgtattgcctactagaacaagtatagctatcgctcgtaccggtccggaattcccgggtcgacccacgcgtccgcatggagattactggcttcagtgctccagtaagagagcagatctacaagatagcggcggggaacctatgctccaatatcactggtcaaatccttgcgagcctcgtcatgaatccaccaaaggttggagacgaatcatatgcttcctacaaggcagagaaagatggaatccttgagtctttagctcgtcgtgcaaaggcgttggaggatgcattcaacaagcttgagggattttcatgtaacaaggccgaaggagcaatgtatcttttccctcagattcttctgccacagaaggcaatcgaggctgctaaagctgctaagaaagcgcctgacgctttctacgctctccgtctccttgaatcgactggaatcgtcgtggtccctggatctggatttggtcaaattcctggaacatggcacatcaa

SEQ ID NO: 84071 - DNA, 506 bp, Zea mays
agaggctgtgtgtgataatgaaacatgatagtatcgctctaccggtccggaattcccgggtcgacccacgcgtccgcgcaagtaccagaagagcacggagctgctgatccgcaagctgccgttccagcgcctggggcgtgagatcgcccaggacttcaagaccgacctccgcttccagagctccgccgtcgccgcgctgcaggaggcgtccgaggcctacctcgtcgggctcttcgaggacaccaacctctgcgccattcacgccaagcgcgtcaccatcatgcccaaggacatccagctcgcccgccgtatccgtggggagagggcctaggcgtcgtcccggtggaggtggaagtagtagtggccgtttctgtcatcactgtctggctagaaggtgtagagatgtgccgggttctgtagtttgggttatcggtcaaatcatgatgtagttgggtctaccctgctgtaatttaactatgactatgcaatggcaatgaaggtctcgg

SEQ ID NO: 84072 - DNA, 505 bp, Zea mays
agaggctgtgtctgataagatgcactaagtaccgctctaccggtccggaattcccgggtcgacccacgcgtccgcttcggcggcgacgagcacccaccagcagttctgtagaaatggctgatggtgaggacatccagcctcttgtctgcgacaatggcaccggaatggtcaaggctggttttgctggggacgatgcaccaagggcggttttccctagcattgttggccgtcctcgccacactggtgtcatggtagggatgggacagaaggatgcatatgttggcgatgaggcacagtccaagagaggtattctcacgctcaagtacccgattgagcacggtattgtgagcaactgggatgacatggagaaaatctggcatcatactttctacaacgagcttcgtgttgcaccagaggagcaccctgtgttgctcactgaggctcctttgaacccaaaggccaacagggagaagatgacccaaattatgtttgagactttcaatgt

SEQ ID NO: 84073 - DNA, 493 bp, Zea mays
  unsure (1)..(493): unsure at all n locations
ntttgaatctgaccctctgtacccccnnnnnntnnggnttnccggctggacccacgcgtccgcccacgcgtccgcccacgcgtccggcacggatcttgaccaaaagcttcacttctgatttccctcatgttgagaggtatttctggaccatggttaaccaacctaatttcaagaaggtcattggtgaggtcaagcaggcagagtctgtacctcctgttcttaaaaagggtgttcctcctaaggagtcaaaggcaaaggatgtgaagaaagaaactccaaaggaggcccccaagccaaaggtggttgaggtaccagcagaagaggaagcaccaaagccaaagccaaagaatcctcttgacttgctgccaccaagcaagatggtccttgatgactggaagaggctatactcaaacacaaagaccaacttccgggaggttgccatcaaaggtttctgggacatgtattacccanagggctactctctgtggttctg

SEQ ID NO: 84074 - DNA, 528 bp, Zea mays
  unsure (1)..(528): unsure at all n locations
nggggttgaggttgtctgtaaatagaaaggtgatagtatgctctaccggtccggaattcccgggtcgacccacgcgtccgcccacgcgtcccgccaggtctggattccgtccccggtcgggcccggccgaccccggctgttggtcccggcgtcaagcgtcgcgggctccactgagcgtgcgtgtcaccggcgggaggcaagggcaggcggtggtggcgatggcgtccgctgacgcgcgcttggcggggatcgcctnctccatccgcgtcatctccgacttccccaagccagggatcatgttccaggacatcacgacgttgctgctcgatcccaaggcgttccgtgacaccatcgacctctttgtcgagcggtacaaggaccaagggatcaccgtggttgctggtgttgaagctagagggttcatttttggtcctcctatcgctttagccattggcgcaaaatttgtgcctttgaagaagccgaagaagttgccaagcgaggtgatctncgaagagtattctttggaat

SEQ ID NO: 84075 - DNA, 518 bp, Zea mays
  unsure (1)..(518): unsure at all n locations
tagtgtattcngtggctagtccttgatngctacgcactacctgtccggaattcccgggtcgacccacgcgtccgctcggcataactgcgctgctcgtgatctactggatgtacaagtacctgacgtgcaagggccagcctggcgccaaccagctggaccacgccaatgcgaggctgacgtccaaggcccgcgacatcgaggatgcagcacagcaccgcatcgaccagccgcaggggtcttgacagaagaaccacactagatcggaccgctcgcgcgacctacttgtaccactgccggagcggcggcatatggcccttaaaggcggtggctgctgctacgtacgctgccgtagagtctcggtcgccgcgatagctctagctagtcgtttatgtgttgtgctctgtgtgtgcatgctcgtgtctggtggcatgcagtgcaccgcagtactatatgctgtatgcgtctatatttgatcggagaggctgatgtacagcatgctcgatatgtctagtttggat

SEQ ID NO: 84076 - DNA, 526 bp, Zea mays
  unsure (1)..(526): unsure at all n locations
ngaggtttaggtgtgtctgtgcctacggctantgcatgctcgtccggtccggaattcccgggtcgacccacgcgtccgatcccgcagcagccaaaacctacctagccgccgccgcaggcggccccccatcgccgccgagatgcagatctttgtgaagactctgacggggaagaccatcactttggaggtggagtcctcggacaccattgacaatgtgaaggccaagatccaggacaaggagggcatccccccggaccagcagcggctcatcttcgccggcaagcagctcgaggacggtcgcaccctcgccgactacaacattcagaaggagtccaccctccacctggtgctccgcctccgcggtggcgccaagaagcgtaagaagaagacgtacaccaagcccaagaagatcaagcacaagcacaagaaggtgaagctctccgtgctgcagttctataaggtggacgacgccacaggcaaggtgacccgnctncgcaaggagtgccccaacacagagtgcggcgcg

SEQ ID NO: 84077 - DNA, 601 bp, Zea mays
  unsure (1)..(601): unsure at all n locations
gagagatcgtnatctgtangctagcctcgctacagcnatngncagtancgcnttcggattcggaattctccgaggtcgaccctacgcgtcgcgaacagctaacagacttgctttcattctatgccctgctcgctttatgggnctaatgcactctacgtgagccgtgcatacaacagtatgtgtgcaaccaaccagttgcatgcnatacaaagttgtaccagcttcttaactcagcgtagcttgtggcagaacgccttgctgcgctaacttgacaacaacttgacttccatttcaacgcaacatgacctgtgtacgaacttctgactgcgtacacttacaacagcgacatacagcttacttaatccacttagcggtggcataaacccattnnggtcgctgacctgtcctatcagcagcaacatattgctcgccatacnatccagtatctcttttgatgatacacctgccttgtcgttggcagcaaccccatcgcttggtggtgccaatcttttagattacatatgangatgtactcgataatggtgccctcatagcggcatgtgtttcctaaaaataatcaatatattgattgagatttatc

SEQ ID NO: 84078 - DNA, 515 bp, Zea mays
  unsure (1)..(515): unsure at all n locations
tgaagtntgtctatactccacctcgagtacggcnnacgtccggtccggattcccgggtcgacccacgcgtccgcaagcttggaggcattgacaagcgtgtgatcgagaggttcgagaaggaggctggtgagatgaacaagcggtccttcaagtacgcgtgggtgctcgacaagctcaaggctgagcgtgagagaggtatcaccattgatatcgctctgtggaagtttgagaccaccaagtactactgcacggtcattgatgcccctggacaccgtgacttcatcaagaacatgatcactggtacctcccaggctgactgtgctgtccttatcattgactccaccactggtggttttgaggctggtatctccaaggatggccagacccgtgaacatgctctccttgcgttcacccttggagtgaagcagatgatttgctgctgcaacaagatggatgcaaccactcccaaatactccaaggcacgttatgaagagattgtgaaggaagtctcatcc

SEQ ID NO: 84079 - DNA, 505 bp, Zea mays
  unsure (1)..(505): unsure at all n locations
aggttgagggttgtgttagccagttcancnacgacttacggttcggaattcccggtcgacccacgcgtcgcggaccgtgggtggtgaaccctgcctctactacaacagcaacaactgatttatgtaggcttcgctgtggtaatgcacctacatacctgcacaacagttgctgcaacagattgtaccagctctgactcagctagctgtggcaaaccctgctgcctacttgcaacagctgcttccattcaaccaactgactgtgtcgaactctgctgcgtacctacaacagcgacaacagttacttaatccactagcggtggctaacccattggtcgttgccttcctacagcaacaacaattgctgccatacaaccagttctctttgatgaaccctgccttgttgtggcagcaacccatcgttggaggtgccatcttttagattacatatgaaatgtactcgataatggtgccctcatagcggcatgttgttccttagaaataactg

SEQ ID NO: 84080 - DNA, 518 bp, Zea mays
  unsure (1)..(518): unsure at all n locations
ggaagtgtatctgttataggggagaaggatgaagctctactcgtccggaattcccgggtcgacccacgcgtccgcccacgcgtccggccacgcgtccggccacgcgttcggaaaaacagattgtaaatgacaggggcgtatattctttagaatgaactgggcctaaaggtgaatttattccgatgaccaaactaaaccaaaatatcaaggatatgaaatctatcctttacggcaatggtgaatcagagcctgtaactgaagcatgtgtacaattgacccaagaattcttcagggagaacactttacggctattaatcatacatcttccaaaactaaatttggaggtatgtaatttgacctgtttttgcatgtagattgacagtactactggagtagcttttattacatacataatacatacccctcttgttatcgtttttacacaaaaaaactgatacattcgtatggatgtatctctacttctgattgttgcagactaggaaagatgctactcaagn

SEQ ID NO: 84081 - DNA, 521 bp, Zea mays
  unsure (1)..(521): unsure at all n locations
gggagaggtgtctgttctccaccccgactatcntatgcacgactggaccggaattcccgggtcgacccacgcgtccgccgacgcgtncgcgcaaaattgacccaggaaatccatcgagaggccgtcgacaggggaagtaagggcgtcgtcgtctagcagcagccaccgccgcctcatcctcgcagccgccgtcctgctctccgtgctcgcggctgccagcgccagcgccgggacctcctgcgtgccggggtgggccatcccgcacaacccgctcccgagctgccgctggtacgtgaccagccggacctgcggcatcgggccgcgcctcccgtggccggagctgaagaggagatgctgccgggagctggcggacatcccggcgtactgccggtgcacggcgctgagcatcctcatggacggcgcgatcccgccgggcccggacgcgcagctggagggccgcctagaggacctgccgggctgcccgcgggaggtgcagaggggattcgccgccaccctcgtca

SEQ ID NO: 84082 - DNA, 513 bp, Zea mays
gaggcttctgttaagagggggaggtatgcacgctctaccggtccggaattcccgggtcgacccacgcgtccgctctccgcttcccgctccgatcgacctgctccctccccaccaccgagcccatggcggagcagctcaccgacgaccagatcgccgagttcaaggaggccttcagcctcttcgacaaggacggggatggttgcatcacgaccaaggagctgggcactgtcatgcgctcgctggggcaaaatcctacagaggctgagctccaggacatgatcaacgaggtcgatgctgatggcaacggcaccatcgatttcccagagtttctcaaccttatggctcgcaagatgaaggacaccgactctgaggaagagctcaaggaggccttccgtgtgtttgacaaggaccagaacggcttcatctcggccgccgagctccgccatgtcatgacaaatcttggtgagaagctaactgatgaggaggtggacgagatgatccgtgaggctgatg

SEQ ID NO: 84083 - DNA, 518 bp, Zea mays
  unsure (1)..(518): unsure at all n locations
tggagggtgtgtctgtaccacgaatagtagtatgacgtaccggtccggaattcccgggtcgacccacgcgtccggtgctcgtgactttgaggacaaggagaagggcgtcaagatcaagaaagaggactgggacaagttgcatgttcacatagcctcgtacaacaacttccccactgctgctggtttggcctcttcggctgctggccttgcctgtttcgttttcacccttggaaagctgatgaatgtgaaagaagattatggagaactttcttcaatagcaaggcagggatctgggagtgcatgccgcagtatatatggtggttttgtgaaatggtgcatgggagaaaaagatgatggaagtgacagtattgccgtgcagcttgctgacgaaacacactggaatgatcttgtaattattattgcagtggtcagttcaaagcagaaggaaaccagtagcaccagtgggatgcgagataatgttgaaacaagtcctctcttgcagtacagggcccagacan

SEQ ID NO: 84084 - DNA, 522 bp, Zea mays
  unsure (1)..(522): unsure at all n locations
agttgtagtgcgtctgtcctcgttcagcnagtacgtcacgccgtaccggtccggaattcccgggtcgacccacgcgtccgcctgtatcggcgctctccaccgccccggccccttcctccaccagcgcgccgccggctgggtccacttcctcgcgccgcacaggaagacccgaccgccccccgcgatgagctggcttgggaagctgggcctgagcgggcttggaggcagcccgcgcgcgtcggaggcgtcggcagcgctggcgcaggggcccgacgaggaccagcccgcgccggggaacgagttcgcgcaattcggcgccggctgcttctggggcgtggagctcgcgttccagcgcgtgccgggagtcacccgcacggaggtcggctacagccagggcaacatccacgatccgacctacgaggacgtctgcaccggcaccacataccacaacgaggtcgtccgcgtgcagtacgacccggccgcctgcaagtacgacgacctactcgacaccttctgggcgcg

SEQ ID NO: 84085 - DNA, 521 bp, Zea mays
gagagaggaggtttctgtcccctgacccgttgcacgccgtacaggtccggaattcccgggtcgacccacgcgtccgtagttctagatcgcgagcggccgcccttttttttttcttttttttgtttttttttttggttgtttttttttttttttttttttttttttttttttttttatatcgagataaatctcaatcaatatattgattatttctaggaaacacatttcggtattagggccccattgtcgagtacatctcatatgtaatctaaaagatggcacctccaacgatgggttgctgcaaggcagggttcatcaaagagaactggttgtatggcaacaattgttgttgctgcttcaggaaggtagccaccaatgggttagccactgccaatggattaagtaactgttgtcgcttttgtaggtacgcagcatagtttgacacagccagttggttgaatggaaccaactgttgtaagtaggcatcagggtttgccacatctagctgattcagagcttgt

SEQ ID NO: 84086 - DNA, 520 bp, Zea mays
  unsure (1)..(520): unsure at all n locations
aagatgaagtgttttctgtaaagaagggaaggacgagtatgctctactcgtccggaattcccgggtcgacccacgcgtccgctcagctgaggctgccgctcgtagaaggatttccctggaataacaaggtcctactggagttcaatcaaagccaggtcctttgcagacagtttttgaactacctncagatgaggttgttgaccacagttattcatgtgcacttgagaggtcatttctgtatcatggacgcatgtatgtctcttcatggcatatttgctttcattcaaatgtcttctcaaagcaaatcaaggttgtgattcctttgagagatattgacgagataaggagaagtcagcatgcagttattaatccagctattacaatatttcttcgaatgggagctggaggatttggtgttcctccattaggatgtccagatggaagagtcaggtacatgtttgcatcattttggacagaaaccatacattagagcatgcaccgagctgtgaagacttccaaa

SEQ ID NO: 84087 - DNA, 519 bp, Zea mays
  unsure (1)..(519): unsure at all n locations
gagagggctttgtgctagcagcaaacagctaggctctactggtccggaattcccgggtcgacccaagccttccggcctacctccaggagggccattggtgaggtcaaccaggcaaagtctgcacctcctatgccgaaaaaggttgctccttctaaggagccaaaggcaaaggatgtcaagaaggaggctccaaaggaggccaccaagccaaaggtggttgaggcaccagcagaagaggaagcaccaaagccaaagccaaagaatcctcttgacttgctgccaccaagcaagatggtccttgatgactggaagaggctatactcaaacacaaagaccaacttccgggaggttgccatcaaaggtttctgggacatgtacgacccagagggctactctttgtggttctgtgactacaagtacaatgatgagaacaccgtctnctttgtgaccctgaacaaggttggtggattcctgcagcggatggacctgtgccgcaagtacgcctttgggaagatgctn

SEQ ID NO: 84088 - DNA, 519 bp, Zea mays
ggggaagtgtgtgtgtgcttagtctagttgcatgctgtaccggtccggaattcccgggtcgacccacgcgtccggtcactcaacacagcacaggcagctcgagagagagagagagagaaagatgtcgtggtgggggcaccaccaccacaaccagccggctcccccggcgtcgggccccaaccaggtgttcaagatcttctgccgcgccaacgagaactactgcctggccgtccgcgacggcgccgtcgtgctggccccggtcaaccccaaggacgaccaccagcactggtacaaggacatgcgcttcagcacccgggtcaaggacgaggaaggcatgccggcgttcgcgctcgtcaacaaggccacggggctcgcaatcaagcactccctcggccagtcccacccggtcaagctcgcgcctttcagcccggaccaggaggacgcgtcggtgctgtggacggagagcaaggacgtgggcaagggcttccgctgcatccgcatggtcaacaacacccgcct

SEQ ID NO: 84089 - DNA, 522 bp, Zea mays
ggggaagtcctttgtcctcgtaaagaacatattgcaggctctaccggtccggaattcccgggtcgacccacgcgtccgcccacgcgtccgatgatgccgagcatgatgtcaccaatggtcttgccgagcatgatggggcaaatgatgatgccacaatgtcactgcgacgccgtctcgcagattatgctgcaacagcagttaccattcatgttcaacccaatggccatgacgattccacccatgttcttacagcaaccctttgttggtgctgcattctagatagaaatatttgtgttgtaccgaataatgagttgacatgccatcgcgtgtgactcattattaacaataaaacaagtttcctcttattaaaaaaaaaaaaaaaaaaaaaaaaaaaaaaaaaaaaaaaaaaaaaaaaaaaaaaaaaaaaaaaaaaaaggggcggccgttttaaaggacccaggttaacttacgcgtccttgcaacgtaatactttttttatggggtcccctaattcaatttccc

SEQ ID NO: 84090 - DNA, 519 bp, Zea mays
  unsure (1)..(519): unsure at all n locations
gggagggctttttccactgtaaagaaagtatagcacgctctaccggtccggaattcccgggtcgacccacgcgtccgcccacgcgtccgcccacgcgtccgcaattagtaaacaacctaaagctcgcatgactggtcatcagaagcttgtaaaccatgtttacttttcccctgatggacaatggttggcaagtgcatcctttgataaatctgtcaagttgtggaatggtatcacaggtaaatttgttgcagcattcagagggcacgttgcagatgtctaccagatcagctggtctgccgacagtaggcttctactaagtggaagcaaggattccactctaaagatctgggatattcgaacacacaagttgaaaatggacttgccgggccacgcggatgaggtgtacaccgtggattggagccctgacggtgaaaaggtggcgtctggtggcaaggatcgggtcctcaagctatggatgaactgatngattattatatatctatgcttgggcgaatttat

SEQ ID NO: 84091 - DNA, 520 bp, Zea mays
  unsure (1)..(520): unsure at all n locations
gggaggggtgtcgtccctccgaatatagctaggctctacnggtccggaattcccgggtcgacccacgcgtccgtgttcccaagcctcaacaaagtcgtatttcttgatgatgatgttgttgtccagcatgacgctagcaccactttgggatattgatctatctgggaaggttaatggcgctgttgagacttgcagaggtggagatagttgggtgatgtctaagaggttcaggaattatttaaacttttctcatcccctcattgcaaaaaactttgatccttcagagtgtgcttgggcatatggtatgaatatttttgacctgaatgcatggaggaagacaacaatcaaagacaaataccatcattgggtcaaggagaacctgaagtcaaacttcacactttggaggctgggaacattaccaccaggccttatagcatttaaaggccatgttcacccaattgatccatcatggcatctgttaggtttggggtatcaggaaaagacagatatcagtagtgtn

SEQ ID NO: 84092 - DNA, 514 bp, Zea mays
  unsure (1)..(514): unsure at all n locations
agtgagaggtttttagctacgttagtgnaggacgtaccgtccggattcccgggtcgacccacgcgtccgtgctgcctactctcagcaacagcagtttcttccattcaaccaactggctgcattgaggtctgctgcttatttgcaacaacaactaccattcagtcagctagctgctgcctacccccagcaatttcttccattcaaccaactggcagcattgaactctgctgcttatttacaacagcaacaactaccaccattcagccagctagctgatgtgagccctattgccttcttgacacagcaacagttgttgccgttctacctgcacgctgcgcctaacgctggcaccctcttacaactgcaacaattgctgccattcaaccaacttgctttgacaaacccaacagcgttctaccaacaacccatcattggtggtgccctcttttagattgcttatgagttatagttcaataatgaagttttttggatgatgtttgtggctttccagaan

SEQ ID NO: 84093 - DNA, 521 bp, Zea mays
  unsure (1)..(521): unsure at all n locations
aggagaggtgtgtgtnccacgaattaatgctatgccgtaccggtccggaattcccgggtcgacccacgcgtccgttttttttttaaaatctggaaatgtaacttcttatttctggttggccacatacatcatgcaagaaactttattattgaattacaactaataagcaatctaaaagagggcaccaccaatgatgtgttgttggtaggaggccgctgggtctgtcaaagcaagttggacaaagggcaacaattgttgtagttgtaagagggttgcggggttagccgcaaactgctggtagaaaggcagcaactgttgctgtgtcaagaaggaagcacggtttgctgcagctagctggctaaatggtagtagtatttgctgctgcaaataagcagcggngttcagtgcgactagttctagatcgcgagcggccgctctagaggatccaagcttacgtacgcgtgcatgcgacgtcatagctcttctatagtgtcacctanattcaattcactggccgtcgn

SEQ ID NO: 84094 - DNA, 518 bp, Zea mays
  unsure (1)..(518): unsure at all n locations
agggaagtgtatctgtaatggggagggacagtatgctctaccggtccggaattcccgggtcgacccacgcgtnccggggaaccccatggacttttaactgtcaagcccattcggtggaggccccgcaggaagggtgaagagaaagaatcagaagaaggcaagcggtggcggcgatgctggcgatgaggatgaggagtgaggatggacaagtagcgttacccaatataataatattatctagttttcttgaacttgttcgaatgatgagtgcttagctgtgtgatctgacgcagagttccctgtgctgactctgtgtcatggatggtccattttatcttgtggtattatcagcctttacataactgctatgtttggatatgttcaattctgttgcaattttatgtggttgttttttgcgttttgttgctattaagctgttctttcaatcggctaatggtttgcttaaatgttatttaaaaaaaaaaaaaaaaagggcggccgctctagaggatccaagc

SEQ ID NO: 84095 - DNA, 528 bp, Zea mays
  unsure (1)..(528): unsure at all n locations
ggagagaggcttttgtcncatgcaacgaanattanagncatcgctcgtaccggtccggaattcccgggtcgacccacgcgtccgactcagtgtaccatcgctcatgccttgttagaaaaccaaataccccaactcggacggatacttggacaaattcgacagccagtaccacttctcttgccagttcacagctgaccttattgccatgaaccacaccgatttcatcatcaccagcacattccaagaaatcgcgggaagcaaggacaccgtggggcagtacgagtcccacatcgcgttcactcttcctgggctctaccgtgtcgtccatggcatcgatgttttcgatcccaagttcaacattgtctcccctggagcagacatgagtgtttactacccgtatacggaaaccgacaagagactcactgccttccatcctgaaatcgaggagctcatctacagcgacgtcgagaactccgagcacaagttcgtgctgaaggacaagaagaagccgatcatcttctcgatggn

SEQ ID NO: 84096 - DNA, 519 bp, Zea mays
  unsure (1)..(519): unsure at all n locations
gaggagggctcngtgatgctcagctagtacgccactgctgtaccggtccggaattcccgggtcgacccacgcgtccggggtcttcagaccattagctttatctactccagagcgcagaagaacccgatcgacaccatgagggtgttgctcgttgccctcgctctcctggctctcgctgcgagcgccacctccacgcatacaagcggcagctgcggctgccagccaccgccgccggttcatctaccgccgccggtgcatctgccacctccggttcacctgccacctcctgtgcatctcccaccgccggtccacctgccgccgccggtccacctgccaccgccggtccatgtgccgccgccggttcatctgccgccgccaccatgccactaccctactcaaccgccccggcctcagcctcatccccagccacacccatgcccgtgccaacagccgcatccaagcccgtgccagctgcagggaacctgcggcgttggcagcaccccgatcctgggccagtgc

SEQ ID NO: 84097 - DNA, 518 bp, Zea mays
  unsure (1)..(518): unsure at all n locations
ngtgagaggcttcttagcccccactccnccgcaggacgtccctgtccggaattcccggtccgacccacgcgtccggggtccggaagcgccggcagccagcaccagcgagcgtcgtcgtccctgctgatcaccgggggcgttcgagggaaagcgaagctgacaccgcccctcccgcgcgggttctacggcaacggcttcgtcttcgtggaggcggagctgtgcggggcgacgcgctcgctcggtggcacggtcgagctcgtgcagaaggccaagcgcggcatgacggaggagtacgtgaagtcgatggtggatctgttctcgctcggcggggcgccgccgtacgcgcaggggtggacgttcgtggtgtccgacataacgcggatcggggaggacgagttggacctggggtgggcggagcgggtggccggcggcgtgcccattgtcggaaacgacgacgcgaccaagatggttagctaccagatgaggtgcaagaacgcatacgatgaggactgcgtggt

SEQ ID NO: 84098 - DNA, 519 bp, Zea mays
  unsure (1)..(519): unsure at all n locations
tggagggtgttctgtgcactgaaaggtagtacggctctaccggtccggaattcccgggtcgacccacgcgtccgaggtggttgaggttaatgttaaagtggaaagtgcaggcacacataatgtgcataatagtgctttctatgctgaagagaagttgctgaaatctgagttgcaagcaatgcgtgattgcgacccttcatctgcccgccactggattgtacgcaacacacgaactgtgaatcggacggggcagccaactggctacaggctcgtacctggttcgaactgcctgcctttggctctgcctgaggcgaaatttctgaggagggctgggttcttgaagcacaacctctgggtcactcaatacaagcgtggcgagatgttccctggaggggagtttcccaaccagaatcctcgcatccatgagggtctgccaacatgggtcaagaatgataggcctctggaggaaaccgacattgttctctggtacgtgttcgggctcacccatatncncaggct

SEQ ID NO: 84099 - DNA, 520 bp, Zea mays
  unsure (1)..(520): unsure at all n locations
aggagaggtttcgtacccagcttagncgcatgactgtaccggtctcggaattcccgggtcgacccacgcgtccgctgttattgtgaggcagcgcaagccatggcgccgaaaggatggtgtctacatgtactgggaagacaatgctggagtgattgtgaacccaaagggagagatgaaaggttctgccatcactggacccatcggaaaggagtgcgcggatctctggcccaggattgctagcgcggcaaatgcgattgtctaaaggaagcagtttgtcaaagttccatttaaaatggggacttgagaagggagttcttagttaggcgagctttcgattgccctgaatatgtttccccggctaatgcttgtgctgctggaccgtttcctgatagctttgctttgatgacatcctccccgttatcgataaagttgcgtagcctgacattttgcagagtttaagtaggctggttttggtgggagaaattngagtgatccatggtgacgaatttctcccacatgg

SEQ ID NO: 84100 - DNA, 520 bp, Zea mays
agaggagggtgtctgtccctagccagagtgcatagctcgtaccggtccggaattcccgggtcgacccacgcgtccgcggacgcgtgggtcgcccacgcgtccgcggacgcgtgggcggcggcggcgatggggggcgaccaggagacggagaagaagaagaccccggtggcactaatgcccatcgcgaagcccctcgcaggaaagaagctctgcaagcggaccctcaagctcgtgcgacgagcctctgaggccaagtgcctcaagcgcggagtcaaagaggtagtcaagagcattcgccgcgggaacaaagggttgtgtgtgattgctggaaatatttctcctattgatgtgattacacacgttccaatactatgtgaggaatctaatgttccttacatatatgttccatcaaaagaggatcttgcgaccgcgggaaccactaagaggccaacttgttgcgtcctggttctgaccaaaccaaacaaggtggagctcagtgacgaggtgaaagataaactga

SEQ ID NO: 84101 - DNA, 518 bp, Zea mays
ggaggtaagtgtgtctgtttatgaggaggaagtatgctctacctgtccggaattcccgggtcgacccacgcctccggggtggatgtgacaagcaaggcttcccaatgaagcagggagttttgacttctggtcgggttcgtcttctgctccataggggcactccctgcttccgtggttatggcaggcgtaatggtgagcgcaggaggaagtctgtccgtggttgcatcgtgagccaagacctatctgttatcaacttggtgattgtgaagaagggtgagaatgatctgcctggtctgactgacactgagaagccaaggatgaggggtcccaagagggcctccaagatcagaaagctgttcaaccttaacaaggatgatgatgtacgcaagtacgtgaacacataccgtacgacattcactaccaagaacggcatgaaggtcagcaaggcacctaagatccaacggcttgtgacacccttgacccttcagaggaagcgtgctataatcgctgacaagaaa

SEQ ID NO: 84102 - DNA, 513 bp, Zea mays
  unsure (1)..(513): unsure at all n locations
tgtgaagtgtgtcntgtcctccactttgcagtacgctctactgtccggattcccggtcgacccacgcgtccgcccacgcgtccgcccacgcgtccgcgcaaattgcaccaagaaatccatcgagaggccggcggcaggggaattaatggcgtcgtcgtctagcagcagccaccgccgcctcatcctcgcagccgccgtcctgctctccgtgctcgcggctgccagcgccagcgccgggacctcctgcgtgccggggtgggccatcccgcacaacccgctcccgagctgccgctggtacgtgaccagccggacctgcggcatcgggccgcgcctcccgtggccggagctgaagaggagatgctgccgggagctggcggacatcccggcgtactgccggtgcacggcgctgagcatcctcatggacggcgcgatcccgccgggcccggacgcgcagctggagggccgcctagaggacctgccgggctgcccgcgggaggtgcagaggggattctt

SEQ ID NO: 84103 - DNA, 516 bp, Zea mays
agggagggctttgtgttgaaagaagattattgcacgctctaccggtccggaattcccgggtcgacccacgcgtccgcccacgcgtccgctactatactatactctaggaagcaaggacaccaccgccatggcaggcaagatgcttgcattgttcgctctcctagctctttgtgcaagcgccactagtgcgacgcatattccagggcacttgccaccagtcatgccattgggtaccatgaacccatgcatgcagtactgcatgatgcaacaggggcttgccagcttgatggcgtgtccgtccctgatgctgcagcaactgttggccttaccgcttcagacgatgccagtgatgatgccacagatgatgacgcctaacatgatgtcaccattgatgatgccgagcatgatgtcaccaatggtcttgccgagcatgatgtcgcaaatgatgatgccacaatgtcactgcgacgccgtctcgcagattatgctgcaacagcagttaccattcatgttcaa

SEQ ID NO: 84104 - DNA, 529 bp, Zea mays
  unsure (1)..(529): unsure at all n locations
ggaggggagaggcgttcnngtgtatgacgtaaagagtgtattagcactgctcgtaccggtccggaattcccgggtcgacccacgcgtccgcccacgcgtccgcggacgcgtggggtcaacactgactgctatgataaatgatgaggctgcaatatctgaagtgattgagactgtcaagcagcaagttaaggatgctaaatttcctgatttagaggttattcgcatgttgtgggatgtgctcatggaggctgttcagtggtctgggaagaaccagcagcaaaattccaatgcagcacttaggcaggtgaaagcttggactgagcttttgaatgctttttgcacgagtggcagactcgaactggaacttatacacaaagttcagacacagtgctatgaggatgctaagctgatgaagctgtttccggaaatcataagaacactgtatgaccaagatgtcctagctgaagatactatagtcctttggttccgtaaaggttcaaacccgaagggcaggcaatcttttgtgaaa

SEQ ID NO: 84105 - DNA, 533 bp, Zea mays
  unsure (1)..(533): unsure at all n locations
ggttnttttagaggaagggtgtgtcatacttactgaacatagtacgctctaccggtccggaattcccgggtcgacccacgcgtccgcgctcgctgtgggcaatgcacctacatacctgcaacaacaattgttgcaacagattgtgccagctctgactcaactagctgtggcaaaccctgttgcctacttgcaacaatttcttccattcaaccaactgtctacactgaaccctgctgcttatttgcagcaacaacaactactaccattcagccagctagctactgcctactctcagcagcaacaatttcttccatttaaccaattcgccgcactgaacccctctgcttatttccagcagcaaatactactaccatttggccagctagctacaacaagccccgcttccttcttgacacaacaacaattgcttccgttctaccagcagtttgtggctaaccncgcaacccttttacaactgcaacagttgctgccctttgtccaacttgctttgacaaacccagcagccttctacc

SEQ ID NO: 84106 - DNA, 521 bp, Zea mays
gggagagtgttctgtgcacgaattatagcaagctctaccggtccggaattcccgggtcgacccacgcgtccgctcctctctcgcattccgaaccttttgagcctttaattcatccccttgaacttcaaacgggaccaccaccaatcaggcggccttggcccccaccgcaccaggaaccggcgggaaggcgaaaaaagggcgcgggcgggcgcaagggccgcgggccgaggaagaaagtcgtgacgaggtccgtcaaagccgggctgcagttccccgtcggccgcatcgggcggtatctgaagaagggccggtacgcgcaacgcgtccgcacgggcgcccccgtctacctggcgcgcgtcctcgagtacctggcccgcgaggtgctggagcctggccgcaacgctgccaaggacaacaagaagacccgcatcatcccgcgccacgtgctcctggccatccgcaacgacgaggagctcggcaagctgctgtccggcgtcaccatcgcccacggcggcgtcctc

SEQ ID NO: 84107 - DNA, 516 bp, Zea mays
  unsure (1)..(516): unsure at all n locations
gagtgatgtgtctttngttccctcatcgcttactacgctatactgtccggattcccggtcgacccacgcgtccgcccacgcgtccgaggaaaaatatccccaaaccctagctcccgatctcgatggcgaacgctcgcgtcttcttcgacatgaccgtcggcggcgccccggcgggccggatcgtgatggagctgtatgccaacgaggtgcccaagaccgcggagaacttccgcgcgctgtgcacgggcgagaagggcgtgggcaagtccgggaagccgctccactacaagggctccaccttccaccgcgtcatccccgagttcatgtgccagggcggcgacttcacccgcggcaacggcaccggcggcgagtccatctacggcgagaagttccccgacgagaagttcgtgcgcaagcacaccgtccccggtgtgctctccatggccaacgccgggcccaacaccaacggctcctagttctgcatctgcaccgtctcgacctcttggctcgacggcg

SEQ ID NO: 84108 - DNA, 524 bp, Zea mays
  unsure (1)..(524): unsure at all n locations
tgagaagtgcctctgtccatgctcagctcagttagnactgccgtaccggtccggaattcccgggtcgacccacgcgtccgcccacgcgtccgggagagcaccctccacctggtgctccgtctcaggggtggcatgcagatctttgtgaagacactcactggcaagacaatcacccttgaggtggagtcttcggataccattgacaatgtcaaggccaagatccaggacaaggagggcatcccaccggaccagcagcgcctcatcttcgccggcaagcagctggaggatggccgcaccctggcggattacaacatccagaaggagagcactctccacctggtgctccgtctcaggggtggcatgcagatttttgtgaagacattgactggcaagactatcaccttggaggtggagagctctgacaccattgacaatgtgaaggccaagatccaggacaaggagggcattcccccagaccaacagcgtctgatctttgcgggcaagcagctggaggatggccgccn

SEQ ID NO: 84109 - DNA, 526 bp, Zea mays
  unsure (1)..(526): unsure at all n locations
agagtttgagaggtgtctgtgcctacgcatagnagtcaggnctctacnggtccggaattcccgggtcgacccacgcgtccgcggacgcgtggggaagaacccgatcgacaccatgagggtgttgctcgttgccctcgctgtccgggctctcgctgcgagcgccacctccacgcatacaagcggcagctgcggctgccagccaccgccgccggttcatctaccgccgccggtgcatctgccacctccggttcacctgccacctcctgtgcatctcccaccgccggtccacctgccgccgccggtccacctgccaccgccggtccatgtgccgccgccggttcatctgccgccgccaccatgccactaccctactcaaccgccccggcctcagcctcatccccagccacacccatgcccgtgccaacagccgcatccaagcccgtgccagctgcagggaacctgcggcgttggcagcaccccgatcctgggccagtgcgtcgagttcctgaagccataatgccacccg

SEQ ID NO: 84110 - DNA, 536 bp, Zea mays
gggttttggaggagagaggcctctgtgtatcgagcaaggaagttatgcatctaccggtccggaattcccggctcgacccacgcgtccgcaaggttcttccttggggagacgtttccaattccagtatatctttctcttcttccaatgcattggtggttgtgctctagctgctgtcacagagctgaactttaatatggttggatttatgggtgccatgatatccaaccttgcatttgttttccgcaacatcttctcgaagaggggcatgaaggggaagtccgtcagtggcatgaattactacgcttgcctgtcaattatgtccctggtcatactgactccatttgctatagctatggaaggccctcaaatgtgggctgctggttggcaaaaggctcttgcagaagttggacccaatgttgtctggtggattgctgcacagagcgtgttctaccacttatataaccaggtgtcctacatgtctctcgatcagatttctccattgacattcagcattggcaatacaatgaagcgtatat

SEQ ID NO: 84111 - DNA, 522 bp, Zea mays
  unsure (1)..(522): unsure at all n locations
gaggggaagcgtgttcngttatagtgagggatgatatgcatctctcggtccggaattcccgggtcgacccacgcgtccggtttatcgtggcctgtatttcggactttacgattctatcaagccagttgtcctcactggcagcctccaggacaacttctttgccagttttgctctgggttggctgatcaccaacggtgctggtcttgcatcttaccccattgatactgtccgcagaaggatgatgatgacttctggtgaggctgtcaagtacaagagctcattggacgcattccagcagatccttaagaaggaaggccccaagtccctgttcaagggtgctggtgctaacattcttcgtgccattgctggcgctggtgtgctttctggctacgaccagctccagatcctcttcttcggaaagaagtacggctccggcggtgcttaaatggagaaaaatgatgacgaacaagagcagttcgctcccggtccagcccagtcaggatctggtcaagtttttgcctt

SEQ ID NO: 84112 - DNA, 522 bp, Zea mays
  unsure (1)..(522): unsure at all n locations
aggagaagggcgtctgtttatgggaaacactgtatgctctaccggtccggaattcccgggtcgacccacgcctcccgcttaagaaagaacttgaccccagcctggttgacctaagggtcctaaactccaactgggggaacaaggtgaacctgctatttatggagaggaccgttgatagccattgtcctgggatggtagtccgcatggctgaacgagcactctgccatcaataaactcattagcaaggtggtttggagagcctgtaagggctgctattctgcaaaccgaggcttttcttacaaatgcaaaaggatatccttgtttatcaaagcgccatcagagtctgctaactggattttttaaacattctgttcatgtttgttatttttattgcttttatgcttacgcttagtcaacctttgtattttcatatcttcagagtcaatgatccaatgttgtatgcttcttttaacttgtttttttaatatatattcaattttgtgcttcaattgaggtaattgn

SEQ ID NO: 84113 - DNA, 516 bp, Zea mays
  unsure (1)..(516): unsure at all n locations
agggatgggtgtgtnttcctagttcgagagtacgctatancggtccggaattcccgggtcgacccacgcgtccgcggacgcgtgggttttagcaaccggttcctgaagtctggtgttcaaaaggctggtaggaaaacgagatacgagagagctggaaatgagcaatttgtgacagagacaagcaaatgggtcttccatgagagggggcaccttaaggctgttaatgttaagcaccacaaggttggggagaccaatgaaccaggcatgtaccgcattaacgatgacctggaatactctgttgagatctatgaatggtctggaacaagctggaagccatatgttgctgatgatgtgcaactccagtttttcatgatgagtccttatgttctgaaaactatgtcgaatgacaacaagggtttatactcaacatccttcaaagttcctgatgtctacggagttttccagttcaaagttgagtaccagaggctgggatatactggtttggcttttacaaan

SEQ ID NO: 84114 - DNA, 529 bp, Zea mays
  unsure (1)..(529): unsure at all n locations
ngagcttgagagtcctgtgtagcctccagtctctcagtacgncgtactggtccggaattcccgggtcgacccacgcgtccggcacgagctgcgggggaagagcaaggcggatctgcaagcgcagcttaaggagtttaaggcggggctctccctgctacgcgtaaccaaggtcaccggcggggctcccaacaagctctccaagatcaaggttgtgcgcacctccatcgcgcgcgtgctgaccgtcatctcgcagaagcagaagtcggcgctgcgtgaggcgtacaagaagaagaagctgctcccgctcgacctccgccccaagaagacccgcgccatccgcaagcgcctcaccaagcaccagctcttcttgaagaccgagaaggaaaagaagcgcgagaaagtatttcccatgaagaagtacgctatcaaggcctagatcagtgaaagaacatttatcctgtcaaaagttgctcataagtttcatgaattcgccaccaatctatgtgcattcacctgctataggcaaaaa

SEQ ID NO: 84115 - DNA, 526 bp, Zea mays
  unsure (1)..(526): unsure at all n locations
taggaatggtnntttctgatgccttcagcctctagctacgctatgacgtaccggactcgccatgtctccgacccacgcgtccgccgacgcgtccgcggacgcgtggccgtacgcttgcgtggccgccgcattcgccctagggaggtggagttcttaagctcgaactctttttacctgaggaatatccaatggctgccccaaaggttaggtttctgacaaagatttatcatcccaacatcgacaagcttggtaggatatgcctcgacattctcaaggacaaatggagcccagcacttcagattcgaacagttcttttgagtatacaggctctactgagtgcgccaaatccagacgaccctctttcggataacattgcaaagcactggaaagccaatgaagtagaagctgtcgaaacagctaaggagtggactcgcctgtatgcgagcggtgcatgagaacgcagtgatgttcttgatgtaataacccatcatacttcagtcctcatctattgccatttgcttgataa

SEQ ID NO: 84116 - DNA, 528 bp, Zea mays
  unsure (1)..(528): unsure at all n locations
ngagttagagcggcctcngtcttacgaagggaagtatattgcatcgctctaccggtccggaattcccgggtcgacccacgcgtccggcagttggaagccaattctggcccggctgaagtttctgagttgactggcccggatgtgatggaagagaagtgcgcttctgctgccatttgttttgtatcattccttccagacatccttgattcaaaggcagaaggaagaaacaagtaccttgagctcctgctctctgtagctgagaagtttaaaaagagtccatacagttttgtctggacagctgctggcaagcaagctaatctcgagaaccaggttggtgtgggcggctacggctatcccgccatggtagctctcaacgtgaagaaaggtgcatacgctccactccgtagtgccttccagcgcgacgaaatcatcgagttcgtgaaggaggcaaggcgtggtggaaagggaaaccttcctctgaacgatgcacctacagtagtcgcgtccgaaccgtgggacggcaaaaat

SEQ ID NO: 84117 - DNA, 524 bp, Zea mays
  unsure (1)..(524): unsure at all n locations
ggggantagagggtttgtccatgtttagcnagttagcactgctgtaccggtccggaattcccgggtcgacccacgcgtccgcccacgcgtccgcccacgcgtccgtttgagcattcagaaacacaccaagcgaagcgcagtagcaacaacctaacaacaatggctaccaagatattatccctccttgcgcttcttgcgctttttgcgagcgcaacaaatgcgtccattattccacaatgctcacttgctcctagttccattattccacagttcctcccaccagttacttcaatggccttcgaacacccagctgtgcaagcctataggctacaacaagcgattgcggcgagcgtcttacaacaaccaattgcccaattgcaacaacaatccttggcacatctaacaatacaaaccatcgcaacgcaacagcaacaacagttcctaccagcactgagccacctagccatggtgaaccctgtcgcctacttgcaacagcagctgcttgcatccaacccacttgctct

SEQ ID NO: 84118 - DNA, 523 bp, Zea mays
  unsure (1)..(523): unsure at all n locations
gagaaagggtnattnatgtagtagtgtatgtaatgctatgctcgtaccggtccggaattcccgggtcgacccacgcgtccgcccacgcgtccgcccacgcgtccgcccacgcgtccggaccaactagcaacatagaaagcacaatagtgtaccaacaatggcagccaaaatattttgcttccttatgctccttggtctttctgcaagtgctgctaccgcaaccattttcccacaatgctcacaagctcctatagcttcctttcttcccccatacctctcaccagcggtgtcttcagtatgtgaaaacccaattcttcaaccctacaggatccaacaggcaatcgcagcaggcatcttacctttatcacccttgttcctccaacaaccgtcagccctattacagcagttacctttggtgcatttgttggcacaaaacatcaaggcacaacaactacaacaacttgtgctaggaaaccttgctgcctactctcagcaacagcagtttcttccattcaaccaactt

SEQ ID NO: 84119 - DNA, 546 bp, Zea mays
  unsure (1)..(546): unsure at all n locations
gtnagagaaggagcgtgnngttcnnangcatggatagtagtgttacagctatgcctgtactcgatccggaattcccgacccaggcgtccgcacccaactcgccgccgccgctgccaacgccgcctgctgccgcagccgccatgggggcgtacaagtatgtgtcggaactatggaggaggaagcagtcggacgtgatgcgcttcgtgcagcgcgtgcgctgctgggagtacaggcagcagccgtccatcgtccgcctcaccaggcccacccgccccgacaaggcccgtcgtctcggctacaaggccaagcagggatatgttgtctaccgtgtccgtgtgaagcgtggtggcaggaagaggcctgtgcccaagggtattgtctatggcaagcccaagcaccagggtatcacccaactcaagttccagaggaacaagaggtctgtcgctgaggagagagctggacgtaagcttggtggactgagggttcttaactcctactgggtgaatgaggatagtacctacaagtatttngagatcatccttgtgg

SEQ ID NO: 84120 - DNA, 540 bp, Zea mays
  unsure (1)..(540): unsure at all n locations
tatttttagatgtgttgtggagagtgtgttgatcttatgcgtacgcatgncgtaccggttcggaattcccgggtcgacccacgcgtccgcccacgcgtccgggttggcttctccttcccctccggttcgggttcgggttcgtgaggttctccggggttcgggttcgtgggtgagcggatcgagatggcggcgtcggatgttgagtaccgctgcttcgtcggcggcctcgcctgggccacggacgaccactccctccacaacgccttcagcacctacggcgaggtcctcgagtccaagatcatcctcgatcgggagacgcagaggtcccgcggcttcggcttcgtcaccttctccacggaggaggcgatgcggaacgccatcgagggcatgaacggcaaggagctggacggccgcaacatcaccgtcaacgaggcccagtcccgctgcggccgtggaggctgctgctgtgggtacggtggtggccgtagaggcggcgggtaccgcggtggccggcgccgtgattggcgtgggcggttctgt

SEQ ID NO: 84121 - DNA, 557 bp, Zea mays
  unsure (1)..(557): unsure at all n locations
tatattagtgatgatgattgttgattnattggagaagtgtttcntgtctacgtacgtaatagaatngnctatctcgtntcggaattcccgggtcgacccacgcgtccgcccacgcgtccgagaacgtttccgcacgattactactgcttactacaggggagcaatgggcatcttgcttgtgtacgatgtcacagacgagtcatctttcaataacataagaaattggatcagaaacattgagcaacatgcttcggataacgtgaacaaaattctggtggggaataaagctgatatggatgaaagcaaacgggctgagcccacttcgaaggggcaagctctcgctgacgaatacgggataaagttttttgaaacgagtgcaaaaacaaacctgaatgtcgagcaggttttcttttccatagcaagggacatcaaacagagactgtcggagaccgattccaagcctgaagatcgaactatcaagatcaaggctgaaggggaagctgaggccacggctgcggctcaaaaatcaacttgctgtggcttctgaacacctagat

SEQ ID NO: 84122 - DNA, 542 bp, Zea mays
  unsure (1)..(542): unsure at all n locations
agatatataataggagatagaggctcgtgcgttgntacgtatgctacgctactacagttccggttcggaattcccgggtcgacccacgcgtccgagctcctatagcttcctttcttcccccatacctctcaccagcggtgtcttcagtatgggaaaacccaattcttcaaccctacaggatccaacaggcaatcgcagcaggcatcttacctttatcacccttgttcctccaacaaccgtcagccctattacagcagttacctttggtgcatttgttggcacaaaacatcaaggcacaacaactacaacaacttgtgctaggaaaccttgctgcctactctcagcaacagcagtttcttccattcaaccaactggctgcattgaactctgctgcttatttgcaacaacaactaccattcagtcagctagctgctgcctacccccagcaatttcttccattcaaccaactggcagcattgaactctgctgcttatttacaacagcatcaactaccaccattcaaccagctagctgaagtgaag

SEQ ID NO: 84123 - DNA, 506 bp, Zea mays
tagaaaatgtgttttgggccagctcgacgcattgatgtaccggtccggaattcccggctcgacccacgcgtccggccgggccggatccagcgccggcccctacctcgcgtctccgctccaccatcgcgggcgacgacgcgccgcgtaggaccaagggccgcggcttccgcgaggaccccaactcctctgcgccccgcgattcgcgctttggcgcggggggacgcgccgacctcgactcgctcggcggcccgggacccatccaatcaattgaaggatggattgtgttggtcactggagttcatgaagaagctcaagaagatgacctccaaaatgctttccaagaatttgggcaggtcaaaaacctgcatttgaatttggaccgtcgtaccggatttgtcaaggggtacgctttgattgaatatgaaaaagttgaagaaactcatgctgcaataaaagaactggatggagctgagctttatgaccaaaaaaggagtggtggatggccc

SEQ ID NO: 84124 - DNA, 560 bp, Zea mays
  unsure (1)..(560): unsure at all n locations
ataatgatatatgtnattgagtattagatggctcgaagttttctgttatcgnttcgttancagtattantggtttcgaattcccgggtcgacccacgcgtacgcaactactaccattcagccagctagctggtgtgagccctgctaccttcttgacacaagcacggttgttgccgttctaccagcacgcttcgcctaacgctggcaccctcttacaactgcaacaattgctgccattcaaccaacttgctttgacaaacccagcagcattctaccaacaacccatcattggtggtgccctcatttagatttcttagtaggtatatgtcaataatataagtttttagcctatgtttggggctttccagaaatatgaaaggtccatattaagattctttgtgctaaagtnatttatgattttaattttatattatcttttagtgcttataatttttcgaaattattttttttatgattatgttttttgtattatataattttttattgtatttttatgttagttcttatgtattagatattagtgttgatattttaatattg

SEQ ID NO: 84125 - DNA, 448 bp, Zea mays
taggttttgaggagggtggttaatgagaagatgtatccggtccggattcccgggtcgacccagcgtccgggaccgtggcgaccgtggcgacctggttcagaacacacctacgggccactacacgactacacaaggctaccaaatttatccttttgcgctcttgcccttttggagcgcacaagcgtcattattccccaatgctcacttgctctaggccattattcacagtctccctcagtcttcaaggcttcgaacacccactggcaagcctacaggctacaacagcgcttgcggcagcgtttacaacaaccaattgccaattcacaacaatctggacatctaaccatacaaaccatcgacgcacagcacacaatttctaccagcctaaccaactagctgggtgaccctgtcgctattgcacagcattgttgcatcaaccaatgcctgg

SEQ ID NO: 84126 - DNA, 531 bp, Zea mays
tatataatatagtagtgatgttatggaggggtggtcctatggggattgcatcgcgttcgttccgattcccggtcgaccccgcgtccgcggcgcgtgggcggacgcgtggggttctagatcgagcggccggatctgcctcgtccgctcggtcgtctactgggccgcgcagctgctcggcgccgtcgccgccgcgctcgtgctcaggctcgccaccggagggatgcatctgccggagtacgcgctggcggtgggcgtgagcggatggaacgcggcggtgctggaggcggccatggcgttcgggctcatgtacgcctactttgcgacggtgatggacaaagcgcggagggtccgcgccggcgccggagcgctggcggcgccgctcgccgtgaggcttctggcgggggccaacgtgctggcctgcggcgcgctggagggcgccgtgatgaatccggcgcgcgcgttcgggcccgccgtcgtgggctcccgtcgctggaacaccaatgggtgtactgggtggggcccatgggccag

SEQ ID NO: 84127 - DNA, 546 bp, Zea mays
  unsure (1)..(546): unsure at all n locations
aatgatttatatgatgtgcgtatatgagagagcgttagtgatgataagaacgtacagcatgntgtaccggtccggaattcccgggtcgacccacgcgtccgtagcaacatagaaagcacaatagtgtaccaacaatggcagctaaaatattttggctcggtatgctccttggtctttctgcaagtgctgctacggcgaccattttcccacaatgctcacaagctcctatagcttcccttcttcccccgtacctctcaccaacggtgtcttcggtatgtgaaaacccaattcttcaaccctacaggatccaacaggcaatcgcagctggcatcttacctttatcacccttgttccttcaacaatcatcagccctattacagcaattaccttnggtgcatttatgggcacaaaacatcatggcacaacatctacaacaacttgtgctatgcaaccttgctgcctactctcttcaacaggcagttcttccattcaaccaactagctgcatggaactctgcttcttatttgcaacatctataactacctg

SEQ ID NO: 84128 - DNA, 546 bp, Zea mays
  unsure (1)..(546): unsure at all n locations
agatgattattnatcatgatgagatgctagggttgctgtttcagcgtcgctacagcactgccggtaccggtccggaattcccgggtcgacccacgcgtccgcccacgcgtccgcggacgcgtgggtttgcatttaaggactacttcaagaggtggttgagcttcaagaaggatagggatggctattggaagtggtttgctggcaacctggcctctggtggtgctgctggtgcttcctctttgttttttgtgtactccctggactacgcgagaacaaggttggctaatgacgctaaggctgccaagggatgaggtgaaaggcagttcaatgggcttggcgatgtctaccgcaagacactcaagtctgatggtattgctgggctataccgtggatttaacatctgctgtgttgaaatcattgattatcgtggtcagtactttgggctctatgattccatcaagccagttgtacttactggcaacctccaggacaatttctttgccagtttcgctctgggttggctgatcactaatggtgctggtcttg

SEQ ID NO: 84129 - DNA, 509 bp, Zea mays
  unsure (1)..(509): unsure at all n locations
gagtaaaagtggatcggtggccctccnaaccgacncatcgnatagctgttcggaattcccggctcgacccacgcgtccgcgcacgcgtccggcaacatagaaagcacaatattgtaccaacaatggcagccaaaatgtttggcctccttatgctccttggtctttctgcaagtgctgctaccgcgaccattttcccgcaatgctcacaagctcctatagcttcccttcttcccccgtacctctcaccagcggtgtcttcggtatgtgaaaacccaattcttcaaccctataggatccaacaggcaatcgcagctggcatcttacctttatcacccttgttcctccaacaatcatcagccctattacagcagttacctttggtgcatttattggcacaaaacatcagggcacaacaactacaacaacttgtgctagcaaaccttgctgcctactctcagcaacagcagtttcttccattcaaccatgnaactgcattgaactctgcttgg

SEQ ID NO: 84130 - DNA, 506 bp, Zea mays
  unsure (1)..(506): unsure at all n locations
naggttaaagtgtgttgggctcccagcctcnctacagctcatctgttcggaattcccgggtcgacccacgcgtccggtccgcagaaggatgatgatgacttctggtgaggctgtcaagtacaagagctcattgtacgcgattccagcagatccttaagaaggaaggccccaagtccctgttcaagggtgctggtgctaacattcttcgtgccattgctggcgctggtgtgctttctggctacgaccagctccagatcctcttcttcggaaagaagtacggctccggcggtgcttaaatggagaaaaatgatgacgaacaagagcagttcgctcccggtccagcccagtcaggatctggtcaagtttttgcctttcatatcgaagaaattaataatttatgtaggagaatttttccaacattcgttttgggcggagacattgatctcaaaacactcgtaactgtcctactaggtggtggcatgggtccccaaaacatggtcataggn

SEQ ID NO: 84131 - DNA, 499 bp, Zea mays
  unsure (1)..(499): unsure at all n locations
gagaagagatgcgtctaggcttccagcccccatcgnataacgtccggaattccggtcgacccacgcgtccgagctttgtgcaagcgccactagtgctacgcatattccaggcacttgccaccaggattgcattgtgtaccatgaacccatgcatgcagtactgcatgatgcaacaggggcttgccagcttgatggcgtgtccgtccctgatgctgcagcaactgttggccttaccgcttcagacgatgccagtgatgatgccacagatgatgacgcctaacatgatgtcaccattgatgatgccgagcatgatgtcaccaatggtcttgccgagcatgatgtcgcaaatgatgatgccacaatgtcactgcgacgccgtctcgcagattatgctgcaacagcagttaccattcatgttcaacccaatggccatgacgattccacccatgttcttacagcaacccttttgttgaccacgcatttattataggaaaatttg

SEQ ID NO: 84132 - DNA, 514 bp, Zea mays
  unsure (1)..(514): unsure at all n locations
nagtttnaaagataggtcttgtccctaccttgatagtcatgctctaccggtccggaattcccgggtcgacccacgcgtccgcggacgcgtgggttgccgtctcccttttgcgtgagcaaagaaagagagcgagaagagcagtcgccatgtctggcatcatccacaagatcgaggagaagctccacatggggggcgaccacaagaataaggaggaggagcaccacaagaaggccgaggagcaccacaagaaggaggagggggagcaccacaagaaggacggcggggagcacaaggaaggcatcgtggagaagatcaaggacaagatcaccggcgagcacggcgacaagtccggcgaccacaaggaaaagaaggacaagaaaaagaagaagcacggcgagggccacgaccacgacggcggccacagtagcagcagcagcgacagcgactgagatctggtgtcgcagcacaggtgcaacacatgtatgcttgnnnnntggaggattcattccagctg

SEQ ID NO: 84133 - DNA, 543 bp, Zea mays
  unsure (1)..(543): unsure at all n locations
tagatgatatatgnatgtagatgagggagttaattttgatgttgattgtcatgctcataccggtccggaattcccgggtcgacccacgcgtccgcggacgcgtgggcggacgcgtgggctttctccctactctcagcaacaacaatttctggcattcaaccaactgtctacactgaaccctgctgcttatttgcagcaacaactattaccattcagccagctagctactgcctactctcagcaacaacaacttcttccatttaaccaattggccgcactgaaccccgctgcttatttgcagcagcaaatactactaccatttagccagctagctgcagcaaaccgtgcttccttcttgacacagcaacagttgctgcctttctaccagcagtttgcggctaaccccgcaaccctcttacaactacaacaattgttgccctttgtccaacttgctttgacagacccagcggccttctaccaacaacacatcattggtggtgccctcttttagattgcttattagttggaattcaataatatagt

SEQ ID NO: 84134 - DNA, 558 bp, Zea mays
  unsure (1)..(558): unsure at all n locations
aatataatgatatgatatagatagatttatatggtggaagatgtatngtcttatgtatagtactgcatngncgttncggttcggaattcccgggtcgacccacgcgtccgcccacgcgtccggagccacctagccatggtgaaccctgccgcctacttgcaacagcaggtgcttgcatcaaacccacttgctctggcaaacgtagttgcaaaccagccacaacaacagctgcaacagtttctgccagcgctcagtcaactagccatggtgaaccctgccgcctacctacaacagcaacaactgctttcatctagcccgctcgctgtggccaatgcacctacatacctgcaacaacaattgttgcaacagattgtaccagctctgactcagctagttgtggcaaaccctgctgcctacttgcaacagctgcttccattcaaccaactgactatgtcgaactctgctgcgtacctacaacagcgacaacagttacttaatccactagcagtggctaacccattggtcgctgccttcctacagcagcaacaattggttcca

SEQ ID NO: 84135 - DNA, 534 bp, Zea mays
atagattgtgattcaatgagaggggtcagtttagtagtgattgcacgctcgtccggtccggaattcccgggtcgacccacgcgtccgcaaatttactgtattattatggcatgtgtaatgtcgtgaaggatattttgttgcaatgctactttagaaagggagtacgtggaggctcagctgaacctgaatcagatattgtgcaggcttgcagaagctttctagatcaacagcagtgcattaatgtgtggcgatttatctaaactatcaacgagagaaaagacttgacagagaacctgaagcagctacagtgcaggacactaatttttgttggtgagaattcccagttccatgctgaagttgtgcacatgactgcaaagcttgataggcgatatagcgctcttgtggaggtacaagcttgtggctcggttgtgacagaaaagcaaccacacgcaatgctgataccaatggagtactttctcatgggatatggactgtataggccaagacagataaactatagccctcgtagccctt

SEQ ID NO: 84136 - DNA, 503 bp, Zea mays
  unsure (1)..(503): unsure at all n locations
gaggggagtagctggagctacgtccaaaagcttcagtactccggtccggaattcccgggtcgacccacgcgtccggccagttaacttccaattactggggtttccacgtttaaggttgctcctatgaaggctgcaagtaacttcaataagatccaatgtttctgctttgaggagcaaacacttcttcctggagaacagattgacatgccagtattcttctatatcgatcctgagtttgagacagaccccaaaatggacggngtgaacaatatcgttctttcgtatacattcttcaaggtgaacgatagttaggaaacgtgccaacagcattgttgtattaggaaaacaacacttgaacaatccatatgcagatatgctgcggaatagcatctcatgtaacaccaagagttttttttggtagttagctcacgttagtctgtggagaattttgcaaaaaaaaaaaaaaaaaaaaaaaaaactagaaaaaaagggcggccgctcta

SEQ ID NO: 84137 - DNA, 533 bp, Zea mays
  unsure (1)..(533): unsure at all n locations
atatgttttattatgtaaggggttgtctcatgatattgtatngccataccggtccggaattcccgggtcgacccacgcgtccgccgctcctccgcgagggtgtcgttgtcccgcaagaccctgtgttgttgtcatcaactgagagagaaacaactcgatcgatcgatcaagaagaccggcgaggctctagctccagaccgacaatgccgtacgcagccacaaggacgtcgccgcagcagcacagccgcgtggccagcaacgggagggccgtggcggcgtgcgcaggccacgcgggcgtgccggacgaggtggcgcggcaccacgaagcacgcggtggccgcggggcagtgctgctctgtgatggtgcagtccatcgcggcgccggcggacgcggtgtggtcgctggtgcgccgcttcgaccagccgcaggggtacaagcgcttcatcaggagctgccacctggtggacggcgacggcgtcgaggtggggtccgtgcgggagcttctgggcgtgttcgggcttgccggcctaaa

SEQ ID NO: 84138 - DNA, 469 bp, Zea mays
  unsure (1)..(469): unsure at all n locations
acagagtatactgtccggattcccggtcgaccacgcgtcggccacgcctcccaactgggggcccaagttctggtaactgatccaagggaacttgagaggatgcggtcagagagaatctgacataacaaaggagcgaattgagaaaattctcaaggctggagctaatgttgtgttgaccaccaagggaattgacgatatgtccttgaagtactttgttgaggttggtgcgattgcagtaaggcgtgtgcgcaaggaagatttgcgacatgttgccaaagccactggtgcaactatggtgtctacttttgcggacatggaaggtgaagaaacattcgattcatcattccttggtcatgctgatgaagttgttgaggaaagaattgctgacgatgatgttattctggtgaaaggcacaaagaacaccagcgcggtctctataatacttntnngcgcaaatgactacatgctt

SEQ ID NO: 84139 - DNA, 510 bp, Zea mays
  unsure (1)..(510): unsure at all n locations
naggtttaaatgaggtgtgagctacgaaaagtatgtaatgctcatcccgtccggaattcccgggtcgacccacgcgtnccgttcgactgctcatccttaccgacccaaggactgaccatcacccaattaaggagtctgggtctggggaacatccccaccattgccttctgtgatactgactctcccatgcggtatgtcgatatcggcatcccagcgaacaacaaggggaggaacagcattggatgcctgttctggcttttggccaggatggttctgcagatgaggggcactatcctccctgggcacaagtgggaggtcatggtggatttgttcttctacagggacccagaggaagcaaaggagcaggaggaggaagctgctgttgcccctgagtttgccgcaatcactgattaccaaggagctgatcagtggggtggtgaccagtggacctctgatgtgactgcgccgcctgttgctcctactgtgnctgattggggtgctgctccaact

SEQ ID NO: 84140 - DNA, 501 bp, Zea mays
  unsure (1)..(501): unsure at all n locations
taggtaaagtgtgtgtaggccctcacgcccttcagcgcatatcgtttcggaattcccggtcgacccacgcgtccggggagacgcagaggtcccgcggcttctgcttcgtcaccttctccacggaggaggcgaggcggaacgccatcgagggcatgaacggcaaggagctggacggccgcaacatcaccgtcaacgaggcccagtcccgcggcggccgtggaggcggcggcggtgggtacggtggtggccgtggaggcggcggctacggcggtggcgggcgccgtgatggcggtggcggctacggcggtggcggcggctacggtggcggcggcggctactgtggtggtggcggcggctacagcggtggcaaccgtggcggcggctactgcaactccgacgggaactggaggaactgatcggtggggcccgcgcggccaaattatcctgttcgctaccgtgatgtttaccctagtccaantnttgtattttcgttcgtgacgt

SEQ ID NO: 84141 - DNA, 501 bp, Zea mays
aagtaaaagtgtgttgggccgctacgccgcctcagctatcccgttcggaattcccgggtcgacccacgcgtccggcttgattgttccaggtattagcagtcgaccggttcctcggagcacgatgaagtttggtgcggcctacctgcttgctgtcctcgctgggaacgccagcccctccgctgacgatttgactgccattctggagtcagttggctgtgaagttgacaatgaaaagatggaactcctgctgtcccaactgagcggtaaggacatcaccgagctcattgccgcgggcagggagaagtttgcttcagtcccatgtggtggcggcggtgtcgctgttgcggcagctgcacctgctgctggcggagctgctcctgcagctgaagcaaagaaagaagagaaggtggaagagaaggaagaaagcgatgatgatatgggcttcagcctcttcgactaggctgcacagtcatcacagtattgttttgggcattgaaaccg

SEQ ID NO: 84142 - DNA, 529 bp, Zea mays
atatattattgattatgtttggggtatctggtcctacgcgtacgctatgctatccttcggattcccggtcgacccagcgttcgacacacctagcgaagcgcactagcaacgacctaacaacaatggcttccaagacattatccctccttgcgcttcttgccctttttgtgagtgcaacaaatgcgttcattattccacaatgctcacttgctccgagtgccattattccacagttcctccctccagttacttcaatgggcttcgaacacccagctgtgcaagcctataggctacaacaagcgcttgcggcgagcgtcttagaacaaccaattgcccaattacaacaacaatccttggcacatctaaccatacaaaccatcgcaacgcagcagcaacaagcactgagccacctagccgtggtgaaccctatcgcctacttgcaacaacagctgcttgcatccaacccacttgctttggcaaacgtagctgcataccaacaacaacaacagttgcaacagttctttccgct

SEQ ID NO: 84143 - DNA, 538 bp, Zea mays
  unsure (1)..(538): unsure at all n locations
gtgatatagttgattagatttaagggtgagtttagatagagaagtatgctatanctgtccggaattcccgggtcgacccacgcgtccgttgagcattcagaaacacaccaagctatacgcactaccaacgacctaacaacaatgggtaccaagatattagccctccttgcgcttcttgccctttttgtgagcgcaacaaatgcgttcattattccacaatgctcacttgctcctagtgccattattccacagttcctcccaccagttacttcaatgggcttcgaacacctagctgtgcaagccaacatgcaacaacaagcgcttgcggcgagcgtcttacaacaaccaattgcccaattgcaacaacaatccttgccacatctaacaatacaagccatcacaacgcatcagcaacaacagttcctaccagcactgagccacctagccatggtgaaccctgccggctacttgcaagagcagctgcttgcatccaacccacttgctctggcgaacgtaatttcaaaccatcaaccaccac

SEQ ID NO: 84144 - DNA, 551 bp, Zea mays
  unsure (1)..(551): unsure at all n locations
atatgatttgagattatgtggtagtactcatcttctcagctncattatgctattagcatntctgttccganttcgaattcccggctcgacccacgcgtgcgcccacgcgtccgcacaatgctcactttttccgagtgccattattccacaggtgctccgtgcagttacttcaatgggcttcgaacacccagctgtgcaagcctataggctacaacaagcgcttgcggcgagcgtcttagaacaaccaattgcccaattacaacaacaatccttggcacatctaaccatacaaaccatcgcaacgcatcaacaacaagcactgagccacctagccgtggtgaaccctatcgcctacttgcaacaacagctgcttgcatccaacccacttgctttaacatacgtggctgcataccaacaacaacaacagatgcaacagtttctaccaacgctcagtcaacttgccattgtgaaccctatcgtctacctacaacaacaacaacttttttcatttaaacccgttgctattggcaaaggcacctacatacctttaa

SEQ ID NO: 84145 - DNA, 500 bp, Zea mays
  unsure (1)..(500): unsure at all n locations
aggtaaagtgtgtgtggcctccagcttctctacgtctacctgtctcggaattcccgggtcgacccacgcgtccggtgggttggcttctcctccccctccggttcgggttcgggttcgtgaggttctccggggttcgggttcgtgggtgagcggatcgagatggcggcgtcggatgttgagtaccgctgcttcgtcggcggcctcgcctgggccacggacgaccactccctccacaacgccttcagcacctacggcgaggtcctcgagtccaagatcatcctcgatcgggagacgcagaggtcccgcggcttcggcttcgtcaccttctccacggaggaggcgatgcggaacgccatcgaaggcatgaacggcaaggagctggacggccgcaacatcaccgtcaacgaggcccagtcccgcggcggccgtggaagcggcggcggtgggtacggtggtggccgtggaagcggcggctatctttggggcnggcgccgtgatgg

SEQ ID NO: 84146 - DNA, 505 bp, Zea mays
  unsure (1)..(505): unsure at all n locations
nagtttaaagtgtgtctgagcctagccgnacgctcagctataccgttcggaattcccgggtcgacccacgcgtccgaaagatgcaactgagcttgtagcaaagcttatggcatatcatcatactgctcaaacggaggcgcgcaagcaacattattcaagtatgggccttgacctctctaagggtatcattcgcaacaaccttgagtatggcgtgatagagccatcgatgagcaaagtaaagatcattcagtttgccacggaggctgccattactatcctgaggattgacgacatgatcaagcttaccaaggaagaagagggtaacgaagagtaagcagcccaccagtagtgggctagtggactcccatgggatggttgccatagcatgtagcacttgttttttcacttatcgtttacttttgcttgctgtgagcattcgtttgtaggaaaagtgagaacggatgtgtatcaatccgtgttgngtgacgatgactcacggatgaan

SEQ ID NO: 84147 - DNA, 542 bp, Zea mays
tattttagatagatgtggataagtataggggtcgattatgagcgtatgtcatgctgtaccggtccggaattcccgggtcgacccacgcgtccgcggacgcgtgggattaagcagaacctttacctttttatgtttatcatgtagcaacaatgagtatttttatccatttattaggttgataacctgagaaatcgctgtgagcttcaagaacttgagcttcaaaaatcagcaaaaaaagtactagaggccatgacactggttgccgaagaatctgcaaaatccaaagctgcaaaagaagttataaaatctttaaccgctcagctcaaggatatggctgagagattaccaccagaccacggggcctataatgtcaatgagacaaagcaatcacataatccgaatggcattgactcacatgctgctagctactctagcatgaatggaattcaccagacacggaatgagttgctcaatgcttcaattgcacatagtctgaactctggacgaccatcgtcgcattgcaatggaatctcaggacaaca

SEQ ID NO: 84148 - DNA, 533 bp, Zea mays
  unsure (1)..(533): unsure at all n locations
atatgtttagttatgtgtggggtgngtcatgcttagttgctacgcatcncgtccggattcccggtcgacccagcgtccggtcgccgtcgtcgtcgtcgttttcgttcccatcgtcacaagtccagtaccaaacgtgcgagcgcgacgtcgacaggcacaacgtctgcgccatggaggtgaggcacagcgtcgaacggctggaccaggccgacgtctacagccctggggctgggaggatcacactgcctcaccagccacaagttccccgtcctcaacctcgtacagatgatcgcggtgcgagtagacctgtaccaggacgccatcatgtcaccgttctggaacttcaacgcccacagcgccatgtacggcatcaagggcagtgcaaggatccaagtcgccagcgacaacggtaccacggtgttcgacgacgtgctccgtgcagagcaactgctcatcgtaccccatggctacctcgtcgtcaccaaagcgcaaggagaaagctttccaatcatgggctttgagacgaaccctat

SEQ ID NO: 84149 - DNA, 508 bp, Zea mays
  unsure (1)..(508): unsure at all n locations
agttcttagaaggttcttggcttcacccgtnccatcgcgatcacgtctcggaattcccgggtcgacccacgcgtccgcggacgcgtgggtagcaacatagaaagcacaatagtgtaccaacaatggcagccaaagtatggtgcctccttatgctccttggtctttctgcaagtgctgctacggcgaccattttcccgcaatgctcgcaagctcctatagcttcccttcttcccccgtacctctcaccagcggtgtcttcggtatgtgaaaacccaattcttcaaccctacaggatccaacaggcaatcgcagctggcatcttacctttatcacccttgttcctccaacaatcatcagccctattacaacagttacctttggtgcatttattggcacaaaacatcagggcacaacaactacaacaacttgtgctagcaaaccttgctgactactctcagcaacagcagtttcttccattcaacccaacaagttcattgaactcttgttt

SEQ ID NO: 84150 - DNA, 498 bp, Zea mays
  unsure (1)..(498): unsure at all n locations
tagttctagctgcgttgggccccactcccnncacgcataccgttcggattcccggtcgacccacgcgtncgcggaccctggtgggttggcttctcctccctctccggttcgggttcgggttcgtgaggttgtcccgagttcggcttcgtgggtgagcggatcgagatggcggcgtcagatgttgagtaccgctgcttcgtcggcggcctcgcctgggccacggacgaccactccctccacaacgccttcagcacctacggcgaggtcctcgagtccaagatcatcctcgatcgggagacgcagaggtcccgcggcttcggcttcgtcaccttctccacggaggaggcgatgcggaacgccatcgaaggcatgaacggcaaggaactggacggccgcaacatcaccgtcaacgaggcccagtcccgctgcggccgtgtaggcagtggcagtagctaccgtggttgcccttgacgtttcggcttactctgttgctggccg

SEQ ID NO: 84151 - DNA, 544 bp, Zea mays
  unsure (1)..(544): unsure at all n locations
atatgttttgaaggtaggggatagagctcgnctagctagcaatagctanttctgtaccggtccggaattcccgggtcgacccacgcgtccgcggacgcgtgggccggattctcgtccccttgaggatggagatatcatcaatattgatgttactgtctacctcaatggctaccatggtgatacatctgctacatttctttgcggtgatgttgatgacgaagctaagaaattagttaaggtgacaagagaatgtctcgacaaggctatatcgatttgttcacctggggtggagatcatacaaagtggtagaactatacaggatcatgcagacaagtttaagtttggtgtagttagacagtttgttggccatggggttggcaaagttattcatgctgaacctgttgagcattatttcagaaacaatgaagggggacgtatgatgttgaatcaaacatttactatagancccatgctaaccattaggagcattgacacttggcangtggttccatgactggaccctatttacaaaaatatgtaattt

SEQ ID NO: 84152 - DNA, 556 bp, Zea mays
  unsure (1)..(556): unsure at all n locations
atagtaatatatnatgattattgatagaataggattagtgatttagtttagttatcttattgtcaaggctatccggttcggaattcccgggtcgacccacgcgtccggcaacatagaaagcacaatagtgtaccaacaatggcagccaaaatattttgcttccttatgctccttggtctttctgcaagtgctgctaccgcaaccattttcccacaatgctcacaagctcctatagcttcctttcttcccccatacctctcaccagcggtgtcttcagtatgtgaaaacccaattcttcaaccctacaggatccaacaggcaatcgcagcaggcatcttacctttatcacccttgttcctccaacaaccgtcagccctattacagcagttacctttggtgcatttgttggcacaaaacatcaaggcacaacaactacaacaacttgtgctaggaaaccttgctgcctactctcagcaacagcagtttcttccattcaaccaactggctgcattggactctgctgcttatttgcaacaacaactaccattccatcaag

SEQ ID NO: 84153 - DNA, 552 bp, Zea mays
  unsure (1)..(552): unsure at all n locations
gagatgatgtatcgattgaagagtatgaggtgctgatgttatagttcagngtcgctacagcactgtcngtaccggttcggaattcccgggtcgacccacgcgtccgccaaccttgactggtacaaaggcccaactcctgcttgaggctcttgaccagatgaccgagcccaagaggccttcagacaagcccctgcgtctgcccctccaggatgtgtacaagattggtggtattggaactgtaccggttggtcgtgtggagactggtgtcatcaagcctggtatggttgtcacctttggtccaactggcctgactacctaagtgaagtctgtttagatgcaccacgaggcgcttcacgaggctcttccgggtgacaatgttggcttcaactggaagaacgtgtctgtcaatgatctcaagcgtgggtttgaggccttcaactgcaaggatgaccctgacaaggatgctgtcagctataccttccaggtcataatcatgaaccaacctgggtcatattggcaactgctatgccccattgctggattgtccgcctt

SEQ ID NO: 84154 - DNA, 543 bp, Zea mays
  unsure (1)..(543): unsure at all n locations
atatgtattagtagtgcgggtctgtctcagtcctgatgtatngctcaacccgtccggaatcgccgggtcgacccacgcgtacgcgcacgcgtccgcccacgcgtccggcgccgacgcttcccaattccttccaatcggcacgctcggcgtcctcgtgtgcaatccccagctctcctcgcccctccctcccaaactccagcggccccccctgaccaagctccggggacggatggacggaggagccggctttccgggcacgcagccggtctcccgctcgccggaggacgtcttccgggactaccgcgcgcgccaggccggcctgatcagggcgctcaccaccgatgtggagaagttctacgtgatgtgcgacccagagaaggagaacttatgtttatatggacttcctaatgagacatgggaaataaacttgcctgctgaagaggtccctcctgaactgccagagccagctcttggaattaattttgctcgtgatgggatggatgaaaaagattggctatcacttggtgcaatgcataaagatcg

SEQ ID NO: 84155 - DNA, 510 bp, Zea mays
  unsure (1)..(510): unsure at all n locations
agttaagagctgtttttnangtgaagacctggcccatcgcatgctgtaccggtctcggaattcgaggtacgcgtacgcgaacacgatgcccgaccaagcttttcaagcattcatagaccactgcaccgtttcaaggacagttgatgcgaatgtgtctgaggcggaaggtgtatacagcgccttggagaagcttggcatcgactgggaacaggttggaaagcagcttgagctggaacgcgtggactccttcaagaagagctttgacagcctactcgtgagcctgcaggacaagggcaacagtctcaagatggcgagtgtgtaaagctgataagattgggtacctgccagtgaacgattttactaaataaaatgctagcttgctggctcttctcttactatttacgctgtacctttgctctcaattatctgaatcggctttgcatcccaggcttgccagaacgtcattgtgtaaccactgttcatggnnnttaattgtttacgggtattcan

SEQ ID NO: 84156 - DNA, 511 bp, Zea mays
  unsure (1)..(511): unsure at all n locations
tggtaagggtgnatcntcgcccagccacatcgcacgactgtaccggtccggaattcccgggtcgacccacgcgtccgtgttgccgttctacctgcacgctatgcctaacgctggcaccctcttacaactgcaacagttgctgccattcaaccaacttgctttgacaaactcaacagtgttctaccaacaacccatcattggtggtgccctcttttagattgcttatgagttatagttcaataatgaagttttttggatgatgtttgtggcgtcccagaaataagaaagtacatttctaaaaaaaaaaaaaaaagggcggccgctctagaggatccaagcttacgtacgcgtgcatgcgacgtcatagctcttctatagtgtcacctaaattcaattcactggccgtcgttttacaacgtcgtgactgggaaaaccctggcgttacccaacttaatcgccttgcagcacattcccctttcgccagcttgcctaatagccaaaaggcccccac

SEQ ID NO: 84157 - DNA, 504 bp, Zea mays
agatattgagggtttttgttccacgctcaccgcatgacataccgtccggattcccggtcgacccacgcgtccgcccagcgtccgcagaaacacaccaagctaagcgcactagcaacaacctaacaacaatggctagcaagatattatccctccttgcgcttcttgcgctttttgcgagcgcaacaaatgcgtccattattccacaatgctcacttgctcctagttccattattccacagttcctcccaccagttacttcaatggccttcgaacacccagctgtgcaagcctataggctacaacaagcgattgcggcgagcgtcttacaacaaccaattgcccaattgcaacaacaatccttggcacatctaacaatacaaaccatcgcaacgcaacagcaacaacagttcctaccagcactgagccacctagccatggtgaaccctgtcgcctacttgcaacagcagctgcttgcattcaacccacttgctctagcaaacgtat

SEQ ID NO: 84158 - DNA, 512 bp, Zea mays
ggtctttgagatgctgtgtgatgccatgccactacgtcactgcctgtaccgtccgtaattcccgggtcgacccacgcgtccgcggacgcgtgggggcaagtcgctcaggacggagttcttcccggcgacgtggctgaccatggtgtcagggttcgtctcgaaggcgatgtactggaagccttctccctgcgccttggtggcgacgaggtagccctggggtacgatgagcagctgccccgcacggagcacgtcgtcgaacaccgtggtcccgttgtcgctggcgacctggacccttgcactgcccctgatgccgtacatggcgctgtgggcgttgaagttccagaacggcgacatgatggcgtcctggtacaggtctacccgcaccgcgctcatctgtacgaggttgaggacggtgaacttgtggctggtgaggcatgtgatccttccagctctcattgctgtatacgtctgtcttggttcagccttttgtactctgttcttatttacatttt

SEQ ID NO: 84159 - DNA, 521 bp, Zea mays
  unsure (1)..(521): unsure at all n locations
tgaggtgaatcgtgntattgtgagagtccccagcctccactcaccgccatgtctgtatcggttcggaattcccgggtcgacccacgcgtccgcaacaatccttggcacatctaaccctacaaaccattgcaacgcaacaacaacaagaacggtttctgccatcactgagccacctagccgtggtgaaccctgtcacctacttgcaacagcagctgcttgcatccaacccacttgctctggcgaacgtagctgcataccagcaacaacaacagctgcaacagtttatgccagtgctcagtcaactagccatggtgaaccctgccgtctacctacaactactttcatctagcccgctcgcggtgggcaatgcacctacgtacctacaacaacagttgctgcaacaaattgtaccagctctgactcagctagctgtggcaaaccctgctgcctacttacaacagttgcttccattcaaccaactggctgtgtcaaactttgctgcgtacctacaacagcgactt

SEQ ID NO: 84160 - DNA, 537 bp, Zea mays
  unsure (1)..(537): unsure at all n locations
gtttttgtgaggtgngtcnaactagcccgatagcacgncatgcctgtaccgtccggaattcccgggtcgacccacgcgtccgcccacgcgtccggcagcagatgccttcacaagcgccacagttgctgcttcaacagcaggcagctttgcagtctagttatcagtcttcacagcaggcgatttatcagcttcagcaacagctacaactaatgcagcagcagtctaacctaaatcagcaaccctctgcgcaggttggttcatctgcagtttcttcaacatgtaactggacagagcatacctcccctgaaggttttaagtactactacaatagcattactcgtgagagtaagtgggagaagcctgaagagtatgtgctgtatgagcaacagcagcagaaactgcttttgcttcaacagcaccaacagaatatcgctgtacagcaactgcagtcaccgccacagggtcaatcacttccatccatgcaaccgattcaacagcttccccagtcacatggacatacacaaatgcatataatcg

SEQ ID NO: 84161 - DNA, 521 bp, Zea mays
tggtttaggagctttgtcgctgtcagtccataagtcacgccgtaccggtccggaattcccgggtcgacccacgcgtccggctgcctacccccagcaatttcttccattcaaccaactgacagcattgaactctgctggttatttacagcagcaacaactactaccattcagccagctagctggtgtgagccctgctaccttcttgacacaaccacagttgttgccgttctaccagcacgctgcgcctaacgctggcaccctcttacaactgcaacaattgctgccattcaaccaacttgctttgacaaacccagcagcattctaccaacaacccatcattggtggtgccctcttttagatttcttatgagttatagttcaataataaagttttttgtctgatgtttgtggcttcccagaaataagaaagtacatttctaaaaaaaataatattatttattataataaaaaaagggcggccgttttagaggatccaagcttaagtatgcttgcatgccactt

SEQ ID NO: 84162 - DNA, 518 bp, Zea mays
  unsure (1)..(518): unsure at all n locations
nagtgaatgtcttcgtcgccggaacttttgcangtnctatcgctaccggatttcccggatcgacccacgcgtccgcccacgcgtccggcgagatcttcctcaactcaacccaaccttctcgagctcgagcgccggtaggatctgcggtgacatccatggtcaatacagtgatcttctaaggctttttgaatatggaggctttcctcctgaagccaattatctattcttaggtgattatgttgatcgaggcaaacaaagtttggagactatatgccttcttcttgcttacaaaatcaagtaccctgagaacttttttcttctgaggggcaatcatgaatgcgcctcaataaacagaatatatggattctatgatgaatgcaagcgtcgatttaatgtgcggctatggaaggtcttcacagaatgttttaacactttacctgtggctgctcttatcgatgattaaatattatgtatgcacggtggactctctcctgatctaacacacttggatgagatag

SEQ ID NO: 84163 - DNA, 507 bp, Zea mays
  unsure (1)..(507): unsure at all n locations
tagttttagagtattgtgcctcagtctncgtacgccataccgtccggattcccgggtcgacccacgcgtccgtgcttacctcgatgggctagaggcttctggcttgagtgacttatcccgagttactagcgttgcgtccttctttgtcagccgagtggacacccttattgacaaaatgcttgacaagattggaacacctgaggcccttgccttgagaggaaaggctgcagtagcacaggccaaactagcaaatcggctctaccagaagaaattctctggcccaaggtgggaggcgttggccaagaaaggtgccaagaaacaaaggttgttgtgggcatccaccggtgtcaagaacccagcttatcctgacactctggatgtggacagtctcatctgacctgacacgttcaacacgatgcccgaccaagctttgcaagcatttcatagacttcgtctaccttttatggacagtttttgcttatctttttcatgctggattgttttttg

SEQ ID NO: 84164 - DNA, 509 bp, Zea mays
  unsure (1)..(509): unsure at all n locations
gtgagtatgtatggattgcttcagccttnagtgacgcatgncgtactcggttcggaattcccgggtcgacccacgcgtccgctggttattatgaagatggggcctttggtataagattggagaatgtacttattggcaaggacgccaatgctaagtttaattttggagataaaggttatttggcatttgaacatataacatgggctccataccagaccaagctgatagacaccgggcttctgacccctgttgagatcgactgggtgaacacgtaccactcagactgccggaagatcttggagcctcatctgaacgagcaggagaagcaatggctgatgaaagctactgagcccgtagctgcaagaggctgagccttttcgtgaacgttgcatgccaccgagcgccatgctcatcttctgcgtggcatacatataagattggctgcttccgcttgttaaataataatagcggctaatgatcaggatagcctgttcttaacgctgatcttg

SEQ ID NO: 84165 - DNA, 512 bp, Zea mays
agtttgagagcgtgtgtgcattacacgacaacatcggcactgctctaccggtccggaattcccgggtcgacccacgcgtccgagatctcattgcctcctaagtcctatcgcccaccccgatcaccgcgcgggtatcggagcatggcgtctgcggcggcggtggacgccggcgacgcgccggagcccacggtgcggaacctcctagaccaggagtccctcaagtgggtcttcgtcggcggcaagggcggcgtaggcaagaccacctgcagctccatcctttccgtcctcctcgcgggggtccgccagtccgtgctagtcatctccaccgaccccgcgcacaacctcagcgatgccttccagcagcggttcaccaagtttcccaccctcgtccgcggattcaccaacctctacgccatggaaattgacccgaaggtagaaaatgatgatttagccaatgaaggaatggagggattcctttcagaactgacaaatgcgattccaggagtagatga

SEQ ID NO: 84166 - DNA, 544 bp, Zea mays
  unsure (1)..(544): unsure at all n locations
ggtnttttattggggaggaggcctgtttttctctgaggaggagttatagcatgctctaccggtccggaattcccgggtcgacccacgcgtccgggtatcctgctgaagcctagcatggtcacccctggagctgagcacaaggagaaggctggtccagaagccattgcaaagtacacgctaacaatgctcagaaggagagtacctcccgctgttcctggaatcatgttcctttctggtggacagtccgaggtggaggcaactctgaacctgaatgcaatgaaccagtctctgaacccatggcatgtgtcgttctcctatgcccgggctctgcagaactcggtgctgaagacatggcaagggcgccctgagaacgtggaggcagcgcagaaggccctgctggtgcgcgcaaaggccaactcgctggcccagctcggtcgctacactggtgagggcgagagcgatgatgccaagaaaggcatgttccagaagggctacacctactaatgtgccagcgagatgtttccatggcataatattaatgggg

SEQ ID NO: 84167 - DNA, 533 bp, Zea mays
  unsure (1)..(533): unsure at all n locations
gggagatgcgtcnttggccgcccatcncagnacgncggnctgtactcggtctcggaattcccgggtcgacccacgcgtccgaactacaacaattgttgccctttgtccaacttgctttgacagacccagcggcctgctagcaacaacacatcattggtggtgccctcttttagattgcttattagttgtaattcaataataaagttttttggatgatgtatgttgccaaccagaaatatgaagttacatttccagatgttaatgtgaaaaaaaaaattgatcatacacgttatgtagaaagtgggtgaaaggttctcgttaaccaatcctacatggtgatattgttccactgtatatattatttgatgtatgttatgttggttgggtgttggctattatttgtgtccttgttaagaatgtttattgttaattatagtttattttggtaatcttgatctagttttttgtactttatgtaaccttttatttattctttttttttgttttttatgttttatttctttttcttatta

SEQ ID NO: 84168 - DNA, 515 bp, Zea mays
  unsure (1)..(515): unsure at all n locations
gaggagagctttgtggcgccagtcnagacagnctgccgtaccggtccggaattcccggtcgacccacgcgtccggatcgtcgaacagaacagcatgaagatggtcatcgttctcgtcgtgtgcctggcgctggcagctgccagcgcctctgcaatgcagatgccctgcccctgcgcggggctgcagggcttgtacggcgctggcgccggcctgacgacgatgatgggcgccggcgggctgtacccctacgcggagtacctgaggcagccgcagtgcagcccgctggcggcggcgccctactacgccgggtgtgggcagccgagcgccatgttccagccgctccggcaacagtgctgccagcagcagatgaggatgatggacgtgcagttcgtcgcgcatcagctgcagatgatgatgcaacttgagcgtgccgttgtcgtcagcagcagcctgtactagccagctctgatgcagcaacatcaacagctgctgtcaaccccagggtctaactcttt

SEQ ID NO: 84169 - DNA, 507 bp, Zea mays
  unsure (1)..(507): unsure at all n locations
gagaggaggcctctgttcatgatgaaagtagtacgctctaccggtccggaattcccgggtcgacccacgcgtccgcccacgcgtccgcggacgcgtgggcaactagcaacatagaaagcacaatagtgtaccagcaatggcagccaaaatattttgcttccttatgctccttggtctttctgcaagtgttgctaccgcaaccattttcccacaatgctcacaagctcctatagcttcccttcttcccccatacctctcaccagcggtgtcttcagtgtgtgaaaacccaattgttcaaccctacaggatccaacaggcaatcgcaacaggcatcttaccattatcacccttgttcctccaacaaccgtcagccctattacaagagttacctttggtccatttggtggcacaaaacatcagggcacaacaactacaacaacttgtgctagcaaaccttgctgcatactctcagcaacatcagtttcttccattcaaccaactggctgn

SEQ ID NO: 84170 - DNA, 502 bp, Zea mays
  unsure (1)..(502): unsure at all n locations
gggagaggcctgtgtgcctcagccccctgcacgncagtaccggtccggaattcccgggtcgacccacgcgtccgaacgacctcacgcagatgacctttggctacagcagggatgatgtggggaagttcatccggatgtatctggctcagggcatcctccagcatgaccccttcgaggttctcgaccagagaggagtgggcgagctggttaagcttgctacagagaggggccgcaaagctaggcctaacttgaaggtgggcatttgtggagaacatggtggagagccttcatcggttgctttcttcgccaagactgggctggattacgtttcttgctcccctttcagggtcccgatcgctaggctagctgcagctcaggtgcttgtctgagggtgcctctgctcgttggcagccggatcgcctgctgttggtgcatctggtgattaataatactactatgacagagccatgctctgtgaagagtattagtagctacgctcatg

SEQ ID NO: 84171 - DNA, 511 bp, Zea mays
  unsure (1)..(511): unsure at all n locations
agtttgagagctgtgtgatcgttagctcagacgncactgccgtaccggtccggaattcccgggtcgacccacgcgtccgcccacgcgtccggttttgataaataggtactcagggaaaatacagtgtgaaccatagcgagaatgccttgagttctcttaacacaaaaatcctaatccaaagtgcaaataaagtgtagccatctcaacaatcaaacatgacatcatagaaaccaaatatgagattgctcaagcttcaacagcaacccttccagccacctggtccagatcacgccttccctgggaggtgatgcgccgtccacccttgggatcgacatcaatgatgcccatctcctgcagctgctggaggatgttgcgtgaaatggcaccactgctcttgcagaagtgaggtgggcgtgagccattcctctggcggccaccataaatcttctggaagccaccaacaccaatgccttgtctcaagtagatcttccttgctacagatgcagccctt

SEQ ID NO: 84172 - DNA, 523 bp, Zea mays
  unsure (1)..(523): unsure at all n locations
agagaagaggnttcagtcgccgcccatcncagacgtactgcgtaccggtccggattcccggtcgacccacgcgtccgggctggcaagagcatggcgcttgtcggcatgagcggctccggcaagagtaccgtgctggcgctcatcctccgcttctacgacccgatcgccggaagagtcttgatcgatgggaaggacatcaagaagcttaagctcaagtgtctcatgaaacacatcggcctggtccagcaagagccggcgctgttcgcgacgacgatctacgacaacatcctgtatggcaaggacagggccacggaggccgaggtcgttgaggcagccaagctggctaacgctcactcgttcatgagctcgtttccgggggggtacatgaccatggtatgtggagcgcggcttgcatctgtcggtcatgcagatgcagctcatcttgatcattcgcgccgattgacatggaccctgcaatcctgctgttgtacagggttactagtcttcttattatgaattaaat

SEQ ID NO: 84173 - DNA, 518 bp, Zea mays
  unsure (1)..(518): unsure at all n locations
gagagggtcttngtgcatgctagttagtgagccacgctgtaccggtccggaattcccgggtcgacccacgcgtccgcccacgcgtccgcccacgcgtccgcttatgctgaaagtcatgatcaagcattagtcggcgacaagactattgcgttttggttgatggacaaggatatgtatgatttcatggccctcgatagaccttcaactcctaccattgatcgtgggatagcattacataagatgattagacttatcacaatgggtttaggaggagagggctatcttaatttcatgggaaatgagtttggacatcctgaatggatagattttccaagaggtccgcaaagacttccaagtggtaagtttattccagggaataacaacagttatgacaaatgtcgtcgaagatttgacctgngtgatgcatactatcttaggtatcatggtatgcaagagtttgatcaggcaatgcaacatcttgagcaaaaatatgaattcatgacatctgatcaccaatt

SEQ ID NO: 84174 - DNA, 521 bp, Zea mays
agagaagatgctttattgcacgccatcccagacgtactgctgtccggtccggattcccggtcgacccacgcgtccgcccgagggctgcggctaccagttccagatgcagtacggctccatcgggtggtcggtcggcgcgacgctcgggtacgcccaggcggccaaggacaagcgtgtcatcgcgtgcatcggcgacggaagcttccaggtgacggcgcaggacgtgtccacgatgctccggtgcgggcagaagagcatcatcttcctcatcaacaacggcggctacaccatcgaggtggagatccacgatggcccgtacaacgtgatcaagaactgggactacacgggcctggtcaacgccatccataactccgagggcaactgctggaccatgaaggttcggacggaagagcagctcaaggaagccatcgccatggcgactgtcgacaagaaagaatggctttgtttattcaagtaatcgtgcacaatgacaacacgagcaaggatccctcttaagggtg

SEQ ID NO: 84175 - DNA, 521 bp, Zea mays
  unsure (1)..(521): unsure at all n locations
agagtatggtctgttttcgccgccagtcnaggacgnactgcctgtccgntccggattcccggtcgacccacgcgtccgcgttcttcggcttcattgtcacaaggttcgagttcgtcaccgtctagtacgactgtgcgagggaggaagaggcgaggagaagatgcagatcttcgtgaagaccctgacggggaagaccatcaccctcgaggtggagagcagcgacaccgtcgacaacgtcaaggccaaaatccaggacaaggaagggattcccccagatcaacagcgactgatattcgctggcaagcagctggaggatggacgcacgctggctgactacaacatccaaaaggagtcaactcttcatttggtccttaggctgaggggtggaaccatgatcaaggtcaaaactcttactgttatagagatcgattatgacttttatcttacttgatttatttactgatcattggattctttttaatataatgtttgttatttttcttatttttatattttttttt

SEQ ID NO: 84176 - DNA, 506 bp, Zea mays
  unsure (1)..(506): unsure at all n locations
tggaaggtgcctgtcttgccctaagccncnctcacngncgtancggttcggaattcccgggtcgacccacgcgtccgagggcacaacaactacaacaacttgtgctagcaaaccttgctgcctactctcagcaacagcaggttcttccattcaaccaactagctgcattgaactctgctgcttatttgcaacaacaactaccattcagccagctagctgctgcctacccccaacaatttcttccattcaaccaactggcatcattgaactctcctgcttatttacagcagcaacaactactaccattcagccagctagctggtgtgagccctgctgccttcttgacacaacaacagttattgccgttctacctgcacgctgcgcctaacgctggcaccctcttacaactgcaacaattgctgccattcaaccaacttgctttgacaaacccagcaacgttctaccaacaacccatcattggtggtgccctcttttagatttcttag

SEQ ID NO: 84177 - DNA, 506 bp, Zea mays
  unsure (1)..(506): unsure at all n locations
gagtgagaggtttgtgtgccctcagctcnagtacgncatgccgtactcggtccggaattcccgggtcgacccacgcgtccgcccacgcgtccgggaaaccctagccgccatatctcacgatccactcgagcaccgagcggagggaaggtgaggagcgatggcgcgcggcgtggtgtcggcgaagggcggcgcggtcgcgggcaagaagaaggggtcggtttccttcacgatcgactgcaccaagccagtggaggacaagatcatggaggtcgcctcgctcgagaagttcctgcaggagcgcatcaaggtcgccggcggcaaggctggcaacctcggcgactccgtcaccatctttcgcgagaagaccaaggtcaccgtcacgggggacggacccttctccaagaggtacctgaagtacttgtccaataagtacttgtagaaacacaatgtgctgaattggctacacgtggtttgttgcaacaggaccgatacgtctatgagctctt

SEQ ID NO: 84178 - DNA, 511 bp, Zea mays
gttagagagcctgtgtgcctccagcctttgatagctactgccgtactcggtccggaattcccgggtcgacccacgcgtccgcccacgcgtccgcccacgcgtccgggaatatgatgctctgagggttattttcaagaaggtccaatctgtcatatcgtttaagcccacaatggtaacaatactttcccccgaggttgcagaaaaagaatcagaagctggtgggaagatgggtgacctagattcttatgagattgaaggcggcgagacaaaatcagagattttgcagaatctagctgagttccagttttcttgtgtcctgtacaatggtgccctagagaatgcatgcagtgagcttggagcccgtatgtctgccatggacagctctagcagaaatgctggcgatatgcttgatcgtctcactctcacttacaacaggacacgccaagcatccatcaccacagagcttactgagattatatctggtgcatcggcccttgaggggtagtgaaaa

SEQ ID NO: 84179 - DNA, 512 bp, Zea mays
  unsure (1)..(512): unsure at all n locations
agttgagagcctgtgtgcctgctagcccagtacgncatgcctgtaccggtccggaattcccgggtcgacccacgcgtccgcgagctcgctccctccttccacgtcgaggtccgagtcctgctttgatggcgacggacggggctgagactcccgcgccgttggtggatgcggccccagaggcgcccgccgacgccccggcggcgcctgctgccgacgcgaagccggccaaggccaagaaggccaccgcgccgaagaagcgcgccagcccgacccacccgccgtacgccgagatggtctcggaggcgatcacgtcgctcaaggagaggacggggtccagcagctatgcgattgccaagttcgtggaggacaagcacaaggacgggctcccgcccaacttccgcaagcttctgaacgttcagctcaagaagctcgtcgcctgcggcaagctgaccaaggtgaagaactcgtacaagctggcgttcgccgtcaccaagccgaattccaagcccatg

SEQ ID NO: 84180 - DNA, 458 bp, Zea mays
gagtgaggtcttcgtcccgcactccagaagtacgcgtaccgtccgattcccggtcgcccacgcgtcgcccacgcgtcgccacgcgtcgccacgcgtcgggacctgggtgagcgggggaaacacactagcgaagcgcatacacgacctaacaacaatggcttacaagacattatccctcttgccttttgccttttggagtgcaacaaatgcgttattattccaaagctcactgctcagtgccattattccacagtctcctccagttcttaatgggcttcgaacacccactgtgcaagcctataggctacaacagcgcttgctgcagcgtttagagcgccaattgccattcaacaacaatcctgcacaattaacataaaacatcgcactcacagcacctgcacttgacccttatcctgttgaacctattgcctattgcacaacagctgcttgcattaact

SEQ ID NO: 84181 - DNA, 524 bp, Zea mays
gagtagaggctttattgactgccaggttagtacgtcatgacgtaccggtccggaattcccgggtcgacccacgcgtccgctgctttcatctagccctctcgttgtgggtaatgcacctacatacctgcaacaacaatgtctgcaacagattgtaccagctctgactcagctagctgtggcaaaccctgctgcctacttgcaacagctgcttccattcaaccaactgactgtgtcgaactctgctgcgtacctacaacagcgacaacagttacttaatccactagcagtgcctaacccattggtcactgccttcctacagcagcaacaattgctaccatacagccagttctctttgatgaaccctgccttgtcgtggcaacaacccatcgttggaggtgccatcttttagattacatatgagatgtaatcgataatggtgcccttataccggcatgtgtttcctagaaataatcaatatattgattgacatttatcctcgataaaaaatttatttaattattttt

SEQ ID NO: 84182 - DNA, 526 bp, Zea mays
  unsure (1)..(526): unsure at all n locations
ggagtaagaggcctttgttgcacgcccagtcncaganagtactgccgtaccggtccggaattcccgggtcgacccacgcgtccgcggacgcgtgggcaccatctgccgactggtagcagagagaagagatagaccgagagagagagagagaatctgagactgagactggtagcagctgaagcatcggtgctagctagcttgggcagcaacatcacgatgtcgtccaactgcggcgaggatgagaaggagctggtgtgcgtgaccggcgccggcggcttcatcggctcgtgggtggtgaatgagctgctccagcggggttaccgcgtcaggggaacggcgagggaccctgctgacagcaagaacgcgcacctgctggctctggagggagccaaggagcgcctcaccctgtgccgcgcctacgttctcgaccgcgcctccctgctcgccgacttcgccggatgtcacggcgtatgccacgtcgtctctccggtgtccaacgacccggaactagttcaggtggcggttt

SEQ ID NO: 84183 - DNA, 504 bp, Zea mays
  unsure (1)..(504): unsure at all n locations
ggtagtgtgtatctgtgccctcaccccnatcacgcctgtacgtctcggattcccgggtcgacccacgcgtccgataccttccatcaatgatagcttcagtatgtgaaaacccagctcttcaaccctatagggtccaacaagcaatcgcagcaagcaacatacctttatcacccttgtttcaacaatcgccagccctatctttggtgcagtcattggtacaaaccatcagggcacagcagctgcagcaactcgtgctacctgtgatcaaccaagtagctctggcaaacctttctccctactctcagcaacaacaatttcttccattcaaccaactgtctacattgaaccgtgctgcttatttgcagcaacaactattaccattcagccagctagctactgcctactctcagcaacaacaacttcttccatttaaccaattggccgcactgaaccccgctgcttatttgcagcagcaaatactactaccatttagccagctagctn

SEQ ID NO: 84184 - DNA, 507 bp, Zea mays
  unsure (1)..(507): unsure at all n locations
tagggaggggcctctgttgcgtcacgctnagtacgtctgacgtactcggtccggaattcccgggtcgacccacgcgtccgcccacgcgtccggttggccaatcaattatacagaaattttgggcaagagtcctgggtgggggccctgctcttcgtgctgttgcttcaatgagcagggctgattgggcagcaaaacttaagcattggaaggatgaattcgtttgtacactgcagcattactggttagggacaaaactactctgggcagatgttaggatctcatcaagattgctggtgaaacttgctggggggaagagcctttcaagaagagagaggcaacagctgacacgcacaacatcatatatcttcaggcttgatccgggggctgtgttcatcattgttccattcatggaattcttactgccagtcttttttaagttatttcctaacatgctttcatcaactttttaggacaaaattaattagattaattattttaattgtaatg

SEQ ID NO: 84185 - DNA, 512 bp, Zea mays
  unsure (1)..(512): unsure at all n locations
agtgagggtcctctgtggctttagtctcnagtacagncatgccgtactcggtccggaattcccgggtcgacccacgcgtccgtatagaactaacttatcgtaaaaaagattaagaaaaaaagaacccatgactgcggggtgcctgttttccaacaagttgtcacttccttgagctgaaccatgttgaataaaggaaccaagcgatccacaatggagaaatgacaacaagatatgccaagataaatgtaactggctcgttcgacaaaccacaactatatttgttggattccatcacatcacgtataaaacattgggccttgtaatgaaacttccgtgccaatgagatgaaaatgcctacctacaacagcaacaactgctttcatgtagccctctcgttgtgggtaatgcacctacatacctgcaacaacaattgctgcaacagattgtaccagctctgactcatctagctgtggcaaaccctgctgtctacttgcaacaacttctttcatttg

SEQ ID NO: 84186 - DNA, 519 bp, Zea mays
  unsure (1)..(519): unsure at all n locations
agtaagtgctttattgacgcccatcncgnacgtctgncgtaccggtccggaattcccgggtcgacccacgcgtccgcaccgctaaaggtgctgaattcgtggtattcagaccctccgagattgctgccagggttgcacttgctgctatcggcgaatgcaggagttctgtaattgagagagctgctagtagctgcaaatatttggacaaggagagggttttaagatgccatgaaatgattcaagagaagattactgcgggaagcattgtcctaaagtctgctggatcatcaatctgctctgtgccacaaagcccaatatgtgtactggacgctgcatcctgtctgagtcaacaaagcgatgactctactgtcgggtgtgctgcagtatgttaccatagttcttccacaagcaataggagaaagatcactatacgtctactctaattgagtgacgcttcaggtgagctactcaccgctctacgagtttccgattgcttcatacatcttaaatttagtttgt

SEQ ID NO: 84187 - DNA, 519 bp, Zea mays
gagttgagatgcttgattgcactcagcaaactacgtacgctgtaccggtccggaattcccggtcgacccacgcgtccgcccacgcgtccgcacaagcaacatagaaagtggaatccagtagcaacaacagagcaagaatggcgaccaagatattttccctccttatgctccttgctctttctgcatgtgttgctaacgcgacaattttccctcaatgctcacaagctcctatagcttcccttcttcccccataccttccatcaatgatagcttcagtatgtgaaaacccagctcttcagccctataggctccaacaagcaatcgcagcaagcaacatacctttatcacccttgttgtttcaacaatcgccagccctatctttggtgcagtcattggtacaaaccatcagggcacagcagctgcagcaactcgtgctacctgtgatcaaccaagtagctctggcaaacctttctccctactctcagcaacaacaatttcttccattcaaccaactgtctt

SEQ ID NO: 84188 - DNA, 532 bp, Zea mays
  unsure (1)..(532): unsure at all n locations
ggtaggagatgtgtctgttgccttagcctcnagtcacgcatatcgtccggattcccgggtcgacccacgcgtccgcaggaattgggacatcaggtggcccttatccgtcaagtcgctaacaaagttttcaccggtatgggtaaaactattgggtaccagatcgggaccattattgagatttccagggcagatctagaggctcaccagatatgcggagcaagctctaattttttccttttgaactcaataccttattcccattaccctttggtattattatgggttttttgtggtttattatatttttattttatttctcattgtgtattctttgatttttcttctgttgttgttttattttccctaataattattgatttttttggggggtggggtgtttattataattttttaattatattaatttttttattttttatattattatatattttttttttattttattttaattatatattatttttttaattttaatattctatttttttttattttatattattttttt

SEQ ID NO: 84189 - DNA, 506 bp, Zea mays
gggagatgctttgttgcgtccagtcagtacgtctgacgtactcggtctcggaattcccgggtcgacccacgcgtccgaccttctccacggaggaggcgattcggaacgccatcgagggcatgaacggcaaggggcgggacggccgcaacatcaccgtcaacgaggcccagtcccgcggcggccgtggaggcggcggcggtgggtacggtggtggccgtggaggcggcggctacggcggtggcgggcgccgtgatggcggtggcggctacggcggtggcggcggctacggtggcggcggcggctacggtggtggtggcggcggctactgcggtggcaaccgtggcggctgcttctgcaactcctactggaactggaggagctgagcggttgtgcccgctcggtcaagttatcctgttcgctaccgtgatgtttaccctagtccagatggtttatctttcttcgtgtcgtgtttgttgttgcccatctgtgtttttgattgctagtta

SEQ ID NO: 84190 - DNA, 508 bp, Zea mays
  unsure (1)..(508): unsure at all n locations
tagttagagatgtgtctgttgccttacgtcnccttacgcatgatgtaccgtccggaattcccgggtcgacccacgcgtccggggtactggaagtggtttgctggaaatctggcttctggtggagctgctggtgcgtgcgctctattctttggctatgtctctggactacgcccgtacgcgtttggccaatgatgccaaggctgcaaagaagggtggtgagaggcagttcaatggactcgttgatgtttaccgcaagacccttgccagtgatggtattcgtggcctctaccgtggattcaatatctcttgtgtggggatcattgtgtaccgaggtctttactttggtatgtatgattccctgaagccagtgcttcttgttggtaccctgcatgataacttcttggccagcttcttgctcgggtggggtataaccattggtgctggccttgccttctaccccattgacactgttctccgtttcatgatgatgacttctggttaggccgtt

SEQ ID NO: 84191 - DNA, 514 bp, Zea mays
  unsure (1)..(514): unsure at all n locations
ggtgagaggctttagtggctgtctacgcccagtancgtactgccgtactcggtccggaattcccgggtcgacccacgcgtccggatcacccttgaggtggagtcctcagacaccattgacaacgtcaaggccaagatccatgacaaggagggcattccaccggaccagcagcggctgatcttcgccggcaagcagctggaggatggtcgcaccttggctgactacaacatccagaaggagagcaccctccacctggtgctccgcctcaggggtggtatgcagatttttgtgaagacattgactggcaagaccatcaccttggaggtggagtcgtctgacacaatcgataatgtcaaagccaagatccaggacaaggaaggcattccaccggaccagcagcgcctgatctttgctggcaagcagctggaggatggccgtaccctcgccgactacaacatccaaaaggagagcaccctccacctggtgcttcgcttgcgaggtggtatgcaaatta

SEQ ID NO: 84192 - DNA, 518 bp, Zea mays
gtagagagctttgtcgacgccagtccagacgtcacgactgtaccggtccggattcccgggtcgacccacgcgtccgcaatcgccagccctatctttggtgcagtcattggtacaaaccatcagggcacagcagctgcagcaactcgtgctacctgtgatcaaccaagtagctctggcaaacctttctccctactctcagcaacaacaatttcttccattcaaccaactgtctacattgaaccgtgctgcttatttgcagcaacaactattaccattcagccagctagctactgcctactctcagcaacaacaacttcttccatttaaccaattggccgcactgaaccccgctgcttatttgcagcagcaaatactactaccatttatccagctagctgcagcaagccgtgctttcttcttgacacagcaacagttgctgcctttctaccagcagtttgcggctaaccccgcaaccctcttacatctacaacaattgttgccctttgtccaacttgctt

SEQ ID NO: 84193 - DNA, 538 bp, Zea mays
ggttttttttggagttaggaggcttctgtccactgctagttagttagtcatgctgtactggtccggattcccgggtcgacccacgcgtccgcattttccttgcaaccgattgcctatccccctcccaaccaaagaccgatggcgcccaaggccgagaagaagcccgcggcgaagaagccggcggaggaggagcccgcggccgagaagacgaccgccgggaagaagcccaaggcggagaagcgggtccccgcgggcaagtccgccggcaaggagggcggcgagggcaagcgtggcaagaagaagggcaagaagagcgtggagacgtacaagatctacatcttcaaggtgctgaagcaggtgcacccggacatcggcatctcctccaaggccatgtgcatcatgaactccttcatcaacgacatcttcgagaagctggccggcgaggcctgcaagctcgcgcgctacaacaagaagcccaccatcaccttccgcgagatccagaccttcgtgcgccttgtgctccccggcgagcttgttg

SEQ ID NO: 84194 - DNA, 518 bp, Zea mays
  unsure (1)..(518): unsure at all n locations
taagagatggtttgtcgatgcccagctaggaagtatgncgtaccggtccggaattcccgggtcgacccacgcgtccgcccacgcgtccgggcaaaccccccaagttcgcctgggggcacagcacctgcgtggttggcggcactagggtcctcgtcctcggaggccacaccggggaggagtggatactgaacgagctacatgagctctgcctggcaagcaggcccgacgacgacgacgatgaccgctactgactagtttcgttgcacatggttcatctgttttatatgctatatgctattgttcgtaactacttccagtatgttgttgggtaatcggtatgagaaaaaatagtggaaaattaattaaaaaagttagactagaagattttagtgtattttgttttcatcggagaagttttcttttatcggtctagatagattctatggtctatattattggatattttttgtctaatagattaaaaaatacttgatcatctctttgtatattcttatgta

SEQ ID NO: 84195 - DNA, 523 bp, Zea mays
  unsure (1)..(523): unsure at all n locations
agttcatgaggaaggggttttagcccagccttagtcgncttgacgtccgattcgccggctcgcccaggcgtccccaaggttcttccttggggagacgtttccaattccagtatatctttctcttcttccaatggttgggggttgtgctctagctgctgtcacagagctgaactttaatatggttggatttatgggtgccatgatatccaaccttgcatttgttttccgcaacatcttctcgaagaggggcatgaaggggaagtccgtcagtggcatgaattactacgcttgcctgtcaattatgtccctggtcatactgactccatttgctatagctatggaaggccctcaaatgtgggctgctggttggcaaaaggctcttgcagaagttggacccaatgttgtctggtggattgctgcacagagcgtgttctaccacttatataaccaggtgtcctacatgtctctcgatcagatttctccattgacattcagcattggcaatacaatgaagcgtatttcg

SEQ ID NO: 84196 - DNA, 505 bp, Zea mays
  unsure (1)..(505): unsure at all n locations
tagttagctgtatcttagncccacctcncgccagnctgtactgtctcgattcccgggtcgacccacgcgtccgatttgagcattcagaaacacaccaagctaagcgcactagcaacaacctaacaacaatggctgccaagatattatccctccttgcgcttcttgcgctttttgcgagcgcaacaaatgcgtccattattccacaatgctcacttgctcctagttccattattccacagttcctcccaccagttacttcaatggccttcgaacacccagctgtgcaagcctataggctacaacaagcgattgctgcgagcgtcttacaacaaccaattgcccaattgcaacaacaatccttggcacatctaacaatacaaaccatcgcaacgcaacagctacaacagtttctaccatcactgatccacctatccatggtgaactctgtattcttattgcaacaactgttttttttattctaaacttttgcttttatatacttatt

SEQ ID NO: 84197 - DNA, 508 bp, Zea mays
  unsure (1)..(508): unsure at all n locations
tgggttagtggttttgagcccagctcagcgcctngacgtaccggtccggaattcccgggtcgacccacgcgtccggctgcttatttacagcagcaacaactactaccattcagccagctagctgatgtgagccgtgctgccttcttgacacaacaacagttgttgccgttctacctgcacgctatgcctaacgctggcaccctcttacaactgcaacaattgctgccattcaaccaacttgctttgacaaactcaacagtgttctaccaacaacccatcattggtggtgccctcttttagattgcttatgagttatagttcaataatgaagttttttggatgatgtttgtggcgtcccagaaataagaaagtacatttctagattcaaaaaaaaaaataaaaagggcggccgctctagaggatccaagcttacgtacgcgtgcatgcgacgtcatagctcttctatagtgtcacctaaattcaattcactggccgtcgttttacaacg

SEQ ID NO: 84198 - DNA, 506 bp, Zea mays
aggttgagattgtgggagcttcacgcccatacgcatactgtccggattcccgggtcgacccacgcgtccgacgaacgttcggcctgactgtgatcgagtccatgacgtgcggtctgccaacgatctgtaccggccatggtggccctgctgagatcatcgtggacggggtatctggcctgcacattgacccttaccacagcgacaaggccgcggatatcctggtcaacttctttgacaaatgcaagggagatccgagctactgggacaagatctcacatggcggcctgcagagaatctatgagaagtacacctggaatctctactcccagaggcttatgaccctgaccggcttttactggttctggaagtaggggagcaatcctgtataggctcgagtcccgtcgcttcattgatatgttttatgctcttttattattgtattcttatttgcttggttttttttattttcttatttttttttgtttatattgtttattttttaattt

SEQ ID NO: 84199 - DNA, 516 bp, Zea mays
  unsure (1)..(516): unsure at all n locations
gagtntgatgatgtgtgcggagccttccacgctcncttcacgcatacctgttcggaatcggaattccgacgtagacccacgcgtccgggcacaaaacatcagggcacaacaactacaacaactcgtgctagcaaaccttggtgccgactctcagcaacagcagtttctgccattcaaccaactagctgcattgaactctgctgcttatttgcaacaacaacaactactaccattcagccagctagctgctgcctaccaccagcaatttcttccattcaaccaactggcatcattgaactctcctgcttatgtacaacaacaactactaccattcagccagctagctgctgtgagccctgctgccttcttgacacagcaacagttgttgccgttctacctgcacgctgcgcctaacgttggcaccctcttacaactgcaacaattgctgccattcaaccaacatgctttgacaaacccaacagcgttctaccaacaacccatcattggtggtgccct

SEQ ID NO: 84200 - DNA, 514 bp, Zea mays
  unsure (1)..(514): unsure at all n locations
tgttttgatggtgtgtgcctgctagctcagtacgtctgtctgtactcgtccgnattcccgggtcgacccacgcgtccggccgccgccaccgaagcggcctcccaggtaagcaggatcgtccagcccgccgccgccaggaagcgcaatccccgcgtcacgagctcccgccggaagtgccgcaaggcgcactttacggccccgtcctccgtccgccgtgttctcatgtccgccgggctgtcgacggagctccgccacaagtacaacgtgcgctccatcccgatccgcaaggacgactaggtgcaggtcgtgcgcggcacctacatgggccgtgaggggaaggtggtgcaggtgtatcttcgtcgctttgttatacatgacgagcgggtcacttttgttattttttatcttttcatttttatcttttattttttctacttcttttttattttttatttctttttttttttttatgtttttttattttgttttattatattttttgttttatattttt

SEQ ID NO: 84201 - DNA, 520 bp, Zea mays
  unsure (1)..(520): unsure at all n locations
gagagatgctttgtggacgccagtccnagacgtatgncgtactcggtctcggaattcccgggtcgacccacgcgtccgattttgagcattcagaaacacaccaagcgaagcacattagcaacaacctaacagcaagggctaccaagatattatccctccttgcgcttcttgcgctttttgcgagcgcaacaaatgcgttcattattccacaatgctcacttgctccaagttccattattacacagttcctcccaccagttacttcaatgggcttcgaacacccagctgtgcaagcctataggctacaacaagcaattgcggcgagcgtcttacaacaaccaatttcccagttgcaacaacaattcttgtcacatctaacagtacagaccatcgtaactcatcagcatcaacaattcctaccagcactgagccacctagccatggtgaaccctgtcgcctacttgcatcagcagttgcttgcatcaaacccacttgctctggcaaaactaattgcaaacct

SEQ ID NO: 84202 - DNA, 533 bp, Zea mays
  unsure (1)..(533): unsure at all n locations
gtttatagagtgagaggtttctgtgccctcaggccnatgacagctgccgntaccggtccggattcccgggtcgacccacgcgtccgcggacgcgtgggttcaacatggaagatatagaggagggatttgaaggttacgaggatgggaggtcactgcttatgtctcagaagagcttggagaaacgctttggccagtctccaatttttattgcatccacctttatgactcaaggtggcatacccccttcaacaaacccaggttccctgctaaaggaagctatacatgtcattagttgtggatatgaggataaaacagattggggtaaagagatcgtatggatatatggctctgttactgaagatattttaactggtttcaagatgcatgcaggaggttggatatccatctactgcatgccacttcggccttgcttcaagggttctgctccaatttacctttctgatcgtcttaaccaagtgttacactggtctcttggttcaattgaaattctaactatcatacactgttttatg

SEQ ID NO: 84203 - DNA, 519 bp, Zea mays
  unsure (1)..(519): unsure at all n locations
agagagagctttgtgcagtactgaanactacgccacgctctaccggtctcggaattcccgggtcgacccacgcgtccgcccacgcgtccgggggatacagcttggcagaatttgatggagcgtagaacctccgacgggacatacaatgcctggcggcgtgagcctgaggagggacctataatgtactgcagccgcactatttttgaggatgctactcctgaactggttagagatttcttctgggatggtgattttcgtctaaagtgggatcccatgcttgcatattgcaaatctttggatgagttccctcagaatggagcaacaattgtccactggataaaaaagttcccgttcttttgcagtgaccgtgaatacatctttggaggacgcatatggtaatctgggaagacttactattgtgttactaagggtgttccatatccatcattgcccatgaaagaaaaaccgaggcgtgtggagctgtacttatcaaggtggcgtattagacctgttcaattg

SEQ ID NO: 84204 - DNA, 534 bp, Zea mays
  unsure (1)..(534): unsure at all n locations
gttttagagagaggcgttngtgcttgcatcgtccgtgacagtatgccgtaccggtccggaattcccgggtcgacccacgcgtccgaccttcccctacaccagaaaaatccccagttctttggtccgcgtcagagaggcggcggggatgtctgggcgcggcaagggcggcaagggtctgggcaagggcggcgcgaagcgccaccggaaggtgctccgcgacaacatccagggcatcaccaagccggcgatccggaggctggctaggaggggtggcgtgaagcgcatctcggggctcatctacgaggagacccgcggcgtgctcaagatctttctcgagaacgtcatccgcgacgccgtcacctacaccgagcacgcgcgccgcaagaccgtgaccgccatggacgtcgtctacgcgctcaagcgccagggccgcaccctctacagcttcagaagctaggctaggcgcctgttcgtagtcggtgactggttaggggacatgtctctgggtgatgctttttgaggtagtattggctt

SEQ ID NO: 84205 - DNA, 507 bp, Zea mays
tagttgagagggtgtgagcttcacgctccctacgctatccgttcggattcccggtcgactcacgcgtccgcccacgcgtccgcccagcgtccgggctcaccacaccaaccaacaagcaaaaattccggagatggtactagtctccgcggcgaagatgtcagtgcgcggcaagggcggcaagggcctgggcaagggcggcgcgaagcgtcaccggaaggtgctgcgcgacaacatccaggggatcacgaagccggcgatccggatgctgtcgcggcggtgcggcgtgaatcgcatctcggagctcatctacgaggagacccgcagcgtgctcaagaactttctggagaacgtcattcgatactccgttacctacaccgagcacgcgcgccgtaagaccgtcaacggcatggacgattactacgcgcttaaacgccagggccggaccctctacagattcagctgctaggcctgccgcgccttgcttttgcgttgttcggttctggtgtt

SEQ ID NO: 84206 - DNA, 509 bp, Zea mays
  unsure (1)..(509): unsure at all n locations
agtnttgaggggttttgagcccacgtcacaccatgactgtaccgtctcggattcccgggtcgacccacgcgtccgcccacgcgtccggtcaaaggagaggaagatcatgtacactagtgaactggagaagaaggtccagactctgcaaacggaggccactacgctgtcagcacagctgaccctgctccagagggatacaactggtttaactgccgaaaacagagagctcaagcttcggttgcagtccatggaagagcaagctaaactgcgggacgctttgaatgaagccctgcgagaagaagtccagcgacttaagattgccgcaggacaagtcttgtacatgaatgggaaccccttcaatggtggactccatcatcagagggcatcctatttcgtgcatcatcttctgcagcaccatacaccgttctttggtgttctccttgcttaatttttacaatctaattctatactttttttattagatctcgtttatatttttgctttctttt

SEQ ID NO: 84207 - DNA, 518 bp, Zea mays
agtatagagctgtttgtttgcttctagtccgtacgtcatgccgtactcggtctcggaattcccgggtcgacccacgcgtccgggagctgcctggaggcgggctcctcgtgtaccagagcttctgtgctgctgaaggcgcgggtgctacctcgcccaaatctgttttccactgctttgacggcgagaacgtggagagtgctcctcctcctatgaagaaggactacaagctggctaatcttctctgctgggaggaggaagcggatgccatggaggagaaggcgggagtgcttgatgagtaagacgggcttctggggtcgatttgcttctgagttgtttattttatatcgtcgcaatttcgtggttgtcgtttggttattctgtgaagcagccaaaccaggctattgttatgaaaatttgttcgtctgtatacatttttaactttcgatgttgtcacaattcttgattcattcttgaataagtaatttattcatttctatgttggacagtttgtttttttg

SEQ ID NO: 84208 - DNA, 519 bp, Zea mays
  unsure (1)..(519): unsure at all n locations
tagattgacgcggtgtcntgacctccacgccttcactacgctatgccgtaccggtccggaattcccgggtcgacccacgcgtccggcttgagtcagagatccctaagtttcgatccactgtcccagtggatttgggactgcgagggaggagcagttcatcctccgcgtgccgccatccgtcgcagagcggatcgagcgcctcatgaatgaatccgccgcctcctcctccaaccccgacgaggcctacctggacctctccttctcagaggatggaagaaatggcacatttatgatcggtaatgagagctttcctgcatctctcttggatctacctgctgtggtggagtcatacaaaacatatgatgattctgtactaattaaaactgctgatgttggtcagatgattatggtaagagaagaaaatgatcctgctccagaaggagtcgagtacaagcatgggcttactcctccaatgagggatgcacgcaggcgacgtttccgcagagaaccagacttgtn

SEQ ID NO: 84209 - DNA, 515 bp, Zea mays
  unsure (1)..(515): unsure at all n locations
gagtgagagctgtgtcacgccagtaagaagtctgctgtaccgtccggattcccggtcgacccacgcgtccggatcagcaaagcggcagtgcgtagagaggatcgtcgaacagaacacatgaaatgggatcgntctcgtcgtgtgcctggctctgtcagctgccagcgcctctgcaatgcagatgccctgcccctgcgcggggctgcagggcttgtacggcgctggcgccggcctgacgacgatgatgggcgccggcgggctgtacccttacgcggagtgcctgaagcacgctcagttcatccagacagcggcggctacttactactgctgttgtagctagtcatacattctgttttagctctgtttggaggagggtttttaattttgttgttgttgttaagatcgttcttttgtttctcataattcttgcttatcaagtgtttctcttgttatatttgtctttatttcttgtaatcttgtatttactttgtttatttattgtcctttttttattg

SEQ ID NO: 84210 - DNA, 536 bp, Zea mays
  unsure (1)..(536): unsure at all n locations
agttagggtgagagatgtgtagacctccagccctccgtaccgccatgcctgtccggttcgaattcccgggtcgacccacgcgtccggcgcgacgtcgacaggcacaacgtctgcgccatggaggtgaggcacagcgtcgaacgggtggaccaggccgacgtctacagccctggggctgggaggatcacacgcctcaccagccacaagttccccgtcctcaacctcgtacagatgagcgcggtgcgggtagacctgtaccaggacgccatcatgtcgccgttctggaacttcaacgcccacagcgccatgtacggcatcaggggcagtgcaagggtccaggtcgccagcgacaacgggaccacggtgttcgacgacgtgctccgtgcggggcagctgctcatcgtaccccagggctacctcgtcgccaccaaggcgcatggagaaggcttncagtacatcgccttcgagacgaaccctgacaccatggtcagccactttgccgggaagaacttcgtcctgagccacttggccgccgt

SEQ ID NO: 84211 - DNA, 519 bp, Zea mays
  unsure (1)..(519): unsure at all n locations
nttagaaggctataccctcgtcatntccnttttggnntggtattnccgggtcgacccacgcgttcgcccacgcgtccgcggacgcgtggggcattcagagtggcgtgctgctaagaaggctaacggaatgaaggttgtttctcttataagggagaagacaggatatattgtcagtccagatgcaatgtttgatgtgcaggtgaaaaggatacatgaatataagcggcagctgctaaatatccttggaattgtctaccgctacaagaagatgaaagaaatgagcacagaagaaagagcaaagagctttgttccaagggtatgcatattcggtgggaaagcatttgccacatatatacaggcaaaaaggatcgttaaatttattacagatgtggcagctaccgtgaaccatgattcagacattggagatttgttgaaagtcgtatntgttccagactataatgttagtgttgccgaggcgcttattcctgccagtgaattgtcacaagcttattattctgt

SEQ ID NO: 84212 - DNA, 528 bp, Zea mays
  unsure (1)..(528): unsure at all n locations
tagttaatgtattctgagcctaccttgatcgcangctctaccggttcggaattcccggctcgacccacgcgtccgcagccacccacccactcgcttcagccgtttccgccgcgcgtaccaagcaggtggagacgggatgcctgctggccacggcctgcgctcgcggacgcgcgacctcttcgcgcgccccttccgcaagaagggctacatcccgctcaccacctacctccgcacctacaagatcggcgattacgtcgatgtcaaggtgaacggcgccgtccacaaggggatgccgcacaagttctaccacggccgcaccggtcgcgtctggaacgtcaccaaacgcgccatcggcgtttaggtcaacaagcatgtcaatgggcgcattaataggaagcggattcatgttcctgtggaacatgtgcatccgttccgctgcacaaaaaaagtccccccttagtatgcgaaaaaatacccgcttaaagcgttgtccaaaaattccgtcaaggttttatccccaaaagggat

SEQ ID NO: 84213 - DNA, 537 bp, Zea mays
  unsure (1)..(537): unsure at all n locations
nagtntaaagtatatctgagnnccgttcagcacgcatcacctatattcnctcnggnttannnnncggnngccgtgggtctctccgtncctgctttgcaaaccagatcacttggtttactttgttgaggggtgatggcggtgtcttgcgcaaacctcagctccgaggcagggcttaaaaagcttgatgagtaccttctcactcgcagctacatcactggctaccaagcttccaaggatgacttggctgtctacacttcgttttcgtctgctccctcgtccaagtatatcaacgtagcaaggtggtttaatcacattgatgcgctcgtgaggctgagcggaattactgcaaagggccaaggtgtgaaggttgaatcgtcagcagttccgtcagccccaactccagatgttgctgaatcacatgccccagttgctgaagaggacgaccactatgattttgacctttttggtgaggagacctatatatttttgaatgcttcttaaaatccttcctttattttcaatgctttttatataaat

SEQ ID NO: 84214 - DNA, 530 bp, Zea mays
  unsure (1)..(530): unsure at all n locations
gaggttgagagtatctgaccctcacctgaatatcgatggcatnaccacttccggttcggaattaccggctggacccacgcgtccggagacatttaacaactttggagacaatctggatcgcaaaacagtggtgcatagactggttggatgtggagttgcagagaaagtggttgctgctggtttgagatgcatcgtaagcaaccaggataagtggtacctagatcacttggatgctacatgggaaggattttacacgaatgaaccactgacaaatatctacaacccggagcagcagaaattggtacttggtggtgaggtatgcatgtggggcgaacacattgatgcatcagacattcagcagacaatttggccacgtgctgcagcagctgcagagcggctattgacaccaattgagaagctggcgaaggacacaagatcggtcactgcaagattggcacgcttcaagtgcttgctgaatcaaagatgggttgctttttgaacactaacttgttttgttctctctggatcat

SEQ ID NO: 84215 - DNA, 523 bp, Zea mays
agtttgaggctgtacctcgatcgaaagtatgcacgctcgtaccggtccggattcccgggtcgacccacgcgtccggggtcttcagaccattagctttatctactccagagcgcagaagaacccgatcggcacgatgagggtgttgctcgttgccctcgctctcctggctctcgctgcgagcgccacctccacgcatacaagcggcagctgcggctgccagccaccgccgccggttcatctaccgccgccggtgcatctgccacctccggttcacctgccacctcctgtgcatctcccaccgccggtccacctgccgccgccggtccacctgccaccgccggtccatgtgccgccgccggttcatctgccgccgccaccatgccactaccctactcaaccgccccggcctcagcctcatccccagccacacccatgcccgtgccaacagccgcatccaagcccgtgccagctgcaaggaacctgccgcgttggcagcaccccgatcctgggccagtgcgtttaa

SEQ ID NO: 84216 - DNA, 507 bp, Zea mays
tagtttaaagagggtgtggctcggccatcggactgagcactgccgtaccggtccggattcccggtcgacccacgcgtccggctgcttatttgcagcagcaaatactactaccatttagccagctagctgcaggaaaggggacttccttcttgacacagcatcagctgctgactttctaccagcagtttgcggctaaccctgcaaccctattacaactacaacaatcgtagccctttgtccaacttgctttgacagacccagcggcctcctaccaacaacacatcattggtggtgccctcttttagatagcttattagttgtaattcaataataaagttttttggatgatgtatgtggccaaccagaaataggaagttacatttccaaattacttatatttattgaatttttttattattattatatgtattattttttattttttttatcattttaaattatatactattttttattatttaatattattgtttggctcttttaatg

SEQ ID NO: 84217 - DNA, 532 bp, Zea mays
tgttgtagagttgaagtattgtttagtggaaaagagtatgtctactggtttcggaattcccgggtcgacccacgcgtccgccgacgcgtccgcggacgcgtggggataaggtactgtatgttggaagagcacagaaggagtgtgaaagagagatggagttgaaggagaaatttgaaaagaatgttcaagaggtagctgagaagttccaaaacacaaacttgtatttgaagaacttagaggagaacattgatgatgagaaattgcgtgaactctttgctgagtatggcaatattacttcctgcaaggttatgcgggattcgaatggtgtcagcagaggttctggatttgttgctttcaaatctgctgaagatgctaaccgagctcttacggagatgaatggcaaaatggttggaagcaagcccctttatgtagctcttgcgcagcgtaaagaagacagaaaggcaaagctacaggcacatttttcacaaatgcgttctgttgcaattgcgcctttagtatgtcctttcattcc

SEQ ID NO: 84218 - DNA, 529 bp, Zea mays
  unsure (1)..(529): unsure at all n locations
gagtggatgtactgtcttccgctcagccaggtacgcanactctactcggttcggaattcccgggtcgacctacgcgtccgatctctcgccgcctccagtccagagccaccgtgagatctgcccgattccgccggccggacccggtgactccctcccctcctcgatccgttcgggcggccggccggcctagcttcaagtgcggggatggtgttctacttcaaggcgcggcccgaggccggcgactacaccatcttcatgggtcttgacaagtacgagaacgaggacctcatcaaatacggcttccccgaggacatctggttccatgtagataagatgtcctctgcacatgtgtatgtgagattgaataaaggtcaatcaatggatgacatgagtgagggtttgctggaagactgtgcgcaacttgtcaaagctaattccattcaaggtaataaagtcaatatcatttgatgtaagttatacttcattgtacaatttttaataaatcccctttcatttatttttggccatg

SEQ ID NO: 84219 - DNA, 542 bp, Zea mays
  unsure (1)..(542): unsure at all n locations
aggatagggagatgcgttgtngttgctaatccgacgaggaggtgatgctagagctcgtaccggtctcggaattcccgggtcgacccacgcgtccgagcatctccgctccggctgcgctctgccttgctttcctgctacctgctctagcgcgagcgagagaggtacggcggccgatctggcggcgcaggcggagggctcggccggggccggcaagtcggcgccgaacatggggaggggccgggtcgagctcaagcggatcgagaacaagatcaaccgccaggtcaccttcgccaagcgccgcaacggcctgctcaagaaggcgtacgagctctcggtgctctgcgacgccgaggtcgcgctcatcatcttctccaaccgcggcaagctctacgagttctccagcacgcagagcatgccaaaaacacttgaaaagtaccaaaaatgcagttttgcagggcctgaaacagcactccagaatagagagaatgagccactgaaaagttcccccaatgagtgccctaaaattaaaggcaccttttatg

SEQ ID NO: 84220 - DNA, 507 bp, Zea mays
agtttagagagctggtgcccgcacctgccacacagcatcgctgtaccggttcggaattcccgggtcgacccacgcgtccggcagactacaacatccaaaatgagagctccctccaccttgtgctccgtctcgggggtggtcagtaagtcatgtgtcgtttaagctgccaatgtgcctgcgtcgtctggtgccctctctccatatggaggttgtcaaagtatctgctgttcgtgtcatgagttgcgttaacattggattaattatggatcgcttgtcttgtctgtgcgtactacccaggactatcactattcatgattcaagcttatgtatgcattcataccacgtgctcaatcttctatagtgtgacctaactttaattcactatccaatcgttttacatcgtgcatactgcgaaaaacctgtcgtttcctaactcaattgtcttgcagcacatcccactttcgacatctgtcgtaatatcgtctttgctatcattgataaaccttt

SEQ ID NO: 84221 - DNA, 506 bp, Zea mays
  unsure (1)..(506): unsure at all n locations
gtagagagcgttagccctgccactgtccatcgctatgctgtaccggtctcggattcccggtcgacccacgcgtccgcccacgcgtccgcccacgcgtccgcgcgaggccaagaagatcgacaagcacatgtaggacgatatgtacatgaaggtcaaaggtaactcgttcaagaacaagagggtgcttatggagagcatccacaagtccaaggctgagaaggccagggagaagacgctctccgatcagttcgaggccaggcgcgccaagagcaaggcgagtcgcgagaggaagaatgctaggagggaagagaggctggcccagggcccaagagaaataccaccaccagtctcagccacagctcccactaccggggcaccgaagaaagcaaagaagtgaagtattgcaacaaagctgcagctttctagtccagtacttcgtaattttggagcgccctgatcaattttgctgatatacagcttccacgcnnntatgnttgnatttcttt

SEQ ID NO: 84222 - DNA, 504 bp, Zea mays
gataaagagctgtagctggcttacgttactgagctactgctgtaccggtccggattcccggtcgacccacgcgtccgcggacgcgtgggcggacgcgtgggcggacgcgtgggttttgacaggtacgacaggggccggagcggcaaaatcgactcccgtgagctgaccgaggctctccggagccttggatatgctgttccaccttctgtcatcgagcttcttatagcgaattacagcaatggtgtgcccagcaatggcgcgctagactttgacaactttgtggaatgtgggatgattgtgaagggtttaaccgagaaattcaaggagaaggatacgcgctacaccggctcggctactcttacatacgatggtttcttgtcaatggtgatccccttcatcgtcccttagctgtgctgtatgtagttcggtaacttgatagtagtcatcaaccatggttctagtatgagtgcctttccctatatctgtttgaaaggtttttttttt

SEQ ID NO: 84223 - DNA, 530 bp, Zea mays
agtaagtaatgtctgtgatctcagccaaaagaaagtatcgctactacggttcggaattcccgggtcgacccacgcgtccgcccacgcgtccggctgcctactctcagcaacagcagtttcttccattcaaccaacttgctgcgttgaactctgctgcttatttgcaacaacaactaccattcagtcagctagctgctgtgagccctgttgccttcttgacacaacaacagttgttgccgttctacctgcacgctgcgcctaacgctggcaccctcttacaactgcaacaattgctgccattcaaccaacttgctttgacaaacccaacaacgttctaccaacaacccatcattggcggtgccctcttttagattgcttatgagttatagttcaataatgaagttttttggatgatgtttgtggcttcccagaaataagaaagtacatttctagattcttatgtgcttctagccttcaaaatgtggttgatagttaatttgctctaaaatcgggagtaatgaggtataaat

SEQ ID NO: 84224 - DNA, 532 bp, Zea mays
  unsure (1)..(532): unsure at all n locations
agttgtttggtnttgagttttttttatagtaaagtagtatgctactacggttcggaattcccgggtcgacccacgcgtccgctatttttgatcacgttattgaagccctaaattatgtcctaaaaggggaccgaactgggtggggattaccctaatggttgtccaaatcctcttcattggtattcccttctcaaagaaatctgcggtcaaatggattattcactaccccgtctcgtcgttctggtggagctctagggaagatagcacaaacattgaggtctccttcaaagtttataggccgcagtgatactctaccacatgttgatgcacggtatccagccatactattcaaacagcagcttactgcatgtgtcgaaaagatatttgggcagctcagagataatctaaaaaaggaaatatcacctcttcttaatgtttgcattcaggctccaaagtcaacacgtgggcaatctggaaaagcattcaagtcatctggagttggtgcccacccagcatcgaacttcaattgggc

SEQ ID NO: 84225 - DNA, 541 bp, Zea mays
  unsure (1)..(541): unsure at all n locations
ngagtggatgtgtaggttggagtcgtgtgttctattaagaaaagtattgctatgctcgtaccggtccggaattcccgggtcgacccacgcgtccgcgaagctaaaccaggcatcgcttttgtggagttcgaggacgacggccagtccgggggggcgatgcaggctctccaaggcttcaagatcaccccggagaaccccatggctatatcctatgccaaaaaatgagaaccctaggggactctgtaccggctttgtttcggtactctagtattgatcccaaatccacgtgtgctgaggtggattgtggtgtaaattagtttaagttacaccctaatctacctcaatacatgtagattgagctcaatactagagtatccaaactagacctaagatctttccgctccgcctttagaaatcgagccacggtacccactttccagtcatgtgtttttggaaagcactcgcttgatttcgaaattaaactcttaacacttttaaatcaaggtttggccctaaaaaaaaaaattttttatttttttta

SEQ ID NO: 84226 - DNA, 537 bp, Zea mays
  unsure (1)..(537): unsure at all n locations
gatgttaggttaaagtctgtgactcctacttgaaacttatctacgctcgtactcgtccgnattcccgggtcgacccacgcgtccgcggacgcgtggggccactaccctacttaaccgccccggcctcagcctcatccggggccgcacccatgcccgtgccaacagccgcatccaagcccgtgccagctgcagggaacctgcggcgtaggcagcaccaagatcctgggccagtgcgtcgagtttctgaggcatctctacaatcgatccgaaatccactactgctcacctgaattccagtctaaattactgtaagttacaccgttaattacctcaatacatgtagattgatctcaatactagagtatccaaactatacctaagaggtgggcgttcctcctttataaatctagccacgtaactcactttttcagtcatgtgtttttggaaagcactattttgatttctatattaatcttttaacactcttaaatcatgtttagtcttaaaataaatttaattttttttttttttatattt

SEQ ID NO: 84227 - DNA, 530 bp, Zea mays
gagttttaagcgtgtgtgccctcacccgtcacgtcgctacgctgtactcggtctcggattcccgggtcgacccacgcgtccgtgaagcttgtattccagccggctgagtgtatggccagggcggcgcgtactacgggctgggagaaggcgtccttgacgacgcgtcagccatattcggcttgcacgttgacccggccctccccgtcggcgtcgtttcgtccaggccagggcccttcgcggcgacgtccggtcggttcctggcgacggtcaccggtaaaggcgggcacgccgcgatgccccacgaatccatcgaccctgttgtagctgcagccactactgtcgtcagcctccagaagatcatcttccgagatatcgatcccctgcagggcgcggttgtgtccgtcacttttcttaatggaggagtagcttacattgtctttctagatattgtggcctttttctgttacttgtatagcattactatattaatgacttttggattttatgttttttgtcctatttattttctg

SEQ ID NO: 84228 - DNA, 517 bp, Zea mays
  unsure (1)..(517): unsure at all n locations
gagtaagatgtaggtgtgctccctccnaatagtactcagtactgctcgtaccggtccggaattcccgggtcgacccacgcgtccgcccacgcgtccggaagggccagacgtgtccttccctcaacatcctcatcaaggttagggcgaagacaagggattcaaccgccataagcttgatgaggatgttgagggaagggccagacgtgtccttgagagcacctcctctggcgccaccaatgacaggcgccttgtagaggctcagaacgttttggtccaagggtcctggcatgcacttaaactccagtcttaatgtacttatggtccgaccatggtggcatgctcttcaaatggctctacacacgctagagactcatgataaaaggcgtagttctgcttggctgagacagccctgtcgacgtgcatacagcgatccatctcatgtgctctctgttcgaccagttcatgagctcaattctgtgtagacgacttaatatgctaatgtggaattgttagtgtg

SEQ ID NO: 84229 - DNA, 505 bp, Zea mays
agattaaagagctgtggctagcaccgatactgagcattgctcgtaccgtccggattccctggtcgacccacgcgtccgcggacgcgtgggcatcattggtgtgaccaaggggaaaggttacgagggtgtggtcagtcgttgtggtgtcacccggcttccccgcaagacccacaggggtctccgcaaagttgcttgtatcggtgcatggcatccggctagggtctcctatactgttgcccgtgctggtcagaatgggtaccaccaccgcactgagatgaacaagaaggtgtacaagatcggcaaggctggacaagagacccacgatgcctccacagagtttgacaggactgagaaggacatcactcctatgggtggcgtcccccattatggtatcgtgaagggtgactacctgatgatcaagggctgatgtgttggtccataatattaggttttaactcttcataagtcttttctttatcttgtttctatattttctctaaataaa

SEQ ID NO: 84230 - DNA, 540 bp, Zea mays
  unsure (1)..(540): unsure at all n locations
gattnttagttaggaagctgtgtctagggaaaagggaatattgtatactcgttcggattcccgggtcgacccacgcgtccgcaaattcgttccgtccaggcaaggaagtaatctagcagccaaggagaggagaagatggcgcgggctaagcaaaccggccgcaagtccaccggaagcaaggccccgcgcaagcaacttggcaccaaagccgccaggaaatccgcgccgaccaccggccgcgttaaaaaaccccacaagtacaagccccggacggttgcccttctcgagatccgcaaggtccaaaagaagcacgaacttcttatccggaaattgccctttcaacgccttgtcccgtgaaatcgctcaagacttcaaaacggatcttgcggttccagaccaacgccgttctggccttcatgaaagccgcctaggcctaccttgtcgcccttgtccaggaccaccaacttttcgccatattacgcaaaaggccgttacattattcccaaaaagcttttaaattttgccgtctgaattctcggt

SEQ ID NO: 84231 - DNA, 523 bp, Zea mays
  unsure (1)..(523): unsure at all n locations
nagttttagtttttgtttagggagagaggtatgctatactcggtccggaattcccgggtcgacccacgcgtccggccacctccacgcatacaagcggcagctgcggctggcagccaacggcggccgttcatcgtccggccgccgtgcctctgccaacctccgttcacctggcaactcctgtgcatctcccaccgccggtccacctgccgccgccggtccacctgccaccgccggtccatgtgccggccgccgttcatctgccgccgccaccatgccactaccctactcaaccgccccggcctcagcctcatccccagccacacccatgcccgtgccaacagccgcatccaagcccgtgccagctgcagggaacctgcggcgttggcagcaccccgatcctgggccagtgcgtcgagttcctgaagcatcagtgcagcccgaccgcgacaccctaatgtgttgcctaatccaatcctttgcggcaacagttttgccagcaacttaggcaggttgaaccccaacc

SEQ ID NO: 84232 - DNA, 527 bp, Zea mays
tagtttgaagtcttgtgctgcaccgttcgctcagcactgctgtaccggtctcggaattcccgggtcgacccacgcgtccggcaacatagaaagtggaatccagtagcatacaacagagcaacaatggcgaccaggatagtttccctccttatgctccttgctctttctgcatgtgttgctaacgcgacaattttccctcaatgctcacaagctcctatagcttcccttcttcccccataccttccatcaatgatagcttcagtatgtgaaaacccagctcttcagccctataggctccaacaagcaatcgcagcaagcaacatacctttatcacccttgttgtttcaacaatcgccagccctatctttggtgcagtcattggtacaaaccatcatggcacagcatctgcagcaactcgtgctacctgtgatcaaccaagtagctctggcatacctttctccctactctcagcaacaacaatttctttcattcaaccaactgtctacacctgaaccctgtgcttattt

SEQ ID NO: 84233 - DNA, 583 bp, Zea mays
  unsure (1)..(583): unsure at all n locations
agctgagtattatctgagttatgtaatcgtgctgtgnttcaagtcttcttatcatgnctgaattacttccggnttcggaatacccggctgctacccactcatgccgngaacatcataaagttggaatcctttatctttcaacagcatcaacaatggccgaccagggaatgtttccactccttatgttcgcttgctcttatctgcatgtgattgctatactctacaatttttccctcaatgcttcacaatcctcctatatctttcccttcttctctccatacctttccatcaattatagctacatgtattacaaaacccaactcttcatccctatagtctccaacatgcaatcttatcatgcaacatacctttatcacctctgttatatcacctttttcatcctttattttttttacatatagtggttgcaaaccatcaatgcatcattatcttcattaacttatatctttctttaatctaatctattattctttttcaatttcttttttcctactcttatcttctattattttcttatattaaattcatctattatactttattactattatttaattttttt

SEQ ID NO: 84234 - DNA, 535 bp, Zea mays
aagggtttaagtcctgtcgttcatggcctagcttcactacagctattgctcgtactcggtccggaattcccgggtcgacccacgcgtccgggcgatctattatatcgctactgatagtctccagagtgcgaagactgctcctgtctgggaaaagctggttcagaaagatattgaggtcctttacctcattgagccaattgatgaggttgccattcagaatttacagacatacaaagagaagaagttcgttgatattagcaaagaggatttggaattgggtgatgaagatgaggacaaggagaaagaaagcaagcaggagtatactcttctatgcgactggataaagcagcagcttggcgataaagtcgccaaggtccagatctcgaagcgactcagctcttctccatgtgttcttgtttctggtaaatttggctggtcagccaacatggaaaggctcatgaatgcacagacccttggtgacacatcaagccctgagttcatgataggtagacgaattttttagatcaaccctgac

SEQ ID NO: 84235 - DNA, 539 bp, Zea mays
  unsure (1)..(539): unsure at all n locations
gagttgtggtttntagaggtgtgtcttagctgagaagctgagtactgctcgtaccggtccggaattcccgggtcgacccacgcgtccgaaacaaggcttcccaatgaagcaaggagttctgacttctggtcgtgtccgcctgctggtccacagaggcactccctgcttccgcggttatggcaggcgtaatggtgagcgcaggaggaagtctgtccgtggttgtattgtgagccaagacctatctgttatcaacttggtaattgttaagaagggtgagaacgatctgcctggtttaactgacactgagaagccaaggatgaggggtcccaaaagggcctccaagatcaggaagctgttcaatcttgcaaaggatgacgacgtgcgcaagtacgtgaacacgtaccgcaggacattcactaccaagaatggcaagaaggtgagcaaggcacctaagatccagcggcttgtgacccccttgaccctttagaggaagcgtgctagaaatgctgacaggtaatagaggatcgctattataattt

SEQ ID NO: 84236 - DNA, 506 bp, Zea mays
tagtagagtgcgtttaggccgttacccgccacttagctatgatgtaccggttcggaattcccggctcgacccacgcgtccggagaccaacaagcaacatagatagtgttatacagcatcaacaattgagcaacgatgggggccaagatatcttccatcctaatgctccttgctctgtctacatgtgttgctaactcgaccatctttcctgaatactcacaaactactatatctacaattctttcagcatatattgcatcaatgtccacttcaatatgataatacatagccatacaaccatacacgctgcatcaagctttctcaacttgtacattacctatatcatgcctaacgtcataacaatcatcaaccgtatggagcttgccgtcattaacataaacgataacgacgcacaatctggaggaactcgtgctagcagtgatcatccatacagctgtggccttccatgctgcctatactgatcatgacaacgccttgatagcaacc

SEQ ID NO: 84237 - DNA, 511 bp, Zea mays
  unsure (1)..(511): unsure at all n locations
nagtataaaggaggtctgaggcttgcacctgttactnagcattgctgtaccggtctcggaattcccgggtcgacccacgcgtccggagaagaccatcttccacctcaacccgtccgggcgcttcgtcatcggcgggcgccagggtgacgccggcctcaccggccgcaagatcatcatcgacacgtacggcggctggggagcccacggcggtggcgccttctccggcaaggaccccaccaaggtggaccgcagcggcgcctacgtggccaggcaggccgacaagagcatcgtggccagcggcctcgcccgccgctgcctcgtgcaggtgtcgtacgccatcggcgtgccggagcccctgttcgtgttcgtcaactcgtacggcgctggcacgatgcatcacaaggagatactaaggatcgtgaaggagaactcgtacttgaggccttggttgatccggatgatggcttacttgtagaaagttcggaactggctcattacgatattttctttg

SEQ ID NO: 84238 - DNA, 544 bp, Zea mays
  unsure (1)..(544): unsure at all n locations
agtagacgttgagtntntgatgttgtctgttcctacgttaaggaattatgtacactcgtctcgaattcccgggtcgacccacgcgtccggatgacaaccaagaggactcaagcaacacaagttctggtgtatcacttggggattacgttcgtggtcctgccttagatactctcttgcagcgtttggcggagagtgacctcagtcgttctggcacaccgcctgccaagaaggaagcagtcgccgcgctaccaaccgtgaacatcaaggaagcgttgggctgttcagtctgtcttgaggatttcgagatgggaggagaagcgaagcagatgccctgtcagcataagttccactctcactgcatactcccgtggctggagctccacagctcttgcccaatctgccggtttcagttgcctactgaggagacgaagaacaacccatgcgaatcagccagcaccgcaggggccattaacggcgatggagacaacgcttcttcaagccggatcgattccgaaagttcttaccccttttaaattgccccttn

SEQ ID NO: 84239 - DNA, 531 bp, Zea mays
agtatagagagcctgtgttcacgtaggggagagtgatgcattgctcgtaccggtccggaattcccgggtcgacccacgcgtccgcggcacctcagatccggcctccccctcctccgcgcccacctcgcatcctccgaatccgcggccgtcgctcaggtttcgaggggcttcgcgtcgcaggccgccaagcccaccgggaaggagatcaaggttccaaaggctctgtttggcggcacaggcaactatgccagtgcactgttcctcacagcagctaaatctaatgcattggacaaagttgaatctgagattaaagctattgtagaggcttccaagaagagcccgttgttttctcaattcataaaggacttgtcagttccaaaagcgaccagggtgaaggctatagccgaaatatttgctgacgctgggttttcagatgttacaaagaatttcttggctggcctggcggacaatggcaggctgaaatatattgaacgcattgcggaaagatttgttgatttgacttttgaaaat

SEQ ID NO: 84240 - DNA, 541 bp, Zea mays
gatattaaggtagaagcctgtggttcccaccttcgttacagcagaacagtaccggttcggaattcccgggtcgacccacgcgtccgcccacgcgtacgcggcgtgattcacctgtccgtgggcgaccgcgtggcgctgggaccgtgcgttagctgctggcgctggcgccactgcaagggcaggcggtacaacctgtgcgaggacatgaagttcttcgacaccccgccggtgcacggctagctggctaaccaagtggtgcacccggcacgacctgtgcttcaagctcctcgacagtgtgagcctgtaagagggcaccatgtgctaaccgtttagcgtggacatgcacgcttgccgaatttcgaatgtatgttcccttgactaacgggggggtggttgaatcttatatcattattttgatgttactctttagttttagatattatttaattttttaagtattttttttattttttttttttattattattattatatttatttttttaatattataattttttttttttaatattttaattat

SEQ ID NO: 84241 - DNA, 505 bp, Zea mays
taggttaaatgaggtctaggccgtcacctgtacgtcgcatggctgtaccggtctcggattcccgggtcgacccacgcgtccgcggacgcgtgggcggacgcgtgggggtgatgatgaacgtgacatgattgcagatgagggtcctgatttcaatgaccttgatgagaacctgcagagggaattccacaggtacctggatctgcgtggcatttcacccaggaccacaaatttcttgcacctgtacatgatcaacaaggacagccgtgagtacctgctctggctgagaaagctgaaggatttcttcaagcagtaggtgtgaagacctgaagatcagctttatctctcttttgttcctgctagggccttctcggttattccaattccatgtggattgaaatgtattaaaataaattttgacttgttatggatttaaattaacttaataccacccaatccacatggattattggtgaaacaaacatttcctagttgaaatttttgttat

SEQ ID NO: 84242 - DNA, 521 bp, Zea mays
  unsure (1)..(521): unsure at all n locations
tagttagatgttttgtcctccatcctttgctcgctactactgtctcggattcccgggtcgacccacgcgtccggtgatttcgaccttgcagccacctttttttgttctgttgtgtatctagtagttggaggagagatgcagtttgcacttgcattggacacgaactcaggtcctcaccagataagatcttgtgagggtgatgggattgacaggttggaaaaattaagtattgggggcagaaagcaggagaaagctttgagaaataggtgctttggtggtagagttgctgcaactacacaatgtattcttacctcagatgcttgtcctgaaactcttcattctcaaacacagtcctctaggaaaaattatgctgatgcanaccgtgtatctgctatcattttgggcggaagcactggatctcagctctttcctctgacaagcacaagagctacgcctgctgtacctgttggaggatgttacaggcttattgatatccctatgagtaactgctttaacagtgg

SEQ ID NO: 84243 - DNA, 537 bp, Zea mays
  unsure (1)..(537): unsure at all n locations
atatttttgagtattacttctgtgtgcccacnctaccgcacagcataacgttccggttcgattcccggctcgacccactcgtcctatggcagcatggacgctaaattctacatacgacccgcactccaaattcgcctgctcaggtatcaccatccatcccgctagctactgcctactctcatcaacaacaacttcttccatttaaccaattgtccgcacttaaccccgctgcttatttgcatcatcaaatactactaccatttatccagctagctgcatcaagccgttcttccttctttacacatcatcagttgctgcctttctaccatcagttttcggctaacccctcaaccctcttacaactacaacaattgtttccctttgtccaactttcttttacaatacccatattcttctaccaacaacacattattttttattcccttatttatatttcttattatttttaattatttatttatttatttttaattattattttctctattcttttatttaattataattttctattaa

SEQ ID NO: 84244 - DNA, 537 bp, Zea mays
  unsure (1)..(537): unsure at all n locations
ngagaatgggagatgctgttattcatgtcactgaatagttatgcattgctcgtaccggtctcggaattcccgggtcgacccacgcgtccgtagcaacatagaaagcacaatagtgtaccaacaatggcagccaaaatattttgcttcgttatgctccttggtctttctgcaagtgttgctaccgcaaccattttcccacaatgctcacaagctcctatagcttcccttcttcccccatacctctcaccagcggtgtcttcagtgtgtgaaaacccaattgttcaaccctacaggatccaacaggcaatcgcaacaggcatcttaccattatcacccttgttcctccaacaaccgtcagccctattacaagagttacctttggtccatttggtggcacaaaacatcagggcacaacaactacaacaacttgtgctagcaaaccttgctgcatactctcagcaacatcagtttcttccattcaaccaactggctgcattgaactctgctgcttatttgcaacaacaactaccattcatc

SEQ ID NO: 84245 - DNA, 534 bp, Zea mays
gagtggaaggctgtgttcctgcactgttcgcttagcattgctcgtaccggtccgaattcccgggtcgacccacgcgtccgcggacgcgtgggtagcaacatagaaagcacaatagtgtaccaacaatggcaggcaaagtatttcgcctccttatgctccttggtctttctgcaagtgctgctacggcgaccattttcccacaatgctcacaagctcctatagcttcccttcttccaccgtacctctcaccagcggtgtcttccgtatgtgaaaacccaattcttcaaccctataggatccaacaggcaatcgcagctggcatcttacctttatcacccttgttcctacaacaatcatcagccctattacagcagttacctttggtgcatttattggcacaaaacatcatggcacaacatctacaaccaactgtgctagcaaaccttgctgcctactttcagcaacaacagtttcttccattcaaccaactagctgcattgaactttgcttcttaattgcaacaacaacaacttc

SEQ ID NO: 84246 - DNA, 517 bp, Zea mays
  unsure (1)..(517): unsure at all n locations
agataaatgatgctgntagttaaggctaccgtatcacgtangcnattgctcgtactcggtctcggaattcccgggtcgacccacgcgtccgggcttactagttgatgatattatggggtacaaaatctatactcatgaattacgctcgggatatgctgcaaggattgataattgtaggagctatgataccgtgagcaaagatgtaattcaaaggtggacatatcctatggtgcctgatgtagtatccagtcatgatattctaggatagtagacttcataggcagggaatatacagggcatcaaatgtaacattgtcaccttcttcacaaatctaagcatattctattgacgctagtgtgactagattagcaggtcactgcaatggaagtaattcagttattgatcatggctacataattgcgaaagatgaacatattaaatgctcatgtatatagcacaatgatatattaggctatgcatgcaaagccagtagggtatataatgctataacttatac

SEQ ID NO: 84247 - DNA, 507 bp, Zea mays
  unsure (1)..(507): unsure at all n locations
agattaaatgagctcttgccctgcnctagtcagtcgctatactcgtaccggtccggaattcccgggtcgacccacgcgtccgcggacgcgtggggggcaatgcacctacatacctgcaacaacaattgttgcaacagagtgtaccagctctgactcaactagctgtggcaaaccctgttgcctacttgcaacagctgcttccattcaaccaactgactctgtcgaactctgctgcgtacctacaacagcgacaacagttacttaatccattggtagtggctaacccattggtcgccgccttcctacagcagcaacaattgctgccatacaaccagttctctttgatgaatcctgtcttgtcgaggcagcaacccatcgttggaggtgccatcttttagattacatatgagatgtactcgataatggtgccctcataccgacgtgtgtttcctagaaataatcaatatattgattgagatttatntcgattaaaaattaaaaaaaaag

SEQ ID NO: 84248 - DNA, 515 bp, Zea mays
  unsure (1)..(515): unsure at all n locations
agcattaagaggtcggtggttatnnttangccatagtacagcctaccggttcggattcccgggtcgacccacgcgtccggttcttcgccaccccgccggtgcacggctcgctggcgaaccaggtggtgcaggcggggcgacctgtgcttcaagctccccgacggtgtgagcctggaggagggcgccatgtgcgagccgctgagcgtgggcgtgcacgcgtgccgtcgcgcgggggtggggcccgagacgggcgatctcgtggtgggcgcctagctccatctacctggtgtcgattctagtggttctagcctatgacgatgctttccttgtttatgtgatccttttgcttcgactatttctatcagtttttgtttgggggtgttatttttatgatttatatatctttatttctttggtttgttctattttctatggttgttttgtttgcttttttattttatttatttttttttatttttttattttttaaactaactttatcttttattctttat

SEQ ID NO: 84249 - DNA, 542 bp, Zea mays
  unsure (1)..(542): unsure at all n locations
gagttaggatactacgtgagtcccccagtcccctacgcagtactggtcgnattcccgctcgacccacgcgtccgctcgataatggtgccctcattccggcatgtgtttcctagaaataatcaatatattgatggaaatttatctcaatataaaaaaaaaaaaaaaaaaaaaaaaaaaaaaaaaaaaaattaaaaaaaaaaaaaaaaataaaaaaaaaaaaaaaaaaaaaaaatcaaaaaaaaaatacataaaaaataaaaaaaaaataaaaaaaataaaaaaaatgtttaatttttaaatatttaaatttttttattattatttttaaatattaatatttttatattattttcataaaattaaatttataaattttttttttaaaaaaattattttttattaaaaccatttattttcccaaataaaaatttttttaaaaaaaatattttttattatattattatttataataaaaatttatcttattaaattttctttattaaaaaatttttctaaatatatttattttattttttttccct

SEQ ID NO: 84250 - DNA, 541 bp, Zea mays
  unsure (1)..(541): unsure at all n locations
gggttgaagtcctgtggtttgcatccgtcgtacagcagtactgtactcggtccggaattcccgggtcgacccacgcgtccgattaagaccaactagcaacatataatgtacaatagtgtaccaacaatggcancgcgaggtattttgcttccttatgctccttggtctttctgcaagtgctgctaccgcgaccattttcccgcaatgctcacaagctcctatagcttcccttcttcccccatacctctcatcagcggtgtcttcagtatgtgaaaacccaattcttcaaccctacaggatccaacaggcaatcgcagcaggcatcttacctttatcacccttgttcctccaacaaccgtcatccctattacagcagttacctttggtgcatttgttggcacaaaacatcatggcacaacaactacaacaacttgtgctagcataacctgctgcctactctcagcaacagcagtttctttcaattaaccaacttgctgcattgaaactctccttgttatttgcaacaacaacttaccattta

SEQ ID NO: 84251 - DNA, 509 bp, Zea mays
tagttataggatgctgtgggtcggccatcggactacgctatgctgtaccggtccgtgattcccgggtcgacccacgcgtccgcccacgcgtccgcggacgcgtgggggctgcgccggcgtgctcgtgatctcaggccaggtcgtgcctccgctccggtcacccgtcgctccacgcaaccatgtcgaggaggaagaccagggagcccaaggaggagaacgtcacccttggacccactgtccgtgaaggagagtatgtctttggtgtcgctcacatctttgcatccttcaatgacaccttcattcatatcactgatttgtctgggaggtaaactctggttcggatcaccggtggcatgaacgtgaaggctgaccgtgacgagtctgtaccttacgctgttatgcatgcttgtaaagacttctgaaagcgcctcaaggagcttaggatttactggactgcacattaagcttttcgccaactgaggcaatgtttatatattatattttttatt

SEQ ID NO: 84252 - DNA, 502 bp, Zea mays
  unsure (1)..(502): unsure at all n locations
cggggcagtactggtccggaattcccgggtcgacccacgcgtccgcggacgcgtgggtgagattcccagggcagctctagtggctgacgagatcgcggagcagtctgaattcttctcctttggaacgaacgacctcacgcagatgacctttggctacagcagggatgatgtggggaagttcatccccatttatctggctcagggcatcctccagcatgaccccttcgaggttctcgaccagagaggagtgggcgagctggttaagcttgctacagagaggggccgcanagctaggcctaacttgaaggtgggcatttgtggagaacatggtggagagccttcatcggttgctttcttcgccaagactgggcttgattacgtttcttgctcccctttcaggttcccgatcgctaggctagcttcagctcaagtgcttggctgaagggctggcttctcgtggcagcctgctgttggtcattttgtggttaatattctaccatgg

SEQ ID NO: 84253 - DNA, 523 bp, Zea mays
  unsure (1)..(523): unsure at all n locations
nagttcggagttattgacctccgatctccgtacgctctactgttcggattcccggtcgacccacgcgtccgcagctttctcagattgaagaccagaagaactttctaccccagttagttgagactgaaatggacagacttttgaaggagggcacttacaaaggaaagaagtttaatgcaatctgtcacttctttggctaccaagctaggggagcactgccttccaagtttgactgcgattatgcctatgtcttggggcatgtgtgctaccacatcatagctgccggtttgaacggttacatggccacagtgacaaatgttaagagtccaatgaaacaagtgcgaatttgttcggcttcctatttcgtctatgatgactgtgcagcgatggtcgcggttgccctttaaccacccaaaatcgaaagcctgctgttcacatggctagcgttaacttaaaaggaaagcttcgatgtttttaggcataattctttcacgttttttttgaaaatatcttcaattaccct

SEQ ID NO: 84254 - DNA, 538 bp, Zea mays
agatttggagtgcctgtgttcatcgcaccgaataggcatgccagtgctcgtactcggtctcggaattcccgggtcgacccacgcgtccgcaaaattcctgagtcatttgacaaagcttttcagtattcaaaagatggaaatcagttgaccactgcaagctctgtgaaacaagccattgaacctcttaaaaaatgtggggtcagtgatggagagatatgcatgatagcaaacattgggcctgagaccgttgaagaggtttacgcactagtgccatctctcaaggctaataggtcagctatcgaaggttcagtcaccgaggttcttaccgccctcgcaaacataaaagctgctaagtgaatctccaatggaactagaccgacaataaatcggaagcagctgtcttgttgatcgaggagcgcggaatctgcaaactggcccttcagtgttttggatgtgctgcggaaacgtgttatgatgtgtatataaaaaacgtaccatgtgcttgatgaactccctgtaggagtctaaattctttaat

SEQ ID NO: 84255 - DNA, 543 bp, Zea mays
  unsure (1)..(543): unsure at all n locations
tgaggtttaggagagcgttgtgttctactgaaggaaggtagtgtatgcatngctcgtactcggtctcggaattcccgggtcgacccacgcgtccgcgcattcgatccaactcctgagcactttctcctcgtccccgacaagccaatcgaaggggagatacggccatggactccaccggcaccggagcagggggtaaggggaagaagggagcggccgggcgcaaggtcggcgggccaaggaagaagtcggtgtcgaggtccgtgaaggccgggctccagttccccgtcggccgcatcgggcgctacttgaagaagggccgctacgcgcagcgtgtcggcaccggcgcccccgtctacctcgccgctgtcctcgaatacctcgccgctgaggttctggagctcgctggtaatgctgccagggacaacaagaagactcgcattattccgcgccacgtgcttctggcgatccggaacgacgaggagcttgggaagctgttgggcggcgtgaccatcgctcacggcggtgtgctccccaaaattaaat

SEQ ID NO: 84256 - DNA, 538 bp, Zea mays
  unsure (1)..(538): unsure at all n locations
gtagaagtgnnntnnnnaatcgggccacgcccatcgcattaccgtaccggtccggaattcccgggtcgacccacgcgtccgtgaaatttctgccaagagcaactacaactttgagaaacctttcctgtaccttgcaagggagctggctggtgatccgaaccttcactttgttgaagctgttgctcttaagcctccggaagttaccatcgacatggctatgcagcagcagcatgaagctgagcttgctgcagcagctgcacaacctcttcctgatgacgatgatgatctgattgagtagaaaggatcatgagtcttggacttgagcaggagttgtgccttgcacgatttaagttgttctagggtggactctctcttgagttatcattgtctggatcatttttttctccttggacttgttgcaacttttgagtgtggaaatggattggaatagtcgccatgaatttgctggctactttatacatgtctttggtcataaaccttggtttaaagataaattgtggcaatcccttagtgccta

SEQ ID NO: 84257 - DNA, 510 bp, Zea mays
tagttgtgaggatgctgtgagtcggcatcgatagtcgcattgctgtaccggtctcggattcccgggtcgactacgcgtccggcaaaccttgctgcctactctcacatcagcagtttcttccattcaaccaactaggttcattgaactctgcttcttatttgcaacaacaacaactaccattcagccagctacctgctgcctacccccagcaatttcttccattcaaccaactagcagcattgaactctcctgcttatttacagcagcaacaactactaccattcagccagctagctggtgtgagccctgctaccttcttgacacaaccacagttgttgccgttctaccagcacgttgcgcctaacgctggcaccctcttacaactgcaacaattgctgccattcaaccaacttgctttgacaaacccagcattgttctaccaacaacccatcattggtggtgccctcttgtagatttcttatgagtcatagttcaataataaagtttttt

SEQ ID NO: 84258 - DNA, 508 bp, Zea mays
agtattaggagctgtggtcggccatgccagtcgccatgctgtaccggtctcggaattcccgggtcgacccacgcgtccgcccacgcgtccgcccacgcgtccgcccacgcgtccgggtcagacgagtgggcgatctgcggtggaactggagtgttcgcgatggcgagaggcgtcataaggagaacgtttcttgccgacacgagcggcgggaactccgacgagcttgccgtggaggttctctgcccggtgttccgcccggcggcgtttggctcatcgtcgtcacagccagcagcaaaggacatcagctccaccgtcgtcgtcaccaaggtcggagtgtggggtggagagggagggtcggcgcaggacatcgtgacgacggatccgtcgaggcgtctgcagagcctgaccgttcgtgctgtctttgccgtggacttcattgagtttactttcagttccttcacatgttgttagacgctctacgttaaatattttggttttactgtctgct

SEQ ID NO: 84259 - DNA, 512 bp, Zea mays
  unsure (1)..(512): unsure at all n locations
gttaagagctgnntnnnncatcgaaactcatntcatgcnannactctaccggttcggaattcccgggtcgacccacgcgtccggaccaactagcaacatagaaagcacaatagtgtaccaacaatggcagccaaaatatttggcctccttatgctccttggtctttctgcaagtgctgctaccgcgaccattttcccgcaatgctcacaagctcctatagcttcccttcttcccccgtacctctcaccagcggtgtcttcggtatgtgaaaacccaattcttcaaccctataggatccaacaggcaatcgcagctggcatcttacctttatcacccttgttcctccaacaatcatcagccctattacagcagttacctttggtgcatttattggcacaaaacatcagggcacaacaactacaacaacttgtgctagcaaaccttgctgcctactctcagcaacagcagtttcttccattcaaccaactntctgcattgaactctgctgctta

SEQ ID NO: 84260 - DNA, 522 bp, Zea mays
  unsure (1)..(522): unsure at all n locations
aggaggtnntagtatctgcgtccagctccctcagntatgacgtaccggttcggaattcccgggtcgacccacgcgtccgcttggtctttctgcaagtgctgctaccgcaaccattttcccacaatgctcacaagctcctatagcttgctttcttcccccatacctctcaccagcggtgtcttcagtatgtgaaaacccaattcttcaaccctacaggatccaacaggcaatcgcagcaggcatcttacctttatcacccttgttcctccaacaaccgtcagccctattacagcagttacctttggtgcatttgttggcacaaaacatcaaggcacaacaactacaacaacttgtgctaggaaaccttgctgcctactctcagcaacagcagtttcttccattcaaccaactggctgcattgaactctgctgcttatttgcaacaacaactaccattcagtcagctagctgctgcctacccccagcaatttcttccattcaaccaacttgcagcattgaactn

SEQ ID NO: 84261 - DNA, 520 bp, Zea mays
  unsure (1)..(520): unsure at all n locations
agaggactcggagttgaacacgcaaaacgtatctctcgcaggttcggaattcccgggtcgacccacgcgtccggcaacatagaaagtggaatccagtagcaacaacagagcaacaatggcgaccaagatattgtccctccttatgctccttgctctttctgcatgtgttgctaacgcgacaattttccctcaatgctcacaagctcctatagcttcccttcttcccccataccttccatcaatgatagcttcagtatgtgaaaacccagctcttcagccctataggctccaacaagcaatcgcagcaagcaacatacctttatcacccttgttgtttcaacaatcgccagccctatctttggtgcagtcattggtacaaaccatcagggcacagcagctgcagcaactcgtgctacctgtgatcaaccaagtagctctggcaaacctttctccctactctcagcaacaacaatttcttccattcaaccaactgtctacactgaaccctgctgcttatttn

SEQ ID NO: 84262 - DNA, 525 bp, Zea mays
  unsure (1)..(525): unsure at all n locations
agtagtatcgtgaggtgnncctactgaactctttgnatactatagtanaccanacngnttcggaattcccgggtcgacccacgcgtccgcaagcaacatagaaagtggaatccagtatcaacaacagagcaacaatggcgaccaagagattttccctccttatgctccttgctctttctgcatgtgttgctaacgcgacaattttccctcaatgctcacaagctcctatagcttcccttcttcccccataccttccatcaatgatagcttcagtatgtgaaaacccagctcttcagccctataggctccaacaagcaatcgcagcaagcaacatacctttatcacccttgttgtttcaacaatcgccagccctatctttggtgcagtcattggtacaaaccatcagggcacagcagctgcagcaactcgtgctacctgtgatcaaccaagtagctctggcaaacctttctccctactctcagcaacaacaaatttcttccattcaaccaactgtctacactgaac

SEQ ID NO: 84263 - DNA, 522 bp, Zea mays
  unsure (1)..(522): unsure at all n locations
aggtnntctctaggtctctgtcgtatgctcaccgacctcactgcatagccgtaccggttcggaattcccgggtcgacccacgcgtccgcgcatgagcaaggagatcaccgcgctcgcgcggtcagcgatgcgccctggcaccatgggtctgactgctgtgcacgatggcatcttgaaggatgttgtctacccagctgagattgtggggaagcgtgtcagataccgtctggatggttccaagattatcaagattttattggacccaaaggagaggaacaacactgaatacaagctggagacctgcactgcggtctaccgcaagctgtgtgggaaagatgtggactttgagtaccctatgaccgaatatgcataaatatgatgccctctggatatctccactctatttcgttgattctgaatgttatgttgggtctccctatgtacttcaaaaaacatagttgtgatgctaaagttgtctaggaatttgatacggtgaagtggcaatggacgtgaacaatgttg

SEQ ID NO: 84264 - DNA, 531 bp, Zea mays
  unsure (1)..(531): unsure at all n locations
agagtancttnntaaggcgtgactgagacctaaagcactcatagtatagccgtaccggttcggaattcccgggtcgacccacgcgtccgattcatagacacaccacgcgaaacacattagcaacaacctaacaacaatggctaccaagagattatccctacttgtgcttcttgcgctttatgagagcgcaacaaatgcgttcattattccacaatgctcacttgctacaagttccataattacacagtatctcccaccaattacttcaatgggcttggaacacccagatatgcacgcctataggctccaacaagcaatcgccgctagcgtctaacaacagccaatttcccaggagcaacaacaatacttggctcatataacaatacaatccatctcatcgcatcagcatctacaatttctaccagcactgagccacctagccatggtgaaccctgtcggctacttgcaacagctgatgcttgcatcaaacccacttgctatggcaaacgctattgcaaaccagccacacag

SEQ ID NO: 84265 - DNA, 512 bp, Zea mays
  unsure (1)..(512): unsure at all n locations
aggagtgnnccgtagaagtatagatcaccgacctgacagcatgctctaccggtccggaattcccgggatgacccacgcgtacaaacacacctagcgaagcacattagcaactacctatcaacaatggctaccaagatattatccctccttgcgcttcttgcgctttttgcgagcgcaacaaatgcgttcattattccacaatgctcacttgctccaagttccattattacacagttcctcccaccagttacttcaatgggcttctaacacccagctgtgcaagcctataggctacaacaagcaattgcggcgagcgtcttacaacaaccaatttcccagttgcaacaacaatccttggcacatctaacaatacaaaccatcgcaacgcaacagcaacaacaattcctaccagcactgagccacctagccatggtgaaccctgccgcctacttgcaacagcagttgcttgcatcaaacccacttgctctggcaaacgtagttgcaaaccagcc

SEQ ID NO: 84266 - DNA, 504 bp, Zea mays
  unsure (1)..(504): unsure at all n locations
agagggncgtcaggtctgatcaaagcaatataggcgaatattgcaatgctctaccggtgcgtagttccaggcgtacgcacacgcgtccggccacgcgtccgctctgtttgggcccaacatcttagcgaagaagtgaggagaaggttctacaagaactggtgcaagagcaagaagaaggctttcacaaagtatgctctcaaatatgaaaatgatgctggcaagaaggaaattcagctgcagcttgagaagatgaagaaatatgcttctgttatccgtgtcattgctcatacccagattaggaagatgaagggtttgaagcagaagaaggctcacctgatggagattcaggtcaatggtggtaccattgctgacaaggtggactatggctacaaattctttgagaaagaggtccctgttgatgctgtcttccagaaggatgagatgattgacatcattggtgtgaccaaggggaaaggttatgagggtgtggtcactcgttggggt

SEQ ID NO: 84267 - DNA, 536 bp, Zea mays
  unsure (1)..(536): unsure at all n locations
aggaggggcngttgnggagtctgaaaacagcatatatagtatnctctcngcaggttcggaattcccgggtcgacccacgcgtccgcccaggaacagagcgaggcgacgccgcggcacctcttctccggcgaagggaaatggcaagcgttccaggggatctgatctggcaggttgtgaggaagaacaactccttccttgtgaagcagttcggcaacggcaatgccaaggtgcagttcaccaaggagccgaacaacctctacaacatccactccttcaaacactcgggtttggcgaacaagaagactgtgacgatccagccagctgcaaaggactcggctgtggtcctctctactaccaagaccaagaagcagaacgcacctgcgaagctcagccacaagtctgtgatgcgcaaggagttccgcaagatggccaaagctgtgaaaaacccaggttagtgacaactactacagggctgatctgaccaagccagctcttgctaggctaaagctcggtgtacccgcagncttcaggtttgc

SEQ ID NO: 84268 - DNA, 518 bp, Zea mays
  unsure (1)..(518): unsure at all n locations
agggtnnnctnnaggtgctacacgcactgacgcagtcctcagcagttccggattcccgggtcgacccacgcgtccggaggaagaagtcggtgacgaggtccgtgaaggccgggctccagttccccgtcggccgcgtcgggcgctacctcaagaagggccgctacgcgcagcgcgtcggcagcggtgcccccgtctacctcgcggccgtcctggagtacctcgccgctgaggtcctggagctcgccggcaacgctgccaaggacaacaagaagacgcgcatcgtcccgcgccacgtgctgctggcgatccgcaacgacgaggagctcgggaagctgctgaccggcgtgaccatcgcccacggcggcgtgttgcccaacatcaacccggtcctgctgcccaagaagacggcggagaaggcgtccagcggcgggagcaaggaggccaagtcgcccaagaaggccgtcaagtcccccaagaaggcatagggtttgggaggcggatcccgatgtggcatgtgt

SEQ ID NO: 84269 - DNA, 523 bp, Zea mays
  unsure (1)..(523): unsure at all n locations
agaggacgtcggagtgtgattcattntgcatgnannccgagcagntctgaataacttggccgacccacgcgtccggaggaagaagtcggtgaccaggtccgtgtttgccgttctccagttccccgtcggccgcggcgggcgcgacctcatgaagggccgctacgcgcagcgcgtcggcagcggtgcccccgtctacctcgcggccgtcctggagtacctcgccgctgaggtcctggagctcgccggctacgctgccaaggacaacaagaagacgcgcatcgtcccgcgccacgtgctgctggcgatccgcaacgacgaggagctcgggaagctgctgaccggcgtgaccatcgcccacggcggcgtgttgcccaacatcaacccggtcctgctgcccaagaagacggcggagaaggcgtccagcggcgggagcaaggaggccaagtcgcccaagaaggccgccaagttccccaagaaggcatatggtttggaggcggatccgatgttgacatgtgtaggttgt

SEQ ID NO: 84270 - DNA, 520 bp, Zea mays
  unsure (1)..(520): unsure at all n locations
gagggtctcgaggtgctgactgaacttaccgatcctactgtatagccgtaccggttcggaattcccgggtcgacccacgcgtccggcgagcggccgctcgcgatctagaactagcccacgcgtccgcccacgcgtccgcccacgcgtccgcccacgcgtccgggtcgcggggctgttggcggcgcagatagcgcagcaactgacggcgatgtgcggcctgcagcagccgactccatgcccctacgctgctgccggcggtgtcccccactgaagaaactatgtgctgtagtatagccgctggctagctagctagttgagtcatttagcggcgatgattgagtaataatgtgtcacgcatcaccatgggtggcagtgtcagtgtgagcaatgacctgaatgaacaattgaaatgaaaagaaaaaagtattgttccaaataaaaaaagagaaaaaaagggcggccgctctagaggatccaagcttacgtacgcgtgcatgcgacgtcatagcttttctaatgn

SEQ ID NO: 84271 - DNA, 526 bp, Zea mays
  unsure (1)..(526): unsure at all n locations
agagtttctcnaagggctgacgtaactacagccattattgcaatgctctaccggtccggaattcccgggtcgacccacgcgtccgcggacgcgtgggggagcggaaggcgaaagagtagcagcagcaggcggcgccgagtagcggctccccacctcgagcttgccaccatggctagaggattgaagaagcatttgaagaggctcaatgcgcccaagcattggatgctggacaagcttggcggagcttttgctcccaagccatcttctggacctcacaagtctagggagtgcctgccactgatcctcatcatcaggaacaggctcaagtatgctcttacataccgtgaggtcatttccatcctgatgcaacgccatgtactagttgatggcaaggtcaggacagacaagacctaccctgctgggttcatggatgtcatttccatccccaagaccaatgagaactacaggctgctgtacgataccaagggccgcttccgccttcacccaatcagggatgaggatgcta

SEQ ID NO: 84272 - DNA, 521 bp, Zea mays
gagagactcggggttgcttacgaactcaccgcactcactgcatgccgtaccggtccggaattcccgggtcgacccacgcgtccggggagggcaagagcgtcgtcacaactggccgcaagatcattggcgccaccaaccccctggcttctgagcccggcaccatccgtggcgactttgctgtcgacattggcaggaatgtcattcatggaagtgacagcattgagagtgctaataaggagattgccctgtggttccccgagggccctgctgattggcagagcagccagcacccctggatctacgagaagtaaacatggaaagtttcacatcaaaccttgagagccagaggaagcatgtcaccatttgtgctttagcaatgttttcgaaaagattatgatctgtatcttggaaccttatttcaatggaccaaatttctttcaaaaaaaaaaaacaaaaaaaacaacaaaaataaaaaacaaaaaaaaaagaacaaaaaaaaaaaaaaaaaaaaaaagggcggg

SEQ ID NO: 84273 - DNA, 529 bp, Zea mays
agagttcttcaaaaggctgtacgtaactcacagcatatatagcatgctctaccggttcggaattcccgggtcgacccacgcgtccgcccacgcgtccgcaattcgccgcactgaacccctctgcttatttccagcagcaaatactactaccatttggccagctagctacaacaagccccgcttccttcttgacacaacaacaattgcttccgttctaccagcagtttgtggctaaccccgcaacccttttacaactgcaacagttgctgccctttgtccaacttgctttgacaaacccagcagccttctaccaacaacacatcattggcggtgccctcttttagattgcttattagttgtcattcaataatgaagttttttggctgatgtatgtggcctcctagaaataagaagttatatttccaaattctaaaaaaaaaaaaaaaaaaaaaaaaaaaaaaaaaaaaaaaaaaaaaaaaaaaaaaaaaaaaaaaaaaaaaaaaaaaaaaaaaaaaaaaaaaaaaaaaaa

SEQ ID NO: 84274 - DNA, 499 bp, Zea mays
  unsure (1)..(499): unsure at all n locations
agagtntctcaagtttgttacgacactacagacgattaaagcaatgctcgaccgctgggtcgacccacgcgtccgcggacgcgtgggaaatggtgtgtatcataggatccttaccagtgccggtgtgacaatgattgaaggggcaggcagtctagttgatgctcatactgttgaagttagccagcccgatggttcaaagcaaaggtataccgcgaagcacattttgatcgcgactggtagccgtgctcaacgtgtcaacatacctggaaaggatctggctattacttctgatgaggccttgagcttggaggagcttccaaagcgcgctgtaatcctgggtggcggatatattgctgttgaatttgcttctatctggagggggatgggtgctgaagtagatttgttttatcgaaaagatcttcctttaagaggttttgatgatgagatgagagctattgttgcaagcaaccttgagggaaggggaatcaagttgcatcca

SEQ ID NO: 84275 - DNA, 505 bp, Zea mays
agaggaactcgagttgcaaagcattaaagaaacttatcgcaggtccggaattcccgggtcgacccacgcgtccgcccacgcgtccggtggcaaactacatgggtcaaatggccatggctatgggaaaacttggaacgcttgagaatttccttcgtcaggctgacaacctgcggctgcagactctacaacagatgcaaaggatcctgaccactagacagtcagctcgggcgctacttgtgataagtgattactcttcacgtctccgtgccctaagctctctctggcttgctcggcccaaggaatagcaagaacatgctatttgactgcaatacttttcacaatttggttttcaatggtcaggagatttgacaaggctgcgacagacttgattcggacatatctgcacatactatgacccaaatggaaggggatgttcatgtagcttaagctgcttagctttgtagttaagtgttgttgatgtatcattaccaactgctgtaaaatt

SEQ ID NO: 84276 - DNA, 508 bp, Zea mays
  unsure (1)..(508): unsure at all n locations
agagtnnnccttcaaggttggtaaaagagagtaaggggggattaacggaatgtctcggattcccgggtcgacccacgcgtccgcaacatacctttatcgcccttgttgtgtcaacaatcgccagccctatctttggtgcagtcattggtacaaaccatcagggcacaacagctgcagcaactcgtgctacctgtgatcaaccaagtagctctggcaaacctttctccctactctccgcaacaacaatttcttccattcaaccaactgtctacactgaaccctgctgcttatttgcagcaacaactattaccatttagccagctagctactgcctactctcaacaacaacaacttcttccatttaaccaattggccgcactgaaccccgctgcttatttgcagcagcaaatactactaccatttagccagctagctacagcaagccgtgcttccttcttgacacaacaacagttgctgccgttctaccagcagtttgcggctaaccccg

SEQ ID NO: 84277 - DNA, 522 bp, Zea mays
  unsure (1)..(522): unsure at all n locations
agaggtcgtcggagttggaaacgcattacagtatcctcngccagtccggaattcccgggtcgacccacgcgtccgcgcaaattgcaccaagaaatccatcgagaggccgtcgacaggggaattaatggcgtcgtggtctagcagcagccaccgccgcctcatcctcgcagccgccgtcctgctctccgtgctcgcggctgccagcgccagcgccgggacctcctgcgtgccggggtgggccatcccgcacaacccgctcccgagctgccgctggtacgtgaccagccggacctgcggcatcgggccgcgcctcccgtggccggagctgaagaggagatgctgccgggagctggcggacatcccggcgtactgccggtgcacggcgctgagcatcctcatggacggcgcgatcccgccgggcccggacgcgcagctggagggccgcctagaggacctgccgggctgcccgcgggaggtgcagaggggattcgccgncaccctcgtcacggaggccgagtgcaa

SEQ ID NO: 84278 - DNA, 512 bp, Zea mays
  unsure (1)..(512): unsure at all n locations
agggttnattnnagtagttaaagaaatacagtagcctacgcagcccgattcccggtcgacccacgcgtccgcccacgcgtccgccaagatgaaggtgtgcatgcttggtgatgcccagcatgttgaggaggccgagaagatgggacttgactacatggatgttgaggctctcaagaaaatgaacaagaacaagaagcttgttaagaggcttgccaagaagtaccatgctttcttggcatcagaggccatcatcaagcagattccccgtctccttggtcctggtctcaacaaggcaggcaagttcccgaccctggttactcaccaggaatccctcgagtccaaggtgaacgagactaaggcaaccgtcaagttccagctcaagaaggtcctttgcatgggtgtcgccgtcggcaacttggcgatggaggagaagcagatccagcagaacatccagatgagcgtcaacttncttgtttcccttctgaagaagaactggcagaatgtgagatgcc

SEQ ID NO: 84279 - DNA, 523 bp, Zea mays
  unsure (1)..(523): unsure at all n locations
agagggaactcgaaggttctttctgaactcacaagcactcancgtattgctctaccggtccggaattcccgggtcgacccacgcgtccgcccacgcgtccgaaacttttctcacgctcacccattccacccaccacccaccttccttgcctctctctctgtctgactgtctccctccgtccctcgaagcttctctggtttcagacgcaaccccgcgggtcgcgggatcaaggagccagagagcgggacgcagcgagcgttccgccggagatcgagaccgtagctagggtttgaggcgccgggctgcggtggacgagatgtcgacgccggcgaggaagcggctgatgcgggacttcaggcgcctgcagcaggacccgcccgccgggatcagcggcgcgccgcacgacaacaacatcatgctctggaacgccgtcatattcgggccggatgatacgccgtgggacggtggcacgttcaagcttaccttgcagtttacagaagattacccaaacaagccaccaact

SEQ ID NO: 84280 - DNA, 500 bp, Zea mays
  unsure (1)..(500): unsure at all n locations
agagtntcttcaaggtgcgtacagcactatccgccattaacgcatacctgaattcccgggtcgacccacgcgtccgcggacgcgtggggatcagcaaagcggcagtgcgtagagaggatcgtcgaacagaacagcatgaagatggtcatcgttctcgtcgtgtgcctggctctgtcagctgccagcgcctctgcaatgcagatgccctgcccctgcgcggggctgcagggcttgtacggcgctggcgccggcctgacgacgatgatgggcgccggcgggctgtacccctacgcggagtacctgaggcagccgcagtgcagcccgctggcggcggcgccctactacgccgggtgtgggcagccgagcgccatgttccagccgctccggcaacagtgctgccagcagcagatgaggatgatggacgtgcagtccgtcgcgcagcagctgcagatgatgatgcagcttgagcgtgccgctgccgncagcagcagcctgtacga

SEQ ID NO: 84281 - DNA, 521 bp, Zea mays
  unsure (1)..(521): unsure at all n locations
agagggcgtcntagttgatcatgaaatgaagaagcctacgcagttctgaattcccgggtcgacccacgcgtccgctcttggcttaccagcatattacatactagcctcatctgaagcttcttctaatctatcgggctatgatggtatcaggtatggaggacaggtctcggcggatgacttgaatgagctttatggagagtcccgggctaatggttttggtcatgaggtcaaaatgagaattttgatgggaacctatgctctttctgctgggtactatgatgcatactacaaacgagcacaacaggtcaggacactggttaagcaaagcttcaaagatgctttggaaagatacgacattttaatctcaccagctgcgccgtcagcagcctacaagataggtgaaaagataaatgacccgttagccatgtatgcaggagatatcatgacggtgaatgttaaattggccgggcttnctgcattggttgtgccttgtggatttgttgaaggtggagctgcangcn

SEQ ID NO: 84282 - DNA, 535 bp, Zea mays
tagagggacgttgaatagtgtgagtcactgacattataagtatccctacgccagttcggaattcccgggtcgacccacgcgtccggtcactcgcagctggcatcttaccctttttaacctttttccttccaccattatcaaccgggataccggcatttcccttgggtccattaattgccccaaaacataagggcacaacaactacaacaacttgtgctagcaaaccttgctgcctactctcagcaacagcagtttcttccattcaaccaactagctgcattgaactctgcttcttatttgcaacaacaacaactaccatttcagccagctatctgctgcctaccctcagcaatttcttccattcaaccaactgacagcattgaactctcctgcttatttacagcagcaacaactactaccattcagccagctagctggtgtgagccctgctaccttattgacacaaccacagttgttgccgttctaccagcacgctgcgcctaacgctggcaccctcttacaactgcaacaattg

SEQ ID NO: 84283 - DNA, 519 bp, Zea mays
  unsure (1)..(519): unsure at all n locations
agaggnncgtcngaaggctctcgtaactacggcgattaaagcacgctctaccggtccggaattcccgggtcgacccacgcgtccgaacaattcctaccagcactgagccacctagccatggtgaaccctgccgcctacttgcagcagcagttgcttgcatcaaacccacttgctctggcaaacgtagttgcaaaccagccacaacaacagctgcaacagtttctgccagcgctcagtcaactagccatggtgaaccctgccgcctacctacaacagcaacaactgctttcatctagcccgctcgctgtggccaatgcacctacatacctgcaacaacaattgttgcaacagattgtaccagctctgactcagctagttgtggcaaaccctgctgcctacttgcaacagctgcttccattcaaccaactgactatgtcgaactctgctgcgtacctacaacagcgacaacagttacttaatccactagcagtggctaacccattggtcgctgccttccta

SEQ ID NO: 84284 - DNA, 528 bp, Zea mays
  unsure (1)..(528): unsure at all n locations
agagttcctcnatagtggtgacgtaactaccagcatatacagcatgctctaccggtccggaattcccgggtcgacccacgcgtccgcccacgcgtccgctagcctagtggttattgacttccaagtagcacctccaagtcctgggttcgattcccctcgggagcgaattttcaggcttggttaaaaaaatcccctcgctgtgccccatccgctctcaggttacgatgtcctgtgcgccaccctccggttgggccgttgcagagtggacagttgacgccggcccgttagtgatggggggccagggttcggggattttctcggccgggaccattgtttcggtctcttcttaatataataccgggagggcggtctttccctccccggccgagtttttagtactataaagtaaaaattaaagaaaaacaacatacacacgaatgacatggacgaacaaaaaagggcggccgctctagaggatccaagcttacgtacgcgtgcatgcgacgtcatacctcttctatagtgtac

SEQ ID NO: 84285 - DNA, 500 bp, Zea mays
agagtcatcgtcgagagttgttccagccctgaagtagcctacgcagtctgattcccgggtcgacccacgcgtccggcctcgcgcaggcaacagcacaagcgtttacgactactgcagcacaagcgcaggaaacgcctgcacggtggagcaagtagagaacctcaagtcagctctgagcgtgatgcccatgtggtcagccatggtgatgtcgttcctgctgcagagctcctcgttcggggtcctgcaggcagccaccatggaccgccgcgtctgcgcaacaaggttccagatacccgcgggctcgatctcggtcttcgagatcctgaccttcacggcgtggtcaagctgctacgacgcctgcatcgtgccagtcctccggaggatgacggagcggcagcgcgtgctgacgctgaagcagcgcatgggagtcggcgtgtccctggccgtcgcctccatggcggtggcatcggcggtggagacccatcggaggcagcacgccg

SEQ ID NO: 84286 - DNA, 500 bp, Zea mays
agagggactcaagttgaaaccgaattacggtatcttatcgcagtccggaattcccgggtcgacccacgcgtccgccacgcgtccggcaacatagaaagtggtatccagtagcaacaacagagcaacaatggcgaccaagatattttccctccttatgctccttgctctttctgcatgtgttgctaacgcgacaattttccctcaatgctcacaagctcctatagcttcccttcttcccccataccttccatcaatgatagcttcagtatgtgaaaacccagctcttcagccctataggctccaacaagcaatcgcagcaagcaacatacctttatcacccttgttgtttcaacaatcgccagccctatctttggtgcagtcattggtacaaaccatcagggcacagcagctgcagcaactcgtgctacctgtgatcaaccaagtagctctggcaaacctttctccctactctcagcaacaacaatttcttccattcaacc

SEQ ID NO: 84287 - DNA, 524 bp, Zea mays
aggtctcttggtagtggataacgcattacagaaatcctccgccagttcggaattcccgggtcgacccacgcgtccgcacatggttatgacatcattaactgggaagagacatttaacaactttggagacaagctggatcgcaaaacagtggtgcataactggcttggaagtggagttgcagagaaagtggttgctgctggtttgagatgcatcgtaagcaaccaggataagtggtacctagatcacttggatgctacatgggaaggattttacacgaatgaaccactgacaaatatctacaacccggagcagcagaaattggtacttggtggtgaggtatgcatgtggggcgaacacattgatgcatcagacattcagcagacaatttggccacgtgctgcagcagctgcagagcggctatggacaccaattgagaagctggcgaaggacacaagatcggtcactgcaagattggcacgcttcaagtgcttgctgaatcaaagaggggttgctgctgcaccact

SEQ ID NO: 84288 - DNA, 522 bp, Zea mays
  unsure (1)..(522): unsure at all n locations
aggggctcngagtggaaccagcaataagtagcctacgccagttcggaattcccgggtcgacccacgcgtccgtgaagctgttacccgcaagacccgtattctcgacgtggtctacaatgcatcaaacaatgggcttgtgaggaccccaaaccttgggaaagagtgccattgtgcaagttgatgctgccccattcaagcagtggtacctcactcactatggagttgacattggtaggaagaagaaaacccctgctgcaaagaaggataatgctgagggacaagaggttgaggcagcagctgaggaaacgaaaaagagcaaccatgtcacgaggaagcttgagaagcgcaaggagggacgtacccttgacccacacattgaggagcaatttggcagtggacggttgctggcatgcatttcttcccgccctggacagtgtggccgagctgatgggtacatccttgagggtaaagagcttgagttctacatgaagaagctacagaagaagaagggcaagagcgctt

SEQ ID NO: 84289 - DNA, 519 bp, Zea mays
  unsure (1)..(519): unsure at all n locations
agtaggttctnnagggctgatgaaactcacagaaatatagcatgctgtaccggtctcggattcccgggtcgacccacgcgtccgcccacgcgtccgcccacgcgtccgagttccagcagttcggatcctgcggcgtcggcagggtcggcagcccgttcctgggccagtgcgtccagttcctgaggcaccagtgcagtccggcggcgacgccctacggctcgtcacagtgccaggcgctgcagcagcagtgctgtcaccagatcatgcaggcggagccgctgcaccggtaccaggcgacatacggtgtggtcctgcagtgcttcctgcagcagcagccgcagggcgagctcgcggcgctgatggcggcccaggtagcgcagcatctgactgcgatgtgcggtctgcagctgcagcagccagatccctgcccttgcaacgcagctgccggcggtgtctactactgaagaaactatgtactgtagtaataatgtaatggaacccgtgactagctacctatac

SEQ ID NO: 84290 - DNA, 533 bp, Zea mays
  unsure (1)..(533): unsure at all n locations
agaggtcgtgatggtggtgtacgatnctcacagccacttattgtcattgctcgtaccggtctcggaattcccgggtcgacccacgcgtccgcggacgcgtgggtgaagcggctctaccgtcgcgcgaccgggcggcgtccgggcgcgggcgtgggccccgtggcgacgctgctcatcgggtccgcggcgggcgccatcgccagctcggccacgttcccgctagaggtggcccgcaagcagatgcaggtgggcgctgtgggcggtaggcacgtgtaccagaacgtcctccacgctatctactgcatcctcaagaaggagggcgccggcggcctgtaccgaggtctcggacctagctgcatcaagctcatgcccgccgtcggcatcgacttcatgtgctacgaggcgtgcaagaagatcctcgtcgacaaggacgatgaggaggaggaggacgaagccggcggcggagaggatgacaagaaaaaggttgaatgatcaaagttcttggccaagaaggtagcaatggtctgaacgta

SEQ ID NO: 84291 - DNA, 503 bp, Zea mays
  unsure (1)..(503): unsure at all n locations
agaggaactcgaagttgagtcagccctcacgnatntcctagcagagttcggaattcccgggtcgacccacgcgtccggagacgcattctatgagagttgagaccttcttcctgatctatgctatacatgatgcagggaaatatgcataccttgcatcaatgggcatttatgtcttcaagaaagatgcacttttagaccttctcaagtcaaaatatactcaattacatgactttggatctgaaatcctcccaagagctgtactagatcatagtgtgcaagcatgcatttttacgggctattgggaggatgttggaacaatcaaatcattctttgatgcaaacttggccctcactgagcagccttcctagtttgatttttacgatccaatgacacctttcttcactgcaccccgatgcttgcctccgacgcaattggacaagtgcaagatgaaatatgcatgtatcttacatggctgcttactgagagaatgcaacattgagcat

SEQ ID NO: 84292 - DNA, 515 bp, Zea mays
gagagggtcgtcaaaggttctctacagccactacaaagacaattacagccatagctcgtaaccggctgcggagtacccacgcgtacggagaaccctgtcgactacttgcaacagttaggtgctatcatccaacccacttgctatggcgaacatgggtgaataccaacaacaacaacaattgcaacaggttctgccagcgctcagtcaactagccatggtgaaccctgccgtctacctacaacagcaacaactgctttcatctagccctctcgttgtgggtaatgcacctacatacctgcaacaacaattgctgcaacagattgtaccagctctgactcagctagctgtggcaaaccctgctgcctacttgcaacagctgcttccattcaaccaactgactgtgtcgaactctgctgcgtacctacaacagcgacaacagttacttaatccactagcagtgcctaacccattggtcactgccttcctacagcagcaacaattgctaccatacagcc

SEQ ID NO: 84293 - DNA, 520 bp, Zea mays
agagggcttgtgagttgtaaagaaatacagagacctacgcagtccggattcccggtcgacccacgcgtccggagcacactaagcgaagcgcactagctcaacctaacaacaatggctaccaagatatggtccctccttgcgcttcttgcgctttttgcgagcgcaacaaatgcgtgcattatttcacaatgctcactagctgctagttccattattccacagttcataccaccagttacttcaatggccttcgaacacccagctgtgcaagcctataggctacaacaagcgattgcagcgagcgtcttacaacaaccaattgcccaattgcgacaacaatccttggcacatttaacaatgcaaaccatcggaacgcaacagcgacaacagttactaccagcactgatccacctagccatggtgaaccctgtcgcctacttgcaacagcatctgcttgcatccaacccacttgctctagcagaacgtagctgcaaaccaacacaacaacaactgcaactgt

SEQ ID NO: 84294 - DNA, 519 bp, Zea mays
  unsure (1)..(519): unsure at all n locations
agagggtctcnaagggctgatgatactaaagaactgatgcatgctgtaccggtccggattcccgggtcgactcacgcgtccgcggacgcgtgggctcgcgcatcctattgccctcgcgccaccgtcgccgccgctgcagcgagccaccgccctgccgtcgcctgaggtagacaccaagccaccgccatggggcgtatgcacagccgcgggaagggtatctcttcatcggcgctgccgtacaagaggactcctccgatctggctcaagacagctaccaccgaggtggaggagatgattaccaaggctgcgaagaagggccagatgccgtcgcagattggtgttctgctccgtgaccagcacggcatcccgcttgtcaagagcgtgactggtagcaagatcctgcgcatcctcaaggcccatgggttggcgccggagatcccggaggatctctacttcctcattaagaaggccgtggcgattaggaagcatctggagaggaacaggaaggacagggactcc

SEQ ID NO: 84295 - DNA, 520 bp, Zea mays
  unsure (1)..(520): unsure at all n locations
agagtncctcnnagggctgatgtactacaagcattaaagcatgctctaccggtccggaattcccgggtcgacccacgcgtccgatcggatccagtcttctcccgggatctcctccggctataaatttccggccccaattcacccaatccagatgcgcaaacatcgaatcgtctcgctcgtggctgccctactcgtgctgcttgccctcgccgccgtttcctccacgcgcagcgcacaaaaggagtccgtggctgacaacgccgggatgttggcaggcggcatcaaggacgtgccggcgaacgagaacgacctccagctccaggagctcgcgcgcttcgccgtcaatgagcacaaccaaaaggccaatgctcttctggggttcgagaagcttgtgaaggccaagacacaagttgttgctggcacgatgtactatctcactattgaagtgaaggatggcgtagtcaagaagctttatgaagctaaggtctgggagaagccatgggagaacttcaagcagctg

SEQ ID NO: 84296 - DNA, 511 bp, Zea mays
  unsure (1)..(511): unsure at all n locations
aggaggnancgtcgnaggtatgatacaagcatataaaggcatgtcttggcaggtccggaattcccgggtcgacccacgcgtccggcgccgctgacgtcaagggggtcccagcagtaccgcgccctgaccgtcccggagctgacccagcagatgtgggacgcgaagaacatgatgtgcgcggctgacccgcggcacgggcgctacctgacggcgtcggccatgttccgcgggaagatgagcaccaaggaggtggacgagcagatgctgaacgtgcagaacaagaactcgtcctacttcgtggagtggatcccgaacaacgtgaagtcgagcgtgtgcgacatcccccccacgggcctggcgatggcgtccacgttcgtcggcaactccacctcgatccaggagatgttccggcgcgtcagcgagcagttcacggccatgttccggcgcaaggccttcctgcactggtacaccggggagggcatggacgagatggagttcaccgaggccgaga

SEQ ID NO: 84297 - DNA, 506 bp, Zea mays
  unsure (1)..(506): unsure at all n locations
agagtnnttcnaggtctcaccagcataaagagacttatgcaggtccggaattcccgggtcgacccacgcgtccgcaaattgcaccaagaaatccatcgagaggccgtcgacaggggaattaatggcgtcgtcgtctagcagcagccaccgccgcctcatcctcgcagccgccgtcctgctctccgtgctcgcggctgccagcgccagcgccgggacctcctgcgtgccggggtgggccatcccgcacaacccgctcccgagctgccgctggtacgtgaccagccggacctgcggcatcgggccgcgcctcccgtggccggagctgaagaggagatgctgccgggagctggcggacatcccggcgtactgccggtgcacggcgctgagcatcctcatggacggcgcgatcccgccgggcccggacgcgcagctggagggccgnctagaggacctgccgggctgcccgcgggaggtgcagaggggattcgccgncaccctcgtnacgg

SEQ ID NO: 84298 - DNA, 504 bp, Zea mays
  unsure (1)..(504): unsure at all n locations
agaggaactcgagcttgaaaacgcatagacggaatgtatcgcaggtcccggattcccgggtcgacccacgcgtccggagatcgcccaggacttcaagaccgacctccgcttccagagctccgccgtcgccgcgctgcaggaggcgtccgaggcctacctcgtcgggctcttcgaggacaccaacctctgcgccattcacgccaagcgcgtcaccatcatgcccaaggacatccagctcgcccgccgtatccgtggggagagggcctaggcgtcgtcccggtggaggtggaagtagtagtggccgtttctgtcatcactgtctggctagaaggtgtagagatgtgccgggttctgtagtttgggttatcggtcaaatcatgatgtagttgggtctaccctgctgtaatttaactatgactatgcaatggcaatgaagttctcggttatcagttcccgaanaanaaaanannnnnnnnnacanaannaananaaacaaaaacaaaa

SEQ ID NO: 84299 - DNA, 508 bp, Zea mays
  unsure (1)..(508): unsure at all n locations
agggtnnntnaaggtctcaccgacgttacgggaacttactgcaggtctcggattcccgggtcgacccacgcgtccggcccttgaagcccatgcagctcccaactgcaaggttctggtggttgccaacccagcatacaccaatgctcttatcttgaaagaatttgctccatctattccagagaagaacgttacttgcctgacccgtctggaccacaacagggctcttggccagatttctgagagacttaatgtccaagttagtgatgtgaagaatgttatcatctggggtaaccactcgtcctctcagtaccctgatgttaaccatgccacagtgaagacttccactggggagaagcctgttcgtgagcttgtctctgatgacgagtggcttaatggtgaattcatcacaactgtccaacagcgtggtgctgcaatcattaaagcgagaaagttctccagtgctctctcggctgctagctctgcttgtgaccacattcgtgattgggtt

SEQ ID NO: 84300 - DNA, 508 bp, Zea mays
  unsure (1)..(508): unsure at all n locations
agagtgacgtgatagttggttcgtcatcactcagcctagcagttcgattcccggtcgaccagcgttcgcgagcgtncggcacgcgtccgccatgcgttcgttctatgtctgaatacctcatgggtgaagaggttccagatgctgatattgctgttgtccgtgtcaccatcttcagtcgaccctaatgccacttatatgtggatgtctttgactctagtgaagacttcatatacctaatgcacacacttgctgacttcgaagcagctacaaagcttctgacacttgcaaaggttacattctgttatgatgcgctacatggtggtgctggagcttatgccaaacacatctttgatgaaaaacttgatgctgactaaaagctaactgaccaattgtgatccagaacatgactttggaagtggtcatgcggatcctaaccttacctatgctcaagactcggttgaactgatacgtcttggaaagtcattctcaaatgttgaacctcctgtan

SEQ ID NO: 84301 - DNA, 527 bp, Zea mays
  unsure (1)..(527): unsure at all n locations
agagggtttnnnaggctatgggggtaaaggggagttaatgccagtcctcgattcccgggtcgacccacgcgtccgcccacgcgtccgcccacgcgtccgctactatactatactctaggaagcaaggacaccaccgncatggcagccaagatgcttgcattgttcgctctcctagctctttgtgcaagcgccactagtgcgacccatattccagggcacttgccaccagtcatgccattgggtaccatgaacccatgcatgcagtactgcatgatgcaacaggggcttgccagcttgatggcgtgtccgtccctgatgctgcagcaactgttggccttaccgcttcagacgatgccagtgatgatgccacagatgatgacgcctaacatgatgtcaccattgatgatgccgagcatgatgtcaccaatggtcttgccgagcatgatgtcgcaaatgatgatgccacaatgtcactgcgacgccgtctcgcagattatgctgcaacagcagttaccattcatgttcaa

SEQ ID NO: 84302 - DNA, 526 bp, Zea mays
  unsure (1)..(526): unsure at all n locations
agagggtcgtcgnnagttagttaaagaatatacagtaatcctcngccagtcccgaattcccgggtcgacccacgcgtccgattctctgcatactggagaaacaggcaacatcgattctctgacctccctccacccaagcatggatggcattgaaggccaaacaacagtaaggaactcaccatttgtgcaacaagcagatgtcactatggtcgatggtcatgacaccaaggagcagacactcccttccacctctggcatgaccgattcttcgagcggcagcgcctcaagcgagcctactttcaaggggaacccaggacgtgccctcaaagaccgaagcagccctgcactgaccgtgaaagctacctacaatggcgacaccgtccggttcaagtttgtgccagcaaggggctggtaccacttgctggaagagatagcaaagaggttcaagctgacggctggagcattccagctcanatacaaggacgatgaggacgagtgggtgatcctggcgaacgatgccgacctt

SEQ ID NO: 84303 - DNA, 526 bp, Zea mays
  unsure (1)..(526): unsure at all n locations
agagtntttnntaagggtacatgaattacagacgattaagcattctcgaattcccgggtcgacccacgcgtccgtgcataccaacaacaacaacaattgcaacagtttctgccagcgctcagtcaactagccatggtgaaccctgccgcctacctacaacagcaacaactgctttcatctagccctctcgttgtgggtaatgcacctacatacctgcaacaacaattgctgcaacagattgtaccagctctgactcagctagctgtggcaaaccctgctgcctacttgcaacagctgcttccattcaaccaactgactgtgtcgaactctgctgcgtacctacaacagcgacaacagttacttaatccactagcagtgcctaacccattggtcactgccttcctacagcagcaacaattgctaccatacagccagttctctntgatgaaccctgccttgtcgtggcagcaacccatcgttggaggtgccatcttttagattacatatgagatgtaatcgataatgg

SEQ ID NO: 84304 - DNA, 510 bp, Zea mays
  unsure (1)..(510): unsure at all n locations
gggctgacgaanctacacgcattaaagcatgctctaccggtccggaattcccgggtcgacccacgcgtccggcactgcatccgcaccgtgctgcgcgacgaggggcctagcgccttcttcgtttcctacgggacaaccgtggtcatgaacgcaccctacacggccgtccactttgccacctacgaggcggccaagcggatgctcggggacatggccgccgaggaggagtcccttgccgtacacgccactgctggggccgcagcaggggcacttgccgctgcggtcaccactcccctcgatgttgtgaagacgcagctacagtgccagggtgtgtgcggctgtgaacgcttctcaagcagctcaataggagacgtgtttagaacaatcataaagcgagatgggtattccgggctcatgaggggatggaagccaagaatgctgttccatgcacctgcagctgcaatatgttggtctacatacgaggccctaaaagtcatttttccaaagttn

SEQ ID NO: 84305 - DNA, 528 bp, Zea mays
  unsure (1)..(528): unsure at all n locations
agagtgctcntagttgttacgaacttacgagattatgtatgctcgtaccggtccggaattcccgggtcgacccacgcgtccgcggacgcgtgggtacaggcttacttcgcagcaaatgctgctgctcaggcctcgaggagatcctcaccccgtgtgaccaatgaagaagtccagaaggctgctgctgctctcaagggctctgaccaccgccgtgcgaccaacgttagtgctagattggatgcccagcagaagaagcttaacctccccatccttcccaccactacaatcggttcgttcccacaaaccgttgagctcaggagggtccgccgtgagtacaaggcaaaaaagatctctgaggaggaatacgtcactgccatcaaggaggaaatcaacaaggtcgttaagctccaagaagagcttgacattgatgtgcttgtgcatggcgagcctgagagaaacgatatggttgagtacttcggtgagcagctctccggttntgcgttcactgccaatggctgggtgcagtct

SEQ ID NO: 84306 - DNA, 521 bp, Zea mays
  unsure (1)..(521): unsure at all n locations
agagtncttnnaaaggtaacgtatctcacagcattatagcatgctctaccggtccggaattcccgggtcgacccacgcgtccggttcgtgaggttctccggcgttcggcttcgtgggtgagcggatcgagatggcggcgtcggatgttgagtaccgatgcttcgtcagcggcctcgcctgggccacggacgaccactccctccacaacgccttcagcacctacggcgaggtcctcgagtccaagatcatcctcgatcgggagacgcagaggtcccgcggcttcggcttcgtcaccttctccacggaggacgcgatgcggaacgccatcgagggcatgaacggcaaggagctggacggccgcaacatcaccgtcaacgaggcccagtcccgcggcggccgtggaggccgccgcagtgggtaccgtggtggcacgtggaggcggcggctacggccgtggcgggcgccgtgatggcngccgcggctacggcggtcgcggcctgtaccgtggcggtagcggctac

SEQ ID NO: 84307 - DNA, 508 bp, Zea mays
agaggaactcgagtttggacacgaatatataagtatctatctgcagagtccggaattcccgggtcgacccacgcgtccgagaccaacaagcaacatagaaagtggaatccagtagcaacaacagagcaacaatggcgaccaagatattttccctccttatgctccttgctctttctgcatgtgttgctaacgcgacaattttccctcaatgctcacaagctcctatagcttcccttcttcccccataccttccatcaatgatagcttcagtatgtgaaaacccagctcttcagccctataggctccaacaagcaatcgcagcaagcaacatacctttatcacccttgttgtttcaacaatcgccagccctatctttggtgcagtcattggtacaaaccatcagggcacagcagctgcagcaactcgtgctacctgtgatcaaccaagtagctctggcaaacctttctccctactctcagcaacaacaatttcttccattcaaccaact

SEQ ID NO: 84308 - DNA, 509 bp, Zea mays
  unsure (1)..(509): unsure at all n locations
agagtnnctcnaagtggtacacgcatacgggagagtcatgcaagtcctggattcccgggtcgacccacgcgtccggccagcatcaaggagatgccggtggtgcaggacgggccgccgccgggcggtttcgcgcccgtgcgcttcgcccgccggatccccacctcggggcccagcgccaccgccatcttcctcaccaccttcggtgctttcgcatatggcatgtaccaggtcggccaggggaacaaggtccgccgggcgctcaaagaagagaaaattgctgctcgcagtgctatactgccgatgctccaagcagaagaggatgaaagatttgtcaaagagtggaagaagtgtcttgaggaggaggcgaggatcatgaaagacgttccagggtggaaggtcggcgagagcgtgtacaactctgggaaatggatgcccccggctactggtgagctccgccctgaggtttggtaagggcctgttgcaggcactgaatgccatcatgtcacggg

SEQ ID NO: 84309 - DNA, 498 bp, Zea mays
agagggactcgtgttgaaacgaattaagagacttatgcaggtctggaattcccgggtcgacccacgcgtccgcagctcactagtgctcagccgccgcaattaggggggcaggtagctcgagcgcgcgctccacctgcgccgacgcgatgcgggccaagtggaagaagaagaggatgccgatgctcaagaggaagcgccggaaaatgaggctgagatctaagtaggcgcatcttgtgaccgaggatggcgagcttctcctgcaccatggctgtgacgcgttgggatgattggctacctttgtagacgtgctttgctgtagacgtaggcgatgtaaaccgtgctttttgatcaattctagtatgttctgagactgggtttatattgtaatctgaggataatcatatgatgctataaggttatcgatattactgtcataaacgactcaatggagcagatgtaccacgagatggcctaagatagggcggtcgtctacaggat

SEQ ID NO: 84310 - DNA, 512 bp, Zea mays
  unsure (1)..(512): unsure at all n locations
agggttnnttcaaggtgctaaaacgacattaagggaaactactgcaggtccggaattcccgggtcgacccacgcgtccgcggacgcgtggggtggtgaaccctgccgcctacctacaacagcaacaactgatttcatgtagccctctcgctgtggttaatgcacctacatacctgcaacaacagttgctgcaacagattgtaccagctctgactcagctagctgtggcaaaccctgctgcctacttgcaacagctgcttccattcaaccaactgactgtgtcgaactctgctgcgtacctacaacagcgacaacagttacttaatccactagcggtggctaacccattggtcgttgccttcctacagcagcaacaattgctgccatacaaccagttctctttgatgaaccctgccttgttgtggcagcaacccatcgttggaggtgccatcttttagattacatatgagatgtactcgataatggtgccctcatagccgcatgtgtttcctn

SEQ ID NO: 84311 - DNA, 518 bp, Zea mays
agaggacgtcggagttggaaacgcaaaaagtatcttttcgaagttccggattcccgggtcgacccacgcgtccgcccacgcgtccggcttggtgctgatgaaagctcactgttgaattgtgtcccgaaagaggactttggaggtggtcatccggatcctaaccttacctatgcaaaagagttggttgaacgcatgggtcttggaaagtcatcctcaaatgttgagcctcctgaatttggtgctgcagctgatggagatgctgaccgcaacatgattcttggtaaaagattctttgtgacaccgtcggactctgttgccattatcgcagccaatgctgttcaatcaattccttactttgcttctggcctgaaaggagttgccaggagcatgccaacatctgctgcccttgatgttgttgcaaagaatttgaaccttaagttctttgaggtgcctactggaatgaagttttttgggaatttgatggatgctggaatgtgctcaatctgtggtgaaagaaa

SEQ ID NO: 84312 - DNA, 533 bp, Zea mays
  unsure (1)..(533): unsure at all n locations
agagtnnttcnntaagggtcacaagcacttgacaagccaatgaaagaatgctcgaactgctgggtcgacccacgcgtgcggctttggtggcaagaaaaagctggtcctctccactgcaacctggcttgggggaagaacgattttcgtggctttgcataccttatagttggtgggctctgcattttcctggcatttgcattcaccttgctgtacttcgtaaaaccaaggaaactgggagaccacaactacttatcctggaacagacgctaggatgtttcggaacaccaagtgtccgtactactcgaaatgtagcttgtatgaaatgaaatgctctgaaccagaaatgtcgatgggcataagcaagcatggttcaggaaagaacttcatgtatattttttacgaaggggtctaagtggctacgttaattttggttncttggggtccttagtgtagcactgaacaggagaataccaaatgaactctattagcttgcttccgtggtaaaaaaaaaaaaaaaaaaggccggtcgctct

SEQ ID NO: 84313 - DNA, 526 bp, Zea mays
  unsure (1)..(526): unsure at all n locations
aagagggnctcgagtgtctggaccagcatatacagcatcctgcaccagttcggaattcccgggtcgacccacgcgtccgcaagctcctatagcttcccttcttcccccgtacctctcaccagtgttgtcttcagtatgtgaaaacccaattcttcaaccctacaggatccaacatgcaattgcatcaggcatcttacctttatcacccttgttcctccaacaatcatcagccctattacagcagttacctttggtgcatttattggcacaaaacatcagggcacaacaactcgtgctagcaaaccttgctgcctactctcagcaacaacagttacctttggtgcatttgttggcacaaaacatcaaggcacaacaactacaacaactcgtgctagcaaaccttgctgcctactctcagcaacaacagtttctgccattcaaccaactagctgcattgaactctgctgcttatttgcaacaacaactagtactaccattcaaccagccagctgctgcctacccccac

SEQ ID NO: 84314 - DNA, 544 bp, Zea mays
  unsure (1)..(544): unsure at all n locations
agatgggacttnnntagtgtgcgataggatgctgancgacacttaaagtaatgcttgtaccggtgcggaatatccaggctgtgacccacgttgctttgagagacctagcggcctactaccaacaacacatcattggtggtgcccgcttttagagtgcttattagttgtaattcaataataaagttttttggatgatgtatgtggccaaccagaaataagaagttacatttccagattttaatgtgatattggtctccaagggtgttcgataattacttttcctaagattgggagtaacaagctttaaatcaaaagataaataatataaaaaacaaacaagataaaattgatgcatatgaaggcacaaaacataaaaaagggcggccgttctagaagatccaagcttacgtactcgtgcatgctatgacatagctcttctatagcgcaacctaaattcaatctactgggcagtcttttacaactttgtgactgggaatacctttgcgattcccaacttaatcggcttgaaaacataccccttttt

SEQ ID NO: 84315 - DNA, 525 bp, Zea mays
  unsure (1)..(525): unsure at all n locations
agagttncttnntaaggctgaagaaactacggggggtataaggaatgctctaccggtccggaattcccgggtcgacccacgcgtccggtttgattctgcaaaagctatggccttcagcaatgtgcctactcgtgattggattaaggatgccatctttaagactctgattgcaaatggaatgttcaataatgctcatataaggctcacgctcacccgtgggaaaaaggtgacatctggaatgagtccagctttcaatctttatgggtgtgccttgattgtgcttgcagagtggaaaccaccagtttatgataactctcatgggataaaattggttactgccaccacacgtcgaaattctccaaatagtatagattccaagatacatcacaacaatcttatcaacaatattctggcaaagatagaaggtaatcttgcccaggctgaggatgccattatgctagataaggatggctttgtatcagaaacanacgcaacanatatttttatggtcaaaaagggaatngt

SEQ ID NO: 84316 - DNA, 537 bp, Zea mays
  unsure (1)..(537): unsure at all n locations
agagganctcgaaagtggctacggagattacagacgatctattgtaagncttctaccggttcggaattcccgggtcgacccacgcgtccgcccacgcgtccgcaaagcggcagtgcgtagagaggatcgtcgaacagaacagcatgaagatggtcatcgttctcgtcgtgtgcctggctctgtcagctgccagcgcctctgcaatgcagatgccctgcccctgcgcggggctgcagggcttgtacggcgctggcgccggcctgacgacgatgatgggcgccggcgggctgtacccctacgcggagtacctgaggcagccgcagtgcagcccgctggcggcggcgccctactacgccgggtgtgggcagccgagcgccatgttccagccgctccggcaacagtgctgccagcagcagatgaggatgatggacgtgcagtccgtcgcgcagcagctgcagatgatgatgcagcttgagcgtgccgctgccgccagcagcagcctgtacgagccagctctgatgcagcagcagcagcagc

SEQ ID NO: 84317 - DNA, 537 bp, Zea mays
  unsure (1)..(537): unsure at all n locations
agagggnncgtgnngagtgngnaactgaagctctatgacacttaatgtaanactctaccggtccggaattccaggctcgacccacgcgtccgcatggactttccccagttgacgatgacattgcctgatggccgtgaggagtctgtcatgaagagaacaacactggtggctaacacatcaaacatgcctgtcgctgctcgtgaagcttccatttacactggaattacaattgctgagtatttccgtgatatgggctacaacgtcagtatgatggctgactccacctnccggtgggctgaggcattgcgtgagatctcagggcgtttggctgaaatgcctgctgatagtggttacccagcttaactggctgacgtttggcatccttttatgaacgtgctggtaaggtaaaatgtctgggaagtccagacaggaatggcagtgtcacaattgttggagctgtctctcctcctggtggtgatttttcagaccctgttacctncgcaaccctcagtattggtcaagtcttctgggggttaa

SEQ ID NO: 84318 - DNA, 514 bp, Zea mays
  unsure (1)..(514): unsure at all n locations
agaggtngtcaggtctgagaccgacgctatacagcaattagtgcagtgctggaattcccgggtcgacccacgcgtccgggaactacctcaacttcgacctcagcaggctggtgttcccgccggagctcacgtacctggacctgtcccacaacctcatccgcggcaccgtgccgctgtcgctggagcgcctgtccacgctgcagaagctggacctcagctacaaccgcctgtgcggcccgctccccaagggccacggcgtcatcaagcacgggtgcaagccgtacgcgcacaaccagtgcagcaaagggaccccgctcgcgggatgccaggacctggagtgagtgagccggtggccatggttttctatactctgctctgctctccctcgccggcgttcttttcgtgtcccaatcttgaaggacgacggtacggtgcctggtttagctatagacaaaaaaaggtacggccgcgtggtggcggtgctaatatgcttagccacgcccacgcgcggttg

SEQ ID NO: 84319 - DNA, 507 bp, Zea mays
aggggctcaggttgtaggggagtggggggagtaatggcaagtctcggattcccgggtcgacccacgcgtccgctacgaccgcctctctcttgcgtcggcaacagcagcgcagccagtagcccagtactcgttgctccacgccgccgctcaaaaccggcagaagtaagaacggggagggaagcacgccccaaacgttccgaggtttcgcctctcggagcgcaccaacgccacccggagcgactcgccaccggcgcggagaaggagggcggaggctaggcgatggcggacgagaatgaggctgggaagaaagaggaagaggaatttagcacaggccctctgtcagtactaatgatgagtgttaagaacaacacccaggttctcatcaattgccgcaacaacaagaagctgcttggccgggttcgtgcttttgatcgccactgtaacatggtgcttgaaaacgtgcgggagatgtggacagaggtccccaagactggcaagggcaaaaaa

SEQ ID NO: 84320 - DNA, 523 bp, Zea mays
  unsure (1)..(523): unsure at all n locations
ggagggtnctcgntagtctgaatacgcagcttactgtaatgctctaccggtccggaattcccgggtcgacccacgcgtccgatgccgctgaacaatacgaacaaatctttcagtgggccttcatcgatcgaccctatgtgatgtaaaaaaaaaggaccaaagtggtggttccttgaagatcatcagttcatcatcctatagtaagctgaatgatgaaagaaaacccctgtacattacatggaaggcagaccggctattggctccattgctccaatgtctgctttggctgccttgcctcgatggaccggatgcagtgaggaatccagccgaacgacagtttgaaggataggaaggggagctggaagcagtcacgcaggcagcctcgccgtgattcatatggaacaagctggagtcagtttctgctgtgccactcactgtttaccttaagattattacctggtgttgtgtcctttgctcgttagggctgataacgtaatgactcattagaaaatcatgcctcgtt

SEQ ID NO: 84321 - DNA, 519 bp, Zea mays
  unsure (1)..(519): unsure at all n locations
agaggttctcnngagttgatacgatnaccagntatacgtcgtanttctttccggttccggattaccggctcgacccacgcgtccgcccactcgtccgcggactcgtgggcggtctcgtggggcaacatagaaagcacaatagggtaccaacaatggcagccaaaatattttgcctccttatgctccttggtctttctgcaagtgctgctacggcgaccattttcccgcaatgctcgcaagctcctatagcttcccttcttcccccgtacctctcaccagcggtgtcttcggtatgtgaaaacccaattcttcaaccctacaggatccaacaggcaatcacagctggcatcttacctttatcacccttgttcctccaacaatcatcagccctattacatcagttacctttggtgcatttattggcacaaaacatcagggcacaacaactacaacaacttgtgctagcaaaccttgctgcctactctcagcaacagcagtttcttccattcaaccaactaa

SEQ ID NO: 84322 - DNA, 507 bp, Zea mays
gggctacgagcttaaagaacttactgtacgctctaccggtccggaattcccgggtcgacccacgcgtccgcccacgcgtccgaagcaacatagaaagtggaatccagtagcaacaacagagcaacaatggcgaccaagatattttccctccttatgctccttgctctttctgcatgtgttgctaacgcgacaattttccctcaatgctcacaagctcctatagcttcccttcttcccccataccttccatcaatgatagcttcagtatgtgaaaacccagctcttcagccctataggctccaacaagcaatcgcagcaagcaacatacctttatcacccttgttgtttcaacaatcgccagccctatctttggtgcagtcattggtacaaaccatcagggcacagcagctgcagcaactcgtgctacctgtgatcaaccaagtagctctggcaaacctttctccctactctcagcatcaacaatttcttccattcaaccaactgtct

SEQ ID NO: 84323 - DNA, 505 bp, Zea mays
  unsure (1)..(505): unsure at all n locations
agagtnncntcaggtcnactccgtaactacgggagattactgcaagctctaccggtccggaattcccgggtcgacccacgcgtccgcggacgcgtgggcggcgaccattttcccacaatgctcacaagctcctatagcttcccgtcttcccccgtacctctcaccaacggtgtcttcggtatgtgaaaacccaattcttcaaccctacaggatccaacaggcaatcgcagctggcatcttacctttatcacccttgttcctccaacaatcatcagccctattacagcagttacctttggtgcatttattggcacaaaacatcagggcacaacaactacaacaacttgtgctagcaaaccttgctgcctactctcagcaacagcagtttcttccattcaaccaactagctgcattgaactctgcttcttatttgcaacatcaacaactaccattcagccagctatctgctgcctacccccagcaatttcttccattcaaccaactg

SEQ ID NO: 84324 - DNA, 508 bp, Zea mays
  unsure (1)..(508): unsure at all n locations
agggtnncttcaaggctgtcgtaactcaagcatatatagtattgctctaccggtccggaattcccgggtcgacccacgcgtccgcgggttcgtgaggttctccggggttcgggttcgtgggtgagcggatcgagatggcggcgtcgagatgttgagtaccgctgcttcgtcggcggcctcgcctgggccacggacgaccactccctccacaacgccttcagcacctacggcgaggtcctcgagtccaagatcatcctcgatcgggagacgcagaggtcccgcggcttcggcttcgtcaccttctccacggaggaggcgatgcggaacgccatcgagggcatgaacggcaaggagctggacggccgcaacatcaccgtcaacgaggcccagtcccgcggcggccgtggaggcggcggcggtgggtacggtggtggccgtggaggcggcggctacggcggtggcgggcgccgtgatggcggtggcggctacggcggtggcggcggctacg

SEQ ID NO: 84325 - DNA, 504 bp, Zea mays
gggatccagcctttactacgctatagcacgacgtaccggtccggaattcccgcgtcgcagctagtcgtccgcccactcgtgcgtcctactctgccagcgccacctccacgcatacaagcggcggctgcgggtgccagccaccgccgccggttcatctaccgccgccggtgcatctgccacctccggttcacctgccacctccggtgcatctcccaccgccggtccacctgccgccgccggtccacctgccaccgccggtccatgtgccgccgccggttcatctgccgccgccaccatgccactaccctactcaaccgccccggcctcagcctcatccccagccacacccatgcccgtgccaacagccgcatccaagcccgtgccagctgcagggaacctgcggcgttggcagcaccccgatcctgggccagtgcgtcgagtttctgaggcatcagtgcagcccgacggcgacgccctactgctcgcctcagtgccagtcgttgg

SEQ ID NO: 84326 - DNA, 520 bp, Zea mays
  unsure (1)..(520): unsure at all n locations
gaggaactcggtatttgatttagttctgaccgtatngctaagcgactcgaattccgtgtcgacccacgcgttcgctcagctagctgcggcaaaccctgctgtttacttacaacagttgcttacattcaaccaactggctgcgtgaaactctgctgcgtacctacaacagcgacaacagttacttaatccattggcagcggctaacccattggtcgctaccttgctgcagcagcaacaacaattgctgccatacaaccagttctatttgatgaaccctggcttgcagcatcccatcgtcggaggtgccatgctttaaattacatatgagatgtactcgacaatggtgccctcataccgacatgtgttgactagaaataatcaatatatcgatcgagatgcatctcgatcaataaaaagctttaggaaccccggtcggngtgtggtgggagttcggcaaggacggcgacacccacctactcggcgacaacctcaggtggcttggctttcggcggaggtaccc

SEQ ID NO: 84327 - DNA, 523 bp, Zea mays
  unsure (1)..(523): unsure at all n locations
ngttaggtgttagaggaactcgntagttggcgaaaagactgaaaagaacttatgcacctctattcccggtcgacccacgcgtccgacgcaaattgcaccaagaaaccatcgagaggccgtcgacaggggaattaatggcgtcgtcgtctagcagcagccaccgccgcctcatcctcgcagccgccgtcctgctctccgtgctcgcggctgccagcgccagcgccgggacctcctgcgtgccggggtgggccatcccgcacaacccgctcccgagctgccgctggtacgtgaccagccggacctgcggcatcgggccgcgcctcccgtggccggagctgaagaggagatgctgccgggagctggcggacatcccggcgtactgccggtgcacggcgctgagcatcctcatggacggcgcgatcccgccgggcccggacgcgcagctggaaggccgnctagaggacctgccgggcttgccgcgggaggtgcaaaagggattcggcgncaacctcgtcacggaggc

SEQ ID NO: 84328 - DNA, 540 bp, Zea mays
  unsure (1)..(540): unsure at all n locations
ngaaagtgttttagagttncttcnnntaagaggcgtacgtatactctacaagcactcacagtaangccgtaccggtccggaattcccgggtcgacccacgcgtccgcggacgcgtggggcagctcaggcaggtggagccgcagcaccggtaccaggcgatcttcggcttggtcctccagtccatcctgcagcagcagccgcaaagcggccaggtcgcggggctgttggcggcgcagatagcgcagcaactgacggcgatgtgcggcctgcagcagccgactccatgcccctacgctgctgccggcggtgtcccccactgaagaaactatgtgctgtagtatagccgctggctagctagctagttgagtcatttagcggcgatgattgagtaataatgtgtcacgcatcaccatgggtggcagtgtcagtgtgagcaatgacctgaatgaacaattgaaatgaaaagaaaaaagtattgttccaaattaaaaaaaaaaaaaaaaaaaaaaaaaaaaaaaaaaaaaaaaaaaaaaaaaaaaa

SEQ ID NO: 84329 - DNA, 527 bp, Zea mays
  unsure (1)..(527): unsure at all n locations
agaggaactcgntagtttggcgacagaaactctaccgacagcttatcgtaanactctaccggtccggaattcccgggtcgacccacgcgtccgaacacaccaagcgaagcacattagcaacaacctaacaacaatggctaccaagatattatgcctccttgcgcttcttgcgctttttgcgagcgcaacaaatgcgttcattattccacaatgctcacttgctccaagttccattattacacagttcctcccaccagttacttcaatgggcttcgaacacccagctgtgcaagcctataggctacaacaagcaattgcggcgagcgtcttacaacaaccaatttcccagttgcaacaacaatccttggcacatctaacaatacaaaccatcgcaacgcaacagcaacaacaattcctaccagcactgagccacctagccatggtgaaccctgccgcctacttgcaacagcagttgcttgcatcaaacccacttgctctggcaaacgtagttgcaaaccagccacaac

SEQ ID NO: 84330 - DNA, 512 bp, Zea mays
  unsure (1)..(512): unsure at all n locations
aggctgctgatgcttcacgcacatcacgtatagccgtaccggtccggaattcccgggtcgacccacgcgtccgcccacgcgtccgcccacgcgtccgctcgtactggtagcccgaaccctagctagcaggtcggaggcgagagagcagccatggcgcggtgcctcgcgctcgtctccctccttctcctcggcctcgcctccgccgcctccgctgccgatgcgccctttgtcgtcgcgcacaagaaggtttcgctctcccgccccaagccgggcgtcgagcgcgtcgccgtctccctcgacctctacaaccagggatccgcgactgcctatgatgtgtcacttaatgacgactcttggccaacacaagcatttgagcttgtcactggagagaaatcgaagacattggaaaggcttgaccctggtgccactgctacacacacatatgtcctggagaccaaaacacagggcaggttccagggttcaccagctattattacgtaccgtgttcccan

SEQ ID NO: 84331 - DNA, 506 bp, Zea mays
  unsure (1)..(506): unsure at all n locations
agagtnaactcaaggttggttaagtagcttaagaggattacagcatgctctaccggtccggaattcccgggtcgacccacgcgtccgcagtttcccagttgcaacaacaatccttggcacatctaacaatacaaaccatcgcaacgcaacagcaacaacaattcctaccagcactgagccacctagccatggtgaaccctgccgactacttgcaacagcagttgcttgcatcaaacccacttgctctggcaaacgtagttgcaaaccagccacaacaacagctgcaacagtttctgccagcgctcagtcaactagccatggtgaaccctgccgcctacctacaacagcaacaactgctttcatatagcccgctcgctgtggccaatgcacctacatacctgcaacaacaattgttgcaacagattgtaccagctctgactcatgtagttgtggcaaacccttgtgcctacttgcaacagctgcttgcattcaaccaactgactatg

SEQ ID NO: 84332 - DNA, 514 bp, Zea mays
  unsure (1)..(514): unsure at all n locations
nagagtnnncttcaaagttctgtacggaancttggggggaatacggcacgctctaccggtccggaattcccgggtcgacccacgcgtccgcggacgcgtgggcggacgcgtgggcgccctctcgctccagccgcttcacagcgccggcgctcgcctctccgactgccgcgagaatgccgttcaagaggttcgtggagatcgggcgcgtggcccttgtgaactacggcaaagactacggccgcctcgtcgtcatcgtcgatgtggtcgaccagaacagggcacttgtggacgcccctgatatggtcaggtgccagattaacttcaaacggctctcacttaccgacatcaagattgacatcaaacgtgtccccaagaagtcaaccttgatcaaggctatggaggaagctgatgtgaagactaagtgggagaacagctcatggggcaagaagctgattgtccagaagaggagggctgcactcagtgactntgacaggttcaaggtcatgctggcaag

SEQ ID NO: 84333 - DNA, 508 bp, Zea mays
  unsure (1)..(508): unsure at all n locations
agagttnacttcaaagtacatacggaacttacgggggattacgagaaagcttctaccggtccggaattcccgggtcgacccacgcgtccgcattcttgtgcttctggctcatcctcctgatactgtgtacaatatgcaaaaaacgctagctttttacagctcgacctccaataactcgaagctccacgaataactccattgtggcctcaagattgaccatggttggttgattgccaacccccaccagttcaaggtccctagctggttcctcaacaggaaaaagtactacaaggatggtaggttctctcaggttgtttccaacgcccttgacaagaagctcagcttagggatgactctaggctgaagaagaccaggaaccactatggtttgtcactactggggtctacttgtccgtggccagcacaccaagactaccaaaaggcatggaaagactataggtgtgtcggagaatagataaagtcaatttggtgcctaccttggatattta

SEQ ID NO: 84334 - DNA, 525 bp, Zea mays
  unsure (1)..(525): unsure at all n locations
nagagggtnncttcntaggtgctcgttcgtatactacaagacactctaccgccattgctcgtaccggtccggaattcccgggtcgacccacgcgtccgcccacgcgtccgcctccccaaaggccctaacctatcgcccgtacgagactgcgccgccgttgccgtctcctcctccgtcccatcactctctgctcgcgcactctcacctgcccgcgccgtcttcgaccgccaccaagatgaacaaggagaggctcatgaagatggccggcgccgtccgcaccggcggcaagggcaccatgcgcaggaagaagaaggctgtacacaagacggtcaccacggacgacaagaggctgcagggcactctcaagagagtaggggtcaacaccatccctgcaatcgaggaggtgaacatattcaaggacgatctcgtcatccagttcttgaaccccaaagtgcaagcttccatcgcagcaaacacatgggtggtcagtggatctccacagacgaaaaagctacaggatgttct

SEQ ID NO: 84335 - DNA, 520 bp, Zea mays
  unsure (1)..(520): unsure at all n locations
aggggcctcnntgagtgatccaccctgacagtatgcctaagcaatctccgattcccgggtcgacccacgcgtccgcccacgcgtccgcccacgcgttcgcccacgcgtccgcggacgcgtgggctattctgctgccctggtgctctccagtacatcagcggtgtgatcctcttcgaggagaccctgtaccagaagaccaaggatggcaagccttttgttgatgtcctcaaggagggaggcgtcctccctggcatcaaggttgacaagggcaccattgaggttgttggcactgataaggagaccaccacccaaggccatgacgaccttggcaagcgttgcgccaagtactacgaggcaggtgcccgctttgccaagtggcgcgctgttctcaagattggccctaatgagccatcacagcttgccatcgacctgaacgctcagggtctggctcgctatgccatcatctgccaggagaatggtctggtgccaattgttgagcctgagatccttgttgatggcc

SEQ ID NO: 84336 - DNA, 519 bp, Zea mays
  unsure (1)..(519): unsure at all n locations
agagtntctcntnatagacgtctagctatgacaaagaccactaccgtatctctaattcccgggtcgacccacgcgtccggttaaattggtcgtggatgacatctcatatgactttgtaaaaggtgccactgtggattatgaggaggaacttatacgttcagcgttcgtggcagaggtgagtatacttatggttggtactcagcaagtgggtgaatatgcaaggtttcaacaaatcctagtgctgttgggggctgcagctgcaagagttctttcatggtgaaatagcttcaattaccttgaagagatcaataattggaaatagcattctgtagcgaatcatacgctttggatctgagtgtacaattgttattttttggtagttctgaagacgtttctttttgagttttgttactgttggaaacatcatcacaaactgtctggttcaatctgtatccctctaacttgtgatagttgtgatatgatgacaagtttatgtacataatcttgtagctattaacc

SEQ ID NO: 84337 - DNA, 512 bp, Zea mays
atcgggtctagccctcgaccgtaggccctcacgcatctccgaattcccgggtcgacccacgcgtccgcttacgtcttcgcattcatgttcccaatggggctcggtgctgcagcaagcatacgcgtgtccaacgagcttggtgcaggacggccacgcgaggcccgcctggcgactcgggtggtcatgctcctggccttctccctgggcgtctcggaaggccttgtcatggtgctggcgcgcagcctgctcggctacgcctacgccaacgacaagcaagtcgccttgtacacctctaggttgatgccgatcctcgccgcctccaccctgtttgactgcctccagtgcgtcctatcaggtgttgtcaggggctgtggccgacaaaagatgggccgccttatcaacgttgcggcattctacattgtcggcatccctgtagcgtccgttttcgccttcgttcgtcacctcggtggaatgggtctttggtttgggatcttgtgcggagtagcagtgct

SEQ ID NO: 84338 - DNA, 525 bp, Zea mays
  unsure (1)..(525): unsure at all n locations
agagtnaactcgnntgtttggtgacagagacttaatagacgacttactgtaangctctaccggtccggaattcccgggtcgacccacgcgtccggctaaagctgtggctactgagtgcaaaacaacttttttcaatatttctgcctcgtcgattgtaagcaagtggcgcggtgactcggagaaactagtgaaagtgttattcgaacttgcaaggcatcatgcaccatctactattttccttgatgagattgatgctatcattagtcaacgtggtgaagctcgtagtgaacatgaagctagccggcgattgaaaactgagctattaatacagatggatgggttgactaagacagatgagcttgtttttgttctagcagcaacaaatttaccatgggagttggatgcagcaatgctgcgtcggctggagaagcgtattcttgttccattgccagagccggatgctagacatgctatgtttgaagagctcctgccatatacacctggcacaatggagattccctatga

SEQ ID NO: 84339 - DNA, 711 bp, Zea mays
  unsure (1)..(711): unsure at all n locations
aggaggggacgtcgnnnaatttgagattactgtaactctacaagacatataccgtcatagctcgtaccggttccggaattcccgggtcgtacccacgcgtccgttccacgtcgtccgggccatgctagtctgcttgtagagcggctctcaagggtcaagggagtaccgagcgtggctcaggtagggaaccttcagtcgacactcgtggtgccctttggtttcggtattccaggtagcatcattcgactctnntggtatcaagtaccgatctctgtcaacatggtcattctacgnnngaatggatcttcnttnacgtcgtggctttggagcctgtgctcgtgctttactcgtngtgngcngcngctnctgcaggaagggtgccatagtctnccgtcgtttcgggaattcaagcnanctagggtggactcatagggagggacctccnnnatgaagtnggtnnntccagngtcnnaagtaccganagggcnnngtcatcncttttcatacaagggctttcaaggcncattacatcgtttttgtaatacncttcaacncnncgtgngtgcatanatacaaggcttctttctggggtcttcnngtcccnccttcttttcnccgttggcnncatacgtcnnatggaacnncacnnccacnncttttgccccaggggttttttntnttgggggtttttaaaatttnggtnggtttcac

SEQ ID NO: 84340 - DNA, 506 bp, Zea mays
agagggacgtggtgttcttacgaagctaaaagccatcaaaggcaatgctcgtaccggtccggaattcccgggtcgacccacgcgtccgcccacgcgtccgcccacgcgtccgcccacgcgtccgcccacgcgtccgcggacgcgtgggcgcaaattgcaccaagaaatccatcgagaggccgtcgacaggggaattaatggcgtcgtcgtctagcagcagccaccgccgcctcatcctcgcagccgccgtcctgctctccgtgctcgcggctgccagcgccagcgccgggacctcctgcgtgccggggtgggccatcccgcacaacccgctcccgagctgccgctggtacgtgaccagccggacctgcggcatcgggccgcgcctcccgtggccggagctgaagaggagatgctgccgggagctggcggacatcccggcgtactgccggtgcacggcgctgagcatcctcatggacggcgcgatcccgccgggcccggacgcgcag

SEQ ID NO: 84341 - DNA, 521 bp, Zea mays
  unsure (1)..(521): unsure at all n locations
agaggntactcnggatgctcgtacgtatatcataagccatatacagtaagagacattaccggtttcggaattcccggctcgacccacgcgtccgaaggacatcagggcacaacttctacaacttcttgtgctagcaaaccttgctgcatactggcancaacatcagtttcttccattcaaccaactggctgcattgaactctgctgcttatttgcaacaacaactaccattcagccagctagctgctgcctacccccagcaatttcttccattcaaccaactagcagcattgaactctgctgcttatttacagctgcaacaattgctgccattcaaccaacttgctttgacaaacccagcagtgttctaccaacaacccatcattggtggtgccctcttttagattgcttatgagttatagttcaataatgaagttttttggatgatgtttgtggcttcccagaaataagaaagtacatttntagattcttatgtgcttctagtctccaaatgtggttgan

SEQ ID NO: 84342 - DNA, 500 bp, Zea mays
taggttcagcatgacgtatccctccggatctgcaattcccgggtcgacccacgcgtccgcgcatctcaagcgcaagacctcctcgcggctatggcgaagcgtctgatcccgtcgctgaaccgggttctggtggagaagctgctgaagcccagcaagagcgccggcggcatcctcctcccggagaccaccaagcagctgaacgccgctaaagtcgttgctgtgggccctggtgatcgtgatagggatggcaagctgatccctgtatctctgagcgaaggcgacactgttctgcttccggagtacggtgggacagaagtgaagcttgcagaaaaggagtaccttcttttcagagagcacgacatactggggaagctcgaggagtagctctggactgttaaaatggagttgtttgaaagtaggtatgcaagagttttgccacggcttatcttttttttttttgtacgggggaacaaatgaaaaacacaacccttgtgagaacg

SEQ ID NO: 84343 - DNA, 514 bp, Zea mays
  unsure (1)..(514): unsure at all n locations
agcggtgtctatgcccatgtaacgtagnagctancgcgatctcgtattcccggctcgacccacgcgtccgcagaaacacacctagcgaagcgcactatttacgacctatcaacaatggcttccaagacagtatccctcgttgcgcttcttgccctttttgtgagtgcaacaaatgcgttcattattccacaatgctcacttgctccgagtgccattattccacagttcctccctccagttacttcaatgggcttcgaacacccagctgtgcaagcctataggctacaacaagcgcttgcggcgagcgtcttagaacaaccaattgcccaattacaacaacaatccttggcacatctaaccatacaaaccatcgcaacgcagcagcaacaagcactgagccacctagccgtggtgaaccctatcgnctacttgcaacaacagctgcttgcattcaacccacttgctttggcaaacgtagcttgatacaacaacaaccacagttgcaacagtttct

SEQ ID NO: 84344 - DNA, 521 bp, Zea mays
agagggctcgtagttggttaagagcttaagggggtctacaagcatgctctaccggtccggaattcccgggtcgacccacgcgtccgcactagcaacgacctaacaacaatggctaccaagatattatccctctttgcgcttcttgccctttttgtgagcgcaacaaatgcgttcattattccccaatgctcacttgctcctagtgccattattccacagttcctccctccagttacttcaatgggcttcgaacacccagctgtgcaagcctacaggctacaacaagcgcttgcggcgagcgtcttacaacaaccaattgcccaattacaacaacaatccttggcacatctaaccatacaaaccatcgcaacgcaacagcaacaacaatttctaccagcactaagccaactagctgtggtgaaccctgtcgcctacttgcaacagcagttgcttgcatccaacccacttgctctggcaaacatagttgcataccaacaacaacaacaattgcaacagtttct

SEQ ID NO: 84345 - DNA, 503 bp, Zea mays
  unsure (1)..(503): unsure at all n locations
agagtnncctcnagtactaatgtatctacggagattaagtatgctctaccggtccggaattcccgggtcgacccacgcgtccgcggacgcgtgggcggacgcgtggggtgttctaccaacaacccatcattggtggtgccctcttttagattgcttatgagttatagttcaataatgaagttttttagaaatgtactttcttatttctgggaagccacaaacatcatccaaaaaataagaaagtacatttctaaaaaaaaaaaaaataaaaaaaaaaaaaaaagggcggccgctctagaggatccaagcttacgtacgcgtgcatgcgacgtcatagctcttctatagtgtcacctaaattcaattcactggccgtcgttttacaacgtcgtgactgggaaaaccctggcgttacccaacttaatcgccttgcagcacatccccctttcgccagctggcgtaatagcgaagaggcccgcaccgatcgcccttcccaacagttg

SEQ ID NO: 84346 - DNA, 517 bp, Zea mays
  unsure (1)..(517): unsure at all n locations
agagtnacctcaaagtcgtgacagtatctacagacgataaaaaggaatgctcgtaccggtccggaattcccgggtcgacccacgcgtccgcggacgcgtgggcagaaacacacctagcgaagcgcactagcaacgacctaacaacaatggctaccaagatattatccctctttgcgcttcttgccctttttgtgagcgcaacaaatgcgttcattattccccaatgctcacttgctcctagtgccattattccacagttcctccctccagttacttcaatgggcttcgaacacccagctgtgcaagcctacaggctacaacaagcgcttgcggcgagcgtcttacaacaaccaattgcccaattacaacaacaatccttggcacatctaaccatacaaaccatcgcaacgcatcagcaacaacaatttctaccagcactaagccaactagctgtggtgaaccctgtcgcctactttgcaacagcagttgcttgcatccaacccacttgctctggcan

SEQ ID NO: 84347 - DNA, 514 bp, Zea mays
  unsure (1)..(514): unsure at all n locations
agttnaaggggggnnntnaagggcgtgtacgatactacaagacattaccggaatgctctaccggtccggaattcccgggtcgacccacgcgtccgcctttactactcttgccaagaatgctgccttacctcaagaacaagaatccacggatccgagcaaaagcatcagtgtgtttcagcaagagtgtaccacgccttgatgtggtgggaatcaaagaatatggtatggataagctcatccaaattgcggcaacccaacttagcgaccagcttcctgaatcaagggaggctgctcgcaacctggcactggaactgcaagcattctatgagaagtctcaggcctcaacttctgacgaacacgaggtcgaggcctctgcctcgccagatgctgaatcatgggaggctttctgccagtccaagctctccgcattaagtgcccaagccattcttcgtgtgacctctactactacaaaagagtgcgtcacctctgccccaaaagaagggttggctgtggt

SEQ ID NO: 84348 - DNA, 519 bp, Zea mays
  unsure (1)..(519): unsure at all n locations
aggaggatcgtcgnaagtactcgtacgtatactacaagccatatacagtaatgctcgtaccggtccggaattcccgggtcgacccacgcgtccgccaactagcaacatagaaagcacaatagtgtaccaacaatggtagccaaaatattttgcctccttatgctccttggtctttctgcaagtgctgctacgacgaccattttcccgcaatgctcacaagctcctatagcttctcttcttcccccatacctctcaccagcgttgtcttcagtatgtgaaaacccaattcttcaaccctacaggatccaacaggcaatcacagcaggcatcttacctttatcacccttgttcctccaacaatcatcagccctattacatcaattacctttggtgcatttattggcacanaacatcagggcacaacaactacaacaactcgtgctagcaaaccttgctgcctacgctcagcaccagcagttaccttgggtgcaattgttggcacataacatcagggcacac

SEQ ID NO: 84349 - DNA, 532 bp, Zea mays
  unsure (1)..(532): unsure at all n locations
agagggtcgtcnntgagcgaattctgatactctcacgcagcctcactagtacgtctgtaccggtccggaattcccgggtcgacccacgcgtccgcagaaacacaccaagcgaagcacattatcaacaacctaacaacaatggctaccaagatggtatccctccttgcgcttcttgcgctttttgcgagcgcaacaaatgcgttcattattccacaatgctcacttgctccaagttccattattacacagttcctcccaccagttacttcaatgggcttcgaacacccagctgtgcaagcctataggctacaacaagcaattgcggcgagcgtcttacaacaaccaatttcccagttgcaacaacaatccttggcacatctaacaatacaaaccatcgcaacgcaacagcaacaacaattcctaccagcactgagccacctagccatggtgaaccctgccgcctacttgcaacagcagttgcttgcatcaaacccacttgctctggcaaacgtagttgcaaaccagccacaat

SEQ ID NO: 84350 - DNA, 517 bp, Zea mays
  unsure (1)..(517): unsure at all n locations
agagggctcgttgttggttaaagatcttaaagaatataaagtatgctctaccggtccggaattcccgggtcgacccacgcgtccgaagcaacatagaaagtggaatccagtagtcaacaatagagcaacaatggcgaccaagatgttttccctccttatgctccttgctctttctgcatgtgttgctaacgcgacaattttccctcaatgctcacaagctcctatagcttcccttcttcccccataccttccatcaatgatagcttcagtatgtgaaaacccagctcttcaaccctataggctccaacaagcaatcgcagcaagcaacatacctttatcacccttgtttcaacaatcgccagccctatctttggtgcagtcattggtacaaaccatcagggcacagcagctgcagcaactcgtgctacctgtgatcaaccaagtagctctggcaaacctttctccctactctcagcaacaacaaattcttccattcaaccacttgtntacattgaac

SEQ ID NO: 84351 - DNA, 599 bp, Zea mays
  unsure (1)..(599): unsure at all n locations
agggtnnnctcnnntagggacttactgtatctctcaagacgactcactggtattgctcgtaccggttccggaattcccgggntctacccacgtcgtccgcctagttccatgtatgccacagtgttctcctcaccagttatcttcatatggcctgtcgaacaccgcgagctgtgtcaagtcctatgaggctacatacaaggcgattggcggcgagcgtcgttacaacaactcaattagcccaattgacaacaactaatccattggcacatgctaacaatacagaaccatgcgcaacgacatcagcaactaacagttgcctactcagctactgagccatcctagccatggntgaactcctgtcgtcctacgttgcaacagtcagctgcttgctatccaaccgcactttgcttctagcaagacgtagattgcaaaaccagtcaacaaccaacatactgcaacgagtttctggccagcgcttagtcaacttagccatgtgtgaaccactggccgcctgacctacatacagcaacaacatggctttcatnctagtcccgcttcgcttgtgtgccaatgctacctacatactctgcaacaaagaa

SEQ ID NO: 84352 - DNA, 513 bp, Zea mays
agaggaactcgaagtgtgtaatagaataaacggtagcctcatgcaaggtctgtaattcccgggtacgacccacgcgtacgcaggcgtccgtcgactcattccaccaattacgcgactattgttggagccatttgctatagcgctcatgagttatatactcaacaacgacgtcatttggatgatgttcgggcagcgctaaaactactagccttcatgaacagagtcttatacctacaacagcaacaactgatttaatataaccactatagaagagggtaatgcacctacataccatgcaacaacaattgctgcaacagattgtaccagctctgactcagctagctgtggcaaaccctgctgcctacttgcaacagctgcttccattcaaccaactgactgtgtcgaactctgctgcgtacctacaacagcgacaacagttacttaatccactagcagtgcctaacccattggtcactgccttcctacagcagcaacaattgctaccatacagtc

SEQ ID NO: 84353 - DNA, 525 bp, Zea mays
  unsure (1)..(525): unsure at all n locations
aggagggtcgtcggtatgtgtgtaccgtatctacaagcnacttataagtattgctcgtaccggtccggaattcccgggtcgacccacgcgtccgtacgtttcttgctcccctttcagggtcccgatcgctaggctagctgcagctcaggtgcttgtctgagggtgcctctgctcgttggcagccggatcgcctgctgttggtgcatctggtgattaataatactactatgacagagccatgctctgtgaagagtattagtagcagcgctcataaaagctacagttccgtctcttttctcagctatgtaaaacttccaaactgttcatgcttaaaactgagggttttcttggtgtgaaaaaaaaaaacaaaaaaaaaaaaaaaaaaaaaaaaaaaaaaaaaaaaaaaaaaaaaaaaaaaaaaaaaaaaaaaaaaaaaaaaaaaaaaaaaaaaaaaaaaaaaaaaaaataaaaaaaaaaaaaaaaaaaaaaaaaaaanaaaaaaaaaattaaaaatataanaaaact

SEQ ID NO: 84354 - DNA, 512 bp, Zea mays
  unsure (1)..(512): unsure at all n locations
agagtnnnnttnnaggtgctgaatggagtctacaagacatatatagtattgctctaccggtccggaattcccgggtcgacccacgcgtccgcccacgcgtccgcccacgcgtccgtccatccgccgagggtggtgaggacgaaagcgttgatgacacagctgtgaaggtggttgatattgttgacacattccgtctacaggagcaacctccttttgacaagaaatcatttgtgtcttacatcaaaaaatacatcaagaatctcactgctgtgttggagccagagaaagcggatgagttcaaaaagggtgtcgagggtgcaaccaagtttctccttagcaagctgaaggacctccaattttttgttggtgagtccatgaaggatgatgcgtctgtggtattcgcctattacaaggatggtgccactaatccgacattcctctatttctctcatggtctttaaggagatcaagtgctaggcgtgcggcgaaattagttacccatgttgggtact

SEQ ID NO: 84355 - DNA, 527 bp, Zea mays
  unsure (1)..(527): unsure at all n locations
atgagtggaacgtcggaggtacntattactgaanactaccagacgacactaacgcaattgctcgtaccggtccggaattcccgggtcgacccacgcgtccggccgcagctcggatcttatgacggcatattcttcgacacgtacggggaatactacgaggacatgagagagttccaccagcaccttcctaagctactgaagcccggaggcatctactcgtacttcaacggcctctgcggcgacaacgcgttcttccacgccgtgtattgccagctcgtggcgctggagctcgcgaaccttgggtactcgacgcagttcatccctctgccggtcaaagattgcctggcggaggaggtctggaagggcgtgaagcggaagtactggcaactggacacctactacctccctgcttgccagtcagaatcagaatctaccatcagttagtgatgagttatttctagtctgcgtctgaagttggttgtagctaagtacatttttgttcagacatgctgtgttatgaatgttat

SEQ ID NO: 84356 - DNA, 512 bp, Zea mays
gtcgattccagcccatgaccgtatgcctcacgcatctccgaattcccgggtcgacccacgcgtccgtagcaacatagaaagcacaatagtgtaccaacaatggcagccaaaatattttgcctccgtatgctccttggtctttctgcaagtgctgctacggcgaccattttcccgcaatgctcacaagctcctatagcttcccttcttcccccgtacctctcaccagtgttgtcttcagtatgtgaaaacccaattcttcaaccctacaggatccaacatgcaattgcatcaggcatcttacctttatcacccttgttcctccaacaatcatcagccctattacagcagttacctttggtgcatttattggcacaaaacatcagggcacaacaactcgtgctagcaaaccttgctgcctactctcagcaacaacagttacctttggtgcatttgttggcacaaaacatcagggcacaacaactacaacaactcgtgctagcaaaccttgctgg

SEQ ID NO: 84357 - DNA, 524 bp, Zea mays
  unsure (1)..(524): unsure at all n locations
aggggncgtcnntgagtgagtcccagccctgaccggagncgtcacgcaactccgtttcccgggtcgacccacgcgtccgcggggttcggtttcgtgggtgagcggatcgagatggctgcgtcggatgttgagtaccggtgcttcgtcggcggcctcgcctgggccacggacgaccactccctccacaacgccttcagcacctacggcgaggtcctcgagtccaagatcatcctcgatcgggagacgcagaggtcccgcggcttcggcttcgtcaccttctccacggaggaggcgatgcggaacgccatcgagggcatgaacggcaaggagctggacggccgcaacatcaccgtcaacgaggcccagtcccgcggcggccgtggaggcggcggcggtgggtacggtggtggccgtggaggcggcggctacggcggtggcgggcgccgtgatggcggcggcggctacggcggtggcggcggctacggtggcggcggcggctacggtggtggtggcggcggctaccg

SEQ ID NO: 84358 - DNA, 520 bp, Zea mays
  unsure (1)..(520): unsure at all n locations
agagtnnnctcgntgttggctacagaactatggggggttacagcatgctctaccggtccggaattcccgggtcgacccacgcgtccgcggacgcgtgggcggacgcgtgggctttctccctactctcagcaacaacaatttcttcgattcaaccaactgtctacactgaaccctgctgcttatttgcagcaacaactattaccattcagccagctagctactgcctactctcagcaacaacaacttcttccatttaaccaattggccgcactgaaccccgctgcttatttgcagcagcaaatactactaccatttaaccagctagctgcagcaaaccgtgcttccttcttgacacagcaacagttgctgcctttctaccagcagtttgcggctaaccccgcaaccctcttacaactacaacaattgttgccctttgtccaacttgctttgacagacccagcggnctcctaccaacaacacatcaattggtggggccctttttaagatggctaatagtgga

SEQ ID NO: 84359 - DNA, 538 bp, Zea mays
  unsure (1)..(538): unsure at all n locations
agagggtactcgnntaataggctgactgtagaccngtcccagcctctcactgntattgactgtaccggtccggaattcccgggtcgacccacgcgtccgcaacaagcaacatagaaagtggaatccattagcaacaacagagcaacaatggcgaccaggatattttccctccttatgctccttgctctttctgcatgtgttgctaacgcgacaattttccctcaatgctcacaagctcctatagcttcccttcttcccccataccttccatcaatgatagcttcagtatgtgaaaacccagctcttcagccctataggctccaacaagcaatcgcagcaagcaacatacctttatcacccttgttgtttcaacaatcgccagccctatctttggtgcagtcattggtacaaaccatcagggcacagcagctgcagcaactcgtgctacctgtgatcaaccaagtagctctggcaaacctttctccctactctcagcaacaacaatttcttccattcaaccaactgtctacactgaacc

SEQ ID NO: 84360 - DNA, 536 bp, Zea mays
  unsure (1)..(536): unsure at all n locations
ggggaaggagctggnaagagtttnnctgnaaggctgttacgttagggagagttacagcatgctctaccggtccggaattcccgggtcgacccacgcgtccggaccaactagcaacatagaaagcacaatagtgtaccaacaatggcagccaaaatatttggcctccttatgctccttggtctttctgcaagtgctgctacggcgaccattttcccgcaatgctcacaagctcctatagcttcccttcttcccccgtacctctcaccagtgttgtcttcagtatgtgaaaacccaattcttcaaccctacaggatccaacatgcaattgcatcaggcatcttacctttatcacccttgttcctacaacaatcatcagccctattacagcagttacctttggtgcatttattggcacaaaacatcagggcacaacaactcgtgctagcaaaccttgctgcctactctcagcaacaacagttacctttggtgcatttgttggcacacaacatcaaggcacaacaactacaacaactcgt

SEQ ID NO: 84361 - DNA, 514 bp, Zea mays
  unsure (1)..(514): unsure at all n locations
nggggaagaggggccttctaagtgctgacagacactacaagccattaccgtaatgctctaccggtccggaattcccgggtcgacccacgcgtccgcggacgcgtgggggcggagatgcttcgcatatgtggtggctggcaacccacaggaaggccttgaggatgcaaagagagccgaggttattgcatcggactggccgatgggacactacctgcaggccttggcacttcacaacctgggaagggaggctgaaagccaagaagcactgaagaatggcactgccttggaagctgcaatgaatagtagagctagaactgtatagccctgaatttgtgataccctgtcctgcttgtacctagatcgcctccctccaatgcttcgtcaccagtaggggctgtttttggtattccctaacttgtatcggtatttcccctagtttcacaagtcgaaaaaactcctaggggctagtttggatactttgggattagagtgttttgaagggattggagagggt

SEQ ID NO: 84362 - DNA, 513 bp, Zea mays
  unsure (1)..(513): unsure at all n locations
nagaggggncttcaaaggtgcgtgacagtactctacaagccattatagtaatgctctaccggtccggaattcccgggtcgacccacgcgtccgcccacgcgtccgcccacgcgtccgcaattgcccaattgcaacaacaatccttggcacatctaaccctacaaaccattgcaacgcaacaacaacaacaacagtttctgccatcactgagccacctagccgtggtgaaccctgtcacctacttgcaacagcagctgcttgcatccaacccacttgctctggcgaacgtagctgcataccagcaacaacaacagctgcaacagtttatgccagtgctcagtcaactagccatggtgaaccctgccgtctacctacaactactttcatctagcccgctcgcggtgggcaatgcacctacgtacctacaacaacagttgctgcaacaaattgtaccagctctgactcagctagctgtggcaaaccctgctgcctattacaacagttgcttccatt

SEQ ID NO: 84363 - DNA, 517 bp, Zea mays
  unsure (1)..(517): unsure at all n locations
agaggaactcgaagttntgtacgtaactacagacgatatatcagaattgctcgtaccggtccggaattcccgggtcgacccacgcgtccggcaacatagaaagcacaatagtgtaccaacaatggcagccaaaatattttgcctccttatgctccttggtctttctgcaagtgctgctaccgcgaccattttcccgcaatgctcacaagctcctatagcttcccttcttcccccgtacctctcaccagcggtgtcttcggtatgtgaaaacccaattcttcaaccctataggatccaacaggcaatcgcagctggcatcttacctttatcacccttgttcctccaacaatcatcagccctattacagcagttacctttggtgcatttattggcacaaaacatcagggcacaacaactacaacaacttgtgctagcaaaccttgctgcctactctcagcaacagcagtttcttccattcaaccaactagctgcattgaactctgctgcttatttgcan

SEQ ID NO: 84364 - DNA, 550 bp, Zea mays
  unsure (1)..(550): unsure at all n locations
ggaagagaggaagaggggaaggagnagnagaaggagttnnnnctggaggtttnacttcgtacagcatgttatcgganctgcgattcccgggtcgacccacgcgtccggttctagatcgcgatctagaactaggaaatacgatgctggtttgaactttacatgtgttggattgcgcaccatggaccaacatgaagtataccctgaggcatttgcagatccagaaggcctaatatggcaggtgctaaatgctgcgtgggatgctggtatacaagtggctagtgagaacgctctaccttgctatgatagggatggattcaacaagattttggagaatgccaaacctctgaatgacccagacggacggcatttgttaagtttcacctacctaaggcttggcaaagatctgtttgagagacccaacttttttgaatttgagcgcttcatcaagagaatgcatggtgaggcggttcttgatctgcaagtataagaatggtagcatattgcatacacgtatacaagtgaactgatggctcaagccttatggcttaca

SEQ ID NO: 84365 - DNA, 510 bp, Zea mays
  unsure (1)..(510): unsure at all n locations
agtgctgtcagacataaaagacacatgatgcaacccccaattcccggctcgacccacgcgtccgccctctccgaaatcaaggtagcgtacaccgctgcagtttctagagccctctctgccacgcgtgatcccactagtcacaatgcctgccctcgccaagcccgcctcccgcaccgccaagcccgccgcggctccgaagccgaagcctgccgccgccaagccgaaggcggccaccgctggtgcctcccacccgccttacttcgagatgatcaaggaggctatcacggcgctcaaggagaggaccggctccagctcgcaagcgatcgccaagtatgtgggggacaagcacggcgcgtctctgccggccaacttcaagaagatgctttccatccagctccgtgggtccgcagccaagggcaagctcgtgaaagtcaaaggctcgtacaagctctcggacgccgtcaagaagcatnccncaagaccaaggctaagccggcaaaggccgtcgct

SEQ ID NO: 84366 - DNA, 522 bp, Zea mays
  unsure (1)..(522): unsure at all n locations
agagtttnttcctntgagtgctactcagccttacgaatccctccgcagctccgattcccgggtcgacccacgcgtccgggatctggcgtcgcccgggccggacggttgaccgctccaccgcggagcacctgttcgaggtgatcaactccagggaggacgtgctcaggcgcctcatccgccgctgcgcctacctcaagtacgtcgaggcgcggctcggagaccgcacgctgtatgccgacgagatactcaaggacggcttctgcctgaacatgatcgagacgccgctctgccctctcaaggtcgtcactaacctgcnagaggccgtctgggatgccgacatcgtcgtgaatggggtgccgtccaccgagacgagggaggtgtttgatgagatcagcgagtattggaaggagaggatcagtgtcccggtgataatttccctcgccaagggaattgaggcctcgttggatccaatacctcgtatcattacacctactcaaatgattagctctgcaactggagttn

SEQ ID NO: 84367 - DNA, 522 bp, Zea mays
  unsure (1)..(522): unsure at all n locations
agagttnncncggaaaggctgtcagtacttaaagaatatacagaatgctctaccggtccggaattcccgggtcgacccacgcgtccgatcgtcgaacagaacagcatgaagatggtcatcgttctcgtcgtgtgcctggctctgtcagctgccagcgcctctgcaatgcagatgccctgcccctgcgcggggctgcagggcttgtacggcgctggcgccggcctgacgacgatgatgggcgccggcgggctgtacccctacgcggagtacctgaggcagccgcagtgcagcccgctggcggcggcgccctactacgccgggtgtgggcagccgagcgccatgttccagccgctccggcaacagtgctgccagcagcagatgaggatgatggacgtgcagtccgtcgcgcagcagctgcagatgatgatgcagctngagcgtgccgctgccgncagcagcagcctgtacgagccagctctgatgcagcagcagcagcagctgctggcagcccagggtctcaac

SEQ ID NO: 84368 - DNA, 537 bp, Zea mays
  unsure (1)..(537): unsure at all n locations
agaggggtcctcgagtggtgggcgtaccgagnctcataacggagtcctcactgtacgtctgtaccggtccggaattcccgggtcgacccacgcgtccggtgcgcacctccgagatctccacgaagttgtggtaacatggggctcaccttcacgaagctcttcagccggctcttctccaagaaagagatgaggatccttatggttggtctcgatgcagctggtaagaccaccatcctctacaagctcaagctcggagaaatcgtgaccaccatccctacaatcgggtttaatgtggagactgttgaatacaagaacattagcttcactgtctgggatgttggaggtcaggacaagatcaggccattgtggaggcactatttccagaacacccaaggccttatctttgttgttgatagcaatgacagagatcgtgttgttgaagcaaaggatgagctccacaggatgctgaacgaggatgaattgagggatgctgtcttgctcgttttcgcaaacaagcaagatctaccaaatgcaatg

SEQ ID NO: 84369 - DNA, 512 bp, Zea mays
  unsure (1)..(512): unsure at all n locations
agaggggnttcnaggtgctatacagtaactacaagccatatacaggaatgctctaccggtccggaattcccgggtcgacccacgcgtccgcaacaagcaacatagaaagtggaatccagtagcaacaatagagcaacaatggcgaccaagatattttccctccttatgctccttgctctttctgcatgtgttgctaacgcgacaattttccctcaatgctcacaagctcctatagcttcccttcttcccccataccttccatcaatgatagcttcagtatgtgaaaacccagctcttcaaccctataggctccaacaagcaatcgcagcaagcaacatacctttatcacccttgtttcaacaatcgccagccctatctttggtgcagtcattggtacaaaccatcagggcacagcagctgcagcaactcgtgctacctgtgatcaaccaagtagctctggcaaacctttctccctactctcagcaacaacaatttcttccattcaaccaact

SEQ ID NO: 84370 - DNA, 518 bp, Zea mays
  unsure (1)..(518): unsure at all n locations
agagggactcgaggttttataccaatactcacggacgattaccagaatagctcgtaccggtccggaattcccgggtcgacccacgcgtccgcccacgcgtccgattttatctaggaaaaaaggtgacaaaaggtaaaggagaatcagctgaagcagttcttcccagcaaggacgatctgaggaagaccattactgaaatcctcaagaaagttgacttcaacacggcaactttcagtgacattcttaagaagctcggtaagattttgagacatgttttactgattttcagtcgttcatgctagatgcactaacaaactttatcttgtagacaatcactacaaaatggatctgaccccaaagaaagaagccatcaaagttatgatccaagacgagttaaccaagctatcagaggaggatgaagaaggagagggagacgaagacaccgggaagaaacagcagcagcctcaggcgcaggagatcgaggcatgaggatccgcggaaccccgtagctgtagtan

SEQ ID NO: 84371 - DNA, 506 bp, Zea mays
  unsure (1)..(506): unsure at all n locations
agaggggctcnaggtagtgtacgaactacagcggattacggcatgctctaccggtccggaattcccgggtcgacccacgcgtccggggttggcttctcctccccctccggttcgggttcgggttcgtgaggttctccggggttcgggttcgtgggtgagcggatcgagatggcggcgtcggatgttgagtaccgctgcttcgtcggcggcctcgcctgggccacggacgaccactccctccacaacgccttcagcacctacggcgaggtcctcgagtccaagatcatcctcgatcgggagacgcagaggtcccgcggcttcggcttcgtcaccttctccacggaggaggcgatgcggaacgccatcgagggcatgaacggcaaggagctggacggccgcaacatcaccgtcaacgaggcccagtcccgtcgccgccgtggaggccgcngccgtgggtacggtggtggccgtggaggcngcggctacngcggttgccgggcgccgtt

SEQ ID NO: 84372 - DNA, 518 bp, Zea mays
  unsure (1)..(518): unsure at all n locations
gagggacgtnnngaggccgtcagcctgacgtacgcgttagcatctccgattcccgggtcgacccacgcgtccgggacgcggtcagcttccatctctcggtctcctccctctacatcccacggccgctaccacggtccctctagctcacacggccgccggcctctccaaggtctgcacacggaaaaaccttgccacgagtcgccgacactccataccggaagagctaacgaggtgactccccaccgcgcccatgggtgacagccagtactccttctccctcaccaccttcagtccgtcggggaagctcgtgcagattgagcacgcgctcacggctgtcggatccgggcagacctcgctcgggatcaaagctgccaatggtgtagtcattgccactgagaagaagctgccttctattctagtggatgaaacatctgtgcaaaagattcaggcactaacacctaatattggagttgtctatagtgggatgggtccagatttccgtgttctggtgaggaaaa

SEQ ID NO: 84373 - DNA, 528 bp, Zea mays
  unsure (1)..(528): unsure at all n locations
agagtnnnctcnntaggggactaagtacgctataaagaatatacagtatttctgcgtaacgtcccgacccacgcgtccgcccacgcgtccgcagactacaaggtgcatctataactactatagcagtagctcaaatctaaaaaattgtcatgaattcctaaggcagcagtgcagccctttggtaatgccttttctccaatcacgtttgatacaaccaagtagctgccaggtattgcagcaacaatgttgtcatgatcttaggcagattgagccacaatacattcaccaagcaatctacaacatggttcaatccataatccaggaggagcaacaacaacaaccatgtgagttatgtggatctcaacaagctactcaaagtgcggtggcaatcttgacagcagcacaatacctaccatcaatgtgcggcttgtaccactcatactaccaaaataatccatgcagcagcaatgacattagtggtgtttgcaattgaagaattgtgtctacctagccgttatactcctatan

SEQ ID NO: 84374 - DNA, 522 bp, Zea mays
  unsure (1)..(522): unsure at all n locations
agaggnctcnntgttggggtaccgaaagaaagacgcctacgcagctccgattaccgggccgacccacgcgtccggtcctgccgatggagaatcgagcagccctttttttttgttctatcaactatgctgtaatgctggctatgtatcggcaaaaacaattctatatgctgagttggagtcggcaaaaattcatatatgctgagttggagacagcaacttgtttggatcaaaaaaacaaagaaaaaaaaaaaaaaaaaaaaaaaaaaaaaaaaaaaaaaaaaaaaaaaaaaaaaaaagggcggccgctctataggatccaagcttacgtacgcgtgcatgcgacgtcatagctcttctatagtgtcacctaaattcaattcactggccgtcgttttacaacgtcgtgactgggaaaaccctggcgttacccaacttaatcgccttgcaacacatccccctttcgccagctggcgtaatagcgaataggcccggaccgaatcgccttcccaacagttgcgcagc

SEQ ID NO: 84375 - DNA, 536 bp, Zea mays
  unsure (1)..(536): unsure at all n locations
agagtnaactcnnttagtgtagtaacagcactcatagacgncctcactgtaantaccgctacaggtttcggaattcccgggtcgacccacgcgtccgcggacgcgtgggttttccaactattttggtatttggtgctgataaggagagcccattcccctaccagggggctagagttgcatctgccattgaatcctttgcattggagcagttggaagccaattctggcccggctgaagtttctgagttgactggcccggatgtcatggaagagaagtgcgcttctgctgccatttgttttgtatcattccttccagacatccttgattcaaaggcagaaggaagaaacaagtaccttgagctcctgctctctgtagctgagaagtttaaaaagagtccatacagttttgtctggacagctgctggcaagcaagctaatctcgagaaccaggttggtgtgggcggctacggctatcccgccatggtagctctcaacgtgaagaaaggtgcatancgctcactncgtaatgccttccag

SEQ ID NO: 84376 - DNA, 524 bp, Zea mays
  unsure (1)..(524): unsure at all n locations
agagggctcgntgttgggtaagacgcttaaaagaatatacagtaangctctaccggtccggaattcccgggtcgacccacgcgtccgcaacaacaacagtttctgccatcactgatccacctagccgtggtgaaccctgtcacctacttgcaacagcagctgcttgcatccaacccacttgctctggcgaacgtagctgcataccagcaacaacaacagctgcaacagtttatgccagtgctcagtcaactagccatggtgaaccctgccgtctacctacaactactttcatctagcccgctcgcggtgggcaatgcacctacgtacctacaacaacagttgctgcaacaaattgtaccagctctgactcagctagctgtggcaaaccctgctgcctacttacaacagttgcttccattcaaccaactggctgtgtcaaactctgctgcgtacctacaacagcgacaacagttacttaatccattggcagtggctaacccattggtcgctaccttcctgcagca

SEQ ID NO: 84377 - DNA, 523 bp, Zea mays
  unsure (1)..(523): unsure at all n locations
gagggtctcgaagtgnnncctgtaaccactggacaccatagtanttcgtaccggttcggaattcccgggtcgacccacgcgtccgcggacgcgtgggcaaagcggcagtgcgtagagaggatcgtcgaacagaacagcatgaagatggtcatcgttctcgtcgtgtgcctggctctgtcagctgccagcgcctctgcaatgcagatgccctgcccctgcgcggggctgcagggcttgtacggcgctggcgccggcctgacgacgatgatgggcgccggcgggctgtacccctacgcggagtacctgaggcagccgcagtgcagcccgctggcggcggcgccctactacgccgggtgtgggcagacgagcgccatgtaccagccgctccggcaacagtgctgccagcagcagatgaggatgatggacgtgcagtccgtcgcgcagcagctgcagatgatgatgcaacttgagcgtgccggtgcgncagcagcaaccggtccaagccagttctgatgcatcaaca

SEQ ID NO: 84378 - DNA, 523 bp, Zea mays
  unsure (1)..(523): unsure at all n locations
agagggancgtcgaggtanctcgcaccgactctcatagtcatccctcagctangcccgtaccggttcggaattcccgggtcgacccacgcgtccgcagagagcgccacagatctcgatcctgaagcttacgagcgagttcttacgtactcctcgcagtcagccatggcccgctgctactggcagtcgcagtcctccgtcggtggcggctgctatagctgccgttgttcccgcataccttccatcaatgatagcttcagtatgtgaaaacccagctcttcaaccctataggctccaacaagcaatcgcagcaagcaacatacctttatcacccttgtttcaacaatcgccagccctatctttggtgcagtcattggtacaaaccatcagggcacagcagctgcagcaactcgtgctacctgtgatcaaccaagtagctctggcaaacctttctccctactctcagcaacaacaatttcttacattcaaccaactgtctacattgaaccgtgctgcttatttgca

SEQ ID NO: 84379 - DNA, 505 bp, Zea mays
  unsure (1)..(505): unsure at all n locations
agagttcttaaggtctgacgacctacagcacttactgcatgctcgtaccggtccggaattcccgggtcgacccacgcgtccgcctagcgaagcgcactagcaacgacctaacaacaatggcttccaagacattatccctccttgcgcttcttgccctttttgtgagtgcaacaaatgcgttcattattccacaatgctcacttgctccgagtgccattattccacagttcctccctccagttacttcaatgggcttcgaacacccagctgtgcaagcctataggctacaacaagcgcttgcggcgagcgtcttagaacaaccaattgcccaattacaacaacaatccttggcacatctaaccatacaaaccatcgcaacgcagcatcaacaagcactgagccacctagccgtggtgaaccctatcgcctacttgcaacatcagctgctngcatccaacccacttgctttggcaaacgtagctgcataccaacaacatcaacagtt

SEQ ID NO: 84380 - DNA, 521 bp, Zea mays
  unsure (1)..(521): unsure at all n locations
agagtgancgtcagattcngaataccggatnctcaccgacanctcattgncattgctctaccggtccggaattcccgggtcgacccacgcgtccgcccacgcgtccgcccacgcgtccgaaacaatcatatatgcttagaactgctttcatttcaaagtaacttatgtacatctgacaaaatgcaaactagctacatttctatactttgtatttgctttggtttgtgttggcatcagtcaccaaaaagggggagattgaaagggaaatggcctcaatcatttcctataatcgattttggtgtttgacgaccatcacaaaccttatggactaactagtttgcctagttgatcttttctcaggtgcataaagtttatatacacatataaggaaaatgacccttgggccaattctataagtatggggcaagtcaagattgcaccagcctgcatgcaccggactgtctgtgtgcaccggacagtgtccggtgcctaagctgtcgcacccaacgaataggccgctc

SEQ ID NO: 84381 - DNA, 608 bp, Zea mays
  unsure (1)..(608): unsure at all n locations
attcagcttctatattagatgacgaatatataggttataaggtacaattgatataatcatacatatctggagaaggagagtgctcaactcnnactctgtannctgtagnncntacgnacagcntcggaannacnggcccgacccacgcgaccgcggacgcgagggcggacgcgngggcggtcgcgagggggcagggagaggcgnaaccggggangagcagaaggctgcgggcatgccaaaaaggctagctccaaccataggcatttctgtggatcaccgccgcaagaacaaatcccttgaggggctgcaggccaatgtccagaggcttaagacatacaaggccaagctggttatcttcccaaggcctgctcgcagggccaaggctggtgactctactctggaggaaccttaccactgctacccagttacaagggtgacttacatgccatatactctgcggtgagaagtcgctcctgtaaagggtgcgaaaggtcacaacatgataataaacgcttttggctagccttaatgtaagcttcagctttttgccggattaaccatttaatcacctatatgagaccctcctttaagtaaggtagcttaagttt

SEQ ID NO: 84382 - DNA, 501 bp, Zea mays
gtagggagtgttgagcctagctcagaagaaatcgcgactgcttcggaattcccgggtcgacccacgcgtccggaagcagcagaagaaactgggcatgaagcccatcgaacaggggagctggacacaaggggcgccggctgatggtacgtacattgggtaaccaccaccaagcacacatctgaggagaaaatccaggagtgaggaaatcgaagctggatgtaacaatagattttactgtttgcaaatgcaacctttgtttttttttttctgggtgttcttcgtgttggaggtttttttagctctgccctagttgtgagttgtgacatctttagttttaggctgaagtctgaacgatatggggtgagagatcatgcgtgcccatggttgtcttgggattggacatgcataagttgagatgttctccttttctgtaagagttttcttttcgatgtgaccgttttgaattgcgtgaagctttttttttaaaaaaaaaaaaaatag

SEQ ID NO: 84383 - DNA, 501 bp, Zea mays
  unsure (1)..(501): unsure at all n locations
agtagggcgttttgggcccacttagtagggatcgcgactgcttcggaattcccgggtcgacccacgcgtccgggcggcgatccagcattacaccaaagccttggaacatgacgacgaggatatttcttatttgagtaaccgggcagcagtttatattgaaatgggaaagtacgatgaatgcatcaaggactgtgataaggctgtggagaggggaagagaacttcgtgctgatttcaagatgatctcaagggcactgacaagaaaaggaacagctctagtcaagcttgctaagacctctaaggattttgatattgccatcgagacctaccagaaggctctaactgagcatcggaacccagacactcttaaaaagttgaatgaggctgagagagcgaaaaaagagttggagcaacaagagtactatgatccaaaattagcagatgaggacagagagaaaggcaaccagtttttaaggagcaaaaatacccanaagcatttaaa

SEQ ID NO: 84384 - DNA, 507 bp, Zea mays
  unsure (1)..(507): unsure at all n locations
agaggagctancttcntgaagccagcccgacttagctatgtctgtaccggttcggaattcccgggtcgacccacgcgtccgcggacgcgtgggcggacgcgtgggctgacgcgtgggggctgggagaggctttaccgtggaggagttgaaggctgcgggcattccaaaaaggcttgctccaaccattggcatttctgtggatcaccgccgcaagaacaaatcccttgaggggctgcaggccaatgtccagaggcttaagacatacaaggccaagctggttatcttcccaaggcgtgctcgcaaggtcaaggctggtgactctactctggaggagcttaccactgctacccaggtacagggtgactacatgccaattactcgcggtgagaaacgctctgtaaaggttgtgaaagtcacagatgagatgaaagcgtttgccggctatggcaagcttcgccttgaccggatgaacaagaagcaccttggtgcccgccagaagaaggcagt

SEQ ID NO: 84385 - DNA, 512 bp, Zea mays
  unsure (1)..(512): unsure at all n locations
gagtagttaaggctgntgcatgaatcaccgcaatcatatgcattgctcgtaccggttcggaattcccgggtcgacccacgcgtccggagaaaccctagaatggacagactacatgtcgctcgccttcacacagcacgtaagagcatgtagacatcttagcatgcacagcaacggaaggcggtgaaattgacaattaattgactgcatatccacccacccatgcaatgcaatgcatacattcatgcgttcaggtgatcacggagacgctgcggatgggcaacatcatcaacgggatcatgcggaaggcggtgcgagacgtggaggtgagaggccacctggtccccaagggctggcgcgtcctcgtctacttccgcgccgtccacctcgacgccgccgtccacgacgacccgcacgccttcaacccctngaggtggaaggagaggcccgacgtcgtggccatgagcggcttcaccccgttcggcggcgggcaaaggctgtgccctgggctcgac

SEQ ID NO: 84386 - DNA, 506 bp, Zea mays
  unsure (1)..(506): unsure at all n locations
tggacggagcgtgtctgatncctagccttaccagcatggatcgnacagcctcnccanatnnggcnnnnnnncccggagccggggaaagcagcgaagcgcccgcggatttttcatgttatgggtgcacactataataggggacaaggatcanggggcttgcaagtttggcttctatgagttctttaagaagtattactcggacatcgcagggcctgagtatgcccaaaagtacaagactctaatctacctcgcaggatctgcatctgctgaggtaattgctgatgtggctctctgcccttttgaagctgtgaaggtacgtgtgcagacacaacctggatttgctcgtggattgagtgatgggctccccaaatttgtccgatctgagggtgttcttgggctctacaagggaattgttcctctctggggtcgtcagattccttataccatgatgaagtttgcttcctttgagaccatcgttgagcttatctacaagcatgctgngccct

SEQ ID NO: 84387 - DNA, 541 bp, Zea mays
  unsure (1)..(541): unsure at all n locations
nggagancgtgtctgtgcccatgcctagagtacgctcgtaccggctcggaattcccgggtcgacccacgcgtccggcaaagcggcagtgcgtagagaggatcgtcgaacagaacagcatgaagatggtcatggttctcgtcgtgtgcctggctctgtcagctgccagcgcctctgcaatgcagatgccctgcccctgcgcggggctgcagggcttgtacggcgctggcgccggcctgacgacgatgatgggcgccggcgggctgtacccctacgcggagtacctgaggcagccgcagtgcagcccgctggcggcggcgccctactacgccgggtgtgggcagccgagcgccatgttccagccgctccggcaacagtgctgccagcagcagatgaggatgatggacgtgcagtccgtcgcgcagcagctgcagatgatgatgcagcttgagcgtgccgctgccgncagcagcagcctgtacgagccaactctgatgcagcagcagcagcaacttgtggcaacccaggggntaaacccatggc

SEQ ID NO: 84388 - DNA, 539 bp, Zea mays
  unsure (1)..(539): unsure at all n locations
gagaggcatgatntangctcgatctacagcaagtatagtaagactcgtaccggtccggaatcgacccacgcgtccggctctggcaaacctttctccctactctcagcaacaacaatttcttccattcaaccaactgtctacactgaaccctgctgcttatttgcagcaacaactattaccattcagccagctagctactgcctactctcagcaacaacaacttcttccatttaaccaattggccgcactgaaccccgctgcttatttgcagcagcaaatactactaccatttagccagctagctgcagcaaaccgtgcttccttcttgacacagcaacagttgctgcctttctaccagcagtttgcggctaaccccgcaaccctcttacaactacaacaattgttgccctttgtccaacttgctttgacagacccagcggccttctaccaacaacacatcattggtggtgccctcttttagattgcttattaggtggaattcaataataaaggtttttggatgatgtatgtggccaacc

SEQ ID NO: 84389 - DNA, 532 bp, Zea mays
  unsure (1)..(532): unsure at all n locations
ggtaggaacatggttgtccctagtttaagaactacgtgctatcaagtntcggaattcccgggtcgacccacgcgtccggtgatcccatcgacactctctcaacttccaaatttgaagatattatgtgaagaccaagtaggagaacaactcatggggtgtaagcagattttctagaagaggagagcagcacttgatgactttgataggttcaaagtcatgctggcaaaggtcgagaggggtggtgctatcaggcaagagctcgctaagttgaagaagacacccatgacttaatggttatcttttagtggatgtcatgttagagtttttggttctaagttggatcagcaattcgattgagtgtcgataaagacagaagtactaatatgttccctgtgaatacattttaaactttatcaagcatgggtgtgctctagatattttatcgtgaataatatataatatataaggtagcttgcgtcaaaaaaaaaaaantannnaaaaaaaaaaaaaaaaaacaaaaaaaaaaaaaaaa

SEQ ID NO: 84390 - DNA, 506 bp, Zea mays
  unsure (1)..(506): unsure at all n locations
taggagggagcgtgtctgatgcccacncctttgatntaggtagcacagtctcggaatttccgggtcgacccacgcgcccgcggacgcgtgggtccaactcctgagcactttctcctcgtcccagacaagccaatcggagccggggtacgaccatggactccaccggcaccggagcagggggtaaggggaagaagggagcggccgggcgcaaggtcggcgggccaaggaagaagtcggtgtcgaggtccgtgaaggccggtctccagttccccgtcggccgcatcgggcgctacttgaagaagggccgctacgcgcaacgtgtcggcaccggcgcccccgtctacctcgccgctgtcctcgaatacctcgccgctgaggttctggagctcgccggtaatgctgccagggacaacaagaagactcgcattattccgcgccacgtgcttcttggcgatccggaacgacgaggagcttgggaagctgttgggcggngtgaccatcgctan

SEQ ID NO: 84391 - DNA, 497 bp, Zea mays
  unsure (1)..(497): unsure at all n locations
gtagaactgttgagncctaaacctgccnatcgcatcgcttcggattcccggtcgacccacgcgtccgattcaaccaactaggttcattgaatggaagaatttatttgccacaacaacaactacggttcaggcagctaccttctgcttaccctcagcaattgctttcattcaaccaactagcagcattgaactctactgcttattaacagcaacaacaactactaccattcagccacttagctcgagtgagccctactacctacttgacacaaaccccttgtgaatgcagactactagcacactgtgattgatgataacaccctatttcaaatgcaccatttgttgacattaaccccattttttttgataaaaccagtactttcatactaccaacttatattagataacccccttttttacaatccaattaatttaaattaattacaaaaatttttaaccttaaaccctaggtttccataattaaaaaatttcctttc

SEQ ID NO: 84392 - DNA, 499 bp, Zea mays
  unsure (1)..(499): unsure at all n locations
gagagtaagggttgtgcctagcttacgacctacgtcgcacaccnccggaattcccgggtcgacccacgcgtccgcgcacgcgtccgggcaaaatggttggtagcaagcccctttatgtagctcttgcgcagggtaaagaagacagaaaggcaaagctacaggcacaattttcacaaatgcgtcctgttgcaatggcgccttcagtaggtcctcgcatgcccatgtttccacctggtgtccctggagttggtcagcagctgttctatggtcagccaccaccagccttcatcaaccctcaggctggatttgctttccagcaacctctgatgcctggtatgaggcctggtggtccaatgccgaactttatgatgcctatggttcagcaaggacagcaaccacagcgtcctgctggtagacgtgctggtggaatgcagcagcccatgccaatgggtggtcagcaacaggtgttccctataggtggtcctggctatcgctatcc

SEQ ID NO: 84393 - DNA, 501 bp, Zea mays
  unsure (1)..(501): unsure at all n locations
gagtagggcgtcttgagctagccacaagttatggtgcacacttcggattcccgggtcgacccacgcgtccgccggggttcggtttcgtgggtgagcggatcgagatggcggcgtcggatgttgagtagcgctggttcgtcggcggcctcgcctgggccacggacgaccactccctccacaacgccttcagcacctacggcgaggtcctcgagtccaagatcatcctcgatcgggagacgcagaggtcccgcggcttcggcttcgtcaccttctccacggaggaggcgatgcggaacgccatcgagggcatgaacggcaaggagctggacggccgcaacatcaccgtcaacgaggcccagtcccgcggcggccgtggaagcngcngccgtgggtacggtggtggcccgggaggccgctgctacggcngtggcnggcgccctgatggctgcggcggctacagcggtggccggcggttaccgtgggggcggcggttccggtggg

SEQ ID NO: 84394 - DNA, 510 bp, Zea mays
  unsure (1)..(510): unsure at all n locations
agtagggagacttcgtggcctccgctttgacntaggtgcattgntcgtaccggtctcggaattcccgggtcgacccacgcgtccgaggtcgatgaaattaggggtggtgtatctggtggtagtattctcaggggagtcctgggggtgaaccagaagattgaagttcgccctggcattgtcatgaaagatgagactggaaacatcaagtgcaccccaatctactcaaggattgtctcactgtacgctgagcagaatgaactccaatttgctgtcccaggagggcttattggtgtgggaacaaccatggacccaactctaacgcgtgctgacaggctggttggccaggttcttggtgaagtaggttcactacctgatgtttacgtagagcttgagatcaatttcttcctactccggaggctgttgggtgtgaggacgaaaggtacagagaaggcagggaaggtgtccaagctcaccaagggtgagatcctcatgcttaacatagggtccatt

SEQ ID NO: 84395 - DNA, 510 bp, Zea mays
agtagaataggctgtcgcacggatcaccgccattatagtcatcgctcgtaccggtccggaattcccgggtcgacccacgcgtccggatcagcaaagcggcagtgcgtagagaggatcgtcgaacagaacagcatgaagatggtcatcgttctcgtcgtgtgcctggctctgtcagctgccagcgcctctgcaatgcagatgccctgcccctgcgcggggctgcagggcttgtacggcgctggcgccggcctgacgacgatgatgggcgccggcgggctgtacccctacgcggagtacctgaggcagccgcagtgcagcccgctggcggcggcgccctactacgccgggtgtgggcagccgagcgccatgttccagccgctccggcaacagtgctgccagcagcagatgaggatgatggacgtgcagtccgtcgcgcagcagctgcagatgatgatgcagcttgagcgtgccgctgccggcagcaacagactgtaccacccactctgatgc

SEQ ID NO: 84396 - DNA, 541 bp, Zea mays
  unsure (1)..(541): unsure at all n locations
gagagacaagctctgctccacgcatcgtggggaagattagtattactcgtcaccggttcggaattgccgcatgcgtccggtagggttaggaaggcggcggccagcggcgagagcgcgagaggaagagcaggaggaggggtcggtcatgacggggaaggcgaagccgaagaagcacacggcgaaggagatcgccgcgaagatcgacgcggcgacgacgaaccggggcggcggcaaggccgggcaggcggaccggctggggcaggacaagggcgggcatgcgaagctggcgtgcccgctctgccgcaccccggcgcccgacatcaagtccatgcagatccaccacgaggcgcgccaccccaagctccccttcgagccggagaagctcctcaacctgcactcctnncgccccgctgctgccgncgncgncgccgctgccgncgccgctgccgaggccaccaccttcaagcccaaacccggcgtncgccgcagccctcaagaagtagcttgcttggccttggntgctaggccgnctgcatagggg

SEQ ID NO: 84397 - DNA, 401 bp, Zea mays
ggggacagtggctagtagatagtgacgctcggaattccgggtcgacccacgcgtcgacgtcgcggagctgcgagcgcggaccagaggcagacgacggggagccggacacggtttacactgaatcgcgcgcgtcgtcgcgtttcgtcccatcgtacaagtcgaccaaacgtccaccgactcacggcacacttgcccatggagtaggacacgcaacggtgaccagccgacttaaccctggctggaggacaaccctaccagcacagttccgtctaactgtacagatacgcgggcgtagactgtccagaccctcattgccgtctgacttaacgccacaggcatgtacgatcaggcatgcaaggtcagttgcagcgacacggaccacggtcgacactgctctgcgg

SEQ ID NO: 84398 - DNA, 495 bp, Zea mays
cgaggaaggtctacgcctgcttagagcactccgacagcgtcggattcccggctcgacccacgcgtccgcgcgcggcgaccacccgattcgaagcgtgcggagagaccgaagaagcgggagagatggctcgtaccaagcagactgctcgcaagtccacgggagggaaggctcccaggaagcagcttgccaccaaggctgcccgtaagtctgcccccaccactggtggagtgaagaagcctcaccgctaccgccctggaactgttgccctccgtgagatccgcaagtatcagaagagcactgagctgctgatcaggaagctgccctttcagaggctcgtcagggaaattgcacaggacttcaaaactgatttgcgtttccagagccatgcggtgcttgccctccaggaggctgctgaggcataccttgttggcctcgttgaggacaccaacctgtgcgccatccatgctaagcgtgtgaccatcatgccaaaagaca

SEQ ID NO: 84399 - DNA, 505 bp, Zea mays
  unsure (1)..(505): unsure at all n locations
nagagggagctgttgagncctaaccgntgcnantngcgactcgtcggaattcccgggtcgacccacgcgtccgccgcacgcgtccgcccacgcgtccgcctacgcgtccgcccacgcgtccgcttccattggaccaattggccgcactgaaccccgctgcttatttgcagcagcaaatactactaccatttagccagctagctgcagcaaaccgtgcttccttcttgacacagcaacagttgctgcctttctaccagcagtttgcggctaaccccgcaaccctcttacaactacaacaattgttgccctttgtccaacttgctttgacagacccagcggcctcctaccaacaacacatcattggtggtgccctcttttagattgcttattagttgtaattcaataataaaagtttttggatgaaaaaaaataatttttagtattagttaaactaattgtaaaaccataattaaaaaaaaaaagggccggcctttctaaaaggatc

SEQ ID NO: 84400 - DNA, 506 bp, Zea mays
  unsure (1)..(506): unsure at all n locations
gtagatcagctggcctacgaacaagacatatagtacgctcgtaccggtccggaattcccgggtcgacccacgcgtccgcggacgcgtgggcaatctccccagcaatccctagcagaagccttccatcctcactcgctcgatggcccgcacgaagcagacggcgaggaagtccaccggcggcaaggcgccgaggaagcagctggcgactaaggcggcccgcaagtctgcccctgcgaccggcggagtgaagaagccccaccgcttccgccccggcaccgtcgcgctccgggagatccgcaagtaccagaagagcacggagctgctgatccgcaagctgccgttccagcgcctggtgcgggagatcgcgcaggacttcaagaccgacctacgcttncagagctctgctgtctccgcgctgcaggaggcggctgaggcctaccttgtcgggctcttcgaggacaccaacctctgcgccatccacgccaagcgcgtcaccatcatgcccc

SEQ ID NO: 84401 - DNA, 536 bp, Zea mays
  unsure (1)..(536): unsure at all n locations
nggggagatacgagagttctgcgccctagctctaagactagcactgcatccgcttcggaattcccgggtcgacccacgcgtccggtgggttggcttctcctccccctccggttcgggttcgggttcgtgaggttctccggggttcggtttcgtgggtgagcggatcgagatggcggcgtcggatgttgagtaccgctgcttcgtcggcggcctcgcctgggccacggacgaccactccctccacaacgccttcagcacctacggcgaggtcctcgagtccaagatcatcctcgatcgggagacgcagaggtcccgcggcttcggcttcgtcaccttctccacggaggaggcgatgcggaacgccatcgagggcatgaacggcaaggagctggacggccgcaacatcaccgtcaacgaggcccagtcccgcggcggccgtggaggccgcggcngtgggtacggtggtggccgtggaggctgcngctaccgcggtggcnggcgccgtgatggcngccgcggctaccgcngttgccgcc

SEQ ID NO: 84402 - DNA, 507 bp, Zea mays
  unsure (1)..(507): unsure at all n locations
agtagagccgatctgagnctagcctcaagacttagctggaccactgtcggaattcccggctcgacccacgcgtccggagcattagctttatctactccagagcgcagaagaacccgatcgacaccatgagggtgttgcgcgttgccctcgctctcctggctctcgctgcgagcgccacctccacgcatacaagcggcagctgcggctgccagccaccgccgccggttcatctaccgccgccggtgcatctgccacctccggttcacctgccacctcctgtgcatcttccaccgccggtccacctgccgccgccggtccacctgccaccgccggtccatgtgccgccgncggttcatctgccgncgccaccatgccactaccatactcaaccgccccggcttagnctcatccncagncacacccatgcccgtgccaacagccgcatccaagcccgtgccaactgcagggaaccctgcggcgttggcaggaccccgaacctggggcaat

SEQ ID NO: 84403 - DNA, 495 bp, Zea mays
  unsure (1)..(495): unsure at all n locations
nagagtgaggtttgccctagcaaacgattatgtgcatcctcctcgaattcccgggtcgacccacgcgtccggtttctgatctggttgctggattgatggctctaatggagagtgatcacattggtcctttcaagttgggaaacccaggagagtttaccatgttggagctagcacaggttgtgaaggaaacaattgacccaatggcaaccattgaattcaaacccaacacagctgatgatccccatatgagaaagccggatatcaccaaggctaagcaactgctacattgggagccaaacgtctctctcagagaaggccttccgctaatggtcaaagacttgcgtcaaaggatctcggatgagtaatcgaggcaatgctacgatactggtgaccggttcgattctgaactatgctgcaaatacagtcagaagctctttatcgattggagccatgcagtacaatgtactgtgtacacaaagactgtanaataacccc

SEQ ID NO: 84404 - DNA, 500 bp, Zea mays
ggagggacggttgagcctagctcacgactagtagcacagcgctcggattcccgggtcgacccacgcgtccgcgacgcgttcgccaatgctcacttgctcctagtgccattattccacagttcctcccgccagtgacttcaatgggcttcgaacacccagctgtgcaagcctacaagctacaacaagcgcttgcggcgagcgtcttacaacaaccaattgcccaattacaacaacaatccttggcacatctaaccatacaaaccatcgcaacgcaacagcaacaacaatttctaccagcactaaaccaactagctgtggtgaaccctgtcggctacttgcaacagcagttgcttgcatacaacccacttgctctggcatacatagttgcataccaacaacaacaacaattgcaacagtttctaccagcgctcagtcaactagccatggtgaacccttgccgcttactacaacagtaacaaccgatttcatttagccccttt

SEQ ID NO: 84405 - DNA, 452 bp, Zea mays
  unsure (1)..(452): unsure at all n locations
agaggcgatcgagcctaccgctagtgacgctcggattcggctgacccacgcgtcggcggcatgagctgctacgacgtcagcacaatgtacaaaagcggacctagaagtgccagcgctaaccagctgtaatcttttttgaaattggtggttgaacatggtgcagatacagcaggacattgggagatatatagcagacaagatttagagaagctcagattacctgaaagggcactgccttttgacggagggacagtcgctaatcaaacaccataaacagaaagtcagaaattgctgtcagtggacagnaccaaaacaactgagattttgaagcgatcgctcgtagtcaatcacaacaatcttcttaagttagtgtagaggaattcttcttaatgctggcatctgtcaactatgtaaaggtgatcctattgccataacaaattcattggagcgat

SEQ ID NO: 84406 - DNA, 504 bp, Zea mays
gagagggctggtctgcgtcatgtatcaagactgagtagaaatcctctccggatttccgggtcgacccacgcgtccggccacgcgtccggtcagttttacttgatgtgaagccacgggacgatgagaccgacatggccaagctcgaggaagctgttaggagtgtccagatggaaggactgctttggggcgcatccaagcttgtcccagttggatatggcatcaagaagctgcaaatcatgatgaccattgtcgatgaccttgtctctgtcgacactctcatcgaggactatctctgcgctgagccagtgagcgaatacgtccagagctgcgacattgtcgccttcaataagatctaaatttccttgcaatggtggatggtggacactgtaccagcctaatttataattttccatgagcatcttcaggagtttttctaaagtatcatttggagtcatttacataaaaagcactttctatatctttgtaatcaccaacaacttttct

SEQ ID NO: 84407 - DNA, 503 bp, Zea mays
gagagggcaggtgggctcagctcaagaatatctgcatcccgttcggaattcccgggtcgacccacgcgtccgcagaaacacacctagcgaagcgcactatcaacgacctaacaacaatggctaccaagatattatccctctttgcgcttcttgccctttttgtgagcgcaacaaatgcgttcattattccccaatgctcacttgctcctagtgccattattccacagttcctccctccagttacttcaatgggcttcgaacacccagctgtgcaagcctacaggctacaacaagcgcttgcggcgagcgtcttacaacaaccaattgcccaattacaacaacaatccttggcacatctaaccatacaaaccatcgcaacgcaacagcaacaacaatttctaccagcactaagccaactagctgtggtgaaccctgtcgcctacttgcaacagcagttgcttgcattcaacccacttgctctggcaaacatagttgcataccaa

SEQ ID NO: 84408 - DNA, 506 bp, Zea mays
  unsure (1)..(506): unsure at all n locations
gaggtggggaggttcgacctcgtagttttgacntatgtgcatctgctctaccggtccggaattcccgggtcgacccacgcgtccgaaggaaatgaaggttacggacgtgcagattatttccttgttggcaaggacttccccagctatattgaatgccaagaaaaagttgatgaggcgtaccgagatcagaagttatggacaaggatgtctatcctcaacacggctggctcatccaagttcagcagcgataggacgattcatgagtacgccaaggatatctgggatatcagccctgccatccttccctagaccaggtggatatcaggttctttcgcctatatttctgtgaaccctcaggatcaaggaacagttggtgacgacattaatttgcctcagccccttagcaggaagcgctggtcacctcagttttgtgtagacaaaatctaggcatcgataaatgatgggggactatgcatggtgttttggcagcactgttcagtaccttg

SEQ ID NO: 84409 - DNA, 509 bp, Zea mays
  unsure (1)..(509): unsure at all n locations
gagtagggcaggtctggcccctgcnctagaattatatgcattgctcgtaccggtccggaattcccgggtcgacccacgcgtccggtggcgggtaccggaccctagctgatcatcagcaagtttacatccacccgagcagtgccctctttcaccagcagccacagtgggtgatctaccatgaaattgtgatgacaacaaaagagtatatgagggatgtcacagcggtggacccaagatggctactagagttggcaccgaggtcgtacaagtcggtggacccaacgaagatcagtaagcggaagcgccaagaaaggattgaacctctctatgatagatacaatgaacccaacttgtggcgcctgagtaagcgccgctggtgatttttcatcatgtcttgcacgtctttgatgtaatgttactgtagtgtatatattaaagtgttctttcaatgcaaagactgggataatggcaacgcagtgatacatgtatagttttctcttaaatttgtg

SEQ ID NO: 84410 - DNA, 534 bp, Zea mays
gagtagaccgctgatcgtgcctttccacgcctgcgatgcacagtctcgaatttccggctcgacccacgcgtccggcgcacgcgtccgcaattgaaatgaaatgaaaaaagtattgttcattcacgtcatcgagcaaacggccaattgcaacaacaatgcttcgcacaactaaccctacaaaccattggaacgcaacaacctcaacaacagtgtttgccattaattatccacctaaccatggtgaaacctgtcacctacttgcaacagcagctgcttgcatccaacccacttgctcttgccaacgtagctgcataccaacaacaacaacagctgcaacagtttatgccaatgcttagtcaactagccatggtgaaccctgccgactacctacaactactttcatctagcccgctcactgtgggcaatgcacctacctacctacaacaacaattgctgcaacaaaatgtaccatatctgactcatcttgcttttgcaaaaccttcttgctaattacaaaaaatgttttcattatac

SEQ ID NO: 84411 - DNA, 509 bp, Zea mays
  unsure (1)..(509): unsure at all n locations
ggagggccgtgttgagncctttcncccgacaagttagccacaagtcgtcggaattccgggctcgacccacgcgtccggcgacgcgtgcgcccacgcgttcgcctacgcgtatgcccacgcgtgcgcccacgcgttcgcgggcgcgtgggcaagcccaaggctgcttgatcatagacctttgcaggtacatccaatagaacttttgaagttatgctatgccattggaatgattagtgagtgccgcagttagaatgatgtttaaagaagagctaccacttcagcagataatttgtgacttgcttgcattttttggaccgatttgttcgcgtattaataattttgcagtgacgatacttctgttgtgctgtttataagcttctgaaaaaaattaaaccccttagcaggaaccagcttgtaaactcatttttgcggcaaacaaaatctaggcgtttatgaatagatggggttctatgcatagaaaaaaagggggccctttttaaaaagacccg

SEQ ID NO: 84412 - DNA, 498 bp, Zea mays
  unsure (1)..(498): unsure at all n locations
gagagacaggtcnaggcctgcncttgacttagcgtcacagtcgtcccgttccggctcgagccacgcgtccggagcaggcagtcgcaacaggcatcttaccattatcacccttgttccttcaacaaccgttagcggtattacagcagttacctttggtccatttggtggcacaaaacatcagggcacaacaactacaacaacttgtgctagcaaaccttgctgcatactctcagcaacatcagtttcttccattcaaccaactggctgcattgaactctgctgcttatttgcaacaacaattaccattcagccagctagttgctggctacccccagaaatttcttccattcaaccaactagcagcattgaactctgctgcttatttacagcagcaacaactactaccattcaatcagctagctgatgtgagccctgctgtctttttgacacaacaacagttgtttgtcgttctacctgcacgctatgcctaacgctggc

SEQ ID NO: 84413 - DNA, 502 bp, Zea mays
agagaaaggctgtggactgagccggaagatagcatgcctgtaccggtccggaattcccgggtcgacccacgcgtccgcggacgcgtgggcggacgcgtgggcggacgcgtgggcaagcgtccacctggtgtctgctgaactgagcagacagtagcaagagccactatgctgttcttctcctacttcaaggagctcgtggggaaggaggtgacggtggaactcaagaatgacctggcgatccgcgggacgctccactcggtagaccagtacctcaacatcaagctggaaaacacccgcgttgtcgaccaggacaagtatccccacatgctgtcagtgcggaactgcttcatccggggctcggtggtgcggtacgtgctgctcccgcaggacggcgtggacgtggacatcctgcacgacgccaccaggagggaggcgcgcggaggctgatcggcatcggcatcgggccccctcacctgtgctgcttctcccccggggaggagat

SEQ ID NO: 84414 - DNA, 539 bp, Zea mays
  unsure (1)..(539): unsure at all n locations
tgaggagagcgtgggttgatgctacgccataccgacntacgatgcatcgccatcggaattcccgggtcgacccacgcgtccgcccacgcgtccgacaaacctgaatgtggagcaagtgtttttctccatcgcacgtgacgtcaagcagaggcttgcggagactgattcaaagccagaggacaaggcaatcaaaattaacaagccagaccagggttccgaggcaccagctgcccagcgatctgcttgctgcggctcataagcagatgcacgatggccatagcctttggttatttgacattatttatttcccgcttggctgttataggaaggatttgaagaagccacttatgatataccgatgtggttgtactcgtggttgcttccattctttgaagcaaccacctcttgctgttgacgtagctattgctattgctgggagctattgcactcttgcattgngatccgttggaaaaactctcccctccctacagtgtgtaatgaatgaaatccatatcgntggggttgcaaaaaaaaaaaac

SEQ ID NO: 84415 - DNA, 532 bp, Zea mays
gagatggcatgctcgagctcacgctaacgattatgatcactgcactcggaattcccgggtcgacccacgcgtccgcaacccacttgctctggcaaacccagcagcgttctaccaacaacccatcattggtggtgccctgttttagattgcttatgagttatagttcaataataaagtttttttgatgatgtttgtggcttcccagaaataagaaagtacatttctagaaaaaaaaaaaaaaagggcggccgctctagaggatccaagcttacgtacgcgtgcatgcgacgtcatagctcttctatagtgtcacctaaattcaattcactggccgtcgttttacaacgtcgtgactgggaaaaccctggcgttacccaacttaatcgccttgcagcacatccccctttcgccagctggcgtaatagcgaagaggcccgcaccgatcgccctttccaacagttgcgcagactgaatggcgaatgggacgcgccctgtagccgcgcattaaacccggccggtgttgtggttacac

SEQ ID NO: 84416 - DNA, 497 bp, Zea mays
  unsure (1)..(497): unsure at all n locations
nggtagaaatggttnaccatgcatcttgacaaatagtactctctcccattccggctcgacccacgcgtccgaaggaagcgagaagaccagaaggtgataagagagagagagagtgtgtgtgatcggtgcaaggatcaccgctgtgcctgcgcgtgctgcttcaccgaatcgagtcagatcctgtccgaatccgagctaagggatggcaaccggtagtgaagcctcgaaggcagctgaggctgtggttgactggcataaacacgacagcaagaggatgctccatgcggtttaccgtgttggggatctggaccgcacaatcaagtactacacggaatgctttgggatgaaactgcttaagaaaaaggatggttctgatgaggaggtcacccatggctttctttgctttgggccagaggacaaccacttttcaagtgaaatggcattccactatggggtttacaaggttgaaatttggaaccggcttttgggattttgcc

SEQ ID NO: 84417 - DNA, 506 bp, Zea mays
gaggaggaatggtctgagctcagtctagaagtatgtgcgactcgttcggaattcccgggtcgacccacgcgtccgattgagaccaactagcaacatagaaagcacaatagtgtaccaacaatggcagccaagatattgtgcctccttatgctccttggtctttctgcaagtgctgctacggcgaccattttcccgcaatgctcgcaagctcctatagcttcccttcttcccccgtacctctcaccagcggtgtcttcggtatgtgaaaacccaattcttcaaccctacaggatccaacaggcaatcgcagctggcatcttacctttatcacccttgttcctccaacaatcatcagccctattacaacagttacctttggtgcatttattggcacaaaacatcagggcacaacaactacaacaacttgtgctagcaaaccttgctgactactcttagcaacagcagttttcttccattcaaccaactaggttcaatgaactctgctt

SEQ ID NO: 84418 - DNA, 496 bp, Zea mays
  unsure (1)..(496): unsure at all n locations
tagtagtaaggttgngcctagctcatgactatcgtaccactctcgattcccgggtcgacccacgcgtccgttgagaccaacaagcaacatagaaagtggaatccagtagcaacaatagagcaacagtggagaccaagatattttccctccttatgctccttgctctttctacatgtgttgctaacgcgacaattttccctcaatgctcacaagctcctatagcttccctttttcccccataccttccatcaattatagcttcagtatgtgaaaacccagctcttcaaccatataggcttcaacaagcaatcgcagcaagcaacatacctttatcgcccttgttgtgtcaacaatcgccagccctatctttggtgcagtcattggtacaaaccatcagggcacaacagctgcagcaactcgtgctacctgtgatcaaccaagtagctctggcaaacctttctccctactctccgcaacaacattttctttcattcaa

SEQ ID NO: 84419 - DNA, 501 bp, Zea mays
  unsure (1)..(501): unsure at all n locations
tggtaggagagtcgcgnctacctcaagctagtgattactgctctcggattcccggctcgacccacgagtcacgcgtgcgggatggctttccaccactctctgaattcactgaggtgcttgctaagatctgggagagactcaaagaagtgggagagaaatttgaagttgtagctgtatccttggacagtgaagagtcatcatttaatgagagttttgcaaagatgccttggcttgcaattcctcaaggtgacattaagtgtcagacgctggttcgttactttgagcttagttctcttccaacactagttctgattggccctgatgggaagacactgaacaacaatgtcggcgacataattgacgaccatggtttttaggcatgggaaggctttccctttaatggtgaaaagcttgaaaatcttggttataaaggaaagattaaaactggattacagacctttgggtccaatcttaattaatgggcaatttagacttttgtct

SEQ ID NO: 84420 - DNA, 505 bp, Zea mays
  unsure (1)..(505): unsure at all n locations
agtagtaaaggttgtgaactgaccacgcaatanagcatgctctaccggttcggaattcccgggtcgacccacgcgtccgattcagaaacacaccaagcgaagcgcactagcaacaacctaacaacaatggctaccaggatattatccctccttgcgcttcttgcgctttttgcgagcgcaacaaatgcgtccattattccacaatgctcacttgctcctagttccattattccacagttcctcccaccagttacttcaatggccttcgaacacccagctgtgcaagcctataggctacaacaagcgattgcggcgagcgtcttacaacaaccaattgcccaattgcaacaacaatccttggcacatctaacaatacaaaccatcgcaacgcaacagcaacaacagttcctaccagcactgagccacctagccatggtgaaccctgtcgcctacttgcaacagcagctgcttgcatccaacccacttgctttagcaaacgtaattt

SEQ ID NO: 84421 - DNA, 538 bp, Zea mays
  unsure (1)..(538): unsure at all n locations
ngaggaggagcactgtctgcgnttcggtccacgccttgcgctgcactancatccgaattcccgggtcgacccacgcgtccgcagctagcaacatagaaagcacaatagtgtaccaacaatggcagccaaaatattttggctccttatgctccttggtctttctgcaagtgctgctaccgcgaccattttcccgcaatgctcacaagctcctatagcttcccttcttcccccgtacctctcaccagcggtgtcttcggtatgtgaaaacccaattcttcaaccctataggatccaacaggcaatcgcagctggcatcttacctttatcacccttgttccttcaacaatcatcagccctattacagcagttacctttggtgcatttattggcacaaaacatcagggcacaacaactacaacaacttgtgctagcaaaccttgctgcctactctcagcaacagcagtttcttccattcaaccaactagctgcattgaactctgctgcttatttgcaacaacaactaccatttagacagctt

SEQ ID NO: 84422 - DNA, 538 bp, Zea mays
gaggaggagcatgatctgattcacgccataacgacttatgatgcactgccgtcggaattcccgggtcgacccacgcgtccgagacctccaattccctcgtagcagcagcaccagtagagtctccttcctctccggcggcgatgtctgggcgcggcaagggcggcaaggggctgggcaagggcggcgccaagcggcaccgcaaggtgctccgcgacaacatccaagggatcacgaagccggcgatccggaggcttgcgaggaggggcggcgtgaagcgcatctccgggctcatctacgaggagacccgcggcgtgctcaagatcttcctcgagaacgtcatccgcgacgccgtcacctacactgagcacgcccgtcgaaaaaccgtcaccgccatggacgtcgtctacgccctcaagcgccagggccgcaccctctacgggttcggcggctaagcgcgccctctccatctgggggtgggcctagtactggtggcgtttcttctttgggttccctggactgtgcttttcaatttgggggc

SEQ ID NO: 84423 - DNA, 534 bp, Zea mays
  unsure (1)..(534): unsure at all n locations
gagagtataagtatgtgatctacgaaacaagaatacatcgctaccgctccggaattcccgggtcgacccacgcgtccggtttccgtctgctcggtaaaatgcggtgcattgggaggacgggatgttgtgtgcgctgctgttagcttcagaccatgcatcgacattcacaaggggaaagttaagcagattgttggttctactcttcgggattcatccaatgatggcatggaacttgtgacaaactttgaatcagacaaatctcctgcagaatttgcaaaatcatataaagaagatgaacttcttggaggacatgttataatgcttggctcagatcctgcaagccaggctgctgcactcgaggcactacatgcatatcctggtggcttgcaagttggaggtggaataaatttgcagaatgcaatgtcttaccttaatgaaggggccagtcatgtgatagtgacctcttatgtgcttagcgatggcaagatgaacattgaaaggctgacaaaacttgtcnagctggttggaaacaaa

SEQ ID NO: 84424 - DNA, 500 bp, Zea mays
  unsure (1)..(500): unsure at all n locations
ggtagggaggtttgacctacttagaagnatgcgcactgcttcggattcccgggtcgaccaacgcgtccgcaaagacactgtgttaatttatgttcctgctgtcagatgctcaacaagaagcatacggtagcgcatacttggcacatctgaagtaggtgcagattggtgcataaaaggcatccaggacatcagtagttatagcatcctctcacatctgacgctttcaaaatgtcatctccccatagttagaacgaattcatctcaagactgtaggtcctctgcttgagaagcatcctcaccgctgtcctatacggctcctcgaatgcatccaacacccaggctgcaccagcagccccattccaaactgtgtcccctgttccttcctcacttggcttgatggccacaagcgttgcgccatttagcaccagccccccaggcagctcaatacatggtgcgtaccacagtcacatgctaagctctggcatgagcgtncggtgttg

SEQ ID NO: 84425 - DNA, 496 bp, Zea mays
  unsure (1)..(496): unsure at all n locations
agtagtagtgttgatcccagccattgactaggtgcacctcntcggattccgggtcgacccacgcgtccgcaaggctgccaagaaggagaggcttctgaagagggcccaggctgagaatgaaggaagaactggtgaatccaagaaaccaattgttgtgaagtatggccttaaccatgtgacttacctcattgagcagaacaaggctcagctcgttgtcatcgctcatgatgtggatccgattgaactgggtgtttggctttcagccctgtgcaggaagatggaagtcccatactgcattgttaaaagaaaggctcgccttggatcgatcgttcacaagaagactgcatcaatcttgtgtctgaccacttgtaaaaacgaggacaagcttggagtcaacaaggacttggaagctatttaaggcaactttaattgacaagtttattgaatcaagaagaagttgggaagttggattatgggcttccaaattcaaggccaa

SEQ ID NO: 84426 - DNA, 501 bp, Zea mays
agtagggcgtgttgagcctagctcagagtactcgcgactccttcggaattcccgggtcgacccacgcgtccgccgacgcgtccgcgagaagttactcaaggtggcaagagcaaatttggagcggactccggaaccgtccttagggtcctgtgtcacagaaatgattcagaggcatcacattacgtgaagaagcaattcaagatacccagctcagctccgagcgcctgattgattgcgaacgaaaaaacagatatcgaacaggacagtgcagccttgctcgtaacccaagaaacggtgctccaccgcccattttcatgtttgtgtaacagttattgttcatcggtaacactaagactttgggtggacgcggcagtaaacatgtatttacacaaatactaacacactggttccgatttgaatggtactagtttttggccaaaaaaaaaaaaagggcgggccgttttgaagatcccagcttacctccccttgcttgtaaagtat

SEQ ID NO: 84427 - DNA, 507 bp, Zea mays
gtagtaagggtctgtgcatgcagcacgaatatattgcattgccgtaccggttcggaattcccgggtcgacccacgcgtccgcggacgcgtgggttgatgatggagaaactttccaatggagtaaggttacaagaacagttaacaaccttatccttggtcgagtatattgccatcaccatggcacaatgaacataagtgggaatagacgatattcatgcaaactgacgtttaaagagcagtctttccttgatcggaatcctcgccaggttcaaggagttgtcaacgatgctgatggaagcaaggtcgcaacattgatggggaagtgggatgaaagtatgcattatatcatcaacaatgatgcctccaagaccaactcccatggttcacatgagggttctggtgccactttgctatgggagaaaaacgagcctccagtcaatcccactcgctacaacttgtgcacatttgcaataacattaaatgagttaacaccagaacttcaggaga

SEQ ID NO: 84428 - DNA, 504 bp, Zea mays
  unsure (1)..(504): unsure at all n locations
aggagaagagttctatnccattcccttgactgagtgcacagtctcctcgttcgaattcccggctcgacccacgcgtccgcggacgcgtggggccgccgtcacctgctgcagcttctcaaccggatagggagcacgggagcaggtagaacgctgcacaatccccttcgccgccgccaagatggtgaacgttcctaagaccaagaagacgtactgcaagaacaaagagtgcaagaagcacacactccacaaggtgactcagtataagaagggcaaggatagcctgtctgcccagggaaagcgccgttatgaccgcaagcagtcacgatatggtggtcagaccaagcctgtcttccacaagaaggccaagaccaccaagaagaatgttctgaagctgcaatgccagaacttcaagcactacttacagcaacgccttcagagatgcaagccttttgaagattggtggagacaagaaggccaagggcacatcttttttcttaacttctt

SEQ ID NO: 84429 - DNA, 523 bp, Zea mays
  unsure (1)..(523): unsure at all n locations
cagaggactgattgactacgcatagagtattttcaccgcttcggattcccggtcgacccacgcgtccgngacgcgtccgcacaagcaacatataaagtggaatccagtagcaacaatagagcagcaatggcgaccaagatattttccctccttatgctccttgctctttctgcatgtgttgctaacgcgacaattttccctcaatgctcacaagctcctatagcttcccttcttcccccataccttccatcaatgatagcttcagtatgtgaaaacccagctcttcaaccctataggctccaacaagcaatcgcagcaagcaacatacctttatcacccttgtttcaacaatcgccagccctatctttggtgcagtcattggtacaaaccatcagggcacagcacctgcagcaacttctgctacctgtgatcaaccaagtagctttggcaaacctttttccctactttcagcaacaacaatttcttccattcaaccaattgtctacatttgaacctgctgttt

SEQ ID NO: 84430 - DNA, 534 bp, Zea mays
  unsure (1)..(534): unsure at all n locations
naggaggancatggtctgagcctcagcttagagctacatagtaccgcttcggaattcccgggtcgacccacgcgtccgcaagctcctatagcttccctttttcccccataccttccatcaattatagcttcagtatgtgaaaacccagctcttcaaccatataggcttcaacaagcaatcgcagcaagcaacatacctttatcgcccttgttgtgtcaacaatcgccagccctatctttggtgcagtcattggtacaaaccatcagggcacaacagctgcagcaactcgtgctacctgtgatcaaccaagtagctctggcaaacctttctccctactctccgcaacaacaatttcttccattcaaccaactgtctacactgaaccctgctgcttatttgcagcaacaactattaccatttagccagctagctactgcctactctcaacaacaacaacttcttccatttaaccaattggccgcactgaaccccgctgcttatttgcagcagcaaatactactaccatttagccac

SEQ ID NO: 84431 - DNA, 532 bp, Zea mays
agagggaggatctgacgaacgggctccgactggttgccactgctgtaccggtcccggctcgacccacgcgtccgcggcaacgcatattgcaccaagaaatccatcgagaggccgtcgacaggggaattaagtgcgtggtcgtctagcagcagtcaccgccgcctcatcctcgcagccgccgtcctgttatccgtgctcgcggctgccagcgccagcgccgggacctcctgcgtgccggggtgggccatcccgcacaacccgctcccgagctgccgctggtacgtgaccagccggacctgcggcatcgggccgcgcctcccgtggccggagctgaagaggagatgctgccgggagctggcggacatcccggcgaactgccggtgcacggcgctgagcatcctcatggacggcgcgatcccggcgggcccggacgcgcagctggagggccgcctagaggacctggcgggcttgccccgggaagtgcaaaggggaatcgtcgtcaccactggtacggaggcccaaagcaaacagg

SEQ ID NO: 84432 - DNA, 526 bp, Zea mays
  unsure (1)..(526): unsure at all n locations
atggagaggtgtatganctatagaacgtatgatgcactcgtcccggttcggaattcccgggtcgacccacgcgtccgattattgagaccaacaagcaacatagaaagtggaatccagtagcaacaatagagcagcaatggcgaccaagatattttccctccttatgctccttgctctttctacatgtgttgctaacgcgacaattttccctcaatgctcacaagctcctatagcttccattcttcccacataccttacatcaattatagcttcaatatgtgaaaacccagctcttcaaccatataggcttcaacaagcaatcgcagcaagcaacatacctttatcgcccttgttgtttcaacaatcgccagccctatctttggtgcagtcattggtacaaaccatcagggcacaacagctgcagcaactcgtgctacctttgatcaaccaaatagctcttgcaaacctttatacatactgtctagaacaaccaattgtttcattcaaccaaatggctaaacttgac

SEQ ID NO: 84433 - DNA, 520 bp, Zea mays
atgttaatagtttctgttatgcagttagtatactgcaccggttcggaattcccgggtcgacccacgcgtccggctccttgctctttctgcatgtgttgctaacgcgaccatttatcctcaatactcacgagctcctatagctgaccttcttactccataccttccatcaatgaccgcttcagtatgtgaaaacccagcccttcaaccctacaggctccaacaagcaatcgcaacgagcatcttacctttatcacccctgttctttcaacaatcgccagccctatctttagtgcaggcattggtgcaaaccatcagggcacaacagctgcagctactcgtgctaccagtgatcagccaagtagctctggcaaacctttctccctactctcagcaacaacagtgattttcattcaaccaactgtctacactgaaccctgctgctttattgcagcaacaacaactactaccagttaaaccagtagctactgactatatcattaatgtacaatattttctatta

SEQ ID NO: 84434 - DNA, 527 bp, Zea mays
  unsure (1)..(527): unsure at all n locations
tagagtcagcttctgacacgaacatacagtatatctatactcttnnntcggattccggtcgcccacgcgttcgttgccggtcccgaataaagagcagcagcgcagaggtcggtagagcgagaagaaggcaatggcggccgagagcttccttttcacctcggagtccgtgaacgaggggcaccccgacaagctgtgcgaccaggtgtcggacgccgtgcttgacgcatgcctcgcgcaggaccccgacagcaaggtggcctgcgagacctgcaccaagaccaacatggtgatggtgttcggcgagatcacgaccaaggcgaccgtggactacgagaagatcgtgcgcgacacctgccgcgagatcgggttcaccttcgacgacgtgggccttgacgccgacccgttgcaggtgcttgtgaacatcgagcagcaagtccccgacatcgcgccaggcgtgcacgggcactttcacgaacggcccaaggagatcggcncggcgaaccaggccacatgttcgggtccccacc

SEQ ID NO: 84435 - DNA, 540 bp, Zea mays
  unsure (1)..(540): unsure at all n locations
agaganctgatctgccctacgtaacactgaacggatgtatcactctcgactttncggctngacgcatgcacccacgcgtgcgcgcacgcgtccgcccacgcgtccgcaagcaacatagtattgtggaatacaggagcagcgatagagcaacaatggcggcaaagatattttccatccttatgctccttgctctttcttcatgtgttcctaacgcgaccatttttcctccatactcacaagctcctatagctgcccttcttgctccataccttccataactgaccgcttcagtatgtgaaaacccagcccttcaaccctataggctccaacaagcaatcgcaacaaacaacttacctttatcacacctgttctttcaacaatcgccagccctatctttggtgcagtcattggtacaaaccatcagggcacaacagctgcaacaactcgtgctaccagtgatcagctaagtagctctagcaaacctttctccctactctcagcaacaacaatttcttccattcaaccaactgtctacactgc

SEQ ID NO: 84436 - DNA, 541 bp, Zea mays
  unsure (1)..(541): unsure at all n locations
agggagtnatgatgattctgaagcctagcctctttgaccntatttagtattacttctaccggttcggaattcccggctcgacccacgcgtccgtagaccactgatttcacaatgaaaagttagacaatgccttcatggctagaactgttgcttgcaacacaattctttacgacttgtgctaaccatcttcttgctagtcgcaatgaatgtaacctattttgcacccagtgtgagaccaaaccagctgctttctgtaactattgtcgttcaagtgatcattccacccaccgtgtaatccagataaggcgttcatcgtaccatgacgttgtgagggtgtccgagattgaggatatccttgatgtcagcgatgtgcaaacttatgtaatcaatagtgcaaggattgtattcctgaatgagcggccacaactgcgtgcttctagtgtccccatttgtaaggcacccacatcatcaacacatagctgtgagacatgtaaccgtgtgctacttgatgcatttcgcttctgctctctttgatgcaatc

SEQ ID NO: 84437 - DNA, 529 bp, Zea mays
  unsure (1)..(529): unsure at all n locations
aggtggaagaggatctgannncagctgccgatgcgacgntctntccggtcctggatgcccgggacgacccacgcggcacgggcagattgcacgaaggaaatccagcgttaggccgtcgacaggagaatgaatggcgtcggcatctaacatcagccaccggcgagctagtgctcgcagccgccgtcctgctctccgtgctcgcggctgccagcgccagcgccgggacctactgcgtacgagagtgggccatgcggcgcaaccgggtcgcgagctgagcgtggtgcggggccaggcggacgtggagcatagggcgaggcctgccgggaacggagctgaggaggagatgcaggcgggagctggcgggcatcccggcgtactgccggtgcacagcgctgagcatccttatggacagggcaagcccgaggggcgcagacgctcagatggaggggccggcgagaggacctgcgcggctagccaggggagggagagaggggaagagaggggagcctggggccggaagggcatggcc

SEQ ID NO: 84438 - DNA, 531 bp, Zea mays
  unsure (1)..(531): unsure at all n locations
gtggagaagatgtgtatgtgnctccagcttcatcagtgtaancatcgtaccggtccggaattcccgggtcgacccacgcgttcgaccacgcgttcgtccacgcgtgcgtatgatgacaatgaatctgatccaaggacacgtgaaggattagaagttactaaggtgacaactagagaacttatagcaaaatatggtttaagtgatgatacagtggatttcattggacatgcacttgctagtcatatagatgatagctatgtagtagaaccgagaattgatgcagtgaaagggatgaaactatattcagaagttattgcacgctttcaaagaagctcgtcatatatatatccatagtatggtctgagtgagctaccacagggttttgcacgattgagtgctgcatatggaggaacagacatgttaaacaagatcaattgcaaggttagattgcgagatgtaagggaaagtgtgtaatgtagtgtgtgaatgtgaaactggataagtgaaaaaggtagcaatgngaatattagt

SEQ ID NO: 84439 - DNA, 529 bp, Zea mays
  unsure (1)..(529): unsure at all n locations
atggaaaaatggattttgtagctcatgtcactatagtgtaaccctcgtaccggtccggaattcccgggtcgacccacgcgtccgaattattgaaataaatccttacatgctggggacaatggctggaggtgctgctgatggccaattttggcataggaacctaggaaccaagtgtcgtctccatgagctttcaaacaagcgaaggatctctattgctggtgcttccaaactgttgactaacatcctttattcatatcacgggatgggactgtagataggtacaatgatcgctggatgggatgagaaggatcctggctaggactatgttgacagagagggtgcgcggctcgtggggaacaggttgtctgttggctctggttcactgtatgcttatggtatcttggatgatgagtaccgcttcagcatgtaatgtgaggaagcagtcgaataancgcgacgggctatttatggggcaacattacgttgtgcagcaagatgtagagttgtataatggttaccaagttggtcc

SEQ ID NO: 84440 - DNA, 533 bp, Zea mays
  unsure (1)..(533): unsure at all n locations
gagatggtcgtgagtctgagtttatctcaccgactcgattgctacactctaccggttcggaattcccgggtcgacccacgcgtccggttttcacgggtgctccaggaaagtatgtggagctgaaggaaagcgtgaagagtttgcagggtgttttggatgggaagtatgatgacctccctgagcagtcattctacatggttggtggcattgaggaagtcattgctaaggctgagaaaattgccaaggagtctgcttcataaggaggcttcttgcttgttcaaccctgtacaagttccatttttggattttaagcgtttatttatgcttttcccagttaggcatgacgagctggagagtccatctcctgctgagagatgtttggtttacccttctttgcttncttcaacttacacccaaattagcaactgcagtgacgttggttttggctgcacccaaacttccttgactgaagaaacttgtggcctgtgtaacgcgaatccatcataacgccaaattattggttctggttgtgg

SEQ ID NO: 84441 - DNA, 538 bp, Zea mays
  unsure (1)..(538): unsure at all n locations
gagagaactaggttgatcctcagtttatgacataacagtatactcgtaccggttcggaattcccgggtcgacccacgcgtccgacagtttctgccattcaaccaactagctgcattgaactctgctgcttatgggcaacgacaactagtactaccattcagccagccagctgctgcctacccccagcaatttcttccattcaaccaactagcagcattgaactctcctgcctatgtacagcagcaacaactactaccattcagccagctagctgctgtgagccctgctgccttcttgacacagcaacaattgttgtcgttctacctgcacgctgcgcctaacgttggcaccctcttacaactgcaacaattgctgccattcaaccaacttgctttgacaaacccagcagcgttctaccaacaacccatcattggtggtgccctcttttagattgcttatgagttatagttcaataataaagtgtttttgatgaanaaaataaatttttaaaaaaaaataaaaaaaaaaaaaaagggcg

SEQ ID NO: 84442 - DNA, 525 bp, Zea mays
  unsure (1)..(525): unsure at all n locations
nggaggggaggttgtgcctactatcgactgattgtacgctcgtaccggttcggaattcccgggtcgacccacgcgtccgaaatctctcgtggaagaggataaacttgagctcgcaacttctcttattgagaaggcgaaggcaaagggggtttctcttttgcttcccactgatattgtagtagcggacaagtttgcagctgatgctgagagcaagattgtccctgccactgctatccctgatgactggatgggtcttgatgttggccctgatgccaccaaaacattcaacgaagcattggacaccaccaagactgttatttggaacggccccatgggagtgtttgagttcgagaagtttgcagctggcactgangcgattgccaagaagctagctgagcttacaaccacgaanggtgtcactaccatcatncgcggcggcgattctgtcgctgctgtccagaaggcttggcttgccgacaagatgagccacatttcgaccggcngcngtgccagcttggaactctt

SEQ ID NO: 84443 - DNA, 523 bp, Zea mays
  unsure (1)..(523): unsure at all n locations
atataattaggatttatantttagtttctnatcattaccgtaccggttcggaattcccggctcgtcccacgcgtccgatgctgctcatgctggtcaagagttgattggcttgatattcagtgataaggaactgtgggttggaagagcacagaagatgtatgaaagagagatggagttgaaggagaaatttgtaatgaatgttcaagaggtagctgagaagttgcaaaacacatacttatatttgaagaacttataggtgaacatatttgatgataaattgcgtgagctctttgatgattatggtaatattacttttctgcaatgttatgctgaattctaatggggttatcagaggttctggatttgttgctttcaaatctgctgaatatgctaaccgagctcttactgagatgaagagaaaattgnttgaatcaatctcatttatgtatatttttgctattgtaaagaatactaggaggtataacttcaggttcatttttgaaaattcattccggtttatttg

SEQ ID NO: 84444 - DNA, 528 bp, Zea mays
  unsure (1)..(528): unsure at all n locations
atttagaatagtgtttgtgnctcagctgctatagcatagctctaccggtccggaattcccgggtcgacccacgcgtncgatctccaccaccatcggcgggaagaacggcgagcccaagcggaccatcagttacatgggagaacgtgacgtgggcacaggctcattagggatcgtcttccaggctaagtgtctggaaacaggagagaccttcgccatcaagaaggtgcttcaagaacggcatgtctagaaccgtgagctgcaactgatgcgtaccatgggacacctcaacgtgatatgtctgaagcactggtttatttcgacaacgagcagggacgaattgttttaaaaccttgtcatggaagaggtccctgagactctataccgagtcctgaagcactacagaaagtgcgaccataggtggcttgtaattaaagtaaaggtttacatggatgaactttttatagggccagatttagtgtgataattgacaaggaattatggcttagattttaataccgccaaaagctn

SEQ ID NO: 84445 - DNA, 526 bp, Zea mays
  unsure (1)..(526): unsure at all n locations
atgtttgaaaagtgtcaggctctagctttatagtatactgcaccggttcggaattcccggctcgacccacgcgtccgagcagctgtgcaagcctataggctacttcaagcgattgcgtagagcgtattacaacggcgaattgcccaattgcaacatcaagcagtggcacatctaacaatacaaaccatcgcatcgcaacagcaacaacagtgcctaccagcactgatccaaatgtgcaatggtgcccttgttgactaattgcagcgtgtgctgattggatacaactgacttgctagagcaaacgtagtttcaaaccagcaacaacaacaactgcaacagtttcggacagcgcttagtcaactagccatggtgaaccctgccgtctacctacaacagcaacaactagttgnattaggatgatcgatgtagacaatgcattgaaatacgtgatacaagaatcgttgcaacttgatagaagagattgagactagcttagtttagctgaaaggtgaggctgatttagaca

SEQ ID NO: 84446 - DNA, 528 bp, Zea mays
  unsure (1)..(528): unsure at all n locations
atttattaattaatcatgncctcagttcnatagagtanntctgtaccggtccggaattcccgggtcgacccacgcgtacgccaatcttctacatgcacaatcctgttaagaccatcaagtacaaatgttattggtaccgtgaacatgctgtgacttgcatagatagttggagctaggattttgttgacatcaacatatgaagtttatggtgatccacttgagcatgcttaaacttatgcctgattgtgcagtgttaacctaattgtaatcagtgattgttatgatgagtgtaagcgtgtttcagattcgatgatgtttcgactattacaggcagcatggtattgatattcgaattgccaggatattcaacacctatgggccaaggatgaacattgacgatggccagtgtagtatgaacgtatattgttaacgctgatcgtagttaacctttatatgttcagatactaggtacttattataggagtatattgtattttttatttatgtgttgatgtttnataaagttta

SEQ ID NO: 84447 - DNA, 540 bp, Zea mays
  unsure (1)..(540): unsure at all n locations
atgaataagagtattatgccctcagtccatgagtgcatatctgtaccggtccggaattcccgggtcgacccacgcgttcgaccacgcgtacgaggacgcgtgggggatgtagtgatcaacggtgttattacagaggcatgctatgtgaacattactagtagcagtgctcataaaagctacaatcccatgtacctgtatttgcccagtcatgtatacacttccaaactgctccatgggataaagactaggttatgtaaaacatgatcatagatggattaataaataatattgataaaaaagaatttataattaataataaataaacgtataatgactaataaatagattatgaaaagacaagtggggtatatagcgagtgaacctgaggaccaaagcactgttcaattagtatagagatatataagttatgtaaagnaagaatagcttagataaaaaaanaattaaactatagtattaaaatttaatattctatttnagtattaaaaataaaagnagataaaatcatanatatgataatac

SEQ ID NO: 84448 - DNA, 521 bp, Zea mays
ttgaatgtgtttaaagtaatcagtgctcagtctcatgcgtattctgtccggtccgaatcccgggtcgacccacgcgtaccgccagtgcacgactaggttcagatcttggcgtcatgtgtttggcaacgagccggaaagatggtagtccttagaatcgatcggttcctgagcgagctgacgtgcatgttctagcggagcacggagaagggctacgtatggatgaccatgtagcgagcaagtctcgagggcgaggcacagttgcgttgagatggagaataatgatcaggaggtttagctcaattgagtgattcgcgcctccaatggcaagaagaatattttcagcttggtttctctaattgagtacacaaagtttcaagcttcatacgcaacagttcttaaggaccatatgcatgctctgaagaagagggagagagtagacaatggtgaggctgtatgtgctgagagaggaatgagaactgatccaagaagtaggaggaaggtttttcatagatatttttgag

SEQ ID NO: 84449 - DNA, 531 bp, Zea mays
  unsure (1)..(531): unsure at all n locations
gtggtgtaatgaggattatgncctcagcctccatagcgacantcctgtaccggtccggaattcccgggtcgacccacgcgtccgcgcaaattgcaccaagaaatccatcgagaggccgtcgacaggggaattaatggcgtcgtcgtctagcagcagccaccggcgcctcatcctcgcagccgccgtcctgctctccgtgctcgcggctgccagcgccagcgccgggacctgctgcatgccgggatggaccatcccgcacaacccgctcccgagctgccgctggtacgtgaccagccggacctgcagcatcgggccgcgcctcccgtggccggagctgaagaggagatgctgccgggagctggcggtcatcccggcgtactgccggtgcacggcgctgagcatcctcatggacagcgcgatcccggcgggcccggacgcgcaactgganggccggctagaggacctagcggagcagccgatagaggtgcntaagggatttagcagggccgtggtttactggagcagatggca

SEQ ID NO: 84450 - DNA, 535 bp, Zea mays
  unsure (1)..(535): unsure at all n locations
tggtaggtcgaggtctgaagccctacctccgacttggatgcnacaccacttccggttcggaattcccgggtcgacccacgcgtccgcaaagacatggattgaagtttctggttcatcagcaaaggatgttgctaaggagctcggggaacaacaaatggtgatgccaggccatcgtgagtcaaacttgcagaaggaacttaaccgatacatccccactgccgctgcatttggtggtgtatgcattgtcgcattgaccgtcctggctgatttcatggttgcgattggttcaggaactgctatattgctcgctgtgacaatcatataccaatacttcgaaacctttgagaacgaaagggcgactgagcttggtttctatggtttttgatcattagctgtggaaccttaactagtctatagatgaattttcttgtcagtccatgtagtgcttaaccagttcacacttagagagatctggccacgtttccttcttgcggacacactttttaacaaaatgtacctattttttaagataggt

SEQ ID NO: 84451 - DNA, 535 bp, Zea mays
  unsure (1)..(535): unsure at all n locations
ngagtagaaacaggtttgacgcctagcctcaccgactttagttggattgctcgtaccggttcggaattcccgggtcgacccacgcgtccgcccacgcgtccgggttgggtttattgaggcgtggaggatccctggtgttggcccttgcgccctctgccttttcttctgcaagcttgtggcgtatacgttcctgtactggcttcccttctatatcagccacacagctatcggtggagaatacttgtcggactccgcagccggggtactgtcgacgctgttcgacgtgggcggcgtcgtgggcggcatcctcgccggccacatctccgaccacctggacgcccgggcgctgacggccgcgagcttcaccttctcggcgataccggcgctcttcttctaccgcgtctacgggaacgtctcgctggcctggaacatcgccctcatgttcgtcacggggatgctggtgaacggcccctacgcgctgatcacgacngccgtgtccccggacctcggcacgcacagctggtcaacggcaact

SEQ ID NO: 84452 - DNA, 520 bp, Zea mays
  unsure (1)..(520): unsure at all n locations
aggttaaaggatttggcctagcagttagtagtactcaccggtccggaattcccgggtcgacccacgcgtccgcggacgcgtgggctgctgcagcgccttcgccgtcgccgccgcatctaacgcagttccgtgcgccgcagcccgaggcaagagggatctccagaacgacattgatctgctcaacccgccggcagaactcgagaagctcaagcacaagaaagagagactcgtccgagcggccaacttcttcttgatggatgttaagtgccaggggtgcttcggcataaccgctgagttcagccactcccaggactgttggtgtgtgccctggctgccaaactgtcctctgccaacccacaggaggaaaggcaaggctcactgagggctgctctttccgcangaagggagactagagcggatgtagtcttcaagttttgctctatgccagatactatctgcatgaacttggtgtagctattgatttgcatagattggtgngaagcanattttgggtgggtgt

SEQ ID NO: 84453 - DNA, 532 bp, Zea mays
  unsure (1)..(532): unsure at all n locations
gatatagaatagangtgagtgctatcgaanatcantacatntctgtaccggtccggaattcccgggtcgacccacgcgtccgcagaaacacaccaagcgaagcgcactagcaacaacctatcagcaatggctaccaagagattatccataattgcgcttaatgcactttttgcgagcgcaacaaatgcgtccattatgaccacaatgctcacttgctcctagttccattattacacagttccattcaccagatacttaaatgacctaagaacactcaactgtgcaagccgataggctacaacaagcgagtgaagcgatcgtcttacaacaaccaattgcctaattgcaacaacaatccttggcgcatctaacaatacaaaccatcgcaacgcaacagcaacaacagatactaccaatactaatccaaatanccgttgatgaaccatgaagactacttgcaacatcaggtgattgaatagagaaccgataggtctagcaaatcttaactgaaaaacgaatacagataaaaaat

SEQ ID NO: 84454 - DNA, 538 bp, Zea mays
  unsure (1)..(538): unsure at all n locations
gagtagagcgcgagtctgagncctgnnccattgcnttggctgccacgntcgtcctccttctgacttcccggctcgacccacgcgtccgctggctttgacagacccatttgacttctaccaacaacacatcattggtggtgccctggtttagattgcttattagttgtaattcaataataaagttttttagaatctggaactgtaacttcttatatctgtttcaccacatacatcatccaaagattacaagatacatttccaaattctaacaaatttacaaactgggcgctcattatacagtatccaaacttacctacgcttgcatgcaactctataacttttctatagcttaacttatatcaaatacgctggccccgatagtacttcctcatgactgctaaaactttatcgatacccagcttcagcctcttacatctcatcaacctttctccaactggggtttagctaataggcccgcattgaattaccttaccatctgttgcccaacctgtatagttaataggaatccttcctttcg

SEQ ID NO: 84455 - DNA, 590 bp, Zea mays
  unsure (1)..(590): unsure at all n locations
gagtagagcgtgagtctgagtttacctnatcgcctatggctgcactagcgtcggaatttccggctcgacccacgcatccaggcgacgcgcggacgcgtgggctggacgctgtgggacgcttgtcggcgagctgccttacaacaacgcaattgcgccaattgctaacaacacatccttggcacaaatctaaccctacaaactcattgcaactgcacaacaacaacaacnagtttctgccatcacttgagnctcacctagccgtggtgaacacctgtcancctacttgcaacnagcagctgcttgcattccaacccacttgctcttggcgaacgtagctgcattaccagcaactaacaaccagcttgcaacagtttaatgccagtgctcaagtcaactagctcatggtgaactcctgccgtctacctttacaactactttcanntctagcccgctttcgcggtgggcaaatgcaacctaacgtacctatncaacaacagttgcttgcaaccaaattgtaccaagctctgactcagnctagcttgtggcaaaaccctgcttgcctacttacaacaagttgctttcatttaaan

SEQ ID NO: 84456 - DNA, 525 bp, Zea mays
  unsure (1)..(525): unsure at all n locations
atgtaattagtattgtgcctcacntccatagnatcaccgcaccggtccggaattcccgggtcgacccacgcgtccggcaacatagaaagtggaatacagtagctacaatagagcaacaatggctgccaagatagggtccatccttatgctccttgctatatatgcatgtgttgctaacgcgaccatttttcctcaatactcacaagctcctatagctgcccttctttccctatacctatcattaatgaccgcttcaatatgtgaaaacccagcccttcaaccctacaggctccatcatgcatttgcaacaagcaacttacctttatcacccctgttattacaacaatcgccagccctatcgttggtgcagtcattggtacaaaccattagggcacaacagctgcagcaactggtgctaccagtgatcagccaatgagctcatgcaaacctttctgcctactattagcaacaaatatttgtttcattaaccaaaatattataagtaatacctattggtatttttaa

SEQ ID NO: 84457 - DNA, 525 bp, Zea mays
  unsure (1)..(525): unsure at all n locations
atatataaagtatgttcgcctcagtccactgcgtatcgctgtaccggtccggaattcccgggtcgacccacgcgtccgtggtttttcttgtcaggttgctgaacgtgctttgttcttgtggaacaatgatcatggggtaagcttgatagcacaaaatggtgttgttatatttccaattatatttgaagctgttgagaggaatatacagagccactggaatcaagcagtttatggtctcactgcagaggtgcgcaagatgttattggacattgacagtgaactatttgaagagtgccagcagcagtacatggagaaacaagcgaaagccaaagagatacatgaacaacgagaatcagcaaggagacaattggaagctgttgttgctgccaaggctgctggagaagacatagatttggtcaactaggtagtataacctttagctttatntatttgatagtgcttgtgttagtagatttatatgtgcttgtaaaataaaagctgactaaatctggtagttgtgagtan

SEQ ID NO: 84458 - DNA, 524 bp, Zea mays
  unsure (1)..(524): unsure at all n locations
atgtaaaagagttaggcctcagctgcatgcgnatatctgtaccggtccggaattcccgggtcgacccactcgttcgcccacgcgttcggatcagcaaagcggcagtgcgtagagaggatcgtcgaacagagcggcatgaagatggtcatcgatctagtcgtgtgcctggctctgtcagctgccagcgcctctgcaatgcagatgccctgcccctgcgcgaggctgcaagggtggtacagagctgactccgacctgacgacgatgatgggcgcctgcaggctgtacccctactcggaatacctgagtgagccacagagcatcatgctggcagcggagccctactacgccaggtgtgggcagccgagcgccatgttccagccgctccggcaacagtgctgtcaagaatagatgaggatgatggacgtgcagttcgtagtgcaccaggtgaagatgatgaatgaaattgagcatgattgttacgatagaaaaaaagttgttcagataaatttagaatgaaaaaataa

SEQ ID NO: 84459 - DNA, 536 bp, Zea mays
ggagtcagggttgactacgacaagtgggagagatagtatctgctcgtaccggtccggaattcccgggtcgacccacgcgtccggtttctttggcagatgtggccaactaaatttcagaataaaacaaatggagtgactcccaggcgttggatccggttttgtaatcctgcattaagtgcattaatttcaaagtggattggttctgatgactgggtgcttaatacagacaaactggcagaactgaagaagtttgctgataatgaagatctgcattcagagtggcgtgctgctaagaaggctaacaaaatgaaggttgtttctcttataagggagaagacaggatatattgtcagtccagatgcaatgtttgatgtgcaggtgaaaaggatacatgaatataagcggcagctgctaaatatccttggaattgtctaccgctacaagaagatgaaagaaatgagcacagaagaaagagcaaagagctttgttccaagggtatgcatattcggtgggaaagcatttgccacatatatacc

SEQ ID NO: 84460 - DNA, 537 bp, Zea mays
  unsure (1)..(537): unsure at all n locations
gaggagtagaggatctgtgccctgcncaatgactcgattgctatgctctaccggttcggaattcccgggtcgacccacgcgtccgcccacgcgtccgcccacgcgttcgcccacgcgtccgcccacgcgtccgcggacgcgggcgtttgagcattcagaaacacaccaagcgaagcacattagcaacaacctaacaacaatggctaccaagatattatccctccttgcgcttcttgcgctttttgcgagcgcaacaaatgcgttcattattccacaatgctcacttgctccaagttgcattattacacagttccttccaccagttacttcaatgggcttcgaacacccagctgtgcaagcctataggctacaacaagcaattgctgcgagcgtattacaacaaccaatttcccagttgcaacaacaatccttggcacatctaacaatacaaaccatcgcaacgcatcagcaacaacaatttctaccagcacttgaccacctagccatggtgaaccctgccgnctacttgaacaacaa

SEQ ID NO: 84461 - DNA, 536 bp, Zea mays
  unsure (1)..(536): unsure at all n locations
agagggaaggattnatcactgagtaaagaatatttgcattctcgtactcggttccggaattcccgggtcgacccacgcgtccgcccacgcgtccgaccacgcgtacggcaacatagaaagtggaatccagtagcaacaacagagcaacaatggcgaccaagatattttccctccttatgctccttgctctttctgcatgtgttgctaacgcgacaattttccctcaatgctcacaagctcctatagcttcccttcttcccccataccttccatcaatgatagcttcagtatgtgaaaacccagctcttcagccctataggctccaacaagcaatcgcagcaagcaacatacctttatcacccttgctgtttcaacaatcgtcagccctatctttggtgcagtcattggtacaaaccatcagggcacagcagctgcagcaactcgtgctacctgtgatcaaccaagtagctctggcaaacctttctccctactctcagcaacaacaatntctttcattcaaccaactgtctacactg

SEQ ID NO: 84462 - DNA, 523 bp, Zea mays
atgtatataggattgttctcagctccattgcacactgcaccggtccggaattcccgggtcgacccacgcgtccggtggaaacccctttagtcttgagggaaaaaaaataaagggagaagctctcctgagaagcatatagcaccagcggaacacggtaacggcggaagcaaacaactagaaattccccagaccagttctttgcgtgcggttgatctcgtcagatgcccggacatggttactcaatccgccatcgaattcgatggcagacaacgccgggaataatatccgcaacgccaagctgaatcttcttggagatgtgagcgctggcaaatctagcttggatcttcggtttgttaaaggacagtttgttgaattccaggaatcaacaattggagcagacatcttttccaagaccttagcggtcaatgattagactggtgagttcgaaatctgggagactgtcggacaagttaggtatagaagcttgggttacaatgaccataagggtaggaatttgtttcaa

SEQ ID NO: 84463 - DNA, 531 bp, Zea mays
  unsure (1)..(531): unsure at all n locations
gtgttagaatgaggatttgtacctcagctctanatgcatactctaccggttcggaattcccgggtcgacccacgcgtccgatcgaagatgccgttgacggcgccatcagctggctggacagttaccagctggctgaggtggaggagttctatgacaagatgaaggagcttgaggggatctgcaaccccatcatcgctaatatgtaccagggcgagggcgcggtcatggagcgctgatattgatatatgatttgttgctccagatggtagtagcagttctggttccaatatcgaggaggaggattaagtaggttagtgttcgaggtttggtttagggaggtgtgaagagcctaaactctgatggttgtttgtgaggtgtggtcgcaatagctgcggcctgtggtgaacgtcattattataaataagttttttgtcctagaattaatnttattggggcgggcggattataaggatctaanattacgtaagtttgcatgctaatttattagttattagataattgtaaatttaa

SEQ ID NO: 84464 - DNA, 521 bp, Zea mays
tggggaggaatagacaatgcacgcatagtgtactctccgcatctgaataccgggtcgacccacgcgtccgtccacgcgtccgcccttgcccatgccattgctaatgagactggcgtgccgttctatgagatctccgcaccggaagtcgtatctggagtgtctggagcatctgaggaaaacatcaggggcttgtttcagaaggcctatcggactgccccctcgattgtgtgtatggatgagatagatgcgattgcatccaagagggagaatctacaacgagagatggaactgctgatagttactcaattaatgacatgcatggatcaattccaccagaatattggatcgggaagtaacaatttggaagctgaatcatctgaaaagaaacctggttatgttattgtcattggagccacaaataagcctgatgctgtgatccaagctctgcgaaggccaggcaaggttgaactatagagattacttggtggttcagattaagatgggccgggaccaattcctga

SEQ ID NO: 84465 - DNA, 528 bp, Zea mays
tgagaaggaatatagcttacgaaatatattagtaccgctgtaccggtccggaattcccgggtcgacccacgcgttcgcaaactcttcaattctggatcactgaagagctggaggcacttaaggaaaatctggaagagctaggttcacctttgtcatgtgatcatatcactaatcagattggaatgttctgctacagtgggatgacacctgaacaagtttaccgtttaacaaatgaataccagagttacattacccgtaatgggaggataagctttgctggtgttacgacaggatatgttgactacctttcatatgcaattcatgaggttaccaaaccaaattgagttagggtcctaccttctttggtcgatggaagctgatggaatgagactgttaagcggcttgtcttcagttctgttcctgacatggatgagggtaacctgctggttccatatacatgtacacagactgagatgtagacacttaagtcttgatagtttgtactctggttcatattaattaaaaccc

SEQ ID NO: 84466 - DNA, 534 bp, Zea mays
  unsure (1)..(534): unsure at all n locations
agagggcgggtatnccactgantactgccacttcgtactactgtaccggttcggaattcccgggtcgacccacgcgtccgggaaccaggactcgaagcagaatttgctacgtttgacttgaagagtttctgtcacattggcattgactcttcgggcaacaggttcttcagctatggaccttcgaaatatgcaaacatacagtaagcaaatggtgctaccttcttggctatctgaggaagatgtcagttaccttgcaagtgtgtactcaaaaactggatttgctggtggagtaaattactatcgctgcttggacctgaactgggaactgatggcgccatggacaggagcaaaggtgcaagttccaaccaagttcatcgttggggacggtgacctggcgtaccatcaccctggagtgaagaggtacatccacaagggcgggttcaagagggacgtgcccatgcttgaggaagtggtggtcatcaagggcgctgggcacttcatncaacaagaaagagcgcaagaaatcagtgagcg

SEQ ID NO: 84467 - DNA, 529 bp, Zea mays
  unsure (1)..(529): unsure at all n locations
nggtagggaggggggggagtnnnntnnnccttactgaagcctattggtactgctcgtaccggtccggaattcccgggtcgacccacgcgtncgcaacactattatttcaaaaggatccttggctggtgctggctgggatgtattccgcaggcaggatcttccaaagcttaatgaatatctagctgttcatcgggaagattgtgcagctagatgtcaagcagtgtcttctgttaagtatcctatttatgatcaaactgtgtaccttaacgattatcataagaaggtgttgaaggatcaatatggaattgaacccttcacattccaccaacatattggtgaggctgttttcattccagctgggtgtcctttccaattgaaaaaccttcagtccacggttcaattggctctcaattttttgtcacctgagagtttgccagagtcagtccggctgtcccaagagatccgttgcctgccaaatggtcatttttgcaaacttgagatgctttgagtaaaaaagatcttctatttt

SEQ ID NO: 84468 - DNA, 524 bp, Zea mays
  unsure (1)..(524): unsure at all n locations
agaatagtgttttcngctaatatgaagatgggggaggtagtgtacatacctcgtccggaattcggaattcccgggtcgacccacgcgtccgcccacgcgtccgcccacgcgtccggacaaggttgcgtatgccctgtctcagggactaaaggtcattgcatgtgttggtgagacccttgagcagagggaggctgggtctaccatggatgttgttgctgcacaaacaaaagcaattgctgagaagatcaaggactggagcaacgtagttgttgcctatgaaccagtttgggctattggaactggtaaagttgccaccccagctcaggctcaggaagtgcacgcctccctgagggattggctaaagaccaatgccagccctgaggttgctgaatctactaggatcatctacggaggctctgtaactgctgcgaactgcaaagagctagcagcacagcctgatgtcgatggttttcttgtcggtggagcttctttgaagccttgattcatcgaccatattcaccgcg

SEQ ID NO: 84469 - DNA, 514 bp, Zea mays
  unsure (1)..(514): unsure at all n locations
nggggggagcgtgtngtgatgtaaagggggggataaagagattgctcgtaccggtccggaattcccgggtcgacccacgcgtccgcccacgcgtccgcccacgcgtccgcccacgcgtccgggcaagccaagcgtagtcatgttcgttggtctgcaaggttctggtaaaactactacttgtacaaaatatgcttattatcatcagaagaaaggattcaaaccagcactggtttgtgctgatacatttagggctggtgcttttgatcagttaaagcaaaatgcaacgaaggccaagattcccttttatggaagctacatggaatctgatccagtgaaaattgctgttgaaggtgtggagaggttcaagaaagaaaactgtgatctcatcattgtggacacaagtggaaggcacaaacaagaagcagcactctttgaagaaatgcggcaagtttcggaagcaacaaaaccagacctggtgatttttgtgatggacagtagtattggtcaggctgcn

SEQ ID NO: 84470 - DNA, 493 bp, Zea mays
  unsure (1)..(493): unsure at all n locations
tgaagcgttttgacctcgaatgggagaatagtatagctcgtaccggtctcggaggttcgacccacgcgtacgcgcccgtggtagctcggcccaaattccgttcttcgctgctttgatggcgagaatgcaggaccttgtgcgaaggactgcaagctggctaatcttgtctgcttggaggaagttggatgctatcgaggagaaggatggagtgcttgatgagtaagacgggtttctggtgtcgatttgcttctgagtttttttctttntatatcgttgcgatctcgtggttgtcgtttggttagcaggcaagccaggctattagtccgaagaatgtcgtctataaacatgtgttcctacgttgccacatgctgagtcaatctgtatacagctagctctaggtggtcagctgcgtctaccacaatgagcatacatgtatggataaatcttctgtgaaagcattcgatgaataagggttgttttcaaaaaaaaaaaa

SEQ ID NO: 84471 - DNA, 488 bp, Zea mays
  unsure (1)..(488): unsure at all n locations
nagtntttatggtgtgtctgngtaagtggatggggagaagatagcatcgctcgtaccggtccggaattcccgggtcgacccacgcgtccgggatcacgtatgaatggccagctcccacatctgaactagtctctatcatcatgcaatgcacatcagcaaagcggcagagcgtacagaggatcgtagaacagaacagcatgaagacggtcatcgctctcctcacgtgcctagctctgtcagctgccagctcctctgcaatgcagatgccctgcccctgcacggggctgcaaggcttggacggcgctggcgctcggctgaccacgatgatgggcgcctgctggctgtacccctacgcggagtccctggagcatgcggagtgcactcccgatggcagangcgccctactacgccgggggtgggcagacgagcgccatgtaccatccgatcccggaacagtgctgccagcagcatatgacgatggatgacat

SEQ ID NO: 84472 - DNA, 511 bp, Zea mays
  unsure (1)..(511): unsure at all n locations
agggtgttagtgttcntgttatagaggggggagagtatgcttctaccggtccggaattcccgggtcgacccacgcgtccgaaactgttgagcctgttctaagccctttcctttgtagcagctatgtttgccataggctctcatgctgatggagactgtgagaatgacctccaaagcctgataagtgactgcaagacatacgtgatgttcccagctaatccaaaggtccctccttcggatgcttgctgtggtgtcatcaagaaggcaaacgtttcttgcttgtgctccaaggtcaccaaagaaactgagaagggtgtgtgcatggagaaggttgggtatgttgctgaacaatgtaagaaggcatttgagcatggcttccaatgcggaagctaacaggttccagcanactgatgatatcacangagggaagcgcttgacgtagtctttagatttcaattgttgcagccgatcaaccttcttagggttgtataatatgaagtcaatgttgagac

SEQ ID NO: 84473 - DNA, 506 bp, Zea mays
tagcgtgtcttcactgcatacgaatatgatgcatctgctcgtaccggtccggaattcccgggtcgacccacgcgtccgcaaaagcacactctgttcggcttgccttgtcctttttccttgccatatggctaccaagatggtcctgtgtcgctttgtagccctcgcggctgtcgccttgctcctccggcctggcccggcccgtcaggctcaaccgaaggttttccggttggtccaacaacccggccccgacttggtacggcgcagccaccggcgctggaagcgacggtggtgcatgcgggtaccagaacgccgtcgaccagccgccgttctcgtccatgatcgccgccggcagtccatccatcttccagaacggcaagggctgcggcgcctgctatcaggtgaaatgcaccgggcacgcgtcgtgctccggcagcccggtgaccgtggtcctaaccgacgagtgccccggcggcgcgtgcctggacgagcccgtgcactttgacctg

SEQ ID NO: 84474 - DNA, 491 bp, Zea mays
  unsure (1)..(491): unsure at all n locations
gagaaagggtttggctacgcaatagatttagtggcacggttccggaattcccgggtcgacccacgcgtccgccctccgagcatcctagtgactcccatggctccggccatgtcggcgcagttcacaagaataaccttcagcaacctgtttgtccgtcgggctggcccaggcagcacggagctgaccgtggagggaaggccatccgaccagctgggcaggagaaacctcactgacagccccgtatttgacggccgtggccctgacgccagcctcgtggctcgcgtacagggagtcgctacccagatgggcgacgtgcgccagttgtacaccgtcgtgttccaggagaggccgctcaagggctccacgctcgtcaccgaaggcgcgatgacagaagggtcagacgagtgggcgatctacggtggaactggagtgttcgcgatggccagaggcgtcatanggagaacgtttcttgccgacacgaacggcgggaa

SEQ ID NO: 84475 - DNA, 595 bp, Zea mays
  unsure (1)..(595): unsure at all n locations
ngaggtaggaagagcgctgtngttttatagcagggaggaaggcgaggtattgcttagcgtactcggtntccggnnaatatcccggggtcggacacncaaggccggttccggcgcacagccggttccggcgggacacccgttggggcgcacaggggcctgtcacaagtccttttctcaagaaatataatgggggtccttcttgtgtgggaaccaaccggaaggaatatggggaccattaaggtgggccctttaatccgtcaaaggtcgttaaccaaaaggttttcaccaagtatggggtaaaaactaattggggtacaaagaatcgggaccaatgattgagattcccagggcagctctagtggctgacgagatcgcggagcaggctgaattcttctcctttggaacgaacgacctcacgcagatgacctttggctacagcagggatgatgtggggaagttcatccccatttatctggctcagggcattcttcagcatgaccccttcgaggttctcgaccagagaagagtgggcgagctggttaagcttggtaccaaaaggggcccgcanagctaggccctacctttgaagtgggca

SEQ ID NO: 84476 - DNA, 509 bp, Zea mays
  unsure (1)..(509): unsure at all n locations
ggtgaaggttttnntcatgagtagagcgtattgcattctcgtaccggtccggaattcccgggtcgacccacgcgtccgcccacgcgtccgcccacgcgtccgcgcaaattgcaccaagaaatccatcgagaggccgtcgacaggggaattaatggcgtcgtcgtctagcagcagccaccgccgcctcatcctcgcagccgccgtcctgctctccgtgctcgcggctgccagcgccagcgccgggacctcctgcgtgccggggtgggccatcccgcacaacccgctcccgagctgccgctggtacgtgaccagccggacctgcggcatcgggccgcgcctcccgtggccggagctgaagaggagatgctgccgggagctggcggacatcccggcgtactgccggtgcacggcgctgagcatcctcatggacggcgcgatcccgccgggcccggacgcgcagctggagggccgtctaaaggacctgctcggcttgccgccggaagttccta

SEQ ID NO: 84477 - DNA, 509 bp, Zea mays
  unsure (1)..(509): unsure at all n locations
ggggttagtatgttttagagaagggggggtaagagtattgttgtaccggtccggaattcccgggtcgacccacgcgtccgcagcaagcaacatacctttatcacccttgtttcaacaatcgccagccctatctttggtgcagtcattggtacaaaccatcagggcacagcagctgcagcaactcgtgctacctgtgatcaaccaagtagctctggcaaacctttctccctactctcagcaacaacaatttcttccattcaaccaactgtctacattgaaccgtgctgcttatttgcagcaacaactattaccattcagccagctagctactgcctactctcagcaacaacaacttcttccatttaaccaattggccgcactgaaccccgctgcttatttgcagcagcaaatactactaccatttagccagctagctgcagcaagccgtgcttccttcttgacacagcaacagttgctgcctntctaccagcagtttgcggctaaccccc

SEQ ID NO: 84478 - DNA, 504 bp, Zea mays
  unsure (1)..(504): unsure at all n locations
gggttgagggtgngttaggaggggggatagagattgtcgtaccggtccggaattcccgggtcgacccacgcgtccgaaatcgagtccctgaacaagaagtatggatgtaatgtccctttacttctgatgaactctttcaatacccatgatgacacacagaagatcgttgagaagtattccaactccaacattgaaattcatactttcaatcagagccagtatcctcgcattgttaccgaggacttcttgccacttccaagcaaagggaaatctgggaaggatggctggtatcctccaggccatggtgatgtgttcccctctttgaataacagtggaaaactcgacatcttattggctcaaggcaaggagtatggtcttcgtgctaactcagacaacttgggtgctatagtcgacatcaagatcctgaaccatctgatcaataaccagaatgaatactgcatggaggttactccaaaaacattggctgatgttaaaggcggtact

SEQ ID NO: 84479 - DNA, 494 bp, Zea mays
agggagagggcttgattaaggagggggagtattgtcaacctgtccggaattcccgggtcgacccacgcgtccgccttaacaaaggggcaaatgtgtcacaactgacagctgatggcaggagcgcaattggtatttgtcggaggttaacaagagcaaaagactacaatacaaagatggagcagggtcaagaatcaaataaagataggctgtgtatagatattctagagagggagatgatgcggaatcctatggcggtggaagatgccgtcacctcgcctttgttggcagatgatcttcacatgaagcttctctacctggaaaacagagttgcatttgctagattgttctttcctgctgaagccaaggtcgccatgcaaatcgcacaagcagacaccacagaagaattcggcggtatagttgcagttgcagcaagcacttccggtaaactgagggaggtggaccttaatgagacgccagtgacacaaaacaaaaga

SEQ ID NO: 84480 - DNA, 512 bp, Zea mays
  unsure (1)..(512): unsure at all n locations
ggtggagggtctcntgttaaagaagaggaaaagtattgctcgtaccggtccggaattcccgggtcgacccacgcgtncgnccacgcgtccgcctttctccctactttcagcaacaacaatttcttccattcaaccaactgtctacactgaaccctgctgcttatttgcagcaacaactattaccatttagccagctagctactgcctactctcagcaacaacaacttcttccatttaaccaattggccgcactgaaccccgctgcttatttgcagcagcaaatactactaccatttagccagctagctgcagcaaaccgtgcttccttcttgacacagcaacagttgctgcctttctaccagcagtttgcggctaaccccgcaaccctcttacaactacaacaattggtgccctttgtccaacttgctttgacagacccagcggccttctaccaacaacacatcattggtggtgcccctctttaagatggctattagtngtaattcattatt

SEQ ID NO: 84481 - DNA, 509 bp, Zea mays
gaggtaaaggcgtgtgttatcgtatagaatatattgtatgctcgtaccggtccggaattcccgggtcgacccacgcgtccgatatcttttagtaacctttcaataggcgtcccccaagaactagtaaacatggcaaaactgttgagcctgttcttagccctctcctttgtagcagctatgtttgccataggctctcatgctgatggagactgtgagaatgacctccaaagcctgataagtgactgcaagacatacgtgatgttcccagctaatccaaaggtccctccttcggatgcttgctgtggtgtcatcaagaaggcaaacgtttcttgcttgtgctccaaggtcaccaaagaaactgagaaggttgtgtgcatggagaaggttgtgtatgttgctgagcagtgtaagaggccatttgagcatggcttccagtgcggaagctacaaggttccagcaaactgatgatatcgcaagagggaagcgcttgacgtagtctttagatttca

SEQ ID NO: 84482 - DNA, 466 bp, Zea mays
  unsure (1)..(466): unsure at all n locations
agagcaggcatcctcgtccggaattcccgggtcgacccacgcgtccggtgatccggcgctgagaagagatggctaagatcgccgcagccgccgcggcggcggcggcgctgtgcttcgcggccctggtggccgtggccgtctgccaaggcgaggtcgagcggcagaggctcagggacctgcagtgctggcaggaggtccaggagagcccgctcgacgcgtgccgccaggtcctcgaccggcagctaaccggcggcggcgtcggcggcccgttccggtggggcaccgggctccggatgcggtgctgccagcagcttcaggacgtgagccgcgagtgccgctgcgccgncatccggagcatggtcaggggctacgaggaggccatgccgnctctggagaaaggcttgtggccatatnggccggcagcagcagccgccgccgcagggaggaggaggaggacaggggggct

SEQ ID NO: 84483 - DNA, 489 bp, Zea mays
gagtgagttaaaggtctgtgcatcgatatgtgggcgtatatagtcacgctcgtaccggttcggaattcccgggtcgacccacgcgtacccgtctcaacctgatgcaccaagaaatccatcgagaggccgtcgactggggaattaatggcgtcgtcgtctagcagcagccaccgtcgtctcatactcgcagccgtcgcctgctctccgggctcgcggctgccagcgccagcgccgggaccttctgcgtgccggggtgggccatgcctcaccacccagttcccaactgccgctggtacgtgaccagcccgaccttgcggaatcggcccggccttcccgtgcccgaacctgaaaagaaattcctgccggaacctgccggccttcccggctacttgccggtcaacgggccttaacattccttatggacgggccaatcccgccgggcccggacgcgcagttggaggcccggctagaggacctgccgggctgccc

SEQ ID NO: 84484 - DNA, 484 bp, Zea mays
  unsure (1)..(484): unsure at all n locations
nagaagggtaaggttgtcttatgtaaatgaataattagcattcctctccggaattcccgggtcgacccacgcgtccgccacaacagcgaaggagaaagcagaccaacctagccacccagggagaaagaggccaataaggaggggagagtgtcgtcatggcttccattgtcgcttccaggagggccgttcctctagttcgcgctctggagaagctcatcgcagcgtcctacgctcccgggactggctccgccctcatgccggtggcagtcgccgggctgcctgcgcggctacaacaccggcgctccgctccgacgctacgaaggggccgagtcggaagacgatagcgtccgcgagtacgatgggcggcacggcggccgggactacgctgtgcccagcctgttctcagatattttccgtgatccgcttagtgcgccgcacagcattggccgcctgctgaacctttgggacgacttggcgggggccg

SEQ ID NO: 84485 - DNA, 509 bp, Zea mays
  unsure (1)..(509): unsure at all n locations
ggtaaaggtatctgtgtcaccagaatatatgtatcgctagtactggtccggaattcccgggtcgacccacgcgtccggaccaacaagcaacatagaaagtggaatacagtagcaacaatagagcaacaatggcggccaagatattttccatccttatgctccttgctctttctgcatgtgttgctaacgcgaccatttttcctcaatactcacaagctcctatagctgcccttcttcccccataccttccatcaatgaccgcttcagtatgtgaaaacccagcccttcaaccctacaggctccaacaagcaatcgcaacaagcaacttacctttattacccctgttctttcaacaatcgccagccctatctttggtgcagtcattggtacaaaccatcagggcacaacagctgcagcaactcgtgctaccagtgatcagccaagtagctctggcaaacctttctccctactctcagcaacaacaatttcttccattcaaccaacttgtn

SEQ ID NO: 84486 - DNA, 499 bp, Zea mays
  unsure (1)..(499): unsure at all n locations
gtaggaggctgtgactccagtcttacgcacgctagtaccgtccggattcccggtcgacccacgcgtccggcactacccgtgccatggcacacagggctgttgatgctgtattaggtccccggaccattcagcatgagactgttgcctcagaagctgctgctgctgcccctgcccctccagtgatgaatgctgatgcttgcagcatccattctaaggctttccaagattgtctcaacaactatggcagcgagatcagcaattgccagttctacctagacatgctgaacgagtgccgccgtggtggtgtgtctgcctaaactgcctctgggattattcatggattntcttttcgtgatgttatctcattaaataagataccgtgaaacttttgtctccacagcttgaagctgaacttcctgggattaatacattttgttatcctatgctgttggagcagacttttgtctctggatcatanatatttaaaaaaaaaaaaaan

SEQ ID NO: 84487 - DNA, 509 bp, Zea mays
agggaaaaggttttgtctctgatagaatgtattgcattgctcgtaccggtccggaattcccgggtcgacccacgcgtccgcccacgcgtccgcggacgcgtgggatcctgaatggatagattttccaagaggtccgcaaagacttccaagtggtaagtttattccagggaataacaacagttatgacaaatgtcgtcgaagatttgacctgggtgatgcagactatcttaggtatcatggtatgcaagagtttgatcaggcaatgcaacatcttgagcaaaaatatgaattcatgacatctgatcaccagtatatttcccggaaacatgaggaggataaggtgattgtgttcgaaaagggagatttggtatttgtgttcaacttccactgcaacaacagctattttgactaccgtattggttgtcgaaagcctggggtgtataaggtggtcttggactccgacgctggactatttggtggatttagcaagatccatcacgcagccgagc

SEQ ID NO: 84488 - DNA, 511 bp, Zea mays
  unsure (1)..(511): unsure at all n locations
gagttaagaggctnncgtttctgatagaagatatatagcattgctcgtaccggtccggaattcccgggtcgacccacgcgtccggtcaactagccatggtgaaccctgccgcctacctacaacagcaacaactgctttcatctagcccgctcgctgtggccaatgcacctacatacctgcaacaagaattgttgcaacagattgtaccagctctaactcagctagctgtggcaaaccctgttgcctacttgcaacagctgcttccattcaaccaactaactatgtcgaactctgttgcgtacctacaacagcgacaacagttacttaatccattggcagtggctaacccattggtcgctgccttcctacagcagcaacaattgctgccatacaaccggttctctttgatgaatcctgtcttgtcgaggcagcaacccatcgttggaagtgccatcttttagattacatatgagatgtactcgataatggtgccctcataccggcatgtgtn

SEQ ID NO: 84489 - DNA, 516 bp, Zea mays
  unsure (1)..(516): unsure at all n locations
gagtnngaggcgtgntgttatggaagggggggataaagtatagctcgtaccggtccggaattcccgggtcgacccacgcgtccgttcgcgtccgcctcagcccgccgcaaggagaggtaagttcaggagacatcttcgagaagctgaaatggctcctaaagctgctcctgccaagaagggtgatgccaagacccaggccttgaaggttgccaaggctgtgaagtctggggcagccaagaagaagaccaagaagatccgaacgtctgtgacatttaaccgcccaacgaccctgaagaaggctagggaccccaagtacccacgaatcagcactaccggaaggaccaggcttgatcagtaccaaattctcaagtacccctttaccacagaatcagcgatgaagagattgaagataaccacactctgggctttcattggtgacctcaaggcagacacgaagaagatcaaggctgtcgtcaagaaaatgtgtgacattcacggcaaagaaaggcaaccacc

SEQ ID NO: 84490 - DNA, 506 bp, Zea mays
  unsure (1)..(506): unsure at all n locations
ngaggtagaggctttatttaagaaggggggtaaagcatactcgtaccggtccggaattcccgggtcgacccacgcgtccgcccacgcgtccgcggtcatggggcagaaccttgccctcaacattgcagagaaagggttccccatctctgtgtacaacaggacaacctccaaggtggacgagaccgtgcagcgtgccaaggcagaaggaaaccttcccgtctacggcttccatgaccccgcgtcctttgtgaagtccattcagaagccacgggtggtgatcatgctcgtcaaggccggcgcgccagttgaccagaccatcgcgacgctcgcagctcacttggagcagggcgactgcatcatcgatggggggaacgagtggtacgagaacacggagaggagggagaaggccatggaggagcgcggcctnctgtatcttggcatgggtgtctctggaggaaaggagggtgcccgcaacggcccgtccttgatgccncgaggctcggtcg

SEQ ID NO: 84491 - DNA, 497 bp, Zea mays
agaaagggaggggtctgagtctagacaagaaagtattcttatacccgtccggaattcccgggtcgacccacgcgtccgattttcagcattcaaaaacacaccaagcgaagcgcactagcaacgacctaacaccaatggctaccaagatattagccctccttgcgcttcttgcccttttagtgagcgcaacaaatgcgttcattattccacagtgctcacttgctcctagtgccattattccacagttcctcccaccagttacttcaatgggcttcgaacatccagccgtgcaagcctacaggctacaactagcgcttgcggcgagcgccttacaacaaccaattgcccaattgcaacaacaatccttggcacatctaaccctacaaaccattgcaacgcaacaacaacaacaacagtttctgccatcactgagccacctagccgtggtgaaccctgtcacctacttgcaacagcagctgcttgcatccaacccactt

SEQ ID NO: 84492 - DNA, 500 bp, Zea mays
  unsure (1)..(500): unsure at all n locations
tagctcagtaaggggtctgaggcttcagcctttagtccatcagtcataacggtccggaattcccgggtcgacccacgcgtncggccacgcgtncgattgggcaagggtacaactgtgctgcaaagtggcactccaggcattggtggactcccagccaaggcaatgctgcagaaactgcgaatgtttaatacatattttgaggagatctatgcggcacagtcagaatgggtgatagcagatgaccagctaaaggttgacattagggcagcggtggaggagacagtgatgccagtttacgcctctttaattgccaagttaaagtcttctcctgaaactgggcgtgatttgtacatcaaatacaccccagaagatgttgtaacccacatccagcacttggtttgaagaacaacaaagtgataaatgatatgtatccttgtagcctgttatactgcagcttctgctcttctgaacttgtgaagttgctaccatggatttctcat

SEQ ID NO: 84493 - DNA, 583 bp, Zea mays
  unsure (1)..(583): unsure at all n locations
ctttccctttctactcgataccttgttttncccctctatttactctttatttatttttatatcgnnnnnnnnnnnagnngnaagatgtctggttagaagggagaaagagtattgtcatcncggtccggaattcccgggtcgacccacgcgtccgcccacgcgtccggcaacatagaaagcacaatagtgtaccaacaatggcagccaaaatattttgcttccttatgctccttggtctttctgcaagtgttgctaccgcaaccattttcccacaatgctcacaagctcctatagcttcccttcttcccccatacctctcaccagcggtgtcttcaatgtgtgaaaacccaattgttcaaccctacaggatccaacaggcaatcgcaacaggcatcttaccattatcacccttgttccttcaacaaccgtcagccctattacagcagttacctttggtccatttggtggcacaaaacatcaaggcacaacaactacaacaacttgtgctagcaaaccttgctgcatactctcagcaacatcagtttctttcattcaaccaactggctgcattgaactctgctgc

SEQ ID NO: 84494 - DNA, 514 bp, Zea mays
tggtgtattgactgttagtttctgttatagaagggggggtattgtcacactcgtaccggtccggaattcccgggtcgacccacgcgtccgcccacgcgtccgcggacgcgtgggccaagggtggcgccttattagctgcatctggctccatgctggcctaatccatttggttgtgaacatgctaagtttgctgtttattggaatccgccttgagcagcaatttggatttgttcgcattggtgccatatacctactgtctggttttggtggcagcgtgttgtctgcactcttcctacggaacagctacatctccgttggtgcttctggagctctatttggcctgctgggatccatgctttctgaactactcatgaactggactatatactccaacaaggcagcagctataataacactgttgtttattattgcactcaatttggctattgggatactacctcacgttgacaactttgctcacattggtggattcgcgacgggtttcctcttgggt

SEQ ID NO: 84495 - DNA, 516 bp, Zea mays
  unsure (1)..(516): unsure at all n locations
agttaaagactgntgtcacgtaaggaaggagtatactagtgctcgtaccggtccggaattcccgggtcgacccacgcgtccgattgctgccatttagccaacttgctttgacgaatcctaccaccttattgcagcagcccaccattggtggtgccatcttctagattttttatgctttatactgtaataataaagttctcatactgatatgtgcaacttctcagtaataaaagattagagatctatattttaagttcaaaaaaaaaaaaaaaaataaaaaaaaatcaaagtaaaaaaaaaaaacaataaaaaaaataacaaaaaaaaactaaaaaaaataaaaaaaaattactttaggaaaaaaaaaaaaggggtgcccttttaagaggaccaagttttataacccgggctttgcaacgtaaagattttttttagggccccctaaattcaaatcacggggccgttgtttaaaacgtttaaattgggaaaacctgtgggttacccaatttaaatgcc

SEQ ID NO: 84496 - DNA, 504 bp, Zea mays
  unsure (1)..(504): unsure at all n locations
aggaagttttttgtatagagggggggagagaagtattgctcgtaccggtccggaattcccgggtcgacccacgcgtccgcgcgaggaggcgtgtgaggccagcggctttgcgatgacagcaccagcggacaaggggaagaaggccaagactgatgccgacggcggcgaggagaacgaacagatcgacggcgtcctcgtcctctccatcgagaagctccaggagatacaggacgagctcgagaaggtaaatgaggaagcaagtgacaaggttatggaggtggagcagaaatacagtgagatccgcagacctgtctatctcaagaggggtgacattatcaagaccatcccggacttttggctcacagcgtttatgagccatcctctattaagtgagcttctgactgaagaggaccagaagatattcaagtacttagactccattgatgtggatgattctgatgttaaggcaagatactccattcatnctaacttctctgagacccc

SEQ ID NO: 84497 - DNA, 489 bp, Zea mays
  unsure (1)..(489): unsure at all n locations
nagtaagggaaggctcttagcctgcactgttgctacagcataccgnttcggattcccggtcgaccacgcgtncgaccaactgtctacactgaaccctgctgcttatttgcagcaacaactattaccatttagccagctatctactgcctactctcaacaacaacaacttcttccatttaaccaattggccgaactgaaccctgctgcttatttgcagcagcaaatactactaccatttagccagctagctacagcaagccgtgcttccttcttgacacaacaacagttgctgccgttctaccagcagtttgcggctaaccccgcaaccctcttacaactacaacaattgttgccctttgtccaacttgctttgacaaacccagcagccttctaccaacaacacatcattggtggtgccctcttttagattgcttattagatgtaattcaataataaagttttttggatgatgtatgtggccaaccagaa

SEQ ID NO: 84498 - DNA, 513 bp, Zea mays
agggaagagtgtttctgaaaaagaaggattaattgtattgctcgtaccggtccggaattcccgggtcgacccacgcgtccggacgggaatcaatggaaggaacggggcacgggcaccgtcaagcttctcaagaacaaggagaccggcaaggtccgactcgtcatgcgccaggccaagacgcttaagatctgcgcgaaccacctcgtggcccccaccacgagaatgcaggaacatgccggcagcgacaaatcgtgcgtctggcacgcttctgactttgcggatggcgaactcaaggaggagatgtttgccatcaggtttggttcggtagaaaactgcaagaagttcaaggagttggttgaagagattgctgagtcacttacagagaacgaggacaaggaaggtcaagatggctcttccacggccggattgctggagaagctcactgtgagcgagggcaaatctgaggaaagtggcaagtcggagtccactgattctgggcaagtgaccgaaacc

SEQ ID NO: 84499 - DNA, 517 bp, Zea mays
  unsure (1)..(517): unsure at all n locations
gggaaatgtcgtttgagcccacccacaagcaacaatntagcagtaaccaccngtncggaataccngcctcgacccacgcgtacgggcncnagccaggaggcgggtcaggttacggtcaccgncaagactgctccagccaagggagggccacaagggtccgactcgtgatgcaccaggccaagacaccgaacagatcgacggagtacttgtcctctccatcgagaagctccaggagatacaggacgagctcgagaaggtaaatgaggaagcaagtgacaaggttatggaggtggagcagaaatacagtgagatccgcagacctgtctatctcaagaggggtgacattatcaagaccatcccggacttttggctcacagcgtttatgagccatcctctattaagtgagcttctgactgaagaaggaccagagatattcaagtacttagactccattgatgtggatgattctgatgttaaggcaggatactccattcatcttaacttctctgagaacccg

SEQ ID NO: 84500 - DNA, 509 bp, Zea mays
ggaaatgtgtgtctgatatgcgaggggaagagtatgctctaccggtccggaattcccgggtcgacccacgcgtccggcaacatagaaagtggaatccagtagcaacaacagagcaacaatggcgaccaagatattttccctccttatgctccttgctctttctgcatgtgttgctaacgcgacaattttccctcaatgctcacaagctcctatagcttcccttcttcccccataccttccatcaatgatagcttcagtatgtgaaaacccagctcttcagccctataggctccaacaagcaatcgcagcaagcaacatacctttatcacccttgttgtttcaacaatcgccagccctatctttggtgcagtcattggtacaaaccatcaaggcacagcagctgcagcaactcgtgctacctgtgatcaaccaagtagctctggcaaacctttctccctactctcagcaacaacaatttctttcattcaacccaactgtctacactgaac

SEQ ID NO: 84501 - DNA, 499 bp, Zea mays
  unsure (1)..(499): unsure at all n locations
gagagaaggtaggggagggctcgtgctacgaataagatttatcgtcaacccgtccggaattcccgggtcgacccacgcgtccgctaccaagatattatccctccttgcgcttcttgcgctttttgcgagcgcaacaaatgcgtccattattccacaatgctcacttgctcctagttccattattccacagttcctcccaccagttacttcaatggccttcgaacacccagctgtgcaagcctataggctacaacaagcgattgcggcgagcgtcttacaacaaccaattgcccaattgcaacaacaatccttggcacatctaacaatacaaaccatcgcaacgcaacagcaacaacagttcctaccagcactgagccacctagccatggtgaaccctgtcgcctacttgcaacagcagctgcttgcatccaacccacttgctctagcanacgtagttgcaaaccagcaacaacaacaactgcaacagtttctgccagcg

SEQ ID NO: 84502 - DNA, 495 bp, Zea mays
  unsure (1)..(495): unsure at all n locations
nagggagtntaggtggttgngctcgagatagatagtaattgtcatcctcgtccgaattcccgggtcgacccacgcgtccgcccacgcgtccgcagaaacacaccaagcgaagcacattagcaacaacctaacaacagtggctaccaagatattatccctccttgcgcttcttgcgctttttgcgagcgcaacaaatgcgttcattattccacaatgctcacttgctccaagttccattattacacagttcctcccaccagttacttcaatgggcttcgaacacccagctgtgcaagcctataggctacaacaagcaattgcggcgagcgtcttacaacaaccaatttcccagttgcaacaacaattccttggcacatctaacattacaaaccatcgcaacgcaacagcaacaacaattcctaccagcactgagccacctagccatggtgaaccctgccgcctacttgcaacagcagttgcttgcatcaaacccac

SEQ ID NO: 84503 - DNA, 490 bp, Zea mays
  unsure (1)..(490): unsure at all n locations
tagtaaggggaggggtcgagcccagctcgacgctatgcgtacccgtccggattcccgggtcgacccacgcgtccggctgcagggaacctgcggcgttggcagcaccccgatcctgggccagtgcgtcgagtggctgaggcatcagtgcagcccgacggcgacgccctactgctcgcctcagtgccagtcgttgcggcagcagtgttgccagcagctcaggcaggtggagccgcagcaccggtaccaggcgatcttcggcttggtcctccagtccatcctgcagcagcagccgcanagcggccaggtcgcggggctgttggcggcgcagatagcgcagcaactgacggcgatgtgcggcctgcagcagccgactccatgcccctacgctgctgccggcggtgtcccccactgaagaaactatgtgctgtagtatagccgctggctagctagctagttgagtcatttagcggcgatgattgagtaataatgt

SEQ ID NO: 84504 - DNA, 510 bp, Zea mays
  unsure (1)..(510): unsure at all n locations
ggggaggggggttnnnnaatcgaagttgtaagtaattgtaacgctcgtaccgatccggagttccaaccaagccgtccgtggaaaacccagttcttaaaccttataggctccaacaggcaatcgcagcaggcaccgtacgttaataaccctggtttcaacaatcgccagccctatctttggtgcagtcattggtacaaaccatcagggcacagcagctgcagcaactcgtgctacctgtgatcaaccaagtagctctggcaaacctttctccctactctcagcaacaacaatttcttccattcaaccaactgtctacattgaaccgtgctgcttatttgcagcaacaactattaccattcagccagctagctactgcctactctcagcaacaacaacttcttccatttaaccaattggccgcactgaaccccgctgcttatttgcagcagcaaatactactaccatttagccagctagctgcagcaagccgtgcttncttcttgacacagn

SEQ ID NO: 84505 - DNA, 516 bp, Zea mays
  unsure (1)..(516): unsure at all n locations
nagtnaggctgnattctatactattgtattaagaacttattgtcattactcgtaccggtccggaattcccgggtcgacccacgcgtccgattgagaccaactagcaacatagaaagcacaatagtgtaccaacaatggcagccaaaatattttgcttccttatgctccttggtctttctgcaagtgttgctaccgcaaccattttcccacaatgctcacaagctcctatagcttcccttcttcccccatacctctcaccagcggtgtcttcaatgtgtgaaaacccaattgttcaaccctacaagatccaacaggcaatcgcaacaggcatcttaccattatcacccttgttccttcaacaaccgtcagccctattacagcagttacctttggtccatttggtggcacaaaacattaaggcacaacaactaccacaacttgtgctaacaaaccttgctgcataattttaacaacattagattctttcattcaaaccaattggtgtattgaactctt

SEQ ID NO: 84506 - DNA, 503 bp, Zea mays
  unsure (1)..(503): unsure at all n locations
agggttagttttagtggtgtccgaagataagcatcggtacgcattgctcgtaccggtccggaattcccgggtcgacccacgcgtccgagccgcgacactcaagagatacacctagaacaaggccttcagatgctcaagatattcaaggagcatgtcagcaagacgtccatcctggatgacttcgccttctatgagagtcgccagaagctgatgcaggataagaggtcgaaacagcagcaggtccaaaagcaggtctgggacagtaggacccccatttctgtcactggaagcgagcaacagcaggaagctgccaatgggaagcccaatccgtctgtaccaaacggtgtccctgcagaggtgaaggcggcgaaggcttctgcagagaacggcaccgncactccagctatttcctacgcggcaaaggtggcccaagcagcaacagagaaacctgtgctcgccaacggagtcgctaagaccggttagctggaccgnccaaccgatgc

SEQ ID NO: 84507 - DNA, 505 bp, Zea mays
  unsure (1)..(505): unsure at all n locations
aggtgagggagagtgtctgtngctcggtagtttatgttcttatctgcaattgctcgtaccggtccggggttcgacccacgcgtccgccaagagtgatggtcatgaggactatggcctccttgttagtgagaaggcaaggaaatacgccataatcaaggagcttgatgagccagttaccttgaaggatgggacagtggtcctgcagtttgaagtgagacttcagaatggccttgaatgcggaggtgcctacattaagtacatccgccctcaggatgctggatgggatgccaaggagtttgataatgagactccatacactattatgtttggtccagataagtgtggatcaaccaacaaggttcatttcatccttaagcacaagaatcctaagactggaaagtatgttgagcatcatctcaaattcccaccatctgtcccatatgacaagctctctcatgtctacacggctatcttgaagccagacaatgaggtcaaaattttggta

SEQ ID NO: 84508 - DNA, 486 bp, Zea mays
agtagttaagtgatttgggcctgcaccgtcccacgcgacagttccggattcccgggtcgacccacgcgtccgcaacaagcaacatagaaagtggaatccagtagctacaatagagcaacaatggcgaccaagatagtttccctccttatgctccttgctctttctgcatgtgttgctaacgcgacaattttccctcaatgctcacaagctcctatagcttcccttcttcccccataccttccatcaatgatagcttcagtatgtgaaaacccagctcttcaaccctataggctccaacaagcaatcgcagcaagcaacatacctttatcacccttgtttcaacaatcgccagccctatctttggggcagtcattggtacaaaccatcagggcacagcaactgcagcaactcgtgctacctgtgatcaaccaagtagctctggcaaacctttctccctactctcagcaacaacaatttcttccattc

SEQ ID NO: 84509 - DNA, 498 bp, Zea mays
  unsure (1)..(498): unsure at all n locations
aggaagggagcgggtttgagctctgatcttgatgctatctcatgccgtaccggtccggaattcccggctcgacccacgcgtgcgccgttatgataatttacatcatcaactttaaccattcacccagctagctcgggccggctctcagcaacaacaacttcttccatttaaccaattggccgcactgaaccccgctgcttatatgcagaagcaaatactactaccatttaaccagctagctgcagcaaaccgtgctttcttcttgacacagcaacagttgctgcctttctaccagcagtttgcggctaaccccgcaacccttttacaactacaacaattgttgccctttgtccaacttgctttgacagacccaacggnctcctaccaacaacacatcattggtggtgccctcttttagattgcttattaattgtattcattattaaagtttttgggatgatggattgtggccaacccgaaataagaaagttccatttc

SEQ ID NO: 84510 - DNA, 503 bp, Zea mays
  unsure (1)..(503): unsure at all n locations
aggagtnnntnnccgatggagccctacgtaacgctcgtaccggtccggaattcccgggtcgacccacgcgtccgcggacgcgtgggcattccttcttcgctccttcgccgccgctatggttaagtactcgcaggagccgggcaaccctaccaaatcggccaaggccatgggaagggacctgagggtccacttcaagaacacaagggagacagcttttgcgcttcgcaagctgcctttgaccaaggctaagcgataccttgaggatgttattgctcacaagcaggcaattcccttccggagatactgtggaggtgttggtcgcaccgcacaagcaaagtctcgccactccaatgggcagggtcgctggcctgttaagtcagccaggttcatattggatttgctgaagaatgctgagagtaacgctgatgtgaaaggcttggacgtggacaacctctatgtttcacacatccaggtgaaccaagcccagaagcagaggcgccgca

SEQ ID NO: 84511 - DNA, 502 bp, Zea mays
  unsure (1)..(502): unsure at all n locations
agtaaagtgttttgatcctacgtctagctcatngctatacctgttcggaattcccgggtcgacccacgcgtccggaccaactagcaacatagaaagcacattagtgtaccaacaatggcagccaaaatattgggcttccttatgctccttggtctttctgcaagtgttgctaccgcaaccattttcccacaatgctcacaagctcctatagcttcccttcttcccccatacctctcaccagcggtgtcttcaatgtgtgaaaacccaattgttcaaccctacaggatccaacaggcaatcgcaacaggcatcttaccattatcacccttgttcctccaacaaccgtcagccctattacagcagttacctttggtccatttggtggcacaaaacatcagggcacaacaactacaacaacttgtgctagcaaaccttgctgcatactctcagcaacatcagtttcttccattcaaccaactggctgcattgaactctgctgctt

SEQ ID NO: 84512 - DNA, 503 bp, Zea mays
  unsure (1)..(503): unsure at all n locations
gggatgtattntagccaatttcctgcncatcgcactactgtaccgatttcccatttcgacccatgcgtacggcgaacatacaaagcacattagtgtactaacattttcagccaaaatattttgcttccgtatggtccttgatctttctgcaagtgctgctaccgcaaccattttaccacaatgctcacaagctcctatagcttcctttctttccccatacctatcaccatcggtgtcttcagtttgtgcaaaccctattctttaaccctacagcatccaacaggctttttgtagcacgcatattacctttactattcatgcatcttctataaccgacactcttattacactagtttcttttggtgcatttgttggcacacaacatctatgctttacttctacttcaacttgagctagtaatcctttctgtcaactcttattatcttcattttctttcattttatctcactgttcttaattaacctcactttcttaatcccccc

SEQ ID NO: 84513 - DNA, 500 bp, Zea mays
  unsure (1)..(500): unsure at all n locations
ggggagtgttctgattatcgaatgattgcatgctctaccggtccggaattcccgggtcgacccacgcgtccgaactagcaacatagaaagcacaatagtgtaccaacaatggcagccaaaatattttgcttccttatgctccttggtctttctgcaagtgctgctaccgcaaccattttcccacaatgctcacaagctcctatagcttcctttcttcccccatacctctcaccagcggtgtcttcagtatgtgaaaacccaattcttcaaccctacaggatccaacaggcaatcgcagcaggcatcttacctttatcacccttgttcctccaacaaccgtcagccctattacagcagttacctttggtgcatttgttggcacaaaacatcaaggcacaacaactacaacaacttgtgctaggaaaccttgctgcctactctcagcaacagcagtttcttccattcaaccaactggctgcattgaactctgctgcttattn

SEQ ID NO: 84514 - DNA, 507 bp, Zea mays
  unsure (1)..(507): unsure at all n locations
ggaatgtgngtctgaccatcncactcgagtgtaatcgtactatcgtaccgatccggaattcccgggtcgacccacgcgtccgcaactagcaacatagaaagcacaatagtgtaccaacaatggcagccaaaatgtgttgcctccttatgctccttggtctttctgcaagtgctgctacggcgaccattttcccgcaatgctcgcaagctcctatagcttcccttcttcccccgtacctctcaccagcggtgtcttcggtatgtgaaaacccaattcttcaaccctacaggatccaacaggcaatcacagctggcatcttacctttatcacccttgttcctccaacaatcatcagccctattacatcagttacctttggtgcatttattggcacaaaacatcagggcacaacaactacaacaacttgtgctagcaaaccttgctgcctactctcagcaacagcagtttcttccattcaaccaactagctgcattgaactctgcttctt

SEQ ID NO: 84515 - DNA, 504 bp, Zea mays
ggaagaggtctgtatctagacaggggattaatgcactgctcgtaccggtccggaattcccgggtcgacccacgcgtccgcagataccaacatagacagcacaatagtctaccaacaatggcagccaaaatatgttggctccttatgctccttggtctttctgcaagtgctgctacggcgaccattttcccgcaatgctcgcaagctcctatagcttcccttcttcccacgtacctctcaccagcggagtcttaggtatgtgaaaacccaattcttcaaccctacaggatccaacaggcaatcacagctggcatcttacctttatcacccttgttccttcaacaatcatgagccctattacatcagttaccttcggtgcatttattggcacaaaacatcagggcacaacaactacaacaacttgtgctagcaaaccttgctgcctactctcagcaacagcagtttcttgcattcaaccaactaactggattgaactttgcttctt

SEQ ID NO: 84516 - DNA, 512 bp, Zea mays
  unsure (1)..(512): unsure at all n locations
nggtgaggtgttttgtgttatgacgtgagagacgtaattgccattgctcgtaccggtccggaattcccgggtcgacccacgcgtccggtccctgatgctgcagcaactgttggccttaccgcttcagacgatgccagggatgatgccacagatgatgacgcctaacatgatgtcaccattgatgatgccgagcatgatgtcaccaatggtcttgccgagcatgatgtcgcaaatgatgatgccacaatgtcactgcgacgccgtctcgcagattatgctgcaacagcagttaccattcatgttcaacccaatggccatgacgattccacccatgttcttacagcaaccctttgttggtgctgcattctagatggaataattggggtggtcccaattatggagtgaccttgcattgggtgggaactaattataattaccattaaaccaggtttcttttaaaaaaaaaaaaaagggccggccgttttaaaggtaccaggttaacttccccttcc

SEQ ID NO: 84517 - DNA, 500 bp, Zea mays
  unsure (1)..(500): unsure at all n locations
gggagtcctacttcatgaaaagaaatgattgcactgctctaccggtctcggaattcccgggtcgacccacgcgtccgcccacgcgtgcggtttcttcctggcagagacgctgaagtacctgtacctacggggctgccctacatcagtcatattcttcgacgagtgggttttcaatactgaagctcacccattgagaattgctccagtaagtgataacaaaggcattggaacaccggtccgacaattcaggagaaaacagggaaagcctgagtaaccttggatatagagcagtggatttttgaatctgccgtctgattatgaccgtcctgacgatgtgctctgacacgagggaactttttgcctgaagcaataaggggtaaaaaattacgggatagattgcttagagcaaanatcataggtagaggatgatgttatatgcggcgcattgacctccgtgaggtcaagagccccatagaagcttctatctttggatttgctta

SEQ ID NO: 84518 - DNA, 498 bp, Zea mays
  unsure (1)..(498): unsure at all n locations
aggaagtgtgtctgagcctagttctattgctatagtcannactgttcgggtccggaattcccgggtcgacccacgcgtccgcggacgcgtgggcggacgcgtgggcggacgcgtgggctttgttcccatctctggttgcgaaggtgacaacatgattgagaggtccaccaaccttgactggtacaagggcccaaccctacttgaggctttggacttgatcaatgagccgaagaggccttcagacaagcccctgcgtctccccctacaggatgtgtacaagattggtggtattggaactgttcctgttgggcgtgttgagactggtatcatcaagcctggtatggttgttacctttggtcctagtggccttactactgangtgaagtctggttgaaatgcaccatgaggctctccaggaggcccttcttggtgacaatgttggcttcatgttaagaatgttgctgtgaaggatcctgaacgtgggtatgtggcctccac

SEQ ID NO: 84519 - DNA, 508 bp, Zea mays
  unsure (1)..(508): unsure at all n locations
nagggaggcnctgtgataaagtggggagagtagagtaaatgctcntcccggtccggaattcccgggtcgacccacgcgtccgcccacccttccgccaacccttcggccaagccttccggccaattggacccagaaattggttcaaaaggccgtcaccgggggaattaatggcgtcctcgtctagcagcagccaccgncgnctcatcctcgcagccgccgtcctgctctccgtgctcgcggctgccagcgccagcgccgggacctcctgcgtgccggggtgggccatcccgcacaacccgctcccgagctgccgctggtacgtgaccagccggacctgcggcatcgggccgcgcctcccgtggccggagctgaagaggagatgctgccgggagctggcggacatcccggcgtactgccggtgcacggcgctgagcatcctcatggacggcgcgatcccgccgggcccggacgcgcagctggagggccgnctagaggacctgccgggctg

SEQ ID NO: 84520 - DNA, 502 bp, Zea mays
  unsure (1)..(502): unsure at all n locations
aagacgtgngatacgacagaggggagggaaaagagagngctcgtaccggtccggaattcccgggtcgacccacgcgtccgcttcgtcaacggggccgtcggcgcgttcgttgccggagcctctgtctgcggctacagaggaaagagtattcagtcagccctcatcggaggctcctgtctggctttcacatctgctgtgctggacattggcggcaatacgaccagagttgacaacggcaaagagtactatgcctacacaactgagaagaagcctgcaaattgattccaagtctgcacttctagcaaacaatcttgcacgccatcaactcagtgaatttgaagctgatgtgcagttttatgtctggtttgctgatgcaattagttcttaagcaaatccatggcaacttgtttatcgctgatgcttgagggatggaaatgacactcagaataatatttgatttgctttcttgtgatcgttgatcaccataaaaaaaaaaaaaaaa

SEQ ID NO: 84521 - DNA, 501 bp, Zea mays
  unsure (1)..(501): unsure at all n locations
gaggaggtatgntgtaagggggagggaggatagtgctatacccgtccggaattcccgggtcgacccacgcgtccgcccacgcgtccgggttcacacaaattggagatgaactaccagatgatattactcttagagatgtcatggatactttacctaaagaggtatttgaaatcaatgatgtgaaggcttggacatcagttttgatatcagttacttcttatgcgctgggtttatatttcattgctaagtctccatggtatcttcttcccttggcttgggcttggacaggcacagcagtgactgggttttttgtgataggtcatgattgtgctcacaaatcattttcaaggaataagttggttgaagatgttgttggaaccttggctttcatgccattgatatatccttatgaaccgtggagatttaagcatgaccgacatcatgccaagacaaacatgttgatagaagatactgcatggcaacctgtttggcaaaaggaan

SEQ ID NO: 84522 - DNA, 506 bp, Zea mays
  unsure (1)..(506): unsure at all n locations
ngggaaggcatgtgagtcaccgaaagcagtgtactgcatcactcgtaccggtccggaattcccggctcgacccacgcgtccgccattcgcatctgcctccttttccttgtagccgaagaagagggaaaggaagggaggacagccgtcgccgccgccgccgccgccaccgtcaggatgcattccacgaacctcctgctcgaggagcccatccggatggcctccatcctcgagccctccaagcccagctacttcccggcgatgaccaagatcgtcggcactctcggccccaagtcgcgctccgtcgacacgatctccgactgcctcaaggccggcatgtccgtcgcccggttcgatttctcgtggggggacgccgcgtaccaccaggagacgctggagaacctcaagctctccatcaagtccaccaagaagctctgcgctgtcatgctcgacaccgtgggcccggagctgcaggtggtgaacaagagcgagaccccgatctcccttgg

SEQ ID NO: 84523 - DNA, 505 bp, Zea mays
  unsure (1)..(505): unsure at all n locations
gggaaggtttctattacgtagcgggcaaggaaaagagagngctcgtaccggtccggaattcccgggtcgacccacgcgtccgcggacgcgtgggattcaatgtctaaggttgcagatattgaagctgctgagaagcagagaatgagagagaaagtccaaaagatcatagcacacgggatcaactgttttgtcaacaggcagttaatctataacttccctgaggaactctttgctgacgctggcatacttgcaattgagcatgctgactttgagggcattgaacggctggctcttgttactggtggtgagatcgcatcaacttttgataatccagagtctgttaagcttggtcactgcaaggtcattgaagagattatgattggggaggacaggctaatccatttctctggggttgcgatggggcaggcttgcaccattgtcctaaggggggctagtgagcatgtgctcgatgaagctgagaggtccttgcatgatgcctngtgcg

SEQ ID NO: 84524 - DNA, 518 bp, Zea mays
  unsure (1)..(518): unsure at all n locations
gggagaggagntgaggggaggaggngttgnatgatcgattattgagncctacgtcaggctcgtaccggtccggaattcccgggtcgacccacgcgtccgcccacgcgtccgcccacgcgtccgcccacgcgtccgagaggtcacacatatcagcatgagaactttattattacagtataaatcataaaaaatctagcagagtatttagtgttagattattgtagaaattacgatttagacttgtttctaaatgaataattgtatatataattagaagatcatgatcggttgagaaaaaaattggtggtattggaactgatcatgttgggcgtggtggagactggggtcatccgctctaggttatccaggttcatatcttcgtactggcaaaataaaagatgtgaattatgtacactggcaccaaaaggctgtccatggggctacatctgctaacctggtaaactctaaagttaagaatgctccttcgaatggtactaaatcgcgcttttcccaactgc

SEQ ID NO: 84525 - DNA, 502 bp, Zea mays
  unsure (1)..(502): unsure at all n locations
agttaggtggctcggtgctaagacgaataagatatactcgtcatnactcgtaccggttcggaattcccgggtcgacccacgcgtccgggcttctcctccccctccggttcgggttcgggttcgtgaggttctccggggttcgggttcgtgggtgagcggatcgagatggcggcgtcggatgttgagtaccgctgcttcgtcggcggcctcgcctgggccacggacgaccactccctccacaacgccttcagcacctacggcgaggtcctcgagtccaagatcatcctcgatcgggagacgcagaggtcccgcggcttcggcttcgtcaccttctccacggaggaggcgatgcggaacgccatcgagggcatgaacggcaaggagctggacggccgcaacatcaccgtcaacgaggcccagtcccgcggcggccgtggaggcggcggcggtgggtacggtggtggccgtggaggcggcggctacngcggtggcgggcgccgtg

SEQ ID NO: 84526 - DNA, 634 bp, Zea mays
  unsure (1)..(634): unsure at all n locations
tgatagagagtagttntccatcgagataaagaacactcagcnattgctcgtaccggttccggaattcccgggntctacccacgcgtctcggattttctgccctccttggccctccttggctctttcagncaaacnngttgctaccgcgactatgtgattccacgaatggctctnacaacaatnnacctctcnntccggtgaccagcnncgcgagaatnnttgaatactcnncaactattaccaatcnnnctacagngcnntacanagnagggcnncatcngnncagcaaggcccatctntaaacgagtcgtntagcccatnntgactggtcncanacatacntncatatgcnncctaaattgcanacanaccccatcncttaaagtganatnnctatattctccaaaagaaaatcgtaggcaacatacanacctaacanacnaaccaaatntggctttcccaaacaaatccaanaccaaagtaagtntgccagcngaaacncttngaatangcttacnctnnncagcaaacaaaccannatttctttcccatttcanatcaaacttanngctgngngttganacncnnctgcnntgccttactttttgcannggcaccaacnnagctaactacc

SEQ ID NO: 84527 - DNA, 501 bp, Zea mays
  unsure (1)..(501): unsure at all n locations
gggagtgctgtgtatgagggagagagataatgctataccggtccggaattcccgggtcgacccacgcgtccgggccaaagtggattgaagggttgcttgaccagttgactgatatggtggtgaatgcagttctgtgcattcgcaaaccagatgaaccaattgatctattaatggtggaaataatgcacatgcgcaacaaatttgatgttgacacccgtctggttgagggtctggtcctggaccacgggtctcgtcaccctgacatgaagcgcagggcagagaattgtacatcttgacctgcaatgtctcattagaatatgagaaaagtgaaatcaatgcaggattttttactcanacgcaagaacaagagaggagaatggttgctgcagagagacgcccaggtgattgacgtgtcaaacaggttatttgaattgaaaaaataaggtttgtgcttggaggcgattaaaacctttggggtgatcattcaggaaggcattgacc

SEQ ID NO: 84528 - DNA, 499 bp, Zea mays
  unsure (1)..(499): unsure at all n locations
nggagtatgtgtatgccgacagagatagatgcatctaccggtccggaattcccgggtcgacccacgcgtccgatttgacctgggtgatgccgactattttaaggattaagggattccagaagttggttcgggcattgcaccatcttgagcaaaattatgaattcatgacatctgatcaccagtatatttcccggaaacatgaggaggataaggtgattgtgttcgaaaagggagatttggtatttgtgttcaacttccactgcaacaacagctattttgactaccgtattggttgtcgaaagcctggggtgtataaggtggtcttggactccgacgctggactatttggtggatttagcaggatccatcacgcagccgagcacttcaccgncgactgttcgcatgataataggccatattcattctcggtttatacaccaagcagaacatgtgtcgtctatgctccaatggagtgatagccgggtactcgttgctgccc

SEQ ID NO: 84529 - DNA, 505 bp, Zea mays
  unsure (1)..(505): unsure at all n locations
agcgctgncgtgatagacaggaagatatatatgcattgctcgtaccggtccggaattcccgggtcgacccacgcgtccggcgacgagcgcgtcacatcagccaattgaggagttacaagaacattcattggggcaggtaaccatacaagagatagcaacgcatcaattacaacaatctagaccagcactgagccaactagctgtgaagaaccatggcgtctactggcaacaggagctgatcgcatgcaaccaactagctctggctaacatagtggcataccagcaacaccaacagtcgcaacagcattctaccagcgctcagccaactagccatggtgaaccctgacgtctacctacgacagctacaactgagttaatgtagcacctataggtgagggtaacgcacctacatacctgcagcaacagttgttcggacaaatggtaccagctcatgataacatagctgaggtaaactctgctgtctacttgcaacgatgcttgcatt

SEQ ID NO: 84530 - DNA, 499 bp, Zea mays
  unsure (1)..(499): unsure at all n locations
gggaggatccgtctagatccagaatatattgcattgctcgtaccggtccggaattcccgggtcgacccacgcgtccgcgcaaattgcaccaagaaatccatcgagaggccgtcgacaggggaattaatggcgtggtcgtctagcaacagccaccgccgcctcatcctcgcagccgccgtcctgctctccgtgctcgcggctgccagcgccagcgccgggaccttctgcgtgccggggtgggccattccgcacaacccgcttccgagctgccgctggtacgtgaccagccggacctgcggcatcgggccgcgccttccgtggccggagctgaagaggagatgctgccgggagctggccgacatcccggcgtactgcccgtgcacggngctgaacattctcatggaccgnccgatcccgccggccccggacccgcagttggaggcccgctaaaggacctgccgggctgcccgcggaggtgcaaaggggattcgccccaccc

SEQ ID NO: 84531 - DNA, 495 bp, Zea mays
tgagtatttgtctacgaagggatgtatcgctctacccgttcggaattcccgggtcgacccacgcgtccgcggacccctggggggttggcttttcttccccttccggttcgggttcgggttcgtgaggttctccggggttcgggttcgtgggtgagcggatcgagatggcggcgtcggatgttgagtaccgctgcttcgtcggcggcctcgcctgggccacggacgaccactccctccacaacgccttcagcacctacggcgaggtcctcgagtccaagatcatcctcgatcgggagacgcagaggtcccgcggcttcggcttcgtcaccttctccacggaggaggcgatgcggaacgccatcgagggcatgaacggcaaggagctggacggccgcaacatcaccgtcaacgaggcccagtcccgcggcggccgtggaggcggcggcggtgggtacggtggtggccgtggaggcggcggctacggcggtggcgggc

SEQ ID NO: 84532 - DNA, 500 bp, Zea mays
  unsure (1)..(500): unsure at all n locations
gagttaggaggggtcgtgctcggatcctcgtattattgcatactcgtaccggtccggaattcccgggtcgacccacgcgtccgcccacgcgttcgtccacgcgttcgcccacgcgttcgcacaagtccaaggagtgccttgctctgatcctcatcatcaggaacaggctcaagtatgctctgaactaccgtgaggtcatttctatcctgatgcaacgccatgtacttgttgatggcaaggtcaggactgacaagacctaccctgctgggttcatggatgtcatttccattcctaagacaatggagaactacaggctgctttatgacaccaagggccgattncgtcttcacccaatcagggaatgaggatgccaagttcaagctctgcaaagtgaggtccgttcaattttgggcacaaaggcattccctacctgtacacctacaacgggggtaccatccgctaccccgaaccggtcattaagggcaacgacaccatttatg

SEQ ID NO: 84533 - DNA, 490 bp, Zea mays
  unsure (1)..(490): unsure at all n locations
naggaagggtaaggttnntgtcgaattacgtatatatagtattgctcgtaccggtccggaattcccgggtcgacccacgcgtccgggcaaattatggttcctccctgttcggttgagtggttgcattctggaggtatcttgttctggactcaggctaatgattgtgcgtgcgactgtttcagagtcatttcaaaggttatccaaaaaaaaaaaaaaagggcggccgctctagaggatccaagcttacgtacgcgtgcatgcgacgtcatagctcttctatagtgtcacctaaattcaattcactggccgtcgttntacaacgtcgtgactgggaaaaccctggcgttacccaacttaatcgccttgcagcacattccccttttcgccagctggcgtaataccgaagaggcccgcaccgatcgcccttccaaacagttgcgcaccctgaatggccaatgggacgcgccctgtagcggcgcattaagcgcgg

SEQ ID NO: 84534 - DNA, 504 bp, Zea mays
  unsure (1)..(504): unsure at all n locations
gaggagttatctgttacgagggagggaggagtagtgctactaccggtccggaattcccgggtcgacccacgcgtccgcctcgatcgggagacgcagaggtcccgcggcttcggcttcgtaaccttctccacggaggaggcgatgcggaacgccatcgagggcatgaacggcaaggagctggacggccgcaacatcaccgtcaacgaggcccagtcccgcggcggccgtggaggcggcggcggtgggtacggtggtggccgtggaggcggcggctacggcggtggcgggcgccgtgatggcggtggcggctacggcggtggcggcggctacggtggcggcggcggctacggtggtggtggcggcggctacggcggtggcaaccgtggcggcggctacggcaactccgacgggaactggaggaactgagcggtggggcccgcgcggccaagttatcctgttcgctaccgtgatgtttaccctagtccagagggtttatctttcgtn

SEQ ID NO: 84535 - DNA, 496 bp, Zea mays
  unsure (1)..(496): unsure at all n locations
gggacggcttgtaaagcgggggagagtagtctctacccgtccggaattcccgggtcgacccacgccttccggtggcggtctttggcggcccccgaattgcgtgtggccaacgagctcggcgcggccaacggggagggcgccaggttcgcgaccatcgtgtcgacggtgacgtcgctggtgatcgggctcttcttctgggtgctcatcatgggcctgcacgacaagtacgcgctcatcttcacctccagccccgtcgtcctcgacgccgtcgaccacctctcggttcttctcgccttcaccatcctcctcaacagcatccagcccatcctctcaggtgtggccgtcggctccggctggcaatccatggtggcctacgtcaacatcggctgctactacctcatcggaatccccatgggcatcctgctcggatggctattcaaccttggcgtgctggggatctgggcggngatgatcggcgggaccgncgtncagacgc

SEQ ID NO: 84536 - DNA, 475 bp, Zea mays
ccacgctactaccggtccggaattcccgggtcgacccacgcgtccgcagatttcacatcaaaccttgagagccagaggaagcatgtcaccatttgtggctttagcaatgttttcgaaaagattatgatctgtatcttggaaccttatttcaatggaccaaatttctttctttgccaaaaaaaaaatttggtggattgacgttctggaggatgcaagatatcgtacgcttgcatgcaacgtaataattctactataggggcacctacattgaattcactggccgtatgatcacaacgtcgtgactgggaaaaccctgacgttacccaacttaatggccttgcagcacatccccctttcgccagtttgcgtgataccgaataggcccggaccgatcgccatttccaacagttgctcaagctgaatggcgaatgggacgcgccctggagcggcgcattaagcgcggctggtgtagtgg

SEQ ID NO: 84537 - DNA, 506 bp, Zea mays
  unsure (1)..(506): unsure at all n locations
aggtaggcctgtgttcacgtagaaagaacatgatgcagtgctcgtaccggtccggaattcccgggtcgacccacgcgtccgcccacgcgtccgcaagatctcacagggcggcctgcagagaatctatgagaagtacaggtggaagctctactccgagaggctgatgaccctgaccggcgtgtacgggttctggaagtacgtgagcaacctggagaggcgcgagacccgccgctacatcgagatgttctacgccctgaagtaccgtagcctggcaagccaggttccgctgtccttcgattagtacggggaaagaaggagaagaagaagaagaagcccaggccggagaaccatcgcctgcatttcgatctgtttcaccgcaattcgcattgttagtcgtgtattggagttatgtgtacttggtttccaagaactttggttccttgtttttttttctttcttgtttgagcgtttttgggcagcgctggcctggttcctagtatggtgan

SEQ ID NO: 84538 - DNA, 498 bp, Zea mays
  unsure (1)..(498): unsure at all n locations
ggggagaagggctgntttaaggaagggggggatgagagtatatgctgtaccggtccggaattcccgggtcgacccacgcgtccgcccacgcgtccgcccacgcgtccggatcagcatgttttacaagagattgttaaaattgtccagaagaggcatgatatgcaagtgagggataaggctttgttacttctggattcatggcaagaggcatttggtggacctggtggcaaatatccacagtactactggtcatacattgaactaaagagggcaggagtaatgttcccacaacgtcctgtagatgctcctccaatatttactcctactgcaacacatcaggcatatggttcacctagatatccttctggaagtctaaatgagagaatcacatctgatgctggaacgttgagctttgagggcttgaataatattagaaatgcaacggaactgctgtatgatatggtgaatgctttgaaccctgctgaccgcatggcaatt

SEQ ID NO: 84539 - DNA, 508 bp, Zea mays
  unsure (1)..(508): unsure at all n locations
ntagagagnnaagtaagggaggagcttgnttttcgacatatgaagatatattgtaattgctcgtaccggtccggaattcccgggtcgacccacgcgtccgaggcaatcacagcaggcatcttacctttatcacccttgttcctacaacaatcatcaggcctattacatcaattacctttggtgcatttattggcacaaaacatcagggcacaacaactacaacaactcgtgctagcaaaccttgctgcctacgctcagcaacagcagttacctttggtgcaattgttggcacaaaacatcagggcacaacaactacaacaactcgtgctagcaaaccttgctgcctactctcagcaacagcagtttctgccattcaaccaactagctgcattgaactctgctgcttatttgcaacaacaacaactactaccattcagccagctagctgctgcctaccaccagcaatttcttccattcaaccaactggcagcattgaactctcctgctt

SEQ ID NO: 84540 - DNA, 500 bp, Zea mays
  unsure (1)..(500): unsure at all n locations
nggtgatgtatctgtaaaggggggaagggagagtgctctactcgtccggaattcccggtcgacccaagccttccgtggccgccaaaccctgcccctaagtttcctatggccgcccgttgttccaagaccgtgtttgcggctgtagcctcaagattccctggtaaggctgttggtgtaaatctgcctgcgggatcagctcctgcggcagctgctcctgcggatgaagctgaggatgatgatgaccttgatctttttggtgatgaaactgangaggacaagaaggcagctgatgagcgtgctgccgctgccaaggcctcttctaaaaagaaagaaagtggtaaatcctccgtccttatggatgtaaaaccatgggacgatgagactgatatgaagaagctggaggaggctgtccgcagtgtccagatggagggtctgacttggggagcatcaaagcttgtgcctgttggatacggcatcaagaagatgactatcatgttgac

SEQ ID NO: 84541 - DNA, 504 bp, Zea mays
  unsure (1)..(504): unsure at all n locations
gagaggttttnngatcacgtaaggcgggagataaagtatnactcgtccggaattcccgggtcgacccacgcgtccgaagaaaagaagaaggaggaagattggttctgatttaaatcttggtagaactgaccatacaacatgtctatgaatcaatcaatttgttttgcaggcgtacatggtcggcgagcacggcgacagctcggtggcggtgtggtcgagcgtgagcgtggcggggatgccggtgctcaagtcgctgcaggagagccaccgctgcttcgacgaggaggcgctggagggcatccgccgcgccgtcgtcgacagcgcctacgaggtcatcagcctcaagggctacacctcctgggccatcggctactccgtcgccagcctcgccgcgtcgctgctccgggaccagcgccgcatccaaccggtctccgtnctcgccagggggttccacggcatccccgacgggaacgacgtcttcctcagcctgcccgccaggctcgg

SEQ ID NO: 84542 - DNA, 507 bp, Zea mays
  unsure (1)..(507): unsure at all n locations
gggaggcctgtcatgtacgacaacgaaanagttacgcaagtgctcgtaccggtccggaattcccgggtcgacccacgcgtccggagccatgcttcttcaagacgtacttttcttgggataacacaaaatctttggttcatggaaattccttccagaagaaactctcgctgctttttggattgcgttctgagggtgcacctaggagctctggtaatggtgggccaactcagagggcatctgcattagcagctctatcatccgcattcaatccatcatctcaacaaaggctgtctaatgagaggcctaaaagcacaggcgatggacccacgcaacgtgcctcagcactggctgccttatctaatgcattcaacccatccttaanacccaaaacatcaccttcatctcgctcaggtcgaggttctcaaagagcagctgctgtagctgctctatcctctgtgctgactgctgagcaatctggatcttcagaatttctacgatccanagcta

SEQ ID NO: 84543 - DNA, 510 bp, Zea mays
  unsure (1)..(510): unsure at all n locations
aggtaagacctctngttattgatgaggggagggtatcagtagtgctcgtaccggtccggaattcccgggtcgacccacgcgtccgcaagtgactcttatccgccaagttgctgagaaagtgttcgccaatgtgggcaagactatcgggtacaaagttggaacaatgattgagatccccagggcagctctggtggctgatgagatagcggagcaggctgaattcttctccttcggaacgaacgacctgacgcagatgacctttgggtacagcagggatgatgtgggaaagttcattcccgtctatcttgctcagggcatcctccaacatgaccccttcgaggtcctggaccagaggggagtgggcgagctggtgaagtttgctacagagaggggccgcaaagctaggcctaacttgaaggtgggcatttgtggagaacacggtggagagccttcgtctgtggccttcttcgcgaaggctgggctggattacgtttcttgctcccctttcag

SEQ ID NO: 84544 - DNA, 503 bp, Zea mays
  unsure (1)..(503): unsure at all n locations
agtatagtagagggcttcgagcctcgatcaccgaatatatagtcaagcctctaccggttcggaattcccggctcgacccacgcgtccggtagcaacaatagagcaacaatggcgaccaagatattttccctccttatgctccttgctctttctacatgtgttgctaacgcgacaattttccctcaatgctcacaagctcctatagcttcccttcttcccccataccttccatcaattatagcttcaatatgtgaaaacccagctcttcaaccatataggcttcaacaagcaatcgcagcaagcaacatacctttatcgcccttgttgtttcaacaatcgccagccctatctttggtgcagtcattggtacaaaccatcagggcacaacagctgcagcaactcgtgctacctctgatcaaccaagtagctctggcaaacctttctccctactctcagcaacaacaatttcttccattcaaccaactgtctacactgaaccctgn

SEQ ID NO: 84545 - DNA, 509 bp, Zea mays
  unsure (1)..(509): unsure at all n locations
gagtnaaggggagagtaggtgtgatttatttgataataggagggctatacagcaatngctcgtaccggtccggaattcccgggtcgacccacgcgtccgcggacgcgtgggcaactagcaacatataaagcacaatagtgtaccaacaatggcagccaaaatattttgcttccttatgctccttggtctttctgcaagtgttgctaccgcaaccattttcccacaatgctcacaagctcctatagcttcccttcttcccccatacctctcaccagcggtgtcttcaatgtgtgaaaacccaattgttcaaccctacaggatccaacaggcaatcgcaacaggcatcttaccattatcacccttgttcctccaacaaccgtcagccctattacagcagttacctttggtccatttggtggcacataacatcagggcacaacaactacaacaacttgtgctagcaaaccttgctgcatactctcagcaacattcagttctttcattcaacc

SEQ ID NO: 84546 - DNA, 486 bp, Zea mays
  unsure (1)..(486): unsure at all n locations
agtagtaagagggtctgtcatcgcataagatcatcagtanaccgtccggtcggattccggctcgacccacgcgtccgacggactcatctactgagcagcgcggtgggcatccgagcgagagggcgagcgcgggaggatcggaattccgaaggttgggcatggaggcgagcggcgagaaggctgcggtggtgcgacggctgatggaggcgaaggaggtgtccgggaagaccttctcgggaatcgccgccgagacgggtctcaccaacgtctacgtggcgcagctgctgcggcgccaggcgcagctcaaggccgacacggtgcccgcgctgagggcggccctgcccacgctcacggacgacctcatcgaactcatgatgcagccgcccttccggtcctaccaccccaacatcgtccacgagcccgccatttacagattgaatgaagctgttatgcattttggagagagcatcaaggaaatcatcaatg

SEQ ID NO: 84547 - DNA, 507 bp, Zea mays
  unsure (1)..(507): unsure at all n locations
ngggaggcttcnagctaagtaggggggaaagtaaagtagtactcgtccggaattcccgggtcgacccacgcgtccgcagcatagaaagcacattagtggtacctccattggccggctaaaatatttggcctcctgatgctccttggtctttctgcaagtgctgctacggcgaccattttcccacaatgctcacaagctcctatagcttcccttcttcccccgtacctctcaccaacggtgtcttcggtatgtgaaaacccaattcttcaaccctacaggatccaacaggcaatcgcagctggcatcttacctttatcacccttgttcctccaacaatcatcagccctattacagcagttacctttggtgcatttattggcacaaaacatcaaggcacaacaactacaacaacttgtgctagcaaaccttgctgcctactctcagcaacagcaagttcttccattcaaccaactagctgcattgaactctgcttcttatttgcaacan

SEQ ID NO: 84548 - DNA, 501 bp, Zea mays
  unsure (1)..(501): unsure at all n locations
aggtattgatcatgcaaggggagtattgtcatactcgtaccggtccggaattcccgggtcgacccacgcgtccggcattcagaaacacacctagcgaagcgcactagcaacgacctaacaacaatggctaccaagatattatccctctttgcgcttcttgccctttttgtgagcgcaacaaatgcgttcattattccccaatgctcacttgctcctagtgccattattccacagttcctccctccagttacttcaatgggcttcgaacacccagctgtgcaagcctacaggctacaacaagcgcttgcggcgagcgtcttacaacaaccaattgcccaattacaacaacaatccttggcacatctaaccatacaaaccatcgcaacgcaacagcaacaacaatttctaccagcactaagccaactagctgtggtgaaccctgtcgcctacttgcaacagcagttgcttgcatccaacccacttgctctggcaaacataatn

SEQ ID NO: 84549 - DNA, 500 bp, Zea mays
  unsure (1)..(500): unsure at all n locations
atgtgaggggagggtgtctngaggttggcgaattgcncagtacgctactacactcacaattccggaatcgacccacgcgtcacgctgcaggggacctgccgcgtatgcagcacccttttcctgggccagtgcgtcaagtttgtgaggcatcagtgcagcccgacggcgacgccctactgctcgcctcagtgccagtcgttgcggcagcattgttgccagcagctcacgcaagtggagccgcatcaccgttaccaggcgatcttcggcttgatcctacagtccatcctgcagcagcagccgcaaagcggtcatgtcacggtgctgttgacagcgcagatagcgcagcaactgacggcgatgtgcggcctgcatcagccgactccatgcccatacgctgctgccggcggtgtctcccactgaagaaactatgtgctgtactatagccgctggctagctagctagtcgagtcatttagcggcgatgattgagtaataatgtgt

SEQ ID NO: 84550 - DNA, 497 bp, Zea mays
agttaagtagagggtttggtggtccgcccatcgcccctacgcactgctgtaccggtccggaattcccgggtcgacccacgcgtccgcggacgcgtgggcggacgcgtgggtgatccccccaggtgctcttgttatgctcacaggactgatcgttgggattctatttggggttgagaccctctctggagtccttgctggtgcccttgtctctggtgttcagattgccatttctgcatccaacactggtggtgcctgggacaacgccaagaagtacattgaggctggagtttcagagcatgccaggacccttggcccaaaaggttctgaccctcacaaggcggctgtcattggtgacaccattggagatcctctcaaggacacgtctggcccttccctcaacatcctcatcaagcttatggcggttgaatcccttgtcttcgcccccttcttcgccgcccatggtggcattctcttcaaatggctctaagccagcgaga

SEQ ID NO: 84551 - DNA, 499 bp, Zea mays
  unsure (1)..(499): unsure at all n locations
gggggagtttttgttattgggggagagtgatgctcgtactcgtccggaattccgggtcggaccaagccttccgagtccatcagctacccggctcaggtgttggcaaaatcttctaagatgattcctgtaatgttgatgggaactcttctctatggtgtgaagtacacacttccagagtatttatgcacctttcttgttgccggcggtgtgtcctcctttgcgttgttgaagacaagctccaagacaattaagaagcttgccaaccctaatgcacctcttggttacacattgtgcttcctcaacttagcttttgatggatatactaactcgacccaagatttaataaagtcaaggtacccaaaaacaaacccatgggatataatgcttggcatgaacctctgggggaccatatataatgctgtaattatgtttgttgcgccattactattcagtaactggccatatgcanatggttttgaggcattgagattttgccagg

SEQ ID NO: 84552 - DNA, 505 bp, Zea mays
tggagtttttcgctatagagacgaggacgagaaagtattgctcgttcggaattcccgggtcgacccacgcgtccgccgacgcgtccgattttgagcattcataaacacacctagcgaagcgcactagcaacgacctaacaacaatggcttccaagacattatccctccttgcgcttcttgccctttttgtgagtgcaacaaatgcgttcattattccacaatgctcacttgctccgagtgccattattccacagttcctccctccagttacttcaatgggcttcgaacacccagctgtgcaagcctataggctacaacaagcgcttgcggcgagcgtcttagaacaaccaattgcccaattacaacaacaatccttggcacatctaaccatacaaaccatcgcaacgcagcagcaacaagcactgagccacctagccgtggtgaaccctatcgcctacttgcaacaacagctgcttgcatccaacccacttgctttggcaaacgt

SEQ ID NO: 84553 - DNA, 498 bp, Zea mays
gagaaagttattgataagagggaaaagtatgctcgtccggttcggaattcccgggtcgacccacgcgtccggctcttcagccctataggctccaacatgcaatcgcagcatgcaacatacctttatcacccttgttgtttcaacaatcgccagccctatctttggtgcagtcattggtacaaaccatcagggcacagcagctgcagcaactcgtgctacctgtgatcaaccaagtagctctggcaaacctttctccctactctcagcaacaacaatttcttccattcaaccaactgtctacactgaaccctgctgcttatttgcagcaacaactattaccattcagccagctagctactgcctactctcagcaacaacaacttcttccatttaaccaattggccgcactgaaccccgctgcttatttgcagcagcaaatactactaccatttagccagctagctgcagcaaaccgtgcttccttcttgacacagcaac

SEQ ID NO: 84554 - DNA, 505 bp, Zea mays
  unsure (1)..(505): unsure at all n locations
agggagtnnntnnncgatcgagttgaaagctattgtattactcgttcggaattcccgggtcgacccacgcgtccgatctcacagggcggcctgcagagaatctatgagaagtacacctggaagctctactccgagaggctgatgaccctgaccggcgtgtacgggttctggaagtacgtgagcaacctggagaggcgcgagacccgccgctacatcgagatgttctacgccctgaagtaccgtagcctggcaagccaggttccgctgtccttcgattagtacggggaaagaagaagaagaagaagcccaggccggagaaccatcgcctgcatttcgatctgtttcaccgcaattcgcattgttagtcgtgtattggagttatgtgtacttggtttccaagaactttggttccttctcgttttttttccttgtttgagcgtttttgggcagcgctggcctggttcctagtatggtgggaattggctgcaccttttgcttccgataa

SEQ ID NO: 84555 - DNA, 501 bp, Zea mays
  unsure (1)..(501): unsure at all n locations
gggcctgtgtccatcgtaccgaacatgatagcattgctcgtaccggtccggaattcccgggtcgacccacgcgtccgtttcatataagcgaaatattgcagcaattgaagggagttggtttggatcttgggcaccagagaggatgttatgggatcacattatttataaaccaatacgggcaatgcttggaggacgtctaagatttgttctttgtggtggtgcacctctgtcaagtgacacacaaagatttatgaatatatgtctaggtgtcccagtcggtcaaggctatggattgactgaaacttgtgctggagcagctttcactgaatgggatgatacaagtgtgggtcgtgttggtccaccacttccttgctgctatgtgaagcttgtctcatgggaagaaggtggttacaagatttctgattctccaatgccgagaggagaggtcgtggttggtggacacagtataacanaaggttatttcaacaatgaagcaaagac

SEQ ID NO: 84556 - DNA, 501 bp, Zea mays
  unsure (1)..(501): unsure at all n locations
aagtagtaagtgggtcnangatgaaatagaagccctacgcnannactcgtaccggtccggaattcccgggtcgacccacgcgtccggccctacatgcttagcaaaaattttggggatctatcaggttactagtaagcatgtaaagggtggcaaggagtcaaagatggatttgcttgtgatggaaaatcttttgtttggacggaatattaccaggctctatgatctaaagggatcttcaaggtcaaggtataatgcagattcaaatggtagcaacaaggttcttcttgaccagaacttaattgaagcaatgccaacttcaccgatttttgttgggaacaaggcaaagcggctactggaaagagctgtttggaacgatacatctttcctagctggaatcgatgtgatggactattccttgcttgtgggagtcgacgaggagaaacatgaactggtcttaggaattattgattntatgaggcagtatacatgggacaagcacct

SEQ ID NO: 84557 - DNA, 497 bp, Zea mays
  unsure (1)..(497): unsure at all n locations
agtaagggagtgggttttnngatggatccctcagcactcgcannccntnnnggtccgattcccgggtcgaccacgcgtccggggatagcagccaagatactttgaaggtttgacaatcgccttggtcactaggatccgtcttggttgtcaaaccttcaaagtatgtgggatagcagccaagatggatgttaacgaccatgccgatcaccaaggctccaaagccagtggaatgccaaccaagacagatgctaatgatcaatgcagcaaccaaggttttgttacatgtccctttaagacagctgagaggttagatcatcttctgaaccaaccagcaaacagatactgtgctgattgtggtgctccagatccaaaatgggtgtcaatgactnttggtgttttcatttgcatcaagtgttcaggagctcatagaagtcttggagtacacatatncaagggtgttttcggggaactagacgagtgggcagatgaacaggtgg

SEQ ID NO: 84558 - DNA, 415 bp, Zea mays
  unsure (1)..(415): unsure at all n locations
ngtgtagggtttcgttctactagcacaagatagtatgctcaccggtccggattcccgggtcgacccacgcgtccggacagcaagcggatgcgtgaggacgcgacaacactgaagatggcatgtctgcggtgcctggctctgcactgcacgcttgaatgcaacctgcccctgccgggctgaggctgacggctgcccgctgacacatatgcccgcgctgtccctccgagcctgagagcgatgacccgtgcgcgcccctataccggtgggcaccacccagtcaacgttcgcacagtgctgcagcagcgatgaggatgatggacgtgcagtccgtggcgcaccagctgcagatgatgatgcagcttgagcgtgccgctgccgncagcagcagcctgtacgagccagctctgatgcacca

SEQ ID NO: 84559 - DNA, 515 bp, Zea mays
aggggaagcgttcttcgccctacgctctatgtaggtcacatcgtacttgatctgaattcccggctcgacccacgcgtacgctcacacgtccggtgctgctgcgcttattggacctgctcgagcggcacgcatagggggtggtgacgctgtatacgtgggacaaccgcatgatctggtcatgcctattggccgatgtccccatggtgtcttcgatgcgtgcggtactacaccggttgggctgactagatccactgcctgattgcaccagtcgacggcgcgcaccacgttcttgtgctgcactagccggtcggaattgtcttacagatcatcccctggatcttacatcttctaatgttcgactcgaaggtcattccggcacttgcctgcgtctacacccttgttacgaataccgcctatcatacgccgatatccgagctctactgggctcatcctattgcacgaagtctgagctccacacggcgttctgaacccatttttcaggatttgcaccgacg

SEQ ID NO: 84560 - DNA, 529 bp, Zea mays
  unsure (1)..(529): unsure at all n locations
ngggaatggtntnnnccgcatcgagatgattgctactctctaccgcttcggaattcccgggtcgacccacgcgtccgatatcaaggaaaaagaagttgctgaagtagcaggctgaaggaaagaaaaggatgaagggaataggaagggttgatgtccctcaagaagcattcatggccgtgttgagactggaaaaggaggtgctatgaaagtgctcatgaacctttgtgtctccgtaaattaaagacctcttcctgtgcgccactcacaagtatagtcagacgagagctttgagacaacaggcattcactatggttcaacctgtccgctctggaccataggaaccagtcaagcacagatcactcccagaacaaaagcaggtaaatctggcattcgttcgctattttttgcttttttatgggtcaagctatgatggtaaaacaatcatgtcgccacagagttttgccaggcacatataggaaattcatatgtcaaagtgcattatgtaagcccaattccttttaccccattg

SEQ ID NO: 84561 - DNA, 491 bp, Zea mays
cccgccggatacccgtctcggaattcccgggtcgacccacgcgtccgatgtcttctttctactttcttgtaacctaagacgaactcggtgaactctttctcctggcgcagcaccggagcacaatcaaggattccagtccagtcctgccaatggagtgcgttttgggcttggttggccgcgacttcgcggtggtggcggtcgacaccttcgccgtgcagagtatcctcgtacacaagactgacgaggacaaagtaatggtcctcgactcgcacaagctgttgggcgcttcaggggagcctggtgaccgggtgcagtttacggagttcatacagaagaacctccacctgtaccagttccgcaacaccatcccgctgtcaaccgccgctgccgacaacttcacacgcggcgagctcgccacagcccttcgtaagaatccatacatggtcaatgttattctcggtggttaccaataggatgttggccgcctcact

SEQ ID NO: 84562 - DNA, 519 bp, Zea mays
  unsure (1)..(519): unsure at all n locations
nggtggggaggattgtcctcagttaagaccgtattctatacncgttcggaattcccgggtcgacccacgcgtccgcaactagcaacatagaaagcacaatagtgtaccaacaatggcagccaaaatattttgcgctccttatgctccttggtctttctgcaagtgctgctacggcgaccattttcccgcaatgctcgcaagctcctatagcttcccttcttcccccgtacctctcaccagcggtgtcttcggtatgtgaaaacccaattcttcaaccctacaggatccaacaggcaatcacagctggcatcttacctttatcacccttgttcctccaacaatcatcagccctattacatcagttacctttggtgcatttattggcacaaaacatcagggcacaacaactacaacaacttgtgctagcaaaccttgctgcctactctcagcaacagcagtttcttccattcaaccaactagctgcattgaactctgcttcttatttgcaacaacaacaac

SEQ ID NO: 84563 - DNA, 515 bp, Zea mays
  unsure (1)..(515): unsure at all n locations
aggtaataggtgtcttaaaaatgtaagagaaagtaggcatctctcggtccggaattcccgggtcgacccacgcgtccgccctacttgaggctctggacttgatcaatgagccaaagaggccttcagacaagcccctgcgtctcccccttcaggatgtgtacaagattggtggtattggaactgtccctgttggacgtgttgagactggtgtcattaagcctggtatggttgttacttttgggcctactggtcttactactgaggttaagtccgttgagatgcaccatgaggctctccaggaggcccttcccggtgacaatgttggcttcaacgtgaagaatgttgctgtgaaggatctgaagcgtgggtatgtggcctccaactccaaggatgaccctgccaaggaggctgctagctttacctcccaggtcatcatcatgaaccaccctggccagattggcaatggctatgccccagttctggactgccacacctcacacattgctgtcaagttn

SEQ ID NO: 84564 - DNA, 516 bp, Zea mays
  unsure (1)..(516): unsure at all n locations
tgggggaggttcgtcgnccccactctccgtcgccacgacttaccggtctcggaattcccgggtcgacccacgcgtccgcgctcgcagtttaatttagcggtttaagtgtggatctgtgaaccccatggcgccggttgttgattcgtgttacacgtgctatgttctgagattcatgattaaaaataaaaaacaaaaaaaaaataaaagggcttaagctctaaatgatccatactttagtacgcactcatgctactacttaagtcttctatagtgacaactaaatatcaatgctctggccgaagttttacaacgtcacaactgtgaaaaccatgacattaatgaacttaataaccatgcaaaacatgcgcatttcgccagctagcgtaataactaacatgcccaaaacgatcgtacttcctaacagttgcgcatcatgaatgacgaatgtgactcgatctgtaacggctcattaagcactagtggacttggaggattcacacattgttaccgatacat

SEQ ID NO: 84565 - DNA, 510 bp, Zea mays
  unsure (1)..(510): unsure at all n locations
tggtgaaggttcnttnctagaaagacatgtacgtcacgctctaccggtctcggaattcccgggtcgacccacgcgtccgctcgttaccaagattgataggcgatccggcaaggagctggagaaggagcccaaatttgtgaagaacggtgatgctggtatggtgaagatggttcccactaagcccatggtggtggagaccttttctcagtatcctcctcttggtcgatttgctgtccgtgacatgaggcaaacggtggctgtcggagtcatcaagagtgtggagaagaaggacccaactggagccaaggtgacgaaggctgctgccaagaagaaatgatctatctggctggtgacgaaggctgctgccaagaagaaatgatctatctggctggtgctgtgcttgcttgttggttacctcgtggaagcttaaaatatctcgtcttgttgacatccttgcagttgtcgcgtgaacaagtaatctatgatggcaatgtttgcctggtcatgaag

SEQ ID NO: 84566 - DNA, 506 bp, Zea mays
  unsure (1)..(506): unsure at all n locations
gggaagtgtcgtcgcctagcccacgactgtancatctctctgatcggattaccggccgacccacgcgtccggcactacggcatccgcatcgagttcatgttcccggacgcgagcgaggtgcaggaggttgggcgcaccaagggcctggtctgcttctacgaggacggccaccaggagtgctgccgggtgcgcaaggtgcggcccctgcgcagggcgctcaaggggcttagggcatggatcaccggccagaggaaagaccagtcccccggcaccagggccagcatccccattgtccaagttgatccttccttcgaaggcctgaatggcggagccggtagcttggtcaagtggaaccccgtggccaacgtcgacggcaaggacatctggactttcctgcggaccatggacgtacctgtcaacaccctgcatgctcagggctacgtgtccatcgggtgcgagccgtgcaccaggcccgtccttgccgggcaacacgagcgtgaaggccg

SEQ ID NO: 84567 - DNA, 527 bp, Zea mays
ggggagaatgcgtctgatttacgaaaggaggaagtatcgttatacctcgttcggaattcccgggtcgacccacgcgtccggtggaatccagtagcaacaacagagcaacaatggcgaccaagatattttccctccttgggctccttgctctttctgcatgtgttgctaacgcgacaattttccctcaatgctcacaagctcctatagcttcccttcttcccccataccttccatcaatgatagcttcagtatgtgaaaacccagctcttcagccctataggctccaacaagcaatcgcagcaagcaacatacctttatcacccttgttgtttcaacaatcgccagccctatctttggtgcagtcattggtacaaaccatcagggcacagcagctgcagcaactcgtgctacctgtgatcaaccaagtagctctggcaaacctttctccctactctcagcaacaacaatttcttccattcaaccaactgtctacactgaaccctgctgcttaattgcagcaacaactt

SEQ ID NO: 84568 - DNA, 496 bp, Zea mays
ggtgagcttcgtgctacagaaaaagtaagtaactcggccggaattccggtcgacccacgcgtccgcccatcttccccgctccccctctccctctcgtggccacgactgccgccgctgccgggctggccaggtgtccaggtcatctccggcccattcgccggcgacgagcaccccactagatcgaccgagctatggacggcctgtggcatctgggggacgagctccgcgggcagcccaaggtggtggaggaccgccagtggtcgctcatgacatccaagctggcagagatcaccaggtccaggggcgagaggacgaacgacctcgactacgccaggatgaacgccggccccgacgccaagcagtggggcaaggcggcgtcctaccagcaccacgacgagggcacgatggaccaccacgtcggtctcagcctgaagacgaacgatctcaagatgaacgaggccgtcgctgccgcagtcatgaaactcctcttccgcgg

SEQ ID NO: 84569 - DNA, 510 bp, Zea mays
  unsure (1)..(510): unsure at all n locations
nggtggtgtataaaagaggaaggagggacagttatactcggtccggaattcccgggtcgacccacgcgtccgcggacgcgtgggtgcggcgtcggcagcgtcggcagcccgttcctgggccagtgcgtcgagttcctgaggcaccagtgcagcccggcggcgacgccctacggctcgccacagtgccaggcgctgcagcagcagtgctgccaccagatcaggcaggtggagccgctgcaccggtaccaggcgacatacggtgtggtcctgcagtccttcctgcagcagcagccgcagggcgagctcgcggcgctgatggcggcccaggtagcgcagcagctgacggcgatgtgcggtctgcagctgcagcagccaggtccctgcccttgcaacgcagctgccggcggtgtctactactgaggaaactatgtactgtagtaataatgtaatggagccgctgactagctacctatagctagttcactcgtttagcggcgatgagtaacggag

SEQ ID NO: 84570 - DNA, 519 bp, Zea mays
  unsure (1)..(519): unsure at all n locations
tggggagtatcttanctaccctgccaaataggtnatgtnatctactggtctcggaattcccgggtcgacccacgcgtccgttcattcgttcccggcctcaccccgagccagtcgtctcgctagggtttcgccgccgccggcatgcctcgccgcagctcaggaaggtctgccccacgcccagctccccgtgctgcttcactgaggaacccgccacagccagcacgccaggctcctcctccagctcctgttcgagatggtggtggctccatgtttggaggaattgggtccaccattgctcaaggtatggcgtttggcacgggtagtgccatggcacacagggctgttgactctgtattaggtccccggaccatccagcatgagactcttgccacagaagctcctgctgctgcccctgctgctccagcgatgaatgctgatgcttgcagcttccattctaaggctttccaagattgtctcaacaactatggcagcgagatcagcaagcgccagttatacctg

SEQ ID NO: 84571 - DNA, 507 bp, Zea mays
ggaggaggttccttccctactagacaagtaggctacgctctactcggtctcggattcccggtcgacccacgcgtccggcaaattgcaccaagaaatccattgagaggccgccgacaggggaattaatggcggcggggtctagcagcagccaccgccgcctcatactcgcagccgacgtcctgctctccgtgctcgcggctgccagcgccagcgccgggacctcctgcatgccctggtgggccatcccgcacaacccgctcacgagctgccgctggtacatgaccagccagacctgcagcataggaccgcgcctcccgaggccgcagctgaacaggagatgctgccgatagctggcggacatcacggcgtactgccggtgcacggcgctgagcatcctcatggacagcacggacccatcgagcaccgactcgcacttggaaggccgactacaggacctgactggatgaccgcggcaggtgcaaaggcgataagccgccaccctcgtcg

SEQ ID NO: 84572 - DNA, 508 bp, Zea mays
gtaatgttgtcctattagaacaagacagaatgctctaccggtccggaattcccgggtcgacccacgcgtccgcggacgcgtgggtagcaacatagaaagcacaatagtgtaccaacaatggcagccggaagattttgcttccttatgctccttggtctttctgcaagtgctgctaccgcaaccattttcccacaatgctcacaagctcctatagcttcctttcttcccccatacctctcaccagcggtgtcttcagtatgtgaaaacccaattcttcaaccctacaggatccaacaggcaatcgcagcaggcatcttacctttatcacccttgttcctccaacaaccgtcagccctattacagcagttacctttggtgcatttgttggcacaaaacatcaaggcacaacaactacaacaacttgtgctaggaaaccttgctgcctactctcagcaacagcagtttcttccattcaaccaactggctgcattgaactctgctgcttatt

SEQ ID NO: 84573 - DNA, 490 bp, Zea mays
cccccaccatacccgcctcggaattcccgggtcgacccacgcgtccgcccacgcgtccgcggacgcgtgggactggtcgtaaactttcaagatttgggcttttgaggagttgagagtgaccaatggttttggtggtgttgttctcagccctgttggaacacagtgtgtatccaaggaagatcatcctattgtgcaaagaaaaggattggctgtggttgattgttcctgggcacgtttaagtgatgtcccctttgtgaaactatgttgcggtgctcctcgtctcttaccatggttggtagcagcaaatcctgtgaactatggccgcccatgtgaactgtcatgtgtggaagctttatcagcagccctcataatatgtggggaggaagatacagcacatttgctgcttgggaaatttaaatggggtcacgcattcttgtctctaaacagagatctcctgaaagcatacttccaatgtgaaaatggagctgtt

SEQ ID NO: 84574 - DNA, 513 bp, Zea mays
  unsure (1)..(513): unsure at all n locations
agtgggcgatcgtgtttcatgcttncctcagtataacgtntcggaattcgggtcgacccacgcgtccgattttgagcattcagaaacacaccaagcgaagcacattagcaacaacctaacaacaagggctgccaagatattatccctccttgcgcttcttgcgctttttgcgagcgcaacaaatgcgttcattattccacaatgctcacttgctccaagttccattattacacagttcctcccaccagttacttcaatgggcttcgaacacccagctgtgcaagcctataggctacaacaagcaattgcggctagcgtcttacaacaaccaatttcccagttgcaacaacaatccttggcacatctaacaatacaaaccatcgcaacgcaacagcaacaacaattcctaccagcactgagccacctagccatggtgaaccctgccgcctacttgcaacagcagttgcttgcatcaaacccacttgctctggcaaacctaggttccaaaccact

SEQ ID NO: 84575 - DNA, 500 bp, Zea mays
aagtctcgtactacgaatatagtatgctctaccggttcggaattcccgggtcgacccacgcgtccgtgctcagcgactagctggatagaatcaggcgacactgtaaggaaaaaggtgttcctgaggaacctctctgctcccttcatttgtgagttcttccgtgatgcccaagagaaggtcctcccgtatgctgactacatcttcggcaacgaaactgaggcaaagatctttgccaaagtcagaggatgggagactgagaatattgaggagattgctttgaagatctctcaacttcctttggcttcaggcaagcaaaagaggattgctgtgattactcaaggtgctgatccagtggttgttgctgaggatgggaaggtgaaaacgttccctgtgatcctattgcccaaggagaagcttgttgacaccaacggcgcaagtgatgctttcgttggaggcttcctctcacagttggttctaggcaagggcattgaagactgctg

SEQ ID NO: 84576 - DNA, 507 bp, Zea mays
gtgaggttctcctaccgaacatagtaagcatcactggttcggaattcccggtcgacccacgcgtccggccgggctgcccgcgggaggtgcagaggggattcgccgccaccctcgtcacggaggccgagtgcaacctggccaccatcagcggcgtcgccgaatgcccctggattctcggcggcggaacgatgccctccaagtaactgcgaagagcatagtgcatgaggaatgagcttgtagctagctcatatgtctgaataataagcacagcacgaagatgaatgcatttctcggatcgttcatccggaacaataattaaaggggatccggatttgttcttgtgataaaaaaaaaaaaccattaaaaaacctaagataaatgaaggcaggtcttaaggatccaactttccagacgcatgcatgcagaattcctaactatgctataggggcaccttaatataattttctgggctgtatcttacaatctccgggttcttaaaagagtgcg

SEQ ID NO: 84577 - DNA, 505 bp, Zea mays
agtgtgtcctattagaacaagatagtatgctctaccggtctcggattcccggtcgacgcacgcgtccggcgctctctttctctatcgactggcgacgactccgccaccgacgccgctctacgcgaggggcccaggtcttcgccaacgacgagcatccgggttagagaggaagaaattgcaaccgaaacaatggcggcagattccggcgctcgcagacaaccaagcttcaccaaggtcgaccagctgcgccctggaacccacggccacaacctcatcctcaaggttgttgactccaagatggtcgtccagagaggccgagagggagggccccagggaagacagatgaggattgcggagtgcttggttggtgatgaaaccggcatcattgtcttcactgcaagaaacgatcaagtggatgtaattaggcctggaacaactgttgaactgaggaacgcaaagatcgacatgttcaagggttcgatgcggcttgcagtggacaagtggg

SEQ ID NO: 84578 - DNA, 516 bp, Zea mays
  unsure (1)..(516): unsure at all n locations
aggagaagatgtagctccccatgccttctactgcaacnctttcggattcccggtcgacccacgcgtacgcaacaaccgcagcaccaccaccaacaacaacaacaacagcaccaacaacaacatcaaggtgaaggccaacaacaacatcaccaacaatcacaaggccatgtgcaacaacacgaacagagccatgagcaacaccaaggacagagccatgagcaacaacatcaacaacaattccagggtcatgacaagcagcaacaaccacaacagcctcagcaatatcagcagggccaggaaaaatcacaacagcaacaatgtcattgccaggagcagcaacagactacaaggtgcagctataactactatagcagtagctcaaatctaaaaaattgtcatgaattcctaaggcagcagtgcagccctttggtaatgccttttctccaatcacgtttgatacaaccaagtagctgccacgtattgccagaacaatgttgtcattgaacttaggcaaat

SEQ ID NO: 84579 - DNA, 509 bp, Zea mays
gataagtatcttattatcagaacaaagtaggtctctaccggttcggaattcccgggtcgacccacgcgtccgaactctgctgcttatttgcaacaacaactaccattcagccagctagctgctgcctaccgccagcaatttcttccattcaaccaactagcagcattgaactctgctgcttatttacagcagcaacaactactaccattcagccagctagctgatgtgagccctgctgccttcttgacacaacaacagttgttgccgttctacctacacgctatgcctaacgctggcaccctcttacaactgcaacaattgctgccattcaaccaacttgctttgacaaacccagcagtgttctaccaacaacccatcattggtggtgccctcttttagattgcttatgagttatagttcaataatgaagttttttggatgatgtttgtggcttcccagaaataagaaagtacatttctaaaaaaaaaaaaaaaaaaagggcggccgct

SEQ ID NO: 84580 - DNA, 505 bp, Zea mays
agaaggtcttgtatcagaacaagaaagtatcctcgcctcggattcccggtcgacgcacgcgtccggatatattcaacgggaaaaagctcgaagtatattgttccttcgtcacacaactgtgatgggccgcatgtgaaccgtactgagtatcagctgattgatatatcagaggatggatttgtgagccttcttacttcagatggcaacactaaggatgatcttagactcccaactgatgagactcttgtggcccagatcaaggaagggtttgaaagtggcaaggatcttgttgtgactgtccagtctgctatgggggaggagcagatctgcgcgctgaaggatgttggccccaagtaacttccctgccttggaatactgtatctcaaaacctaaatcgaaaaaagaagtgtatcaaggattgctacagagacatccatctggcttgagctggcttttgctatgtcaaacacaagtgcagggatcgctgggtgttgcaccgtgtctt

SEQ ID NO: 84581 - DNA, 507 bp, Zea mays
ggagatgttcttcccaccacgctagtatgctacctccctcggatcggattcccggctcgacgccacgcgtccggcgggaagcaaggacaccgtggggcagttcgagtcccacatcgcgttcactcttgctgggctctaccgtgtcgtccatggcatcgatgttttcgatcccaagttcaacattgtctcccctggagcagacatgagtgtttactacccgtatacggaaaccgacaagagactcactgccttccatcctgaaatcgaggagctcatctacagcgacgtccagaactccgagcacaagttcgtgctgaaggacaagaagaagccgatcatcttctcgatggcgcgtctcgaccgcgtgaagaacatgacaggcctggtcaagatgtacggcaagaacccccgcctgaggaagctggcaaaccttgtgatcgttgccggcaaccaacgaaagaagtccaaggacagggagaaccaagccgaattcatgaggatttcccc

SEQ ID NO: 84582 - DNA, 586 bp, Zea mays
  unsure (1)..(586): unsure at all n locations
tggattagttcttcctagcaagacaagatagtatgctctaccggtttcggattcccggtcgacgccacgcgtccgataatatacagttaggcaccgacgttggtcctccttgcgcttcttgcccttagagtgggcggcaacaaatgcagttgattattaccacagagcattacttgctccatagctgcacaggcttccaaaatctactcctactcagttacattcaatgtcatcaggaacattcatcacgtgcaagcactacacagctactaactagccgttagcgatcgagacgccctacaacaagccaatcatnccaatctgcaatcaacaattgcttgctgacatcataacgcctacacaaccataccgaacgtcaacatacagacagcatacagttgtgtgcacatcaactgaggccacactacgaccgtgcgtgcaacctctgtgcactctactatcgcttcgatcgagtatgctttgacataacacacccgacttgtctctcatcngaaaccgtacacgtgctatacatcagcacactatcgatcgatcttgcanacaagcattctgctcactcactcan

SEQ ID NO: 84583 - DNA, 511 bp, Zea mays
  unsure (1)..(511): unsure at all n locations
tggagcgaggtccgatccacccgactacctatgtatacctgctcgaattccgggtcgacccacgcgtccgcccacgcgtccgcggacgcgtgggtccagatcagcaaagcggcagtgcgtagagaggatcggggaacagaacagcatgaagatggtcatcgttctcgtcgtgtgcctggctctgtcagctgccagcgcctctgcaatgcagatgccctgcccctgcgcggggctgcagggcttgtacggcgctggcgccggcctgacgacgatgatgggcgccggcgggctgtacccctacgcggagtacctgaggcagccgcagtgcagcccgctggcggcggcgccctactacgccgggtgtgggcagacgagcgccatgtaccagccgctccggcaacagtgctgccagcagcagatgaggatgatggacgtgcagtccgtcgcgcagcagctgcagatgatgatgcagcttgagcgtgccgctgccgncagcagcagcctgtaccaa

SEQ ID NO: 84584 - DNA, 509 bp, Zea mays
  unsure (1)..(509): unsure at all n locations
ngtgggagtttttaattagaggggacggatagttgtactcgtccggaattcccgggtcgacccacgcgtccgcggacgcgtgggaggacaggggctggttctggtgggagaagttcaagtcctacaagtatgatggcaggagcgaggagttctaccgtcttccttatggcttgagcaggtacttcccctcgctctaggacgccgggaggaagacgacggacccaagttctatgtagctgctcgagcgtagaagctgaacatcagttgaaggcaacagaaccatatgttattttcatatatcaagcagttgggagggagcttgatgttttgatttaccttgtaaaacattttggatgataaacttttgcaattactgggagagtaggatcaaccaggggagaattctgcaacaattcagtcaccgtttttgcttcagattcgaaacagaacacagatgccttcacaggcttcgattaaaaaaaaaaaaaaaaaagggcggccgctctaga

SEQ ID NO: 84585 - DNA, 509 bp, Zea mays
  unsure (1)..(509): unsure at all n locations
nggggagtggtcttgtaccaagaacaagtatgcactctcgtccggattccgggtcgacccacgcgtccgcccacgcgtccggggtacggtccacttcgctcgcaaccttccccagccatggcgaccgcgacgcggaggctgctccccgcgctcctcaggaccctagctccagccggcgcgcgcggcctctccaccgagaaggctgttggcgcagccgccgtcgtcggcagccacaccgctaagtggatgcaggacacgagcaagaagtcgccaatggaactgatcaacgaggtacctccaatcaaggttgatggtcgcattgccgtctgtgaaggggcttctgaaggtgttggacttggccacccaatcgagtacatctgccttgatctggaggcacctaatgtgtgcaagtactgtggtctccgttatgttcaagttcaccatcactaaattgagaagataatgctgtctaccgctgcagaagctgagttgaggagtttatgtgcacc

SEQ ID NO: 84586 - DNA, 513 bp, Zea mays
gtaggtgttcgtcctcgatcgacaagatagctatgcttctaccggtctcggaattcccgggtcgacccacgcgtccggccacagcttgcagatggaatggcagaagctgttgcaaacattgctgctttcttgagagaacaacatttgttgccattttacccacaggttgtgggaaacattaatgccttcttgcaacagcaacaattgctaccattctacccacagaatgcggcaaacattgttgccttcttacaacaacaacaattgctgccatttagccaacatgctttgacgaatcctaccaccttattgcaaccgcccaccatcggtggtgccatcttctagattttttatgatttatactgtaataataaagttctcatgctgaaaaaaaaaaaaaaaaaaaaaaaaaaaagggcggccgctctagaggatccaagcttacgtacgcgtgcatgcgacgtcatagctcttctatagtgtcacctaaattcaattcactggccgtcgttt

SEQ ID NO: 84587 - DNA, 509 bp, Zea mays
  unsure (1)..(509): unsure at all n locations
ggtgggcttttgctacgtaagatgtaagcacgctctactggtccggaattcccgggtcgacccacgcgtccggtgaaaacccaattcttcaaccctataggatccaacaggcaatcgcagctggcatcttgcctttatcacccttgttcctccaacaatcatcagccctattacagcagttacctttggtgcatttattggcacaaaacatcagggcacaacaactacaacaacttgtgctagcaaaccttgctgcctactctcagcaacagcagtttcttccattcaaccaactagctgcattgaactctgctgcttatttgcaacaacaactaccattcagccagctagctgctgcctacccccaacaatttcttccattcaaccaactggcatcattgaactctcctgcttatttacagcagcaacaactactaccattcagccagctagctggtgtgagccctgctgccttcttgacacatcaacagttattgccgttctacctn

SEQ ID NO: 84588 - DNA, 514 bp, Zea mays
  unsure (1)..(514): unsure at all n locations
nggtgaatgttcttccacgaatcgaaagatagctacgctctaccggtctcggaattcccgggtcgacccacgcgtccgcccacgcgtccggcaacatagaaagcacaatagtgtaccaacaatggcagccaagatagggtgcctccttatgctccttggtctttctgcaagtgctgctaccgcgaccattttcccgcaatgctcacaagctcctatagcttcccttcttcccccgtacctctcaccagcggtgtcttcggtatgtgaaaacccaattcttcaaccctataggatccaacaggcaatcgcagctggcatcttacctttatcacccttgttcctccaacaatcatcagccctattacagcagttacctttggtgcatttattggcacaaaacatcagggcacaacaactacaacaacttgtgctagcaaaccttgctgcctactctcagcaacagcagtttcttccattcaaccaactagctgcattgaactctgctgcttatttg

SEQ ID NO: 84589 - DNA, 517 bp, Zea mays
  unsure (1)..(517): unsure at all n locations
nggaggcagatctgtgctccgcaccccgccctattcgtatacccgttcggaattcccgggtcgacccacgcgtccggatcagcaaagcggcagtgcgtagagaggatcgtcgaacagaacagcatgaagatgggcatcgttctcgtcgtgtgcctggctctgtcagctgccagcgcctctgcaatgcagatgccctgcccctgcgcggggctgcagggcttgtacggcgctggcgccggcctgacgacgatgatgggcgccggcgggctgtacccctacgcggagtacctgaggcagccgcagtgcagcccgctggcggcggcgccctactacgccgggtgtgggcagccgagcgccatgttccagccgctccggcaacagtgctgccagcagcagatgaggatgatggacgtgcagtccgtcgcgcagcagctgcagatgatgatgcagcttgagcgtgccgctgccgncagcagcagcctgtacgagccaactctgatgcagcaacagcagcagc

SEQ ID NO: 84590 - DNA, 505 bp, Zea mays
  unsure (1)..(505): unsure at all n locations
nggaaagtttttatatatgcacaagtaagtattctcgtccggattcccggtcgacccacgcgtccgcatttatgcagaagctgcatgctgttcgccagatgggagtgaatttgcagttcttgctgttcgtagttgtcctgatggagaagcatcaacacaacaagatggagtaattcttctttttgatgcagaaagctcaaaccccattgcctcctggtcggtaaagaaggcatcgggtggcagcatttcttttgtaaaaggtgacgtccctttggatgcaaatgctgatagttcgagagacaaagagccaatgttgcttgattatgtaaatggttctcatgaatacgccatctttgatccccgggagagtgaggaggtggtcattagcaagaacaagcacaagaagattcaagctgaggaacctgcaccaatcggctacgcttctatttacggagagcttacaaaactggagccaaaggaagaagtttcagatgttccattcgtc

SEQ ID NO: 84591 - DNA, 505 bp, Zea mays
  unsure (1)..(505): unsure at all n locations
nggtgatgttttctcacctgaacaaggtagctacctcgtccggattcccgggtcgacccacgcgtccgcccacgcgtccgcccacgcgtccgcccacgcgttcgcccacgcgtccggttggcttctggtggcccttcggttcgggttcgggttcgtgaggttctccggggttcgggttcgtgggtgagcggatcgagatggcggcgtcggatgttgagtaccgctgcttcgtcggcggcctcgcctgggccacggacgaccactccctacacaacgccttcagcacctacggggaggtcctcgagtccaagatcatcctctatcgggagacgcataggttcctgcgcttcggcttcgtcaccttgttcacggtggaagcgatgcggaacgccatcgacggcatgaactgcaaggagctggacggccggaacatcaccgtcaacgaggcccagtcccgccgcagctcgtgaggcngcagccgtgggtactgtggtggccgtggagg

SEQ ID NO: 84592 - DNA, 515 bp, Zea mays
aggggaagtatcttttctatgtaaagaatagatagctacactccactcgaattcccgggtcgacccacgcgtccgcccacgcgtccgggcatcttacctttatcacccttgttcctccaacaatcatcagcccgattgcagcagttacctttggtgcatttattggcacaaaacatcagggcacaacaactacaacaactcgtgctagcaaaccttgctgcctactctcagcaacagcagttacctttggtgcatttgttggcacaaaacatcagggcacaacaactacaacaactcgtgctagcaaaccttgctgcctactctcagcaacaacagtttctgccattcaaccaactagctgcattgaactctgctgcttatttgcagcaacaacaactactaccattcagccagctagctgctgcctacccccggcaatttcttccattcaaccaactggcagcattgaactctcatgcttatgtacaacaacaacaactactaccattcagccc

SEQ ID NO: 84593 - DNA, 515 bp, Zea mays
  unsure (1)..(515): unsure at all n locations
agtaaagtgtcgtcngcctactgcaaaacgtatgtaatcctgctccggttcggaattcccggctcgacccacgcgtccgtttgagcattcagaaacacacctagcgatacgcactaccaacgacctaacaacagtgggtaccaagatattatccgtctttgcgcttcttgccctttttgtgagcgcaccaaatgcgttcattattccacaatgctcacttgctcctagtgccattattccacagttcctccctccagttacttcaatgggcttcgaacacccagctgtgcaagcttacaggctacaacaagcgcttgcggcgagcgtcttacaacaaccaattgcccaattacaacaccaatccttggcacatctaaccatacaaaccatcgaaacgcaacagcaacaacaatttgtaccagcactgagccaactagctgtggtgaaccctgtcgcctacttgcaacagcatttgcttgcatccaacccacttgctctggcaaacatagtttcat

SEQ ID NO: 84594 - DNA, 488 bp, Zea mays
ccccacgagactctctcggaattcccggctcgacccacgcgtccgcgggcctgaagatcgggttccacgtggtggagtactcgaaccccgtctacttcgcggggctgggggagtacgaggacggcgacggcgacgtggtgcaggtggacctgatggagtccaagacggcgcgcggcccgccgacggggcggtggacgccgatgcgcgagtcctggggctccgtctggcgcatggacaccaaccaccgcatgcaggcgcccttctgcatccgcatacgcaacgagtccggcaagacgctcgtcgacaacaacgtcatcccggacaactggcgccccaacaccttgtaccgctccttcgtccagtaccgctagctgatcgggatgcctgccctgccctgccctgaccgcaattggagcttgctgacgctggggctctacttggctcggtcaccatcggctacaggactatactatggctctactaccact

SEQ ID NO: 84595 - DNA, 491 bp, Zea mays
cccgccgcatcccgtctcggaattcccgggtgcgacccacgcgtccggggttggcttctcctccccctccggttcgggttcgggttcgtgaggttctccgggggtcggggtcgtgggtgagcggatcgagatggcggcgtcggatgttgagtaccgctgcttcgtcggcggcctcgcctgggccacggacgaccactccctccacaacgccttcagcacctacggcgaggtcctcgagtccaagatcatcctcgatcgggagacgcagaggtcccgcggcttcggcttcgtcaccttcttcacggaggaggcgatgcggaacgccatcgagggcatgaacggcaaggagctggacggtcgcaacatcaccgtcaacgaggcccagtcccgctgcggtcgtggaggcggcggcagtgggtaccgtggtggccgtggaggctgcggctactgccgtggccggccgccgtgatggccggtggccggctacggct

SEQ ID NO: 84596 - DNA, 511 bp, Zea mays
gggggggtgtcttttaagagggagggaatagctactactcgtccggaattcccgggtcgacccacgcgtccgcgaaggagggtgcactggctgaagagaacatgcgcgggatttgcttcgaggtctgtgatgtcgttcttcatgccgatgctatccacaggggtggtggccaggtcattccaactgccaggagggtcatttatgcttctcagctcacagccaagccgaggctgctggaaccagtttacctggtggagatccaggccccagaaaatgcacttggtggcatatacggtgttctgaaccagaagagaggacatgtattcgaggagatgcaaaggcctggtaccccgctctacaacatcaaggctttcctccctgtcatcgagtcctttgggttctcaagccagctgagggctgcaacctctggtcaggcgttcccccagtgtgtgtttgaccactgggacatgatgggctcggatcctttggaggctggctcccaggctgccca

SEQ ID NO: 84597 - DNA, 511 bp, Zea mays
gaggatgttcttcgctgcacgcactgactccacgacgtaccggttcggaattcccgggtcgacccacgcgtccgcctttatcacccttgttgtttcaacaatcgccagccctatctttggtgcagtcaggggggcaaaccatcagggcacagcagctgcagcaactcgtgctacctgtgatcaaccaagtagctctggcaaacctttctccctactctcagcaacaacaatttcttccattcaaccaactgtctacactgaaccctgctgcttatttgcagcaacaactattaccattcagccagctagctactgcctactctcagcaacaacaacttcttccatttaaccaattggccgcactgaaccccgctgcttatttgcagcagcaaatactactaccatttagccagctagctgcagcaaaccgtgcttgcttcttgacacagcaacagttgctgcctttctaccagcagtttgcggctaaccccgcaaccctcttacaactacg

SEQ ID NO: 84598 - DNA, 510 bp, Zea mays
gaggatgttgtccacgttcgacaagatagtaatgctctaccggttcggaattcccgggtcgacccacgcgtccgtccaaatctgacgaggagactactgcaaataggaaattggctaaggagctggttgatggatggagtcgaccaatattcaacaagagcacgagatttgaggacatgaagagatatgatgatgaaagagcaccttacaggcggccacaaatgaagaaaccttcatcgagtagctctggaatggaatccagagatgatgatcttgatgctgacttttcacaacgcaagtctgggcaaagtagttcaaggcagcacgcttctaggccggaagcctcgcctttggactttgtcattcgtccacagtccaaaattgaccctgagcagatacgggctcgtgctaagcaggctgtccaagaccagcgtcggctgaagatgaacaagaaattgcagcagctgaaagcgcccaagaagaaaaaccttcaggcgtcgaagctcagcg

SEQ ID NO: 84599 - DNA, 519 bp, Zea mays
  unsure (1)..(519): unsure at all n locations
ggggaggaaggtctatgcctccatgtctccnatgncaaactcctcgattcccgggtcgacccacgcgtacggagcattcagaaacacaccaagcgaagcgcactatcaacaacctaacaacaatggctggcaaggtattatccctccttgcgcttcttgcgctttttgcgagcgcaacaaatgcgtccattattccacaatgctcacttgctcctagttccattattccacagttcctcccaccagttacttcaatggccttcgaacacccagctgtgcaagcctatatgctacaacaagcgattgcggcgagcgtcttacaacaaccaattgcccaattgcaacaacaatccttggcacatctaacaatacaaaccaatagtaacgcaacagccacaacaggttctaccagcacttagccacctaaccatggtgaacccttgttgctactttccacaacaactgcttgcatccaacccctttgttctaacaaaaccttgttgtcaaaccacaaccacc

SEQ ID NO: 84600 - DNA, 521 bp, Zea mays
  unsure (1)..(521): unsure at all n locations
gagtggggcggttttntcatgatttccgcaatatattatacctcttcggaattcccgggtcgacccacgcgtccgcccacgcgtccgcccacgcgtccgcccacgcgtccgcccacgcgtccgcgccgccggggaaggacggaaggagaagagggtacggccgtctcctcgcccccatggcccacgagaagaagctgtccaacccgatgcgggagatcaaggtgcagaagctcgtcctcaatatctccgtcggcgagagcggcgaccgtctcacccgcgccgcaaaggtgctcgagcagctcagcggccagacccccgtcttctccaaggcgaggtacacggtgcggtcgttcggcatccggcgtaacgagaagatcgcctgctacgtcacggcgaggggcgagaaggccatgcagctgcttgagagcggcctcaaggtcaaggagtacgagctgctcaggaggaacttcagcgacaccgggtgctttggtttccgcattcaagtagcccattgacctttg

SEQ ID NO: 84601 - DNA, 505 bp, Zea mays
  unsure (1)..(505): unsure at all n locations
gtatattaatataagagatactgnagagaagaggtgtctgaaaaagacaatgaagnctcngcaanncgctccnnttntaattcccgggtgggcccacgcgtgcgaggcantcgcagctggcatcttacctttatcacccttgatcctccaacaatgggcaggcctattacagcagtaacctttggatcctatcgggttgaagaatcgggttttcacataccgaagacaccgctggtgagaggtacggtggaagaagggaagctataggagcttgtgagcattgcgggaaaatggtcgcggtagcagcacttgcacaaagaccaaggagcataaggaggcaaaatattttggctgccattgttggtacactattgcgctttctatgttgctattctagatcgcgagcgagtgatcttgaggagacgagattacgtacgcagggctgcagaggagattgagtctaagataaatggagangtaagattaagttnactggccaggagag

SEQ ID NO: 84602 - DNA, 498 bp, Zea mays
  unsure (1)..(498): unsure at all n locations
gttatatngnnnatagtggtgggagtgtgtctgagcctagctnatgactgcaatgccgtaccggtctcggaattcccgggtcgacccacgcgtccgcccacgcgtccgcaacagcgggggtgcatgggacaacgccaagaagtacatcgaggccggcttgtcggaggaggcgaggtcgctggggcccaagggatcggaggcgcacaaagcggcggtgatcggggacaccatcggcgacccgctcaaggacacctccggaccgtccctcaacatcctcatcaagcttatggccgtggagtcgctcgtcttcgcgcccttcttcgccgcgcacggtggcatcatcttcgaccacctctgatcaatgcatgctgctgacgttccatggcaaaggcgccggctgttgtcgaaagttgaaagtggggatttgaggggatcagtgatgagatgataatggttgagttttgtagggtngtaagatggnaatgccataagacagtn

SEQ ID NO: 84603 - DNA, 529 bp, Zea mays
  unsure (1)..(529): unsure at all n locations
ngagaaatgtatctgagccccgcatcgtctgtagtctcaacncgctccgaattccaattgcgagctacgacctacgcgtccgcccacgcgttcgtgataagattgcctttgttcccatttctggttttgagggggacagcatgattgaaaggtacaccaaccttgactggtacaaaggcccaaccctgcttgaggctctagaccagatcaccgagcataataggcctttacacaaacctctgcttctgccacttcagcatgcacacatgattgatgccattagaacagtaccaacatgacccagaggagactcataacatgaatcctggtatggaactcacctaacgtgcaactgagctctatacttacgaggattatgcctatatgcaccaaagagcacttcaggaaagcttttaccatgacattgtataatgtaacatgaagaatgcatatgataaagaactccaccatgaatctatgctcatgaactccaaggataacccttaaaacggtggcttgcaagcttttc

SEQ ID NO: 84604 - DNA, 510 bp, Zea mays
agggggagcttgatcagctaagaaatattgtatgctcaccggctcggattcccgggtcgacccacgcgtccgcaagtcgcatcgcacgtacggtctcaggcgcatcggcctcgccgctgcacagcgccggagacgatacgacggcggctacgggatgacggtcttccacttcctcaactgcgccttcctcaccttcgggcctcacgtcgtctactactccgccacgcccctgtcagagtatgatacaatcggcacttctataaaagcagctgctgtttatcttggaactgcgcttgtaaagcttgtttgcttggcaacattgctcaaagtacctgagaatgatagctttgacccctatcaggagttaatgaaagtttttattggattcatagatgtagctggactgtattttgctttgacccagctgacccacagaaacatctctcagaatcataagttccaggctgttggtcttggttgggcttttgctgattcagttttgcaccgact

SEQ ID NO: 84605 - DNA, 488 bp, Zea mays
  unsure (1)..(488): unsure at all n locations
gtgaggtgnntagggtgaaggttctgtctcagctagtaatgtatgctcaacccgtccggaattcccgggtcgacccacgcgtccgcggacgcgtgggcggacgcgtgggcgcgcctctacatttcttctctctctgctcctgcgcctgcgcctgatccatgcaagacagggatcgccatgtcggactcggaggagcaccacttcgaatcgaaggccgacgctggggcgtccaagacctacccgcagcaggctggcaccgtccgtaagaacggcttcatcgtcatcaagaaccgtccctgcaaggttgtggaggtttctacctccaagactggtaagcatggccacgccaaatgccactttgtcgccatagacatattcaatgggaaaaagctggaagagggtgggggttgatcacacaactgtgacatagcggatgtgagaccgggcgtgagtatgggagtagagggggatttcctgagggatgggac

SEQ ID NO: 84606 - DNA, 539 bp, Zea mays
  unsure (1)..(539): unsure at all n locations
agggagaatcctctagtgcccacntcgtagncgctacagctatgacgctaccggtttcggaattcccgggtgcgacccacgcgtcacggtcagctctgcaagcttgaatcatgtgcggagcaccttggcttacgatcctttggtacgcgagagaggacaagggtcaactgcgcctttttacttcaagattggggncttgtcgtcatggggatcgctgttctcgtctgcacaacaggccaactatatcgccaactcttgtgcttgctaacatgtatcagcgccctgatatgataactcctggagttgatgctcaaggccaacctattgatcctgagaagatgcaggagcattttgaggacttctatgaggacatctatgaggagttgggcaagtttggtgagattgagaatctgaatgtttgtgataaccttgctgaccacatgattgggaatgtctatgttcagttcagagaggaagaacaggcagctgcagcatacaatgctcttcaagggcgcttttactctgggcgccctattatt

SEQ ID NO: 84607 - DNA, 518 bp, Zea mays
  unsure (1)..(518): unsure at all n locations
agagagaatatgcttgcttcttagctatgnatgcatgactgtaccggttcggaattcccgggtcgacccacgcgtccggttacacattcggatcgccatgtcagactcggatgagcaccacttcgaattggatgggcgcgccggatcgtccaagacctacccagcacatgctggcaccgtccgtatgaactgcttcatcgtcatcaagaaccgaccctgcacggctgtggaggtttctaccttaaagactgataagcatggtcatgccaaatgctactttgtagccatagatatatccaacggtaaaaagttcgaatatattggtccttcatgacacatactgcatattacagctgtgaaccgtactgagtatcacatgattgatatatcagactatggattagcgagctttcttacttcagatggtaacactaatgatgatcttaaactcccaactgattatactcttgtagcccagatcacagcaggtgcttaatgcagtcaacgatctctgatcn

SEQ ID NO: 84608 - DNA, 506 bp, Zea mays
  unsure (1)..(506): unsure at all n locations
ttttatatattaagagtatagngtatagtagagggtcnntttaagtatcagacacgtgantgcaatgncgntaccggtccggaattcccgggtcgacccacgcgtccggcaaattgcaccaagaaatccatcgagaggccgtcgacaggggaattaatggggtcggggtctagcagcagccaccgccgcctcatcctcgcagccgccgtcctgctctccgtgctcgcggctgccagcgccagcgccgggacctcctgcgtgccggggtgggccatcccgcacaacccgctcccgagctgccgctggtacgtgaccagccggacctgcggcatcgggccgcgcctcccgtggccggagctgaagaggagatgctgccgggagctggcggacatcccggcgtactgccggtgcagggcgcaatacattctcatggacggtacgattccttatggtttgtactcgcaattttgaggtacgtncttataggatcctgccggtctttcttg

SEQ ID NO: 84609 - DNA, 502 bp, Zea mays
  unsure (1)..(502): unsure at all n locations
gtattatgaacttagttaatatngtatggttgagcttttttacagaaagaaacgtaatgcatanncgttcggaattcccgggtcgacccacgcgtccgcccacgcgtgcgctaccattcagccagctagctgctgtgagccctgctgccttcttgacacaggaacagttgttgccgttctacctgcacgctgcgcctaacgttggcaccctcttacaactgcaacaattgctgccattcaaccaacatgctttgacaaacccaacagcgttctaccaacaacccatcattggtggtgccctcttttagattgcttatgagttatagttcaataataaagtttttttgctgatgtttgtggcttcccaaaaataagaaagtgcatttctagtttcttaaaaaaaaagtaaaatttaatatttttatttaaaaaaatattaaattataataattnatattatnattaatttatgannatatattatnnncttantttaacattc

SEQ ID NO: 84610 - DNA, 489 bp, Zea mays
  unsure (1)..(489): unsure at all n locations
atgatatngnnnaatnggggagagttgtgtgatctctactcgtatagctacggcatatcgtccggaattcccgggtcgacccacgcgtccgcaactcctgagcactttctcctcgtcccagacaagccaatcgaagccgagatacgacgatgggctccaccggcaccggagcagggggtaaggggaagaagggagcggccgggcgcaaggtcggcgggccaaggaagaagtcggtgtcgaggtccgtgaaggccggtctccagttccccgtcggccgcatcgggcgctacttgaagaagggccgctacgcgcagcgtgtcggcaccggcgcccccgtctacctcgccgctgtcctcgaatacctcgccgctgaggttctggagctcgccggtaatgctaccagaaacaacaagaagactcgcattatatcgaaaagagggcatttgggcgatgcgaaacgacgagatatttagggaagctggtgggaag

SEQ ID NO: 84611 - DNA, 488 bp, Zea mays
  unsure (1)..(488): unsure at all n locations
gtgattgngnnatatggtgggcgggttngtttagcaagcagaagtaatgttcatcctgtccggaattcccgggtcgacccacgcgtccgcacgtggttcaggtggctcacgtgaatatatggggagaggccctccaccaggtacaggtcggtgtttcaactgtggagttgatggtcactgggcaagagactgtaaagctggtgactggaaaaacaaatgctaccgttgtggagaaaggggccatatagaaagaaattgccagaacagtcctaggagtctcaggcgagagagaagttactcacggtccccatctccccgccgtggacggggccgcagtcgaagctatagcaggagcaggagccggagtcggagctatagtcgatcaagatccctgtgtagatcttctattggaggtcgtcgtgaccgttactgttggtagatcaaggagtcctagctatagctggaagccctatgcgatctgtgcttgc

SEQ ID NO: 84612 - DNA, 492 bp, Zea mays
  unsure (1)..(492): unsure at all n locations
aatatatntnngaatgtngggagttttctatntttagctcgtatagctacggctatatcgtntcggaattaccgggtcgacccacgcgtncggttctctgaatattgtgagactaaatttgaagtggaacctgttgaagtgatacatcgtgatggaaggaaaacagtttaccctgatctttcatgttacaaaatggatgttttgttatctgacattcttgggcctattggcatctcccaggacgagaaacaggttgtctgtcttttgaataaaatgcaactgcaagctgaaagtcactccttgaaaggggaggctcgcatttcagtgtctgttcctccaacaagaagtgatattctgcatgcccgtgatttgtcagaggacgttgctattgcttatgtattcatttatgatataatttcaaattctatatttatatatttttttattattgctttcaattatatagattgttatagatgaaacttttttttn

SEQ ID NO: 84613 - DNA, 525 bp, Zea mays
  unsure (1)..(525): unsure at all n locations
agagggagatcctctcgngttcgaatctcgccncatcgncacgatcgttccgattccgaattgcgagccggacccacgcgtacgagcaactagcaacatagaaagcacaattttgtaccaacaatggcagccaaaagattgggcctccttatgctccttggtctttctgcaagtgctgctaccgcgaccatcataccgcaatgctcacaagctactatagcttcccttcttcccccgtacctcttaccagtgatggcttcagtatgcgaaaacccaattcttcaaccctacaagatccaacatgcaattgcatcatgcatcttacctttatcacccttgatcctgcaacaatcatcacccctattacaacagttacctttggtgcatttattggcacacaacatcatggcacaacaactcgagctagcacaccttgctgcctactcttagcaacaacagttacctttggtgcatttgatcgcacaaaacattaaggcacaacaactacgacaacttgggcttgcn

SEQ ID NO: 84614 - DNA, 379 bp, Zea mays
tggaattcttcgtactcgtaacatcttcatctaacacgactctattacttaaacacacattattttacacactacacaggctgctaatttagctcttccttttaccttttcaccaacaaaacttatattccatctcattctcaattcattataccattctccacattcttcaaatcttaaacacccactttcaaccttatctacaacacaattcactacttttacacaccaattccattcaacaacatctttctacattacaatcaaccttcaacgcacaccacacaattctacatccttacccctatcattttaaccttaccctactttaacacaattcttccttaaccccttcttttctaacctaattcaaacccca

SEQ ID NO: 84615 - DNA, 481 bp, Zea mays
  unsure (1)..(481): unsure at all n locations
atgttttnatatgggggcggtgngttagtagagaaagtattctcatcccgtccggaattcccgggtcgacccacgcgtccgagtcgatggaagccgtattattgttgaatttgctaaaggagttcctcgtggttctgggggttgacgtgagtacatgggaagaggacctccaccaggaacaggtcgttgttttaactgtggaatggatggtcactgggcaagggactgcaaggctggtgactggaagaacaaatgctaccgctgtggtgaatcgggccatatagagagaaattgccagaacagtccaaggaatctcaggcgtgataaaagctattcacggtctccatccccacgtggtggacgtggccgcagccggagctacagcagaagccggatctatagccgttccagatccccatctggatcttatatgagtggacgtccttgaacggtgactatgaggtgatctaggaatgcttta

SEQ ID NO: 84616 - DNA, 487 bp, Zea mays
  unsure (1)..(487): unsure at all n locations
atatagngnnaatgggagtagtatgtgtctcagtctgtactgtatggctatcccgtccggaattcccgggtcgacccacgcgtccgcccacgcgtccgcgcaacagcaacaacaatttctaccagcactgagccaactagctggggtgaaccctgtcgcctgcttgcaacagcagttgcttgcatccaacccacttgctctggcaaacatagttgcataccaacaacaacaacaattgcaacagtttctaccagcgctcagtcaactagccatggtgaaccctgccgcctacctacaacagcaacaactgatttcatctagccctctcgctgtggttaatgcacctacatacctgcaacaacagttgctgcaacagattgtaccagctctgacacagctagatgtggcaaaccctgctacctacttacaatagattattagcattgaacccaactgactgtagaaaaagtctgctgcagatacctac

SEQ ID NO: 84617 - DNA, 483 bp, Zea mays
  unsure (1)..(483): unsure at all n locations
aataaaagaaatgggagagtttctgtcctagcttgacatcatggcatatccgttcggaattcccgggtcgacccacgcgtccgctgccagttggttgaatggaagcattgaactctcctgcttatttacagcagcaacaagtactaccattcagccagttagctggtgtgagccctgctaccttcttgatacaaccacagttgttgccgttctaccagcacgctgcgcctaacgctggcaccctcttacaactgcaacaattgctgccattcaaccaacttgctttgacaaacccagcagcgttctaccaacaacccatcattggtggtgccctcttttagatttcttatgagttatagttcaataataaagttttttgtctgatgttagtggatttaaaaaaagaataaagtatatttagtgattattaatataagaggaaggtagagaaagtaaaataaagcannntngtaagatgagtan

SEQ ID NO: 84618 - DNA, 516 bp, Zea mays
ggaggagttcattaagtcacctgtcaactattgtaaactctaccggttcggaattgccggctcgacccacgcgtccgttctcttcttcccccatacctctcacctgcgttgtcttcagtctgtgaaaaggcaatggttaaaccctacaggatccaacatgcaatcacaacatgcatcttacctttatcacccttgttcctccaacaatcatcagccctattacatcacttacctttcgtgcatatattggcacaaaacatcagggtacaacaactacaacaacttatgctaacaaaccttgctgactacgttcagcaacagcagctacctttggtgcaatagctgtcacaatacatcatggcacaacaactacaacaactcacactatcaaaccttgctgactactttgaggaacatcagcttatggcattcaaccgactatctgcaatgaactctgatgcttatttgcaacacccaacacttctaacatttaagccggtcagttctgtaccaacc

SEQ ID NO: 84619 - DNA, 522 bp, Zea mays
  unsure (1)..(522): unsure at all n locations
nggtgagagcctgcagagttcccatgccctcagtnagctataccgtaccggtctcggaattccgagctggacccacgcgtgcgaatcgccagccctatctttggtgcagtcattggtacaaaccatcagggcacagcaggtgcagcaactcgtgctacctctgatcaaccaagtagctctggcaaacctttctccctactctcagcaacaacaatttcttccattcaaccaactgtctacactgaaccctgctgcttatttgcagcaacaactattaccatttagccagctagctactgcctactctcagcaacaacaacttcttccatttaaccaattggccgcactgaaccccgctgcttatttgcagcagcaaatactactaccatttagccagctagctgcagcaaaccgtgcttccttcttgacacagcaacagttgctgcctttctaccagcagtttgcggctaaccccgcaaccctcttacaactacaacaattgttgcacctttgtccaacttg

SEQ ID NO: 84620 - DNA, 518 bp, Zea mays
  unsure (1)..(518): unsure at all n locations
ggggcgatgctgtcgtccacgaacaggggagtaggtaggctctaccggtccggaattcccgggtcgacccacgcgtccgcacgacttccgtccgagtctgagctcatctccacgcgccgccgccgccgctggacgggcaccgcgcagccatggcggaacagactgagaaggctttcctcaagcagcctaaggtgttcctcagctcaaagaaatctggcaagggtaagaagccaggcaagggtggcaatcgattttggaagagcattggccttggtttcaagactcccagggaagcaattgaagggacctacattgacaagaaatgtccattcactggaaccgtttctatcagaggcagaattattgctggaacatgccacagtgctaagatgaacagaaccatcattgttcgcaggaactatctccactttgttaagaaataccagaggtatgaaaagaggcactccaacattccagctcacatctccccatgcttccgtgtgaaggaaggcgaccan

SEQ ID NO: 84621 - DNA, 488 bp, Zea mays
  unsure (1)..(488): unsure at all n locations
gatataggtnnatatggagaagagggtgngtttttgcgcagaactgtatgctatacccgtccggaattcccgggtcgacccacgcgtccgctagcaacatagaaagcacaatagtgtaccaacaatggcagccaaaatattttgcttgcttatgctccttggtctttctgcaagtgctgctaccgcaaccattttcccacaatgctcacaagctcctatagcttcctttcttcccccatacctctcaccagcggtgtcttcagtatgtgaaaacccaattcttcaaccctacaggatccaacaggcaatcgcagcaggcatcttacctttatcacccttgttcctccaacaaccgtcagccctattacagcagttacctttggtgcatttgttggcacaaaacatgaaggcacaacaactacaacaacttgtgctggagagacctgctacctactctcagcagcatggagtgcttccattcagaccan

SEQ ID NO: 84622 - DNA, 495 bp, Zea mays
  unsure (1)..(495): unsure at all n locations
aatataggtnnatatggagagccgcctgtgttctaccgaaacacagtaantgctacccccgttcggaattcccggctcgacccacgcgtccgcagcatagaaagtggaatccagtagcatcaacagagcaacaatggcgaccaagatatgttccgtccttatgctcctagctctttctgcatgtgttgctaacgcgacaattttccctcaatgctcacaagctcctatagcttcccttcttcccccataccttccatcaatgatagcttcagtatgtgaaaacccagctcttcagccctataggctccaacaagcaatcgcagcaagcaacatacctttatcacccttgttgtttcaacaatcgccagccctatctttggtgcagtcattggtacaaaccatcagaacacagtaactgcagcaactcgtactacctatgaatgaacaagtagcattttgcaatcacttatatacatgactgtcagcaaacaaaca

SEQ ID NO: 84623 - DNA, 527 bp, Zea mays
  unsure (1)..(527): unsure at all n locations
atgaggcgagttcgctgtcgangtccctacgcctcacgatcgcattaccgtacctggttcggaattcccggctggacccacgcgtacgcctactcaaccgccccggccttagccttatccccagccacacccatgcccgggccaagagccgtatccaagcccgtgccagatgcacggaacctgcagcgtttgcagcaccccgatcctgggccagtgcgtcaagttcctgaggcatcagtgcagcccgacggcgacaccctactgctcacctaagagccagtcgttgctgaagcagtgttaccagcagctcacgcaggtggagcctcagcaccggtaccaagcgatctatggattggacctgcagtccatcctgcagcactagccgcaaagtggccaggtcgctgagctgttggcagctcatatagcgcatcaactgactgcgatgtgcggtctgcaggagacgactccatggccctacgctgctggcggcggtgatccccactgaagaaactatttgctgtaatata

SEQ ID NO: 84624 - DNA, 497 bp, Zea mays
  unsure (1)..(497): unsure at all n locations
tatatatacganaattagtaggagcctantttaaagtatagcagngtgactgctacgcccgtaccggttcggaattcccgggtcgacccacgcgtccgatttggaatggaatatctccatgggaagaatatagtgcattttgacttgaagagtggcgaatctgcttgtctacctaagggatcctcaacggcctatatgcaaggttggtgatttgggattatcaaaggtcaaatgccagacactaatctctggcggagtaagaggaacacttccttggatggcccctgagttgttgaatggcagcagcagccttgtctcggaaaaggttgacgtcttctcgtttggcattgtgatgtgggagctacttacaggtgaagagccttacgccgagctgcactaagtagccattataggtaaaaaagtgaataacattatattataataaaatatacgattatatatgatgtatcaattgtaatgncactgatgatgtcaan

SEQ ID NO: 84625 - DNA, 485 bp, Zea mays
  unsure (1)..(485): unsure at all n locations
gatattgnngaaggggagaggtggttccgatgcgtaagtgatgctatacccgtccggaattcccgggtcgacccacgcgtccgcccacgcgtccgcaacaagcaacatagaaagtggaatccagtagcaacaacagagcagcaatggcgaccaagatatgttccctccttatgctccttgctctttctgcatgtgttgctaacgcgacaattttccctcaatgctcacaagctcctatagcttcccttcttcccccataccttccatcaatgatagcttcagtatgtgaaaacccagctcttcagccctataggctccaacaagcaatcgcagcaagcaacatacctttatcacccttgttgtttcaacaatcgccagccctatctttggtacagtgagaggtacaaaccatcagggcacagaacatagaggagacttagtgctaactggagatcgggcaagggggagctggcaaaccgtttatt

SEQ ID NO: 84626 - DNA, 533 bp, Zea mays
  unsure (1)..(533): unsure at all n locations
tggagagaaggatctgtnnccccatgcctcnctacatccatgacgttccggattggaattgccggctcgacccacgcgtgcgctgcaagaaactggatgtctacgccatggctgtatacaaagcagaagcttgtagggcccgtgacagtgaacagcaccgacgtttgatgctccatgacaacgccgtacagtccttgacgacaggcgaaacttacatgtgtggactagctataatcgtgccgcgctccctcttgatgaaactgtacccgcaacaccgactcttggtcagctgaccatccgccttgttccttaactgttcacctttagcaggactacagctatgcattagacctgcgtttgctacaagatgttcaactagtgcatgtacatgtatatggatgcccacctcgcgtacgcgcaggtatgttcaattcacagaggaaacacaatagcatgtatgcagtgtttttcttaccacacatacaattggaaactataccccgatgaagcaaactgttttgggatcaaacctt

SEQ ID NO: 84627 - DNA, 518 bp, Zea mays
ggaggggagcttcgtccagcagccggggtgatgtatcgctctaccggttcggaattcccgggtcgacccacgcgtccgcggacgcgtgggtcctaccactaccacagcaccagcgacggaccgggcaggcggagaggaagcagaccagacgagacctctcgcgttccgtcctcctccctgcccctgctgccgttccccttcttcctcagttctcccgcccgctgctgccctccgtccgcgtccagatcccgccaccaaccgatccggcgccctccagcatggcgggggcgggggcgaaggcggcgggagccctggctctggcgctcgtgctcgcgctcgcgggggccaactcggagggcgacgcgctctcggcgctgcgccggagcctcagggaccccggcggcgttctgcagagctgggaccccacgctcgtcaacccctgcacctggttccacgtcacctgcgaccgcgacaaccgcgtcacccgcctagatcttggtaatttgaacttatctggt

SEQ ID NO: 84628 - DNA, 504 bp, Zea mays
  unsure (1)..(504): unsure at all n locations
gtgatattcnnnatatggagcgtgagcctgtgtctaatgatcacagaangtaactgctatgncgtaccggatcggaattcccggctggacccacgcgtgcgcgcttctcctccccctccggttccggttcgggtccgagaggttctccggagggcgggggcgtgcgtgagcgtatcgagatggcggcgtctgatgttgagataccgcttgattgtccgccgtctcacctgtgccacggacgaccactctctccacaacgcctttagcacctacagtgaggtcctcgactccaagatcatcctcgatcgggagacgcagatgtaccgcggcttccgcttcgtcaccttcttcacgggagacgcgatgcggaacgccattcgagggcatgaacggcaaggagctggtcgggcgtaggattagtggttaactagtgtgtgatttcgaagtgtgttgtgtgaggctgtagttggggggtttcagggataggcccgagggagtatagtg

SEQ ID NO: 84629 - DNA, 496 bp, Zea mays
  unsure (1)..(496): unsure at all n locations
gttattttgncaatggnagtagggtatgttctctaccgctgtactgtactgctatgnctgtaccggaccggaattcccgggtcgacccacgcgtccgtgctcctagttccattattccacagtttctcccaccagttacttcaatggccgtcgagcacccagctgtgcaagcctataggctacaacaagcgattgcggcgagcgtcttacaacaaccaattgcccaattgcaacaacaatccttggcacatctaacaatacaaaccatcgcaacgcaacagcaacaacagttcctaccagcactgagccacctagccatggtgaaccctgtcgcctacttgcaacagcagctgcttgcatccaacccacttgctctagcaaacgtagttgcaaaccagcaataacaatggctgcaacagattctgtcagcagcttagtagaatagtcatggtgaactcatgacgtgctgcctatcaacagcaacaaccaggttttt

SEQ ID NO: 84630 - DNA, 487 bp, Zea mays
  unsure (1)..(487): unsure at all n locations
agatttgnntatgnagagtgtcgatgatgcatagaacgcttcgcatgncgtaccggttcggaattcccgggtcgacccacgcgtccggatgatataaaggagactggctacacttacattatgccaaagaacatattggggaaaggcatatgcatagcgtatctgcggacacaaattgctggatttttgtatgggctgagtccacaggacaatcctcaagtcaaagagattaggtgtatagccatccctccacagcatggaacacaccagatggtgactcttccagcaaatcttcctgagcacgagttccttaatgatctagaacccttgggatggatgcatacacagccaaatgaagctccacagctatcgccacaagacctgacatcatatgccaatatttgggggaacaacattcaatgattatagatagaattgcagtgattatgacatgcgaggtnaatgatagggatcttgactagttgtn

SEQ ID NO: 84631 - DNA, 490 bp, Zea mays
  unsure (1)..(490): unsure at all n locations
gtgaattttnatatggagagcagggtctaatctcacggtgtattgtattgctcatacccgtccggaattcccgggtcgacccacgcgtccgcgcgtttagaacctctaaaatttcccccactcgccagtcgcagcagcacctgtagccgtggacgccagcggagccgatagcaaggggaagaagggtgcggccgggcgcaaggcaggcggccccaggaagaagtcggtgacgcggtccgtcaaggccgggctgcagttccccgtcggccggatcgggcgctacctgaagaagggccggtacgcgcagcgcgtgggcactggcgcccccgtctacctcgccgccgtcctggagtacctcgccgccgaggttctggagttggcagggaacgcggcgaaagacaacaataagacgcgcatgatcccgagccacgtgctagttgtaatccgtgacgacgaggagctagtataagctgctggcaggcgttaatcc

SEQ ID NO: 84632 - DNA, 485 bp, Zea mays
  unsure (1)..(485): unsure at all n locations
gatagtngnaaatggggtaggctaatttagtacagcagcgttatgctcatacctgtccggaattcccgggtcgacccacgcgtccgggacatgataacctcattggggaaattatccgtcttgagggcgattcagctacaatcgaagtttatgaggaaacagctggactgatggttaatgaccctgtattgagaacaagaaagcctctttcagttgaattgggacctggaattcttggaaacatttttgacggtatccagcgacctctaaaaaccatcgctattaagtcaggagatgtgtatattcctcgtggtgtttcagttcctgcccttgacaaagatgtattgtgggaatttcagccaacgaagctaggtgttggagatgtcatcacatgtggagatctatacgctactgttttggagaacacatagatgcaggtccatgttgagtcttacaccggnttctatgngggaaaatgagtttgc

SEQ ID NO: 84633 - DNA, 519 bp, Zea mays
  unsure (1)..(519): unsure at all n locations
agagagtgagatctcgannttccagtctcacgtcgcntatntcnttctaataaccggctggacccgcgcgtacgcgggcctggagatcgggttccacgtggttgagttctcgaaccccgtctacttcgcgtgacttgtggaatactaggactgcgacggcgacgtggtgcaggtggacctgatggagtccaagacggcgcgcggcccgccgacggggcggtggacgccgatgcgcgagtcctggggctccgtctggcgcatggacaccaaccaccgcatgcaggcgcccttctccatccgcatccgcaacgagtccggcaagacgctcgtcgtcaacaacgtcatcccggccaactggcgccccaacaccttctaccgctccttcgtccagtacagctagctgatcgggatgcctgccctgccctgccctgcccgcaattggagctggctgacgcttgggcgctactcggctcggtcaccaatgtctacaagtctttactatgcctttaatacccactg

SEQ ID NO: 84634 - DNA, 508 bp, Zea mays
  unsure (1)..(508): unsure at all n locations
ggagttttaagtgataataggnngntgggtagggggggnttttatcatggaatggacgagtatgggtatcctctccggaattcccgggtcgacccacgcgtccggcaaagcggcagtgcgtagagaggatcgtcgaacagaacagcatgaagatggtcatggttctcgtcgtgtgcctggctctgtcagctgccagcgcctctgcaatgcagatgccctgcccctgcgcggggctgcagggcttgtacggcgctggcgccggcctgacgacgatgatgggcgccggcgggctgtacccctacgcggagtacctgaggcagccgcagtgcagcccgctggcggcggcgccctactacgccgggtgtgggcagacgagcgccatgtaccagccgctccggcaacagtgctgccagcagcagatgagggttatggacgtgcagtccggtgggcaacagcgtgcagatgatgaatacaggtttgagcagtgccgcttgccgncaagaagtaa

SEQ ID NO: 84635 - DNA, 523 bp, Zea mays
  unsure (1)..(523): unsure at all n locations
atagaggaatccatccagnttccccagtccctcgatgcnatgncgtaccggttcggaattcccggctcgacccacgcgtcctcccacgcgtccacccacccattttcattatgcatcaacctaaccacaattggtggcagaatattatccctgcttgcgctacttgcgctttttgcgaacacaacatatgcgttcattattacacaatgctcacttacttctagttccattattccacagttcctcccaccagttacttcaatgaccttctaacacccaactgtgcaagcctataatctacaacaagcgattgcgacgaacgtcttacaacaaccaattgtccaatttcaacaacaatccttatcacatctaacaatacaaaccatcacaactcaacatcaacaacagtttctaccagcactgaaccacctagtcatgttgaacaccttttcctactttcaacaacatctacttgcattcaaccccccttctttttctaaccttattttctaaacaacctccc

SEQ ID NO: 84636 - DNA, 518 bp, Zea mays
  unsure (1)..(518): unsure at all n locations
nagtggtaagatctgagnttttngaccttcggtcgcatancgttcccattcgaattggagctgagcgcacgcatcctcggatgtcgaatcccgctactttcacttctgacatcctatcaccactgactgccacgtattatacaacacttgcgctacttacgcttattgccatcactacaaaagcatccattattgcacaacgctcacttgctgctacttccattattccacagtttctaccaccaattacttcaatagccttctaacacccatctacgcaagcctacttgctacaacaagcaattgcggcaaccatgttacaacaaccaattgcccaatagcaacaacaatccttggcacatctaacaatacaaaccatcgcaacgcaacatcaacaacagctcctaccagcactgagccacctcaccatggtgaaccctgtcggctacttgcaacagcaacttcttgcatccaacccacttgttttaacaaacaaaattttcaaacccacctaccac

SEQ ID NO: 84637 - DNA, 506 bp, Zea mays
  unsure (1)..(506): unsure at all n locations
ggtgggaggntntntncctcggatgcattcgtattacgtaccggtccggaattcccgggtcgacccacgcgtccgaagcaacatagaaagtggaatccagtagcaacaatagagcaacaatggcgaccaagatgttgtccctccttatgctccttgctctttctacatgtgttgctaacgcgacaattttccctcaatgctcacaagctcctatagcttcccttcttcccccataccttccatcaattatagcttcaatatgtgaaaacccagctcttcaaccatataggcttcaacaagcaatcgcagcaagcaacatacctttatcgcccttgttgattcaacaatcgccagccctatctttggtgcagccattggtacaaaccatcatggcacaacagctgcagcaactcgtgctacctttgatcaaccaagtagctctggcaaacctttgtccctactgtcagcaacaaccatttctttcaattcaacaactggttaccctt

SEQ ID NO: 84638 - DNA, 500 bp, Zea mays
  unsure (1)..(500): unsure at all n locations
gggaatattctgaaaagaaggggacagtatgcatgccccggttcggaattcccgggtcgacccacgcgtccgggcaagtcacaaattttcctattctttctacccttgctcgtgatgtgttgtctatgcaagtgtctactgttgcttcagagtctgcatttagttcgggtggacgcattgttgatgcattccgttcaagactcaaaccagaatttattgaggcattggtttgttgtaaagattggaagattgcttcggagaaagatttggagattgaaattaaaaccttaagtgaacctatgaatgacgttgacttggaggatgctgctgcaattggaacttgagaagttaaagttcaagttaccatggatgatgttgaacttgntacttattgntgtaatgttgttgaaccgaagtttgcttggtggttgggtggttgcaacttaatttcctaattgcgcctttttacctggacatgtaaatttatggtcactttctac

SEQ ID NO: 84639 - DNA, 499 bp, Zea mays
  unsure (1)..(499): unsure at all n locations
ngaaatttttttaattgaataatcgacgagattatctaccggtcatgaccgggttggaccaagccttccgccaacccatccaacagcgctctctaactttgcacacttgaacctcccgattgctgcggggggcaattcaactagaatcccagttgtgatgccactttcagccgcgatggcagcatgctcgcagttgctggtggccaggtatggcgagaagagtgatggtctcgtgacgaggaaagatgctgaggttcctggttcagtggcagtccggccggagcggaagctagaccacgcgtggatggtgtattcgtcgctgaaagaagagtctggggatcaggcggacacgtcgcaggtatgcgaagccctgctgactctacttgtcgaggttgcacaaaagaggacgcatgagatggcaatgaaagaccagtgaaagtagcttttggtgttggctggcgatagtgggaggttatcctctgtaatcgtaaactgcccc

SEQ ID NO: 84640 - DNA, 494 bp, Zea mays
aattttctgctagggggggagatatgctgccccggtccggaattcccgggtcgacccaagccttccgcggacccttggaatgggttgcgatgccccgtattgattcctaaggtccaggtcctcgggcgattgccttcccaaatacctgttgtccttaagggcagggttaaaccgacctatcccccacttgtcaaaaatggagacatgtgcattgtacttaatgcacaggatatcagtgttacatgaaggaaaatgaccgataagatttactattggcatacacggtatgttggccatttgaaggaaaggaggctcaaggaccagatggagaaagacccaactgaagtgatccgcaaagctgtgttgcgcatgcttcccagcatcatactgcgtgatgatagggatcgcatgctgaggatattttctggaaacgaacatccattccatgaccgccctatggaaccttatgtgatgccgtcacggcaagtacgcac

SEQ ID NO: 84641 - DNA, 498 bp, Zea mays
tattgtattcctaatagagaggaggaaagcatcgctctaccggtccggaattcccgggtcgacccacgcgtccgagaccaactagcaacatagaaagcacaatagtgtaccaacaatggcagccaaaatagggtgcttccttatgctccttggtctttctgcaagtgttgctaccgcaaccattttcccacaatgctcacaagctcctatagcttcccttcttcccccatacctctcaccagcggtgtcttcagtgtgtgaaaacccaattgttcaaccctacaggatccaacaggcaatcgcaacaggcatcttaccattatcacccttgttcctccaacaaccgtcagccctattacaagagttacccttggtccaattggtggcaccaaaccatcgaggcacaacaactacaacaacctgtgctagcaaaacctgctgcatactctcagccacatcagttcattcattcaacaactggctgcattgaactctgct

SEQ ID NO: 84642 - DNA, 502 bp, Zea mays
gggggaatgttctgttatgaggtagggtatagcatcctctaccggttcggaattcccgggtcgacccacgcgtccgaccaagcgaagcgcactagcaacgacctaacaccaatggctaccaagatattagcccggcttgcgcttattgcccttttagtgagcgcaacagatgcgttcattattccacagtgctcacttgctcctagtgccagtattccacagttcctcccaccagttacttcaatgggcttcgaacatccagccgtgcaagcctacaggctacaactagcgcttgcggcgagcgccttacaacaaccaattgcccaattgcaacaacaatccttggcacatctaaccctacaaaccattgcaacgcaacaacaacaacaacagtttctgccatcactgagccacctagccgtggtgaaccctgtcacctacttgcaacagcagctgcatgcatccaacccacttgctctggcgaacgtagttgcttaccacc

SEQ ID NO: 84643 - DNA, 496 bp, Zea mays
cagtgtgtcgccctccagttacttagcacgctgtaccggtccggaattcccgggtcgacccacgcgtccgcggacgcgtgggctgattcagtggaagagaaacagttgtcccaaggaaccaagaggggggcctagctgacctcccagcaactgtggctgctgtgaagaatcctaaccctaaggtggtttatgatgagtacaaccatgaaagatatcctcctggaaatcccagcaagcgtgcctttgcatactttgtcctgagtggtgtgaggttcatatatgcttcactgctgcatcttctcgtactgaatgatgtcctgagcatgtcagcaagcaaggatgtgcttgcccttgcttcacttgaggtggacctttccagtatccagccagtgaccacagtgaccgtgaaatggcgtgtaaagccagtctttatcaagcgtcagacagaggatgacatcaaacatgccaacagtgcggatgtagccatacctgcgcc

SEQ ID NO: 84644 - DNA, 497 bp, Zea mays
  unsure (1)..(497): unsure at all n locations
aggatgtgtgtctgcgatatgcaatgattgcatgctctaccggttcggaattcccgggtcgacccacgcgtccgcccacgcgtccgccctcgttcctgtcgcgcagccacgacctccacttccacatcttcgccggcggcggcgcggtcagttgaaccatggcggactccaaggccacctcggcggtcaccctccgcacccgcaagttcatgaccaaccgcctcctggcccgcaagcaattcgtgcttgaggtgatccaccccggccgcgccaacgtctccaaggcggagttgaaggagaggcttgccaaggcgtacgaggtgaaggaccccaacaccatctttgtcttcaagttccgcacccacttcggaggaggaaagtccactggtttcggcctcatctacgacaacctcgaggctgccaagaagttcgagccgaaataccgnctcatcaggaatggtcttgctactaagggtgagaagtcccgcaggcaaatg

SEQ ID NO: 84645 - DNA, 498 bp, Zea mays
  unsure (1)..(498): unsure at all n locations
nggaaaaggntatctgancataagagggaggaagagtatggctctaccggttcggaattcccgggtcgacccacgcgtccgcggacgcgtgggcggacgcgtgggcaagaaccgctttgagccggcattcgtgaggaacccgctgcaggcgatgaagaaggacaccctagaacgcgcccgggagcccaacttggatctgaaggcgtacctggccaactcgtacctgcacccggtgttcaagggggacgaaggcgacgacaggtactcggtgatggacgacgatgggtggatggaggaggaggtgatcgtgccgacgaagcggcattcgaggaggacgacgcccgcgcagagcaagcatgaagggtcggactcgctctctgtgctcgagagttctctacagcggtagtcacagtaggagcttagcctgtacagaatggatgaaaatgatcacggccctgctccattgcttttgctttggttgttggttggtcatgtcac

SEQ ID NO: 84646 - DNA, 494 bp, Zea mays
  unsure (1)..(494): unsure at all n locations
agtgntttcngcaataagagtgaggatggacagcatcgctctaccggaccggaaggctcggaccacgcgtgcgcggacgcgtgggcggacgcgtggggacgggcaaaatcctccgccggcgggtgagggcggagaggagccgcagctctcgaagaatgcgaagaagagagaggagaagaggaagaagctggaagaggagcggaggctcaaggaggaagagaagaagaacaaggctgcggctgccagtggaaaacctcagaaggcatctgctgctgacgatgatgacatggatcccactcaatactatgagaataggctcaaggctcttgattcactgaaggccacaggtgtaaacccctatccccataagttcccggttggcatttctgtacccgaatacattgagaagtacaggaccttgagcgagggggagaagcttacagatgtggcagagtgtttagctgggaggatcatgaaccagaaaacaatcgcgt

SEQ ID NO: 84647 - DNA, 619 bp, Zea mays
  unsure (1)..(619): unsure at all n locations
ngtgggagctgtttctggccctccgatattatctgctatgagcgtacccggtcctcggaattcccgggtcgacnccacgccgttcgcaggggcattcacccaggcccggcgatacccggaaggttggccttaggaaggggccggcgttaaaccccggttgtccgggctcaatctacgaggggagacccgcggtgggtgctcaagaaatctttcnntggagaaccgtcnnattcgtgacnngccgtcacctacccaccgagcacgcnnccgccgcaaggaaccgtnncaccgccatnnggatgtnnngtctacgcgctttcaaacgacaagggggccgcacccttctttacggctnntcggcgggctaaggggtcgcttccttcaatcnntggtggcnganacctgggcatgtnngttgtcngcnncggtnnggttgggtgttgtggtggccctttaatttnaagtctaagtcccccgttctctcttaattcgtcgcttgtngnnttctggtggtgggtcttgggtagtcccaatttccctgggcaatacccannacttgcncatnntatcanatnngaaaaaacccttcgtttntcatcccttcaaaaaaaaaaaaaan

SEQ ID NO: 84648 - DNA, 498 bp, Zea mays
  unsure (1)..(498): unsure at all n locations
ggagtggtctgagcctcatttggatgncatgacgtctcggtccggaattcccgggtcgacccacgcgtccgagcaaagctccatcaccttggcaggcttgtgtcacttgagatggggaaaattcttcctgagagggatcggtgaggttcaggaaatcatcgacatgtgtgattatgctgtggggctaagtcgccaactaaatggatccattataccatctgaacgaccaaaccatatgatgatggaggtgtggaatccccttggagttgtgggtgttataacggcatttaatttcccttgtgctgtgcttggttggaatgcttgcattgctttggtctgtggaaattgtgtcgtctggaaaggtgctccaacaactccactgatcactattgcaatgacaaaaatagtggctagtgtattggagaagaacaacttgccaggcgcaatttttacatctttttgtggnggcactgaaattggtcaagcaattgcccttga

SEQ ID NO: 84649 - DNA, 510 bp, Zea mays
gggggagagattgtcttcttcaccgcagaagaagtatgtcacactctaccggttcggaattcccgggtcgacccacgcgtccgtagcaacatagaaagcacaatagtgtaccaacaatggtagccaaaatattttgcctcgttatgctccttggtctttctgcaagtgctgctacgacgaccattttcccgcaatgctcacaagctcctatagcttctcttcttcccccatacctctaaccagcgttgtcttcagtatgtgaaaacccaattcttcaaccctacaggatccaacaggcaatcacagcaggcatcttacctttatcacccttgttcctccaacaatcatcagccctattacatcaattaccttcggtgcatttattggccacaaaacatcagggcacaacaacttctaaaacttgtgctagcaaaccttgctgcctacgctcaacaacaacagttaccttttgtgcaactggttggcacaaaacatcatggcacaaccacc

SEQ ID NO: 84650 - DNA, 508 bp, Zea mays
agggggagatgtgttttttcatgaaggaggggagaggagagtgatccgccccgaaatacttgctgggtcgacccacgcgtccgcccacgcgtccgcccacgcgtccgtcgcaacgcaacagcaacaacaatttctaccaggactaagccaactagctgtggtgaaccctgtcgcctacttgcaacagcagttgcttgcatccaacccacttgctctggcaaacatagttgcataccaacaacaacaacaattgcaacagtttctaccagcgctcagtcaactagccatggtgaaccctgccgcctacctacaacagcaacaactgatttcatctagccctctcgctgtggttaatgcacctacatacctgcaacaacagttgctgcaacagattgtaccagctctgactcagctagctgtggcaaaccctgctgcctacttgcaacagctgcttccattcaaccaactgactgtgtcgaactctgctgcgtacctacaacaacgacaa

SEQ ID NO: 84651 - DNA, 493 bp, Zea mays
ggaggagtgtatctgacctccgaatgattgctacgctctaccggtccggaattcccgggtcgacccacgcgtccgcccacgcgtccgcccacgcgtccgcgctcagggtctggctcgctatgccatcatctgggaggagaatggtctggtgccaattgttgagcctgagatccttgttgatggccctcatgacattgatcgctgcgcttacgtcactgagaccgtccttgctgcctgctacaaggcgctcaacgagcaccatgtcctcctggagggtaccctcctgaagcccaacatggtgactccaggctccgactccaagaaggtgacccctgaggtgattgctgagtacaccgtccgtaccctccagaggaccgtccctgctgctgtgcctgctgttgtcttcctctctggtggacagagcgaggaggaggccacccgcaacctcaatgccatgaacaagctcagcaccaagaagccgtggtcccttgtt

SEQ ID NO: 84652 - DNA, 498 bp, Zea mays
  unsure (1)..(498): unsure at all n locations
gggaagtgtgtgcttacgcctagccgtaggacgtaccggttcggaattcccgggtcgacccacgcgtccgattgctgccattcaaccaacttgctttgacaaacccaacagcattctaccaacaaccgatcattggtggtgccctcttttagatttcttatgagttatagttcaataataaagttttttgtctgatgtttgtggcttcccagaaataagaaagtacatttctaaaaaaaaaaaaaaagggaggccgctcgcgatctanaacccacgcgtacggttctagatcgcgagcggcctcccttgatgatcctcgttagaattgtactatcttatatgtgggatgcctcatactatcgacattaaacgctattacagatctataacctattggagatcttaaggaggccccccccttttatcggttcttggtggcatgccgttgagtttttttagcaagtttgttgaatttcagcaattgggctcccttgttcg

SEQ ID NO: 84653 - DNA, 505 bp, Zea mays
  unsure (1)..(505): unsure at all n locations
agaggagattgtcatcncctacttgcaacatagttgncattcctctaccccgtattcccgggttgaaccaagccttccgttccaaccccaacttccaaaggccgcatattcagccccgcccccatttcctattaaccggattgcccctgccaaataagggacccgttaattccccaactttaaaactcgtcatctccgcgaatgttgaacctgtaaaactaccttttttaaaaagcatctcactggagagtttgaaaattaatatggaccaaccattggtattgaaattcatccgttagatttcaacactaacctttgtaaaatcaaggtctacttcttggataccctacggcaagaaaaatttggtggccttaaggattgataccatattcattgccaatgttccatcattatgcttgatgtaaccttaaggcttacctaccagaatgatcctacctggcataaggaacctatgcaaggtcttttgaaacattcccatttgccc

SEQ ID NO: 84654 - DNA, 495 bp, Zea mays
aagtacttgctatgtaggggaaggtatgctgcaccggtccggaattcccgggtcgacccacgcgtccgcggacgcgtgggctgtttcagtagaagagaaacagttgtgccaaggacccaagatggggggctacctaacctctcagcaactgtggctgctgtgaagaatcctaaccctaaggtggtttatgatgagtacaaccatgaaagatatcctcctggagatcccagcaagcgtgcctttgcatactttgacctgagtggtgggaggttcatatatgctgcactgctgcatcttctcgtactgaagtgtgcactgagcatgtcagcacgcaaggatgtgcttgcccttgcttcactagaggtggacctgtccagtatcgagccaaggaccacagtgaccgtgaaatggcttggaaagccagtctctatcatgcgtcggacagaggatgacatcaagcttgtcaacagtgcggactgtgcatccatgcgcccg

SEQ ID NO: 84655 - DNA, 503 bp, Zea mays
  unsure (1)..(503): unsure at all n locations
nggaggagatgatgtcttcagaggaaggagggagatgatgctctaccggtccggaattcccgggtcgacccacgcgtccggaaaatctttcgtggacgaggataaacttgagctcgcaacttctcttattgagaaggggaatgcacagggggcttctcttttgcttcccactgatattgtagtagcggacaagtttgcagctgatgctgagagcaagattgtccctgccactgctatccctgatgactggatgggtctcgatgttggccctgattccaccaaaacattcaacgaatcattggacaccaccaagactgttatttggaacggccccatgggagtgtttgagttcgagaagtttgcaactggcactgaggcgattgccaagaagctagctgagcttacaaccacgaagggtgtcactaccatcatcggctgccacgactctgttgctgctgtctagaaagctaggctgtccgacaagatgaaccacattttgaccc

SEQ ID NO: 84656 - DNA, 504 bp, Zea mays
atgtttgtcgtataggggggtatatagcatcgctcgtaccggtccggaattcccgggtcgacccacgcgtccgagaccaacaagcaacatagaaagtggaatccagtagcaacaacagagcaacaatggcgaccaagatattttccctccttatgctccttgctctttctgcatgtgttgctaacgcgacaattttccctcaatgctcacaagctcctatagcttcccttcttcccccataccttccatcaatgatagcttcagtatgtgaaaacccagctcttcagccctataggctccaacaagcaatcgcagcaagcaacatacctttatcaacccttgttgtttcaacaatcgccagccctatctttgggtccagtaattggtccaacccaatcaggcaccaacacctgcaaccacctcgtcctacctgtgatcaaccaagtagctctggcaaacctttctccctactctcagcaacaacaatttcttccattcaaccaa

SEQ ID NO: 84657 - DNA, 495 bp, Zea mays
  unsure (1)..(495): unsure at all n locations
tggagactgtgtcntangctagcttcaccttacgnctctactggtctcggaattcccgggtcgacccacgcgtccgatcgagtacagccggctaggtaatctggtacgacgacccacgacgacatggcggcgggcgacgaccaccagcagcagcaagaagtcgtcgtcgccgtcgtcctcgagctcggcgcagcgggcagcagctgccgccctgctcgtggcggtgtccgtcctggtggtgggcgcggcggcggtgtgcgacatgagcaacgagcagttcatgtcgtgccagcccgcggcggccaagacgacggacccgccggccgcgccgtcgcaggcgtgctgcgacgcgctggcggtggcggacctcaagtgcctgtgcggctacaagaactcgccgtggatgggcgtctacaacatcgaccccaagcgcgccatggagctgccggccaagtgcggnctcgccacgccgtccgactgctagccaagccaaag

SEQ ID NO: 84658 - DNA, 505 bp, Zea mays
  unsure (1)..(505): unsure at all n locations
nggggggagtgctttctttgaaaggaggggggcagaggggatggcatctctcggtccggaattcccgggtcgacccacgcgtccgcaactagcaacatagaaagcacaatagtgtaccaacaatggcagccaaaatattttgcgttccttatgctccttggtctttctgcaagtgctgctaccgcaaccattttcccacaatgctcacaagctcctatagcttcctttcttcccccatacctctcaccagcggtgtcttcagtatgtgaaaacccaattcttcaaccctacaggatccaacaggcaatcgcagcaggcatcttacctttatcacccttgttcctccaacaaccgtcagccctattacagcagttacctttggtgcatttgttggcacaaaacatcaaggcacaacaactacaacaacttgtgctaggaaaccttgctgcctactctcagcaacagcagtttcttccattcaaccaactggctgcattgaactctg

SEQ ID NO: 84659 - DNA, 500 bp, Zea mays
  unsure (1)..(500): unsure at all n locations
ggaagggtgtcctaaaggggaagatcgattggcatcctccggtccggaatttccgggttggaccaacccgtccgtagcaccatagaaggcacattagtgtaccaacaatggcagccaaaatatttggcttcgtggtgctccttggtctttctgcaagtgttgctaccgcaaccattttcccacaatgctcacaagctcctatagcttcccttcttcccccatacctctcaccagcggtgtcttcaatgtgtgaaaacccaattgttcaaccctacaggatccaacaggcaatcgcaacaggcatcttaccattatcacccttgttcctccaacaaccgtcagccctattacagcagttacctttggtccatttggtggcacanaacatcagggcacaacaactacaacaacttgtgctagcaaaccttgctgcatactctcagcaacatcagtttcttccattcaaccaactggctgcattgaactctgctgcttatttg

SEQ ID NO: 84660 - DNA, 497 bp, Zea mays
  unsure (1)..(497): unsure at all n locations
ttgtttctgacctagtcagatatcatgctctaccggtccggaattcccgggtcgacccacgcgtccgcgactgcagattggagaactcgacaccatgaacgtgctgatcgttgcccttgctctcggggcgctcgctgcgagcgccgcctccagtacaagcggcggctgtggctgccatacaccaccgtttcatctaccgcctccgttctatatgccgcctccgttctatctgccgccgcatcagcagccgcagccatggcaataccccactcaaccaccgcagctaagcccgtgccagcagttcggatcctgcggcgtccgcagcgtcggcagcccgttcctgggccagtgcgtcgagttcctgaggcaccagtgcagcccggcggcgacgccctacggctcgccacagtgccaggcgctgcagcagcagtgctgccaccagatcaggcaggttgagccgatgcaccggtaccaggcgacatacggtgtggtcctcn

SEQ ID NO: 84661 - DNA, 500 bp, Zea mays
  unsure (1)..(500): unsure at all n locations
gaatgtgtgtcggctcagtctactaagtacgncgtaccggtccggaattcccgggtcgacccacgcgtccgcgtccgcctcagcccgccgcaaggagaggtaagttcaggagacatcttcgagaagcggaaatggctcctaaagctgctcctgccaagaagggtgatgccaagacccaggccttgaaggttgccaaggctgtgaagtctggggcagccaagaagaagaccaagaagatccgcacgtctgtgacatttcaccgccccacgaccctgaagaaggctagggaccccaagtacccacgaatcagcactaccggaaggaacaagcttgatcagtaccaaattcttaagtaccctcttaccacagaatcagcgatgaaaaaaaatgaagataacaacactctggtcttcattgttgacctcaaggcagacaagaagaagatcaaggctgccgtcaagaagatgtatgacatccaggcaaagaaggtcaacaccttg

SEQ ID NO: 84662 - DNA, 493 bp, Zea mays
  unsure (1)..(493): unsure at all n locations
gagggaggtgtcttttatgtaggggggatgatatancatctctcggtccggaattcccgggtcgacccacgcgtccgcccacgcgtccggagagaaaggacgctgctgagaacacgatggtggcatacaaggctgcccaggacattgctctggctgagcttgctccaactcaccctattaggcttggactggcacttaacttctcagtgttctactatgagattctgaactcacctgatcgcgcctgcagtcttgcaaagcaggcttttgacgaggccatctcggaactggacaccctgagcgaggagtcctacaaggacagcactttgatcatgcagctccttcgtgataacttgaccctatggacttctgacatctcggaggaccctgctgaagagattagggaggcacccaagcgcgactcgagtgaggggcagtaaagccggctttatgtgcctagaaactagtagctagtgtttgctgctgtcgaatg

SEQ ID NO: 84663 - DNA, 490 bp, Zea mays
  unsure (1)..(490): unsure at all n locations
acggtgtcntcaattagcgggaggatagtattgctctccnggtccggaattcccgggtcgacccacgcgtccgcggacgcgtgggctagccttcacttctcagcacggcagccttcgacccccgactgcagccgccagccgcgccatggagcaagccgccatgccgcaggttccccgcgtcaagctcggcatccaggggcttgaggtgtcgaagctggggttcgggtgcatggggctcacgggcacctacaacgcgccgctcggcgacgaggccgtggccgccgtcgtcgcgcacgccttccgccgcgggatcaccttcttcgacacctccgatgcctacgggccccgcaccaacgagaccctcctggggaaggcgctcaagcagctgccgagggagcaggtgcaggtggccaccaagttcgggataggtcagggcgccgctggcatgaccgtgtgcggcacgcccgagtacgtacgcgcctgctgcgag

SEQ ID NO: 84664 - DNA, 506 bp, Zea mays
  unsure (1)..(506): unsure at all n locations
gagtaatgtatctgncctacgatatgatagtagncatctctcggtctcggaattcccgggtcgacccacgcgtccgcaaacgcccaatcacaacaacaatccttggcacatctaaccatacaaaccatcgcagcgcgagcatcaacaagcactgagccacctagccgtggtgaaccctatcgcctacttgcaacaacagctgcttgcatccaacccacttgctttggcaaacgtagctgcataccaacaacaacaacagttgcaacagtgtctgccagcgctcagtcaactagccatggtgaaccctatcgcctacctacaacagcagcaacttctttcatctagcccgctcgctatgggcaatgcacctacatacctgcaacaacagttgttgcaacaaacaggtgctgaacaaaattgtaccagctcttactcagctagctgtggcaaaccctgctggctacttgcaacaactacttgcattcaaccaacttactgggtcgaac

SEQ ID NO: 84665 - DNA, 498 bp, Zea mays
ggagggtctctatgcggaggagaagcatgctctaccggtccggaattcccgggtcgacccacgcgtccgcgcaaattgcaccaagaaatccatcgagaggccgtcgacaggggaattaatggcgggggcgtctagcagcagccaccgccgcctcatcctcgcagccgccgtcctgctctccgtgctcgcggctgccagcgccagcgccgggacctcctgcgtgccggggtgggccatcccgcacaacccgctcccgagctgccgctggtacgtgaccagccggacctgcggcatcgggccgcgcctaccgtggccggagctgaagaggagatgctgccgggagctggcggacatcccggggtacttggccgtgcaccgggcttgagcattcctatggacggctcggatcccgccggccccggacgctcagcttgagggcccgtctagaggaactgtcgggctacccgcgcgaaagtgcataggggaattcgcctcccc

SEQ ID NO: 84666 - DNA, 502 bp, Zea mays
  unsure (1)..(502): unsure at all n locations
nggatgtatgtcnctagtgggaaagaaaggatggctctaccggtccggaattcccgggtcgacccacgcgtccggagagacaggagtgaaggaaagaagcataagggtggctcttcaggagctggatctggggttctcgtgccccttcaactttcggatgatttagtaaaatttatcggcactggtgagagcatgttatcacgatctgatgtcgtgaagaaaatgtgggattacataaaagggaacaacctgcaggatccttctgaccggaggaaaataatctgcgatgagaagctgaaggacctatttggagtggaaacattcaccggctttactgtttcgaagctgcttgcccctcattttaccaagacgaagtagcaacctgccatccacatcttctaaaaccaaaaaggcttggtaattttgtttttgcagaatgtgtaatcatggaacagttaggagctatgtgggtggtgtgaatttttttttggttacctatggg

SEQ ID NO: 84667 - DNA, 485 bp, Zea mays
  unsure (1)..(485): unsure at all n locations
agtttcgttctatagcacatagctcgnctctccctggttcggaattcccgggtcgacccacgcgtccgcccacgcgtccgcggagaagttggacccaagaccattcatgttcctactggggagaaggtttctgtttttgatgcggccatgagatacaaatctgagggccatgctactataatcctcgctggtgctgagtatggaagcggcagttctcgtgattgggctgctaagggtccgatgctcctgggagttaaagctgtaattgccaagagctttgagcgtatccacagaagcaacttggtggggatgggaatcattcctctgtgcttcaaagctggtgaggatgctgattcgcttggcctcactggacatgagcggtacagcatcgatctccctaccaacctcagtgagatccgtcccggccaggatgtgactgttactaccgacaatgggaaatctttcacttgcatcgntcgctttgn

SEQ ID NO: 84668 - DNA, 483 bp, Zea mays
  unsure (1)..(483): unsure at all n locations
nagcttcgtgctaccagaaaaagntcgcactacggtccggaattcccgggtcgacccacgcgtccgggcgtcgtcgtctagcagcagccaccgccgcctcatcctcgcagccgccgtcctgctgtccgtgctcgcggctgccagcgccagcgccgggacctcctgcgtgccggggtgggccatcccgcacaacccgctcccgagctgccgctggtacgtgaccagccggacctgcggcatcgggccgcgcctcccgtggccggagctgaagaggagatgctgccgggagctggcggacatcccggcgtactgccggtgcacggcgctgagcatcctcatggacggcgcgatcccgccgggcccggacgcgcagctggagggccgcctagaggacctgccgggctgcccgcgggaggtgcagaggggattcgccgncaccctcgtcacggaggccgagtgcaacctggccaccatcagcggcgt

SEQ ID NO: 84669 - DNA, 499 bp, Zea mays
aattatgtcacctactgaataaagtagtatctcccggtccggaattcccgggtcgacccacgcgtccggcgaagcgcactagcaacgacctaacaccaatggctaccaagatattagccctccttgcgcttcttgcccttttagtgagcgcaacaaatgcgttcattattccacagtgctcacttgctcctagtgccattattccacagttcctcccaccagttacttcaatgggcttcgaacatccagccgtgcaagcctacaggctacaactagcgcttgcggcgagcgccttacaacaaccaattgcccaattgcaacaacaatccttggcacatctaaccctacaaaccattgcaacgcatcaacaacaacaacagtttctgccatcactgagccacctagccgtggtgaaccctgtcacctacttgcaacagcagctgcttgcatccaacccacttgctctggcgaacgtagctgcataccagcaacaacaacg

SEQ ID NO: 84670 - DNA, 504 bp, Zea mays
  unsure (1)..(504): unsure at all n locations
gatatgtgttgtcgtaagaaggggagagaggggagagcattgctccggtccggaattcccgggtcgacccacgcgtccgagcatccctttctttgagatggttgaagtgtacaactctttgagcgaggaaggcaaaggggagttcaacaaggcttatagcgcatcgttttacccatgcatggatatactctacgaatgctatgaagatgtggcctctggaagtgaaatccggagcgtggtgttggctgggcggaggttttatgagaaagagggcctcccagcttttccgatgggcaacatcgaccaaactcgcatgtggaaggttggtgaaaaggtgcgctcaacccgtccggaaggtgatcttggcccgctccatgccttcactgctggagtgtacattgccctgatgatggctcagattgagatcctgaggaagaaagggcactcctactctgagatcatcaacgagagcgtgattgagtcngtggactcgctgaacccgtn

SEQ ID NO: 84671 - DNA, 494 bp, Zea mays
attatatcttcattgcaagaagatagcatcgctctaccggtccggaattcccggtcgacccacgcgtccgcccacgcgtccgcaacaacaactaccattcagtcagctagctgctgcctacccggaggagtttcttccattcaaccaactggcatcattgaactctgctgcttatttacaacagcaacaactaccaccattcagccagctagctgatgtgagccctattgccttcttgacacagcaacacttgttgccgttctacctgcacgctgcacctaacgctgtcaccctcttacaactgcaacaattgctgccattcaaccaacttgctttgacaaacccaacagcgttctaccaacaacccatcattgctggtgccctcttttaaattgcttatgagttatagttcaataatgaaattttttggatgatgtttgtagctatccagaaataaaaaagtacatttctagatcttaaaaaaaaaaaacaat

SEQ ID NO: 84672 - DNA, 502 bp, Zea mays
tatgtgtcttggaagagggaggacgaagtatcctctaccggtccggaattcccgggtcgacccacgcgtccgcccacgcgtccgcccacgcgtccgggcggaccaggtaagcagcagcaggaaccctaggaccgccgcatccgcagccatgggtatcgacctcgttgccggtgggaggaacaagaagaccaagcgcacagcgccgaagtccgacgatgtttatctcaagctccttgtcaagctctaccgtttcttggtcaggaggaccaagagcaacttcaatgctgtcattctcaagaggctcttcatgagcaaaaccaatcgcccaccaatctccatgcgccgccttgtcaagttcatggaaggaaaggagaagaacattgctgtgattgttggcacagtcacagatgacaagaggatccaagaggttccagcaatgaacgttactgccctgaggttcaccgagactgctagggccaggattgtcaatgctggtggggag

SEQ ID NO: 84673 - DNA, 512 bp, Zea mays
aagtgttttgttcggcttcacttcgcattacagtactgccgtaccggtctcggaattcccgggtcgacccacgcgtccggcttcgaacacctagctgtgcaagcctacaggctacaacaagcgcttgcggcgagcgtgttacaacaaccaattaaccaattgcaacaacaatccttggcacatctaaccatacaaaccatcgcaacacaacagcaacaacagttcctaccagcactgagccaactagatgtggtgaaccctgtcgcctacttgcaacagcaggtgcttgcatccaacccacttgctctggcaaacgtagctgcataccaacaacaacaacaattgcaacagtttctgccagcgctcagtcaactagccatggtgaaccctgccgactacctacaacagcaacaactgctttcatctagccctctcgttgtgggtaatgcacctacatacctgcaacaacaattgctgcaacagattgtaccaactctgactcagctaggtgg

SEQ ID NO: 84674 - DNA, 498 bp, Zea mays
  unsure (1)..(498): unsure at all n locations
taggggtgaaggtgtcntagctaccgaaatatagctacgactctacnggtccggaattcccgggtcgacccacgcgtccgcccacgcgtccggagaccaacaagcaacatagaaagtggaatccagtagcaacaatagagcaacaatggcgaccaagatattttccctccttatgctccttgctctttctgcatgtgttgctaacgcgacaattttccctcaatgctcacaagctcctatagcttcccttcttcccccataccttccatcaatgatagcttcagtatgtgaaaacccagctcttcaaccctataggctccaacaagcaatcgcagcaagcaacatacctttatcacccttgtttcaacaatcgccagccctatctttggtgcagtcattggtacaaaccatcagggcacagcagctgcagcaactcgtgctacctgtgatcaaccaagtagctctggcaaacctttctccctactcttagcaacaaca

SEQ ID NO: 84675 - DNA, 495 bp, Zea mays
  unsure (1)..(495): unsure at all n locations
agagaagtctctcgtcccatcgattagggaagtatgcactnatggaccggaattcccgggtcgacccacgcgtccgcagtccagcactggggcatagccgtcaagtttgctgagctcattaccaagatcgacaggcggtctggcaaggagcttgagaaggagccaaagttcctgaagaacggtgatgctggtatggtgaagatgataccgaccaagcccatggtggtggagacgttctcagcgtatcctccccttggtaggtttgctgtccgtgacatgaggcagacggttgctgttggagttatcaagagtgtggagaagaaggacccgaccggcgccaaggtgaccaaggcggctgccaagaagaaatgatgcgatcctgcgcctgctttagcaatacctagttttcatcatcacaagttttgtttgtgatcgttgctgttatcgtgtgaactgttgagatctgttagcatgtgcacttttatctatttattt

SEQ ID NO: 84676 - DNA, 494 bp, Zea mays
  unsure (1)..(494): unsure at all n locations
ggagtntgtcncttcatgaagggtgattatatgcacgctcggaccggaattcccgggtcgacccacgcgtccgctcgtcccaagatgaaggtgtgcatgcttggtgatgcccagcatgttgaggaggccgagaagatgggacttgactacatggatgttgaggctctcaagaaaatgaacaagaacaagaagcttgttaagaggcttgccaagaagtaccatgctttcttggcatcagaggccatcatcaagcagattccccgtctccttggtcctggtctcaacaaggcaggcaagttcccgaccctggttactcaccaggaatccctcgagtccaaggtgaacgagactaaggcaacagtcaagttccagctcaagaaggtcctttgcatgggtgtcgccgtcggcaacttggcgatggaggagaagcagatccagcagaacatccagatgagcgtcaacttccttggttcccttctgaagaaagacttgcn

SEQ ID NO: 84677 - DNA, 507 bp, Zea mays
  unsure (1)..(507): unsure at all n locations
aatggtntgtactcgcctccactcnncgtagtacnaccgtaccggtctcggaattcccgggtcgacccacgcgtccgcggacgcgtgggccttgatcctcctggaaatacaggacaccctgaagtcacctgcgggcgagaacaagacgatgaagagggcgtcgatgatctcgatcctcgtcacgacattcttctacctctgctgcggctgcttgggctacgccgccttcggcagcgacgcgccgggcaacctccttaccggcttcggcttgtacggtccgtactggctcatcgacttcgccaacgcgtgcatcatcctccacctgctgggcgggtaccaggtgtacagccagccgatattccagttcgcggagcggctcttggcggagcggttcccggacagcgggttcgtgaacggcggctcctacaccgtccggttcgcgtgcctgcaggcgtgccgggcgaactccgataccgtgtccctactgactcatgacgaggccatccc

SEQ ID NO: 84678 - DNA, 509 bp, Zea mays
  unsure (1)..(509): unsure at all n locations
taggnnnnnnnnnaattgatgcagccctcagtaacgccgtaccggttcggaattcccgggtcgacccacgcgtccgggcaatcgcaacaggcatcttaccattatcacccttgttcctccaacaaccgtcggggctattacaagagttacctttggtccatttggtggcacaaaacatcagggcacaacaactacaacaacttgtgctagcaaaccttgctgcatactctcagcaacatcagtttcttccattcaaccaactggctgcattgaactctgctgcttatttgcaacaacaactaccattcagccagctagctgctgcctacccccagcaatttcttccattcaaccaactagcagcattgaactctgctgcttatttacagcagcaacaactactaccattcagccagctagctgatgtgagccctgctgccttcttgacacaacaacagttgttgccgttctacctacacgctatgcctaacgcttgcaccctcttacan

SEQ ID NO: 84679 - DNA, 487 bp, Zea mays
  unsure (1)..(487): unsure at all n locations
ctggtatgtttttagccttgattcncgctacgctctactgttcggattcccggtcgacccacgcgtccgcaaccagttctctttgatgaatcctgtcttgtatggcagcaattgttgctgctgtaggagaggcggtgaccaatgggttagccactaccaatggattaagtaactgctgtctctgttgtaggtactcagcatagttcgacagagtcagttggttgaatggaagcagctgttgcaagtaggcaatagggtttgccacagcagcaacatttgctgccttacaaccagatctctatgatgtatcctatgttgccgaggcatcatcccatcgttggaggtgccattttttagattacatatgatatgtactacattacggtgccctcctaccgacatgtgtttactagatgtaatcaataaatgcgatttagatttattaaataacttcattttatctattgtattctctattggctgcacc

SEQ ID NO: 84680 - DNA, 491 bp, Zea mays
gggggaggtgttgtcatagcgggcgatagttaggctctaccggtccggaattcccgggtcgacccacgcgtccgatccagatcagcaaagcggcagtgcgtagagaggatcgtcgaacagaacagcatgaagatggtcatcgttctcgtcgtgtgcctggctctgtcagctgccagcgcctctgcaatgcatatgccctgcccctgcgcggggctgcagggcttgtacggcgctggcgccggcctgacgacgatgatgggcgccggcgggctgtacccctacgcggagtacctgaggcagccgcagtgcagcccgctggcggcggcgccctactacgccgggtgtgggcagacgagcgccatgtaccagccgctccggcaacagtgctgccagcagcagatgaggatgatggacgtgcagtccgtcgcgcagcagctgcagatgatgatgcagcttgagcgtgccgctgccgacagcagcagcctgtacga

SEQ ID NO: 84681 - DNA, 512 bp, Zea mays
  unsure (1)..(512): unsure at all n locations
nggaaggatcntcatgggggagattgtatgctctaccggtccggaattcccgggtcgacccacgcgtccgggcatgaaagcagctgaacttcatggcaccttacccaagcccaacggcttgaggctgtggaacttttcaagaaaaaagaagtagattttttgattgcaactgatgtcgctgctcgtgggattgatattgttggtgttcagactgtaataaatttcgcatgcccaagagatgtgaaaacttatcttcatcgtgttggccgcactgcgcgggcaggaagagaaggctatgctgtgacatttgtaaccgatgatgatagatgcctcttgaaagcaattgcaaagaaggctggttcacagctgaaaagtcgcattgttgcagagaaacctgtggctgagtgtgcacgactgattgagcaactagaaggccaaatttctatcatcattcgagaagaaagggttggaagagaagcaagaaaagcctgaatggaaattcanaggccgaa

SEQ ID NO: 84682 - DNA, 517 bp, Zea mays
  unsure (1)..(517): unsure at all n locations
gggattatcttcatagtgggggaggaaagcatccccggntcggaattcccgggtcgacccacgcgtccgcccacgcgtccgtaccgcaccaaccccttgtgggcgtctcccgttgcatttccgccctactgctgattcatgatattggggaaaactcctctatccatctctctctatctatatatgtaataatgcagtaagacgacacacattatcatgtgtggtatgaccaataatatatgcatggtcataataaagttttggttttaatgaatctatcggccgcttgatgtctatgatggacaaaaaaaaaaaaaaaaaagggcggccgctctagaggatccaagcttacgtacgcgtgcatgcgacgtcatagctcttctatagtgtcacctaaattcaattcactggccgtcgttttacaacgtcgtgacttgggaaaaccctggcgttacccaacttaatcgccttgcagcacattcccctttcgccagctggcgtaatatcgaaaaggccc

SEQ ID NO: 84683 - DNA, 515 bp, Zea mays
ggaagtgtattcgcctacgcacacgtcagcacgccgtaccggttcggaattcccgggtcgacccacgcgtccgcttcccccgtacctctcaccagcggtgtcttcggtatgtgaaaacccaattctgggacgctacaggatccaacaggcaatcacagctggcatcttacctttatcacccttgttcctccaacaatcatcagccctattacatcagttacctttggtgcatttattggcacaaaacatcagggcacaacaactacaacaacttgtgctagcaaaccttgctgcctactctcagcaacagcagtttcttccattcaaccaactagctgcattgaactctgcttcttatttgcaacaacaacaactaccattcagccagctacctgctgcctacccccagcaatttcttccattcaaccaactggcagcattgaactctcctgcttatttacagcagcaacaactactaccattcagccagctagctggtgtgagccctggtacct

SEQ ID NO: 84684 - DNA, 521 bp, Zea mays
  unsure (1)..(521): unsure at all n locations
gttgaggtgttttaaccacggaactcatcgatagcacactctaccggtccggaattcccggctcgacccacgcgtgagctttcaaaaccacaccaagcgaagccctttaccaccaacctaccaccaatggctgccgggatattatccttccttgcgcttcttgcgctttttgcaagcgcaccaaatgcgttcattattccacaatgctcacttgctccaagttccattattacccagttcctccaaccagttacttcaatggccttcaaacacccagttgtgcaagcctataggctacaacaggcaattgcggcgagcgttttacaacaaccaatttcccagttgcaacaacaatccttggcacatctaacaatacaaaccatcgcaacgcaacagcaaccacaattnctaccagcactgagccacctagccatggtgaaccctgccgnctacttgcaacagcaagtgcttgcatcaaacccacttgctctggcaaacgtangtgcaaaccaagcacacca

SEQ ID NO: 84685 - DNA, 511 bp, Zea mays
  unsure (1)..(511): unsure at all n locations
agtgtatcttaagcggaggtgaaagcatcgctctaccggtccggaattcccgggtcgacccacgcgtccggttggcttctcctccccctccggttcgggttcgggttcgtgaggttctccggggttcgggttcgtgggtgagcggatcgagatggcggcgtcggatgttgagtaccgctgcttcgtcggcggcctcgcctgggccacggacgaccactccctccacaacgccttcagcacctacggcgaggtcctcgagtccaagatcatcctcgatcgggagacgcagaggtcccgcggcttcggcttcgtcaccttctccacggaggaggcgatgcggaacgccatcgagggcatgaacggcaaggagctggacggccgcaacatcaccgtcaacgaggcccagtcccgcggcggccgtggaggcggcggcggtgggtacggtggtggccgtggaggccgcggctaccgcngtgggcggccccgtgatggcggtggccggtatccgggg

SEQ ID NO: 84686 - DNA, 495 bp, Zea mays
  unsure (1)..(495): unsure at all n locations
gatgtgtgtctgagctaccgaatatactgcaggncatanccntcggntnnnnnnncggccggagcgcacgcgtgcgagtgagaccaactagcaacatagaaagcacaatagtgtaccaacaatggcagggaaggtattttgcctccttatgctccttggtctttctgcaagtgctgctaccgcgaccattttcccgcaatgctcacaagctcctatagcttcccttcttcccccgtacctctcaccagcggtgtcttcggtatgtgaaaacccaattcttcaaccctataggatccaacaggcaatcgcagctggcatcttacctttatcacccttgttcctccaacaatcatcagccctattacagcagttacctttggtgcatttattggcacaaaacatcagggcacaacaactacaacaacttgtgctagcaaaccttgctgcctactctcagcaacagcagtttcttccattcaaccaactagctgcatt

SEQ ID NO: 84687 - DNA, 500 bp, Zea mays
  unsure (1)..(500): unsure at all n locations
gggagcgtgtctgtgtataacgacggggatgtattagcacnnccgtnccggtccggaattcccgggtcgacccacgcgtccgatctacttctcctagagatcaatggtctggtatctgaagtcaagcagatcttacctggtatggttcggcgacatcggcattcagatagcactggtagcacgacttcctccagaagcaatccaatgcgagaagacatgttgaaccgatcaaacacacatcgtgctagaagtcagtttttagaaaatcacctggcaaagttatttgagcaaaaaatggaaatattcaccaaagttgaatacacacaggaatctgttatttctactgtcctcaagctctgcctgaaaagcttgcaagaatttgtccgtcttcagactttcaacagaagtggatttcagcagattcagctggatatggaatttctcaagacctctcttaaggaatttgtggatgatgaagcagccattagctttttactcaa

SEQ ID NO: 84688 - DNA, 490 bp, Zea mays
ggggagcgttcgtccatgctagttcatacgtacgacgtaccggtccggattcccgggtcgacccacgcgtccggtgcaagccaacatgcaacaacaagcgcttgcggcgagcgtcttacaacaaccaattgcccaattgcaacaacaatccttgccacatctaacaatacaagccatcacaacgcaacagcaacaacagttcctaccagcactgagccacctagccatggtgaaccctgccgcctacttgcaagagcagctgcttgcatccaacccacttgctctggcgaacgtagttgcaaaccagcaacaacaacagctacaacagtttctgccaacgctcagtcaactagccatggtgaaccctgccgcctacgtacaacaacaacaactgctttcatctagcccgctcgctgtgggcaatgcacctacatacctgcaacaacaattgttgcaacagattgtaccagctctgactcaactagctgtg

SEQ ID NO: 84689 - DNA, 524 bp, Zea mays
ggtttagctgtgtctgataaagaggaaggggaaattatgctcgactcggttggaattcccggctcgacccacgcgtccgcccacgcgtccgcggacgcgtgggtcagcattcaaaaacacaccaagcgaagcgcacgagcaacgacctaacaccaatggctaccaagatattagccctccttgcgcttcttgcccttttagtgagcgcaacaaatgcgttcattattccacagtgctcacttgctcctagtgccagtattccacagttcctcccaccagttacttcaatgggcttcgaacatccagccgtgcaagcctacaggctacaactagcgcttgcggcgagcgccttacaacaaccaattgcccaattgcaacaacaatccttggcacatctaaccctacaaaccattgcaacgcaacaacaacaacaacagtttctgccatcactgagccacctagccgtggtgaaccctgtcacctacttgcaacagcagctgcttgcattcaacccacttgctctg

SEQ ID NO: 84690 - DNA, 521 bp, Zea mays
ggagaagcgtttcttttacggggggggttattgcatgctctaccggtccggaattcccgggtcgacccacgcgtccgcatcgcctcggacagcggctccagaacctccgcgttgcagaaacacagtagcgagaactattcggtggggccgaagatggtgtcgctgaaggtgccaaagcgcctcgccgcaagcgttctcaagtgtgggaaaggcaaagtgtggcttgaccccaatgaagttagtgagatctccatggcgaactcccgccataacatccggaagttggttaaggatgggtttatcatcaagaagcctcagaaaatccactctagatctcgtgcaagaagggcgcacgaggctaagcagaagggacggcactcaggatatgggaagcgtagaggtaccagggaggctaggctccccaccaaggtactgtggatgaggaggatgcgcgtgctgaggcgcctgctccgcaagtaccgcgaggccaagaagatcgacaagcacatggtccacgataa

SEQ ID NO: 84691 - DNA, 509 bp, Zea mays
agtgttcaatggggagaagagagaagctctaccggtccggaattcccgggtcgacccacgcgtccgaactagcaacatagaaagcacaatagtgtaccaacaatggcagccaaaatattttgcctccttatgctccttggtctttctgcaagtgctgctacggcgaccattttcccgcaatgctcgcaagctcctatagcttcccttcttcccccgtacctctcaccagcggtgtcttcggtatgtgaaaacccaattcttcaaccctacaggatccaacaggcaatcacagctggcatcttacctttatcacccttgttcctccaacaatcatcagccctattacatcagttacctttggtgcatttattggcacaaaacatcagggcacaacaactacaacaacttgtgctagcaaaccttgctgcctactctcagcaacagcagtttcttccattcaaccaactagctgcattgaactctgcttcttatttgcaacaaccaccacc

SEQ ID NO: 84692 - DNA, 515 bp, Zea mays
agctgtgtcgactgcagcatgtatgtaggacgtaccggtttcggaattcccggctgcgagccacgcgtccgagctactgcctactctcagcagctacaatttcttccatttaaccaattcaccggactggacccctgtgcttatttccagcagcaaatactactaccatttggccagctagctacaacaagccccgcttccttcttgacacaacaacaattgcttccgttctaccagcaatttgtggctaaccccacaacccttttacaacttcaacaattgctgccctttgtccaacttgctttgacaaacccaacaaccttttaccaacaacacatcattggccgtgccctcttttaaattgcttattaactgccattcaataatgaagttttctggcttgatgtatgtagcctcctagaaatcaaaaagttattttccaaaacatacaacccaaatgcttttgaaggtttaaaatgctttgcatagccctgttaaaaggggggcccttttaa

SEQ ID NO: 84693 - DNA, 491 bp, Zea mays
  unsure (1)..(491): unsure at all n locations
agtgcttcnttcatagcgagggtgtaagcacactctaccggtccggaattcccgggtcgacccacgcgtccgcaatgctcacttgctccgagtgccattattccacagttcctccctccagttactgcagtgggcttcgaacacccagctgtgcaagcctataggctacaacaagcgcttgcggcgagcgtcttagaacaaccaattgcccaattacaacaacaatccttggcacatctaaccatacaaaccatcgcaacgcagcagcaacaagcactgagccacctagccgtggtgaaccctatcgcctacttgcaacaacagctgcttgcatccaacccacttgctttggcaaacgtagctgcataccaacaacaacaacagttgcaacagtttctaccagcgctcagtcaactagccatggtgaaccctatcgcctacctacaacagcaacaacttctttcatctagcccgctcgctatgggcaatgn

SEQ ID NO: 84694 - DNA, 490 bp, Zea mays
ggaggagcttcgtccatgatatagaattattgcatgctctaccggtccggaattcccgggtcgacccacgcgtccgggcaccgtcggtgttcagtgtgcgcaacatcgggaagactctcgtatccaggacacagggtaccaggattgcttctgagggtctgaagcacagagtctttgaggtttgcctagctgatcttcagggcgacgaggatcaagcttacaggaaaatcaggctccgtgctgaagatgtgcagggcaggaatgtgctcacaaacttttggggtatgaattttaccactgataaattgaggtccctagtgaagaagtggcagacattaatcgaagcccatgttgatgtcaagacaaccgacaactacatgttgcgtttgttctgcatcggcttcaccaagaggcgcccaaaccaggtcaagagaacctgctatgctcaggcatcccagatccgtcagatccgccgtaagatggttgagat

SEQ ID NO: 84695 - DNA, 486 bp, Zea mays
agtttcttaatagaggtagagtatagcatgctctaccggtccggaattcccgggtcgacccacgcgttcgtggtctttctgcaagtgctgctaccgcgaccattttcccgcaatgctcacaagctccgatagcttcccttcttcccccgtacctctcaccagcggtgtcttcggtatgtgaaaacccaattcttcaaccctataggatccaacaggcaatcgcagctggcatcttacctttatcacccttgttcctccaacaatcatcagccctattacagcagttacctttggtgcatttattggcacaaaacatcagggcacaacaactacaacaacttgtgctagcaaaccttgctgcctactctcagcaacagcagtttcttccattcaaccaactagctgcattgaactctgctgcttatttgcaacaacaactaccattcagccagctagcttgttgctacccccaacaatttcttccat

SEQ ID NO: 84696 - DNA, 490 bp, Zea mays
  unsure (1)..(490): unsure at all n locations
ggggagcctgagtctacgaggggagagtgtagatgatgctctaccggtccggaattcccgggtcgacccacgcgtccggcgaggagtcctacaaggacagcactttgatcatgcagctccttcgtgataacttgaccctatggacttctgacatctcggaggaccctgctgaagagattagggaggcacccaagcgcgactcgagtgaggggcagtaaagccggctttatgtgcctagaaactagtagctagtgtttgctgctgtcgaatgacactatgcaatgtgatctggaacctggtttcttgggtgcgacgcttgttatgactgtcgtcagtaaaatttgggggctccccgtatgagatgctgccgggcaaggcctcggtgtcccacctcgtttgtggcggngggcgctggagcccggtctggttgggttgggaagccctttaaactgttgtcacttgcattntaccttttccatcgctggttatg

SEQ ID NO: 84697 - DNA, 519 bp, Zea mays
  unsure (1)..(519): unsure at all n locations
gggtagtatctgaaagtgggacgatgaggtatgctctcccggtccggaattcccgggtcgacccacgcgtccgcccacgcgtccgtgttcttagccctctcctttgtagcagctatgtttgccataggctgtcatgctgatggagactgtgagaatgacctccaaagcctgataagtgactgcaagacatacgtgatgttcccagctaatccaaaggtccctccttcggatgcttgctgtggtgtcatcaagaaggcaaacgtttcttgcttgtgctccaaggtcaccaaagaaactgagaaggttgtgtgcatggagaaggttgtgtatgttgctgagcagtgtaagaggccatttgagcatggcttccagtgcggaagctacaaggttccagcaaactgatgatatcacaagagggaagcgcttgacgtagtctttagatttcaattgttgcagccgatcaaccttcttaggggtgnataatatgaagtcaatgttgagactaatgtgaggtgggag

SEQ ID NO: 84698 - DNA, 510 bp, Zea mays
  unsure (1)..(510): unsure at all n locations
cagattgcaggtggaggagggtgagttccccggtccggaattcccgggtcgacccacgcgtccgcccacgcgtccgagaggctgcagtggaggcaactggcgaattcctgaaccagggcgtggagccagtccttggcggccggcccaaactgggtgtgggaaaaggcagaaaaggctttggtcgatatgggtagaatcccatggctatgcctatgccgtgatgccatcggccaaaggtcttgtgccagagactcacccncacttcatcggcacctactggggcgccgtcagcaccgncttctgtgcggagattgttgagtccgcagatgcctacctctttgcaggccccattttcaatgactacagctctgttggctactcattcctcctcaagaaggaaaaggccatcatcgtccagcctgaacgtgtgataatgggggaatgggccggcattcggatgtgtgatgatgaaagagtcctggcttgattgggctaaaggttaataagaac

SEQ ID NO: 84699 - DNA, 513 bp, Zea mays
  unsure (1)..(513): unsure at all n locations
tgtttcgtaatggggaggagtaagtgatgctctaccggtccggaattcccgggtcgacccacgcgtccgcggacgcgtggggcattcagaaacacaccaagcgaagcgcactagcaacgacctaacggcaatggctaccaagatattagccctccttgcgcttcttgccctttttgtgagcgcaacaaatgcgttcattattccacaatgctcacttgctcctagtgccattattccacagttcctcccaccagttacttcaatgggcttcgaacacctagctgtgcaagccaacatgcaacaacaagcgcttgcggcgagcgtcttacaacaaccaattgcccaattgcaacaacaatccttgccacatctaacaatacaagccatcacaacgcaacagcaacaacagttcctaccagcactgagccacctagccatggtgaaccctgccgnctacttgcaagagcagctgcttgcatccaacccacttgctctggcgaacgtagttgcaaa

SEQ ID NO: 84700 - DNA, 515 bp, Zea mays
agtgtgtcggacacgcagggatgaagtcatcgctctaccggtccggaattcccgggtcgacccacgcgtccgctagcaacatagaaagcacaatagtgtaccaacaatggcagccaaaatattttgcctggttatgctccttggtctttctgcaagtgctgctacggcgaccattttcccgcaatgctcacaagctcctatagcttcccttcttcccccgtacctctcaccagcagttgtcttcggtatgtgaaaacccaattcttcaaccctacaggatccaacaggcaatcgcagctggcatcttacctttatcacccttgttcctccaacaatcatcagccctattacagcagttacctttggtgcatttattggcacaaaacatcagggcacagcaactacaacaacttgtgctagcaaacgttgctgcctactctcagcaacaacaagttctttcattcaaccaactagctgcactgaactttgctgcttatttgcaacaaccaccactt

SEQ ID NO: 84701 - DNA, 495 bp, Zea mays
ggtgatgctctcgtcccatccagcacaagtatgcatactctaccggtctcggaattcccgggtcgacccacgcgtccgcccacgcgtccgcccacgcgtccgggcggccatcagggacgtccaggaagcatgcgtgtatgatggctacgtcctcccgaagctgtacgccaaggtgcaccactgcgtctcgtgcgcgatccacgctcacatcgtccgcgtccgatcccgtgagaagcgcagggaccgcaagccgccggagcgcttcaggcgcagggaggataggcctgctggtggacaaggaggcccccgccctggtcctggtgctgctgctccagctccagctccagcacctgttgctgctcgcccataggctttagcttttcgaccgtgttaagtcttctgcccactcagtttcggaattgtcgcctatgggtgtgtgaagctgctatattagagttactttttgtctaaagcctgaacattttcaaagaattt

SEQ ID NO: 84702 - DNA, 521 bp, Zea mays
  unsure (1)..(521): unsure at all n locations
gaagtttctcgattggggggggacgtgtagatgtctcggtccggaattcccgggtcgacccacgcgtccgtgaaatgctcgcaaggtttggtggagatagtcacgccagatcccaacccaaaggggctgacctttgaaaccggggttcaaatggtggggattaagaaccaattggttgttgaagggaaggttgcccaaatgtccctttccaagaaattgttgaaaaatacataacctattcctaacttgatggggttcccaaaaatccttgatgccgattctagacaagaataacccatggttatgcttgaactccgncgtgaatccccttcatggccaaggggttccttattgcagtaaggcatatagagtcaatcatccggatgtcggaggcacatgcaaggatgcatctgangagctacgtgtctcaggaagatgttgacatggccatncgtgtcttgcttgactctnttatttcgactcagaagttncgtgtgcnagnagcacttcaaaaagatttt

SEQ ID NO: 84703 - DNA, 515 bp, Zea mays
  unsure (1)..(515): unsure at all n locations
gttagttattgagnnnggactgnnngnagatcttctcgtctcgaattaccggctggacgcacgcgtccgtgggatcctcgcaaggtttgttgtagacagtcactccagatcccagccgaatgcggctgtacgtctaatacaggtttgtgactgatgtggatgatgatccactggctgctgcacagcaagctgacccagatgtcctttcccaagacatgctgaacaaatacataacctatgctaatctgaatgtgtttcccaaaatacatgatgcccatctagacaagattaaccatgtttatgctgaacttcgtcatgaattctctcatggccaagtagtgtctattgcaataaggcatatagagtcaatgatgcggatgtctgatgcacatgcaacgatgcatttaaagagctacaattcttagcaagatgcttacatttccattcgtggcttccttgactcttttattttgacttaacaattcagttaacatatagcccttgtaaaaatttan

SEQ ID NO: 84704 - DNA, 522 bp, Zea mays
  unsure (1)..(522): unsure at all n locations
agtatgtatctgaaaatgtaagatggaaggtagagnctctcccggttcggaattcccgggtcgacccacgcgtccgcaactagcaacatagaaagcacaatagtgtaccaacaatggcagccaaaatattttggcgtccttatgctccttggtctttctgcaagtgctgctaccgcaaccattttcccacaatgctcacaagctcctatagcttcctttcttcccccatacctctcaccagcggtgtcttcagtatgtgaaaacccaattcttcaaccctacaggatccaacaggcaatcgcagcaggcatcttacctttatcacccttgttcctccaacaaccgtcagccctattacagcagttacctttggtgcatttgttggcacaaaacatcaaggcacaacaactacaacaacttgtgctaagaaaccttgctgcctactctcagcaacagcagtttcttccattcaaccaactggctgcattgaactctgcttgctatttgcaacaacaactacct

SEQ ID NO: 84705 - DNA, 518 bp, Zea mays
tagtgtgttcaaagagggtggatggaagagatatgctgtaccggtccggaattcccgggtcgacccacgcgtccgtggcaacctagtcgccactctgctcgcgcacaagttgggagtcactcagtgtaccatggctcatgccttggagaaaaccaaataccccaactcggacatatacttggacaaattcgacagccagtaccacttctcttgccagttcacagctgaccttattgccatgaaccacaccgatttcatcatcaccagcacattccaagaaatcgcgggaagcaaggacaccgtggggcagtacgagtcccacatcgcgttcactcttcctgggctctaccgtgtcgtccatggcatcgatgttttcgatcccaagttcaacattgtctcccctggagcagacatgagtgtttactacccgtatacggaaaccgacaagagactcactgccttccatcctgaaatcgaggagctcatctacagcgacgtcgagaactccgagcacaagt

SEQ ID NO: 84706 - DNA, 514 bp, Zea mays
agtgtgtccctatttgatattgaagtatcgctctaccggtccggaattcccgggtcgacccacgcgtccgataagggtcggtgagaaggaaaaggccctggaacagcttaaagtcactgaaggagaagctgtagctgttggccaaaagatggatcttgtgttccacactttgcagattggttttttctacatggattttgatctgatatcaaaatccatcgataaggcaaagaacttgtttgaggaaggaggcgattgggagaggaagaacaggttgaaagtatatgaaggcttgtactgcatggcaaccagaaacttcaagaaagctgccagcttatttttagactcgatttcgactttcacaacttatgagatattcccatatgatacgttcatcttctatacagtcctcacaagtgtcatcacattggatcgtgtatctctgaaacaaaaggtggtagatgcaccaagaattctggcttgaatttgcacaagtaccttaacttttccagat

SEQ ID NO: 84707 - DNA, 500 bp, Zea mays
ggggggagggtctcagttgtatgattgtagggtgtatggctacgctgtaccggtccggaattcccgggtcgacccacgcgtccgggcgtcttcgtactcgcctacctccgcggctcaaacctttcccccttctcccagtgtggcgccgccgctccatcccgtaacgcgacaccatgagggagtgcatttcgatccacatcggccaggccggtatccaggtcggaaacgcgtgctgggagctgtactgccttgagcatggcattcaggctgacggtcagatgcccggtgacaagaccattgggggaggtgatgatgctttcaacaccttcttcagtgagactggtgctgggaagcacgtgccccgtgctgtttttgttgaccttgaacccactgtcatcgatgaggtgaggactggcacctaccgccagctcttccaccctgagcagctcatcagtgggaaggaggatgcagccaacaactttgcccgtggtcactacacc

SEQ ID NO: 84708 - DNA, 513 bp, Zea mays
  unsure (1)..(513): unsure at all n locations
ggagtatcttcaagagaggggaggaaagcatcctcggntcggaattcccgggtcgacccacgcgtccgcccacgcgtccgcatggtgaaccctgccgcctacctacaacagcaacaactgctttcgtctagcccgctcgctgtggccaatgcacctacatacctgcaacaacaattgttgcaacagattgtaccagctctgactcagctagttgtggcaaaccctgctgcctacttgcaacagctgcttccattcaaccaactgactatgtcgaactctgctgcgtacctacaacagcgacaacagttacttaatccactagcagtggctaacccattggtcgctgccttcctacagcagcaacaattgctgccatacaaccagttctctttgataaaccctgtcttgtcgaggcagcaacccatcgttggaggtgccatcttttagattacatatgagatgtactcgataatggtgccctcattccggcatgtgtttcctaggaattatcac

SEQ ID NO: 84709 - DNA, 514 bp, Zea mays
gagatatcttatagagccgagggaaggaatcactctactcggtctgactggctcgacccacgcgtgcgtggacgcgtgggtcagcattcaaaaacacactaagcgaagcgcactagcaacgacctagcgggaatggctaccaagatattagccctccttgcgcttcttgcccttttagtgagcgcaacaaatgcgttcattattccacagtgctcacttgctcctagtgccagtattccacagttcctcccaccagttacttcaatgggctttgaacatccagccgtgcaagcctacaggctacaactagcgcttgcggcgagcgccttacaacaaccaattgcccaattgcaacaacaatccttggcacatctaaccctacaaaccattgcaacgcaacaacaacaacaacagtttctgccatcactgagccacctagccgtggtgaaccctgtcacctacttgcaacagcagctgcttgcgttcaacccaattgctctgggcgacgtagctc

SEQ ID NO: 84710 - DNA, 518 bp, Zea mays
aagtatctgcgaagcggggagggagagaagacatgccccggttcggaattcccggctcgacccacgcgtccggaaagtggaatccagtagcaacaatagatcaacaatggcgaccaagatattttccctgcttatgctccttgctctttctacatgtgttgctaacgcgacaattttccctcaatgctcacaagctcctatagcttcccttcttcccccataccttccatcaattatagcttcaatatgtgaaaacccagctcttcaaccatataggcttcaacaagcaatcgcagcaagcaacatacctttatcgcccttgttgtttcaacaatcgccagccctatctttggtgcagtcattggtacaaaccatcagggcacaacagctgcagcaactcgtgctacctctgatcaaccaagtagctcttgcaaacctttctccctactctcagccacaacaatttcttccattcaaaccactgtctacacttgaaccctgctggttaattgcagcac

SEQ ID NO: 84711 - DNA, 520 bp, Zea mays
gaaatgtgaatagtggtctagggggagagtatcctcggcctcggaactactggctcgaccgacgcatgcgtgcacacaggggtcagcattcacaaccatactacgccaatcgcactcgcaacgacctagcagcattggctaccaggtatattataccattcttgcgtctcgttgcccttttagtgagcgcgataaatgcctacattatctcacattgctcactcagctcctacagccattattgcacagatacttcaacaacttacttcaatgacctactagcatccacacgcgctagcctacaggctactacttgcacttgcctcgagcgccttacaatagccagtcgtatatttgcagcaacaattgttgcaacatataacgctacaaccgatggagacgcatcagctacctctgcacaacctggcatctctgagccacctagctgcgtagtatcatgtaccatacttgcaaccgattgtgctagtgtctacactgatatgctgtgcttatgtcaccc

SEQ ID NO: 84712 - DNA, 514 bp, Zea mays
agtgtgtcgtatttgaacaagatagcatcctctaccggtccggaattcccgggtcgacccacgcgtccgcccacgcgtccgcccacgcgtccgaagcaacatagaaagtggaatccagtagcggcagacagagcaacaatggcgaccaagatattttccctccttatgctccttgctctttctgcatgtgttgctaacgcgacaattttccctcaatgctcacaagctcctatagcttcccttcttcccccataccttccatcaatgatagcttcagtatgtgaaaacccagctcttcagccctataggctccaacaagcaatcgcagcaagcaacatacctttatcacccttgttgtttcaacaatcgccagccctatctttggtgcagtcattggtacaaaccatcagggcacagcagctgcagcaactcgtgctacctgtgatcaaccaagtagctctggcaaacctttcttcctactctcaacaaccaccaattcttccatttcaacaag

SEQ ID NO: 84713 - DNA, 499 bp, Zea mays
  unsure (1)..(499): unsure at all n locations
tgtgatgatgctctagtcttacgaagggaggtggaaggcacgctctaccggtctcggaattcccgggtcgacccacgcgtccgacgacttctgcccagtgctgagcatgcagcaactgtaccggatcagcacgatgtactgcgacgacaagtttgggaccctgggcattccatcagaagtcgtctccagcatgcggaccaagatgatcgagggctcgtcgagcagcccgtcggcgcacgacgacatcaactcgttcctgctagacgatgacttcagcataccgttctccgtggatgacttcacgaagctgatagtgcacgtcgacgtagcggacatggatttgccaccgctcattcaggagagcagcggcggcggctccaaaatgggacattgaggagtgacaatatgcacgccttttttgtgtgtgttgcggtgatgtgcatagtgcgtgacatattgctctgagaccagngttttgtttttttcttcgtcgactggt

SEQ ID NO: 84714 - DNA, 489 bp, Zea mays
aggaggtctagtccatgaaacgtatgtatagcatgctctaccggtccggaattcccgggtcgacccacgcgtccgcccacgcgtccgcggacgcgtgggctgccgggagctggcggacatcccggcgtactggcggtgcacggcgctgagcatcctcatggacggcgcgatcccgccgggcccggacgcgcagctggagggccgcctagaggacctgccgggctgcccgcgggaggtgcagaggggattcgccgccaccctcgtcacggaggccgagtgcaacctggccaccatcagcggcgtcgccgaatgcccctggattctcggcggcggaacgatgccctccaagtaactgcgaagagcatagtgcatgaggaatgagcttgtagctagctcatatgtctgaataataagcacagcaagaagatgaatgcatttctcggatcgttcatccggaaccaataattaaggggatccggatttgttctt

SEQ ID NO: 84715 - DNA, 516 bp, Zea mays
  unsure (1)..(516): unsure at all n locations
tatgtatcttagtagtggggagggagggccggcatctctcggttcggaattcccgggtcgacccacgcgtccgcccacgcgtccgcccacgcgtccgagagatttggaaagtttcagagaattttttggaggtccagcgttccgggctgatggtctgaagatttatccaacacttgtgattcgtggaactggtctttatgagctctggaaaactggcagatatagaaattatccacctgagctgttggtggatattgtggcaagaattctgtctttggtaccaccttggacacgagtgtatcgggtccagagagatattcctatgcctcttgttacttctggtgtcgagaaaggtaaccttcgcgagcttgctttggctcgaatggaagatctgggcttaaaatgccgggacgtcagaacccgtgaggcaaggattcaggatatccatcacaagatccggccagatgaagtagagcttgtcagacgtgactatgctgcnaatgagggttgggaaac

SEQ ID NO: 84716 - DNA, 496 bp, Zea mays
  unsure (1)..(496): unsure at all n locations
caggatcttcgtcgtggaagggaggacgtgcatcctcggtctcggattcccgggtcgacccacgcgtccgcgaagggactcactttatgattccatggtttggaccacccatcatttattatggtccgggttgaaccgattttggtgaaaagtccttctggaattcggaatctcaaatgtgaaaatgtctccggtccttcaaggctatgccaaagctccactattacgactctggagagaacttaatgagagagtttgccttcaatcatccatgaaacactgaaagctgttgttgctcaatataatgctagtcagctgatcacacagagagagactgtgagtagggagattaggaagatactgactgagagggctagattcttcaacattgctcttgatgacgtctncatcacaagcctgagctttggaaaggagttactcatgccattgaagcgaagcangttgctgcacaggaaagctagcgtgcttagttcat

SEQ ID NO: 84717 - DNA, 514 bp, Zea mays
  unsure (1)..(514): unsure at all n locations
agtgtcgtagtaaggggagagaggggaagctatcctcggttcggaattcccgggtcgacccacgcgtccgcaattcttcaaccctacaggatccaacaggcaatcgcagcaggcatcttacctttatgaccgttgttcctccaacaaccgtcagccctattacagcagttacctttggtgcatttgttggcacaaaacatcaaggcacaacaactacaacaacttgtgctaggaaaccttgctgcctactctcagcaacagcagtttcttccattcaaccaactggctgcattgaactctgctgcttatttgcaacaacaactaccattcagtcagctagctgctgcctacccccagcaatttcttccattcaaccaactggcagcattgaactctgctgcttatttacaacagcaacagctaccaccattcagccagctagctgatgtgagcccttgtgccttcttgacacaacaacaagtgttgcccgtctacctgcacgctgcgcctaagn

SEQ ID NO: 84718 - DNA, 524 bp, Zea mays
gaaatgtatctctaccgcaaaggaaagtatccatctaccggtctcggaattcccgggtcgacccacgcgtccgccaacaacccatcattggtggtgccctcttttagatttcttatgagttatagttgaataataaagttttttatctgatgtttgtggcttcccagaaataagaaagtacatttctaaaaaaaaaaaaaaaaaaaaaaaaaaaaaaaaaaaaaaaaaaaaaaaaaaaaaaaaaaaaaaaaaaaaaaaaaaaaaaaaaaaaaagggcggccgctttaaaggatccaaacttacgtacccgtgcatgcgacatcataactcttttatagggtcacctaaattcaattcactggcccccgttttacaaacgttggaattggaaaaccctgggggtacccaacttaaaaacccttgtagaacaatacccctttttcccaatggggaattatcgacaaagacccccacaccgaacgcttttaacaaaatgtccccatccttaaaggcaaaatggcacc

SEQ ID NO: 84719 - DNA, 512 bp, Zea mays
aggtgtcaatggtgggagagggagagaatgctctaccggtccggaattcccgggtcgacccacgcgtccgctgggataccgcagggcaagagaagtttggtggcctcagggatggatactatatgcatggccagtgtgcgatcatcatgtttgatgtaacttcaaggcttacttacaagaatgttcctacgtggcatagggacctgtgcagggtctgtgaaaacatccccattgtcctctgcggtaataaggttgatgtgaagaacaggcaggtcaaagccaagcaggttactttccacaggaagaagaatctgcagtactatgaaatttctgccaagagcaactacaactttgagaaacctttcctgtaccttgcaaggaagctggctggtgatccgaaccttcactttgttgaagctgttgctcttaagcctccggaagttaccatcgacatggctatgcagcagcagcatgaagctgagcttgctgcagcaactgcacaacctctttct

SEQ ID NO: 84720 - DNA, 492 bp, Zea mays
ggggagctcgattctatgatgggggagtgaaggaatgctctaccggtccggaattcccgggtcgacccacgcgtccgcccagcaatttcttccattcaaccaactggcagcattgaactctcctgcttatttacagcagcaacaactactaccattcagccagctagctggtgtgagccctgctaccttcttgacacaaccacagttgttgccgttctaccagcacgctgcgcctaacgctggcaccctcttacaactgcaacaattgctgccattcaaccaacttgctttgacaaacctagcagtgttctaccaacaacccatcattggtggtgccctcttttagatttcttatgagttatagttcaataataaagttttttgtctgatgtttgtggcttcccagaaataagaaagtacatttctaaaaaaaaaaaaaagggcggccgctctagaggatccaagcttacgtacgcgtgcatgcgacgtcat

SEQ ID NO: 84721 - DNA, 500 bp, Zea mays
gtggggagtctctcagttgccaaccccagtcatagtacgccaaactctaccggtctcggaattcccgggtcgacccacgcgtccgcggacgcgtgggtctgactgcacctgaaagtttacaactgtatcttgatacacgtgtggagcagcttaaagttgctacagaactctccctttggcaggaagccttccgatcggtggaagatatccatggtttgatgaccatggtgaagaaaatgccaaaaccatctatcctggtggtctattatgcaaagttgactgagatcttctggatatcggacagccacttatatcatgcgtatgcgtggctcaagcttttcaacttgcagaagagctacaataaaaacttgtctcagaaggatctacagttaatagcatcttctgttttacttgctgcactatccgtgtcaccttatgacaaaaaatatggtgcatttgagacagagaatgagaaagagcgcaacatgcgtctgtccaac

SEQ ID NO: 84722 - DNA, 492 bp, Zea mays
  unsure (1)..(492): unsure at all n locations
ngaggagcctgnattctacgagggggggagagagcatgctgtaccggtccggaattcccgggtcgacccacgcgtccgttctgccgtctccaccgccgccgcagccagcgtcaccggagggatctgccgtctcccgtgctccacgcgatgaacaccgacatcaccgcctcgactaagccggagtacccggtggtggatcggaacccggccttcaccaaggtggtcggcaacttctctgcgctcgactacatgcgcctctccaccatctccgccgtctccgtcaccgttggctacctctccgggatcaagccggggatccggggcccgtcgatggtcacgggcggcctcatcggggtcatgggagggttcatgtacgcctaccagaactccgccgggcgcctaatgggattctttcccaacgacgccgaggttgcgcgctacaagcacaagcttcattgaggatccagctccattccgtctctcttttcgcaa

SEQ ID NO: 84723 - DNA, 518 bp, Zea mays
  unsure (1)..(518): unsure at all n locations
ntggctgtgcaaaggcggaaggaaaggacgagcattcctcggtccggaattcccgggtcgacccacgcgtccgcccacgcgtccgcccacgcgtccgcccacgcgtccgtagcaacatagaaagcacaatagtgtaccaacaatggtagccaaaatattttgcctccttatgctccttggtctttctgcaagtgctgctacgacgaccattttcccgcaatgctcacaagctcctatagcttctcttcttcccccatacctctcaccagcgttgtcttcagtatgtgaaaacccaattcttcaaccctacaggatccaacaggcaatcacagcaggcatcttacctttatcacccttgttcctccaacaatcatcagccctattacatcaattacctttggtgcatttattggcacaaaacatcagggcacaacaactacaacaactcgtgctagcaaaccttgctgcctacgctcagcaacagcagttaccttttgtgcaattgttggcacaaaaca

SEQ ID NO: 84724 - DNA, 517 bp, Zea mays
  unsure (1)..(517): unsure at all n locations
ngtgagttttattgatagaaaaaagagggagaagtatcctcggttcggaattcccgggtcgacccacgcgtccgcggacgcgtgggcgggctggcaagacagactacagggccaggataaggctgattaacgaagacaaaaacaagtacaacacacccaaatacagatttgttgtgcgatttaccaacaaggacatcactgcccaaatcatatctgctagtatagcgggtgatatggttcttgcttctgcctactcgcatgagttgccacgatatggtcttgaagttggtctgaccaactatgcagctgcctactgcactggccttctgttggctcgccgtgtgctcaagatccgtggtttggatcaggagtacgagggcaatgttgaggccactggtgaggacttctctgttgagccaactgatgagaggaggcctttccgtgctctcttggatgttggccttatcangactacnnacaggaaccgtgtctttggtgcccttcaaggagcattnga

SEQ ID NO: 84725 - DNA, 512 bp, Zea mays
aggtatctatgagagtgcgaggagaatagctctaccggttcggaattcccgggtcgacccacgcgtccgtattgagaccaactagcaacatagaaagcacaatagtgtaccaacaatggcagccaagatattttgcttccttatgctccttggtctttctgcaagtgttgctaccgcaaccattttcccacaatgctcacaagctcctatagcttcccttcttcccccatacctctcaccagcggtgtcttcaatgtgtgaaaacccaattgttcaaccctacaggatccaacaggcaatcgcaacaggcatcttaccattatcacccttgttcctccaacaaccgtcagccctattacagcagttacctttggtccatttggtggcacaaaacatcagggcacaacaactacaacaacttgtgctagcaaaccttgctgcatactctcagcaacatcagtttcttccattcaaccaactggctgcattgaactctgctgcttatttgcaac

SEQ ID NO: 84726 - DNA, 511 bp, Zea mays
  unsure (1)..(511): unsure at all n locations
aagctnttcatgaggggatgataccatgctctaccggtccggaattcccgggtcgacccacgcgtccggaccaacaagcaacatagaaagtggaatccagtagcaacaacagagcaacaatggcgaccaagatattttccctccttatgctccttgctctttctgcatgtgttgctaacgcgacaattttccctcaatgctcacaagctcctatagcttcccttcttcccccataccttccatcaatgatagcttcagtatgtgaaaacccagctcttcagccctataggctccaacaagcaatcgcagcaagcaacatacctttatcacccttgttgtttcaacaatcgccagccctatctttggtgcagtcattggtacaaaccatcagggcacagcagctgcagcaactcgtgctacctgtgatcaaccaagtagctctggcaaacctttcttcctactctcagcaaccacaatttcttccatatcaccaactgtctacactgaaccc

SEQ ID NO: 84727 - DNA, 515 bp, Zea mays
  unsure (1)..(515): unsure at all n locations
ggatggtgtcctataagtgaggagaaagcatcgctctaccggtccggaattcccgggtcgacccacgcgtccgcggacgcgtgggcagggatgatgtggggaagttcatccccatttatctggctcaggggatcctccagcatgaccccttcgaggttctcgaccagagaggagtgggcgagctggttaagcttgctacagagaggggccgcaaagctaggcctaacttgaaggtgggcatttgtggagaacatggtggagagccttcatcggttgctttcttcgccaagactgggctggattacgtttcttgctcccctttcagggtcccgatcgctaggctagctgcagctcaggtgcttgtctgagggtgcctctgctcgttggcagccggatcgcctgctgttggtgcatctggtgattaataatactactatgacagagccatgctctgtgaagagtattagtagcagcgctcataaaagctacagntccgtctcttttctcagatatgn

SEQ ID NO: 84728 - DNA, 487 bp, Zea mays
  unsure (1)..(487): unsure at all n locations
ggggaggttcgtccatgatagaaagtacgtaggncgtaccggtctcggattcccgggtcgacgacgcgtccgatctgcccttgccgccgactgctcactcctctccggtccgctccactccgaatggccggcacgaagcagacggcgcgcaagtcgaccggcggcaaggcgccgcggaagcagctggccaccaaggcggcgcgcaagtcggccccggccacgggcggcgtgaagaagccgcaccgcttccgccccggcaccgtcgcgctccgcgagatccgcaagtaccagaagagcacggagctgctcatccgcaagctccccttccagcgcctcgtccgcgagatcgcgcaggacttcaagacggacctgcggttccagtcgtcggcggtggcggcgctgcaggaggccgcggaggcgtacctggtggggctcttcgaggacaccaacctctgcgccatccacgccaagagggtcaccatcatgc

SEQ ID NO: 84729 - DNA, 496 bp, Zea mays
  unsure (1)..(496): unsure at all n locations
agggggagtttgtcngtgatagagagaggatgtattgcaagctctaccggtccggaattcccgggtcgacccacgcgtccggggaacttcaatgagtattttggctttgccaccgatgtagatgcagtggtttacttgatgctggtaaatgatctaattcatggactttatcctgaggctgtaaccattggtgaagatgttagtggaatgcctacatttgcccttcctgttcacgatggtggggtaggttttgactatcggatgcatatggctgtggctgacaaatggattgaccttctcaagcaaagtgatgaaacttggaagatgggtgatattgtgcacacactgacaaataggaggtggttagagaagtgtgtaacttatgctgaaagtcatgatcaagcattagtcggcgacaagactattgcgttttggttgatggacaaggatatgtatgatttcatggccctcgatagacctttcactnctaccattg

SEQ ID NO: 84730 - DNA, 515 bp, Zea mays
  unsure (1)..(515): unsure at all n locations
agctgtcntctttgaggggagggtgtatatgctatactcnactcggattcccggctcgacccacgcgtccggtgggttggcttctcctccccctccggttcgggttcgggttcgtgaggttctccggggttcggtttcgtgggtgagcggatcgagatggcggcgtcggatgttgagtaccgctgcttcgtcggcggcctcgcctgggccacggacgaccactccctccacaacgccttcagcacctacggcgaggtcctcgagtccaagatcatcctcgatcgggagacgcagaggtcccgcggcttcggcttcgtcaccttctccacggaggaggcgatgcggaacgccatcgagggcatgaacggcaaggagctggacggccgcaacatcaccgtcaacgaggcccagtcccgcggcggcccgtgaggccgcngcngtgggtaccgtggtggccgtggaggccgcggctacngcngtngcngggcgccgtgatggccgcngccgctaccgcn

SEQ ID NO: 84731 - DNA, 514 bp, Zea mays
  unsure (1)..(514): unsure at all n locations
aggggtnnttcactgactgcatacntagnacnactcctttgatttgcattcccgactcgagccacgcgttcgctctgctaccgatccatgtacatttgccgagcgcggtagatctccgttcggcagcgtgtgatctgaccgatccgtgcggttgggtctggatcgggtggtgaaggtagcggtcgcggaagaagatggggctcgcgttcggtaagctcttcagacggttctttgccaagtatgagatgctgattcttatggacggtctctactcctacggtaaaaccaccatcctctacaatctcaagctcggcgagatctgcacatccatccgcaccatcggtttcaatgtttacactgctgactgcaagagcattatctatacggtatgagatgtctggggtcaggacatgatcagacctgtctggacgcattacttgcgtaacacacatggtcgtatctttagtggcgatagcgatggccggggcccgtgttgatgaagcccgattttacc

SEQ ID NO: 84732 - DNA, 485 bp, Zea mays
agcttcgtctatgagggaggttgaatgcacgctctaccggtccggaattcccgggtcgacccacgcgtccgctcaagagtgatccaatgtgcaatgcttgtgagatggctgtggtatggatgcagaaccaacttgcccagaacaagacacaggagctcatcctgaactacattaatcagctttgcgagcgtcttccgagtccgatgggagaatcagccgtggactgtggcagtcttgcgtccatgcctgacattgcgttcaccattggaggcaagaagttcaagctgaaaccagagcagtacattctgaaggttggtgaaggacaggctgcccagtgcatcagcggattcacagctatggatatcccaccaccccgtggccctctctggatcttgggtgatgttttcatgggagtctaccacaccgtcttcgactatggcaagctgagggttggcttcgcagagtcggccctaggatatggtttg

SEQ ID NO: 84733 - DNA, 487 bp, Zea mays
gacttcgtcgatgaccgaaagtacgtcacgacgtaccggtctcggaattcccgggtcgacccacgcgtccgtagcaacatagaaagcacaatagtgtaccaacaatggtagccaaaatattttgcgtgcgttatgctccttggtctttctgcaagtgctgctacgacgaccattttcccgcaatgctcacaagctcctatagcttctcttcttcccccatacctctcaccagcgttgtcttcagtatgtgaaaacccaattcttcaaccctacaggatccaacaggcaatcacagcaggcatcttacctttatcacccttgttcctccaacaatcatcagccctattacatcaattacctgtggtgcatttattggcacaaaacatcagggcacaacaactacaacaactcgtgctagcaaaccttgctgcctacgctcagcaacagcagttacctttggtgcaattgttggcacaaaacatcaggg

SEQ ID NO: 84734 - DNA, 506 bp, Zea mays
  unsure (1)..(506): unsure at all n locations
tggggagggnnnnntnnnnnnaattgaattgctatncactngacantcccgnttcggaattcccgggtcgacccacgcgtccggggaaaggttatggaaggtgcggatgaaattgagattgggcaagttgactgtggtgtgagcaaaccagtatgctcaaaggtcgatatacactcctacccaacattcaaggtgttttatgaaggcgaagaagtagtaaaatataaaggacctagggatgtggaatcgctgaagaacttcgtgttgaatgaagctgagaaagcaggcgaggcaaagcttgaagctgattgaggcaggggagtttcagcaagcatgtggcgagtggcgtagacaaggaacaatgctttgcaacattgtcttctatcctgtcatttacaaagccagtttacaggaaagaaatgaccttatgagctcgtatcagagtattcctcttacaaagtaactccgaatcagttcatagaagctgtactccattccataagttt

SEQ ID NO: 84735 - DNA, 511 bp, Zea mays
agggatgtgtgtctgatacacgcacagacagtacgtctctaccggttcggaattcccgggtcgacccacgcgtccggaacaatgcacatgttccatatgcatttcgaatgggtttgatttcagatgaattgtttgagaggttagttactacatgtaatggaaagtattggaataactccaatccatcatgccaagagaacatggagcaattttatactcaaatcataggtattaacatggagcatattctatgtccgccgtgtcgatacaagatggggataaccaatcaattcattgaatatgattctggtcaaatgtttgagagcctttcgaaaacctccaagcatggtttagaatgcaatgatcaagagttggcccttgagaaactctttgatacaagatcaggtagagaaaaattgcatgccaaaaaggttgaagtatcaggaccatggaagaggtgccccaagcgtgttctgtacacgagggatattctaacattgatagagtatca

SEQ ID NO: 84736 - DNA, 514 bp, Zea mays
  unsure (1)..(514): unsure at all n locations
ggtggagtgncgtcncctacagacacggcgcggaccgtaagactccactcggattcccgggtcgacccacgcgtncggctaatggcattatttcacaagttcttccaacaggtactttaatgggctttgaacacctgacggtgcaagccaacatgcaacaacaagcgcttgcggcgagcgtcttacaacaaccaattgcccaattgcaacaacaatccttgccacatctaacaatacaagccatcacaacgcaacagcaacaacagttcctaccagcactgagccacctagccatggtgaaccctgccgcctacttgcaagagcagctgcttgcatccaacccacttgctctggcgaacgtagttgcaaaccagcaacaacaacagctacaacagtttctgccaacgctcagtcaactagccatggtgaaccctgccgnctacgtacaacaacaacaactgctttcatctagcccgctcgctgtgggcaatgcacctacataccctgaaacaaa

SEQ ID NO: 84737 - DNA, 508 bp, Zea mays
  unsure (1)..(508): unsure at all n locations
gggggaggctctcttgctgttaggcagtangtcagacgcaccggttcggattcccggccgacccacgcgtccgcctggctctcgctgcgagcgccacctttacgcatacaagcggcggctgcggctggcaagcaccgccgccggttcatctaccgccgccggtgcatctgccacctccggttcacctgccacctccggtgcatctcccaccgccggtccacctgccgccgccggtccacctgccaccgccggtccatgtgccgccgccggttcatctgccgccgccaccatgccactaccctactcaaccgccccggcctcagcctcatccccagccacacccatgcccgtgccaacagccgcatccaagcccgtgccagctgcagggaacctgcggcgttggcagcaccccgatcctgggccagtgcgtcgagtttctgaggcatcagtgcagcccgactgcgacgccctactgctcgcctcagtgccagtcgttgccggcagcaat

SEQ ID NO: 84738 - DNA, 512 bp, Zea mays
  unsure (1)..(512): unsure at all n locations
ngggggaggagctgtacttcgagtttagtntttctatgcatgacgtaccggtttcggaattcccggctcgacccacgcgtccgaacaaatggagtgactcccaggcgttggatccggttttgtaatcctgcattaagtgcattaatttcaaagtggattggttctgatgactgggtgcttaatacagacaaactggcagaactgaagaagtttgctgataatgaagatctgcattcagagtggcgtgctgctaagaaggctaacaaaatgaaggttgtttctcttataagggagaagacaggatatattgtcagtccagatgcaatgtttgatgtgcaggtgaaaaggatacatgaatataagcggcagctgctaaatatccttggaattgtctaccgctacaagaagatgaaggaaatgagcacagaagaaagagcaaagagcttttgttcaagggttggcatattcggggggaaagcatttggccatattttccagggcaaaaggttgtn

SEQ ID NO: 84739 - DNA, 503 bp, Zea mays
  unsure (1)..(503): unsure at all n locations
agggaggtgagggagtgngttcagcatgcaccgtactgccataccgtccggaattcccgggtcgacccacgcgtccgcgcaaatggtaaaacgcttgggaaacacaattcagccctggcctttttccagttgagtgcacgtcttggctcttgcctcctgcatctctagagaggcacatcccagctccaagcttcgcgccttgttggatcgtggcgtccaagcaacggtggtagcggagcgcgaggcagtggccgcagaaggaagcgcgaagcatccatggaccaacgccaggtggttagcgagaattatgccaatcccataacatgcttcttccatgtgctattcaaggcggnggcgctagccttctacatcctattctcgctctttgtgaagagcttcgtcatcatcttcgtgatcacggtgctcctcgcagcgcttgacttctgggtggtgaagaacgtcagtggcaggatactagtcgggctgcggtggttgaatgagaa

SEQ ID NO: 84740 - DNA, 505 bp, Zea mays
  unsure (1)..(505): unsure at all n locations
ggtcggctgaggtattcatatactgattgcataccatgtcanttccggttcggaattcccgggtcgacccacgcgtccgcccacgcgttcgcccacgcgttcgcggacgcgtgggtgattattggttttgtcacataatacgacactagcaatgcatacagtcttgtgcaagacgttgcagattcctgcagaactggtgctgccactaatgtcattttgggtcttgctcttggatacaatgacaatgctggtggtattgctgagaactgatgctgttgatgctgctggcaacaccactgccgctattggaaagggatttgccattggttcagctgctcttgtgtctctggcgcttttttggtgcctttgtcagcagagctggagtcaaggttgtccatgtactcttccccaaggttttcattggtttgattgttggagccatgcttgcctattggatctatggcatgaccgtgaatagtgttagtaatgccctcctaaagatgcn

SEQ ID NO: 84741 - DNA, 508 bp, Zea mays
  unsure (1)..(508): unsure at all n locations
aggggagtgccttcgtgacgacaacgcaatacagctaacccgttcggaattcccgggtcgacccacgcgtccgcccacgcgtccgacgcgctagacaagcaccttgagaggcggtcgcatcgccgtccacgtcgagggggtcagcgggcggcggcggtgtgcgcgaccaccaccgcctcgtcgtgccgtcctccgtgtcgtccatccccaagggccgctgctccgaaggggagtctgattctgatagtgaagcatcagatgttagtggctctgatggagaagacacctcgtggatttcatggtattgcaacttaagagggaatgagttcttctgtgaagtcgatgatgactacattcaagacgacttcaacctttgtggcctcagcagccaagttccttattatgattatgctctggatctcatnttagatattgaatcatctcatggtgatatgttcactgaggaacaaaatgagcttcganaatcagctgcaaagatgctttatgg

SEQ ID NO: 84742 - DNA, 510 bp, Zea mays
gtaacgtgtatctgtacagcgaaggaaggtacgcttcaccggttcggaattcccgggtcgacccacgcgtccggcgcgacaacctgatcgctaggcacaccaaccttgactggtacaaaagcccaaccctgagtgaggctcttgaccagatcaccgagcccaagaggccttcagacaatcccctgcgtgtgctcctccaggatgagtacaagattgctggtattggaactgtaccgggtggccgagtggaaactgtagtaatcaagcctgttatggtaatcacctttggtccaactggactgactaccgacgtgaagatctgatgagatgcaccacgaggcacttgatgacgttcttccggacgacaatgatggcttgaacctgaagaatgctgctgctaatgatctcaagcgctgttgtgcggacttcaacttcaaggatgactctgccaatgaggctgccagcttcacctcccgagttatcatcatgaaccaccctgagcagattggc

SEQ ID NO: 84743 - DNA, 499 bp, Zea mays
  unsure (1)..(499): unsure at all n locations
nagaggtcttgctacagcccagggggggacagtaatactccntcggaattcccggctcgacccacgcgtccgccgactcgtacgtcatgcaacaaaaccctttaatgatggaaagtacctcccggttcaggtgggacctataaactggttattttttcgcgactacaggaaggtgtggaagtacttcacgaagttgattgcttagcaactggaagatatgctatcattgatgcactaaggtggaacgttggaattatcgatgccacatacagcacacgaataccgaagaacatgctgatgaaaatggctgaaggaaaatgtcagatcatatttctgtgaacactatgtaatgaccaacatgttcttgagagaactatacaatcgaaagttcaacaaagacctgactatgcatagcatacagaatatgaagctggcgtacaagatttcaaataccgattggcctattatgaaaaggtctatgaaccgctgggagaatgtt

SEQ ID NO: 84744 - DNA, 483 bp, Zea mays
ttttatgagtaatcgtaccggttcggaattcccggctggacccacgcgtgcgtggaagccaaatcaagaggtgatgatgtcttcagaagaaaggactaccttgtaggggggcatgcttatacgcaggctacagagttggacccaactgatgcaacagtgctctcaaacagaagcctgtgctggctgcgggcagggcaagctgagcgtgctctggaggacgccaaagcatgccgtgcattgagaccagattgggcgaaagcctgctacagggaaggtgcggcgcatcgtctgttacagaggtttgaggaagccgcaaacgccttctatgagggggtgcagcttgagccggagaacacggagctcgtcaacgcattcacggaggccatcgaagccgggaggaagttccatggcgtgaacacgccaaactcaacacaatgagactttgctgatagggtggataggtagatgatgaaccgtatggcg

SEQ ID NO: 84745 - DNA, 515 bp, Zea mays
  unsure (1)..(515): unsure at all n locations
nagttagctcttcctctccgacacgccacgacacgtataacgcaccggttcggaattcccggctcgacccacgcgtccgcccacgcgtccggatcaaccaagtagctctggcaaacctttctccctactctcaggaagaacaatttcttccattcaaccaactgtctacactgaaccctgctgcttatttgcagcaacaactattaccatttagccagctagctactgcctactctcagcaacaacaacttcttccatttaaccaattggccgcactgaaccccgctgcttatttgcagcagcaaatactactaccatttagccagctagctgcagcaaaccgtgcttccttcttgacacagcaacagttgctgcctttctaccagcagtttgcggctaaccccgcaaccctcttacaactacaacaattgttgccctttgtccaacttgctttgacagacccagcggccttctaccaacaacacatcattggtggtgccctcttttagattgct

SEQ ID NO: 84746 - DNA, 517 bp, Zea mays
  unsure (1)..(517): unsure at all n locations
tggagtgaagtcgtggagtttcgaaccncgccctatctgcattatcttcgaattaccggcccgacccacgcgttcgcagggcagcccgacggcgacgccctacttgtcttctcagtgccagtcgttgcggcaaagttggtgccagcagctcaggcaggtggagccgcagcaccggtaccaagcgatcttctgcttggtcctccagatcatcctgcagcagcagccgcaaaacggacaagttgcggggctgttggtggcgcaaatatgcgaacaactgaaagcgaattgcagactgtattaatcgatttcattccctaccctgatttccgcagtggtccccactgtaaaaaactttgactttaagataagaccgtgggtaggcttactagctgaagcattttaatatcagaacaattgaataattaattgtggtaacgcattaaccatggggtggcaaatggctaatgtgaagcaatgaacctgaattaaacaattgatatgaaaagaaaaaaagcct

SEQ ID NO: 84747 - DNA, 502 bp, Zea mays
  unsure (1)..(502): unsure at all n locations
aggagggagggcgtaggtttcccgaccacagtactgccataccgtccggaattcccgggtcgacccacgcgtccgggacgtcagcctagcaattagctcatcgactccagattggagaactcgacaccatgaaggtgctgatcgttgcccttgctctcctggcgctcgctgcgagcgccgcctccagtacaagcggcggctgtggctgccagacaccaccgtttcatctaccgcctccgttctatatgccgcctccgttctatctgccgccgcagcagcagccgcagccatggcaataccccactcaaccaccgcagctaagcccgtgccagcagttcggatcctgcggcgtcggcagcgtcggcagcccgttcctgggccagtgcgtcgagttcctgaggcaccagtgcagcccggcggcgacgccctacggctcgccacagtgccaggcgctgcagcagcagtgctgccaccagatcaggcangtggaaggcgtgcaccn

SEQ ID NO: 84748 - DNA, 515 bp, Zea mays
  unsure (1)..(515): unsure at all n locations
tgggtacgtcctcgttaacgcggggcagaggggaagctagcaccggttcggaattcccgggtcgacccacgcgtccgcggacgcgtggggatcagcaaagcggcagtgcgtagagaggatcgtcgaacagaacagcgtgaagatggtcatcgttctcgtcgtgtgcctggctctgtcagctgccagcgcctctgcaatgcagatgccctgcccctgcgcggggctgcagggcttgtacggcgctggcgccggcctgacgacgatgatgggcgccggcgggctgtacccctacgcggagtacctgaggcagccgcagtgcagcccgctggcggcggcgccctactacgccgggtgtgggcagccgagcgccatgttccagccgctccggcaacagtgctgccagcagcagatgaggatgatggacgtgcagtccgtcgcgcagcagctgcagatgatgatgcagcttgagcgtgccgctgccgncagcagcagcctgtacgagccagctctgatgn

SEQ ID NO: 84749 - DNA, 505 bp, Zea mays
  unsure (1)..(505): unsure at all n locations
ggacgccttatgtcgttaggacagtatgncngtctactcggtcgattcccggccgacccacgcgtccgcgggcgcgtggggccgacgtgacatcattagcgtcagccgtcacgcgagccctggagcgttacgacaccccggcattccatgagatggttcagaactgcatggcgcaagacctgtcctggaaggggcctgcgaagaagtgggaggaggtgcttctgggccttggagtcgaggggagtcgagctggtatcgacgacgcagaggagatcgccccacttgccaaggaaaacgtagccactccgtgagggcttggtggtgcctcggactcggaaacacgcgttggtgataggaagcgtcttgtgggagcctcctgcgcggtcttgaggctggtggagtgaggtgttcagcctgacactgtttcctctctactaccacagtaccactactacttcattgtcatataatccctaggcattctcaaaaaagccatgcctggccg

SEQ ID NO: 84750 - DNA, 518 bp, Zea mays
  unsure (1)..(518): unsure at all n locations
ggaggttagagctcttgtgatagagcccggggacgaagctagcctctaccggttcggaattcccgggtcgacccacgcgtgcgcaacatcttagcaccaatggcagccaagatttttgccctccttgccctccttgcggttggagcaaacgttgctaccgcgactattattccacaatgctcacaacaatacctctctccggtgacagccgcgagatttgaatacccaactatacaatcctacaggctacaagaggccatcgcagcaagcatcttacggtcgttagcattgactgtccaacaaccatatgccctattgcaacaaccatncttagtgaatctatatctccaaagaatcgtagcacaacaactacaacaacaattgcttccaacaatcaaacaagtagttgcagcgaaccttgatgcttaccttcagcaacaacaatttcttccattcaatcaactagctggggtgaaccctgctgcttacttgcaggcacaacagctactaccattcaa

SEQ ID NO: 84751 - DNA, 498 bp, Zea mays
aggggaggagccctcagtttcccatcgcccctacgtcattcacctcgaattaccggcccgacccacgcgtccgcccacgcgtgcgcccacgcgtccggggttggcttctcctccccctccggttcgggttggggtgcgtgaggttctccggggttcggcttcgcgggtgagcggatcgagatggcggcgtcggatgttgagtaccgctgcttcgtcggcggcctcgcctgggccacggacgaccactccctccacaacgccttcagcacctacggcgaggtcctcgagtccaagatcatcctcgatcgggagacgcagaggtcccgcggcttcggctttctcaccttcttcaccgaagaggcgatgcggaacgccatttagggcatgaaccgcaatgagcttgaccgccgcaacatcaccgtcaacgaggtccagtccccccggagtccgtgaagccgcagccgttggtaccgcggttgcccctgaggccgcgctacg

SEQ ID NO: 84752 - DNA, 501 bp, Zea mays
  unsure (1)..(501): unsure at all n locations
aggaggagctgatatgtttcatgaccatagtactgcattccgtttcggaattcccgggccgacccacgcgtccgattacatcaattacctttggtgcatttattggcacaaaacatcagggcacaacaactgcgacgactcgtgctagcaaaccttgctgcctacgctcagcaacagcagttacctttggtgcaattgttggcacaaaacatcagggcacaacaactacaacaactcgtgctagcaaaccttgctgcctactctcagcaacagcagtttctgccattcaaccaactagctgcattgaactctgctgcttatttgcaacaacaacaactactaccattcagccagctagctgctgcctaccaccagcaatttcttccattcaaccaactggcagcattgaactcttctgcttatgtacaacaacaactactaccattcagccagctagctgctgtgagccctgctgncttcttgacacagcaacagttgttg

SEQ ID NO: 84753 - DNA, 502 bp, Zea mays
  unsure (1)..(502): unsure at all n locations
aaggaagtagtgatagattctgacacgacagtacttacgttccggtcggaattcccgggccgacccacgcgtccgcccacgcgttcggcaattagctcatcgactccagattggagaactcgacaccatgaaggtgctgatcgttgcccttgctctcctggcgctcgctgcgagcgccgcctccagtacaagcggcggctgtggctgccagacaccaccgtttcatctaccgcctccgttctatatgccgcctccgttctatctgccgccgcagcagcagccgcagccatggcaataccccactcaaccaccgcagctaagcccgtgccagcagttcggatcctgcggcgtcggcagcgtcggcagcccgttcctgggccagtgcgtcgagttcctgaggcaccagtgcagcccggcggcgacgccctacggctcgccacagtgccaggcgctgcagcagcagtgctgccaccagatcangcangtggagccgctgcaccgn

SEQ ID NO: 84754 - DNA, 504 bp, Zea mays
gggacgggttctgacggcgggaacggtacgctctaccggttcggaattcccgggtcgacccacgcgtccggcgccatccctcactctcctccgaagccatcgtccacgtcccagcctccccggactctgaggggcagaagctgcagcgtcgagatggtgaaggggcgcacggggcagcgcgtgaggctctacgtccggggcaccgtccttggatacaagcggtccaagtcgaaccagtacgagactacgtcgctggtgcagatcgagggggtgaacaccaaggaggacgtcgcgtggtactgcgggaagcggatggcctacatctacaaggccaagaccaagagcagcggcacccactaccgctgcatctggggcaagggtcgccgcccgcatggcaactccggcgtcgtccgggccaagttcaggtccaacctgccggcgaaatccattggccgtaggtcaggggtgtcatgtcccccagcagcatctaaagattatctgatt

SEQ ID NO: 84755 - DNA, 513 bp, Zea mays
  unsure (1)..(513): unsure at all n locations
ggaggtaacggtctgntnttacacgcaccaaggtacgctacaccgcntcggaattaccgggccgaccgacgcgtccggcgcgctccctcactctcctccgaaccatcgttcacgtcccagcctccccggacttggggcagaagctgcagcgtcgagatggtgaaggggcgcacggggcagcgcgtgaggctctacgtccggggcaccgtccttggatacaagcggtccaagtcgaaccagtacgagactacgtcgctggtgcagatcgagggggtgaacaccaaggaggacgtcgcgtggtactgcgggaagcggatggcctacatctacaaggccaagaccaagagcagcggcacccactaccgctgcatctggggcaaggtcgcccgcccgcatggcaactccggcgtcgtccgcgccaagttcaggtccaacctgccgccggaatccatgggccgtaaggtcagggtgttcatgtaccccagcagcatctaaagataatctgaatgtgtg

SEQ ID NO: 84756 - DNA, 478 bp, Zea mays
  unsure (1)..(478): unsure at all n locations
cgtcgctagcaccggttcggaattcccggctcgacccacgcgtccgcccacgcgccggtccctctnctctggaggtattcgcagtcgaccgtgtccctcgagccggatgaaaggtggtgctgcctacctgcttgctgtcctcgctgggaatgccagcccctccgctgaggatttgactggcattctggagtcagttggctgtgaagttgacaatgaaaggatggaactgctgctgtcccaactgagcggtaaggacatcaccgagctcattgccgcgggcagagagaagtttgcttcagtcccatgtggcggcggcagtgtggctgttgcggcaggtgcacctgctgctggcggagctgctcctgcagctgacgcaaagaaagaagagaaggtggaagagaacgaagaaagcgatgatgatatgggcttcagcctcttcgactaggttgcacagtcatcacagtattgtttcgggcag

SEQ ID NO: 84757 - DNA, 511 bp, Zea mays
  unsure (1)..(511): unsure at all n locations
tggaaagttatctgtttctnggcccaaagtacgctacaccggntcggaattcccggctcgacccacgcgtccggatgttttgcctccttatgctccttgctttttttgcatgtgttgctaacgcgacaatggtccgtcaatgctcacaagctcctatagctttccttcttcccccataccttccatcaatgatagcttcagtatgtgaaaacccagctcttcaaccctataggctccaacaagcaatcgcagcaagcaacatacctttatcacccttgtttcaacaatcgccagccctatctttggtgcagtcattggtacaaaccatcagggcacagcagctgcagcaactcgtgctacctgtgatcaaccaagtagctctggcaaacctttctccctactctcagcaacaacaatttcttccattcaaccaactgtctacattgaaccgtgctgcttatttgcagcaacaactattaccattcagccagctagctactgnctactctcn

SEQ ID NO: 84758 - DNA, 505 bp, Zea mays
  unsure (1)..(505): unsure at all n locations
nagttttaagagcggtatagtttcggtcgccacgtactgcatttcgtttcggaattcccggctcgacccacgcgttcgcggacgcgtgggcggacgcgtgggcggttcgcgtgggcggacgcgtggggtcaccaacggaaagtgcaccaagaaatccatcgagaggccgtcgacaggggaattaatggcgtcgtcgtctagcagcagccaccgccgcctcatcctcgcagccgccgtcctgctctccgtgctcgcggctgccagcgccagcgccgggacctcctgcgtgccggggtgggccatcccgcacaacccgctcccgagctgccgctggtacgtgaccagccggacctgcggcatcgggccgcgccttccgtggccggagctgaagaggagatgctgccgggagctggcggacatcccggcgtactgccggtgcacggcgctgagcatcctcatggacggcgcgatcccgccgggcccggacgcgcaacttgagggccgt

SEQ ID NO: 84759 - DNA, 506 bp, Zea mays
  unsure (1)..(506): unsure at all n locations
cggcgagcgactatacttttctntagccacnctatcatgcattacgttctcgattcccggctcgacccacgcgtccgcaacaagcaacatagacagtggaatccatctagctacaatacagcaacaatggcgaccaggatattttccctccttatgctccttgctctttctgcatgtgttgctaacgcgacaattttccctcaatgctcacaagctcctatagcttcccttcttcccccataccttccatcaatgatagcttcagtatgtgaaaacccacctcttcaaccctataggctccaacaagcaatcgcagcaagcaacatacctttatcacccttgattcaacaatcgccagccctatctttggtgcagtcattggtacaaaccatcaaggcacagcagctagcatcaactcgtgctacctgtgatcaaccaagtagctcttgcaaacctttatccctactctcagcaacaacaattttttccattcaaccaactgtctg

SEQ ID NO: 84760 - DNA, 502 bp, Zea mays
  unsure (1)..(502): unsure at all n locations
tgtggtgggggacgactcgtatttacctagtangctggacatttcgtttcggattcccggccgacccacgcgtccggggaagaaatgaaccttttggcagaagttgatcaaccaggtagcctgattgacaactaggtggcccaactgagctttctgctgtcacgcaaggctgcaggcttggtcagcctccaagcacgcttggcacggttccagcaccggctcaaagagcaagagatccttagccgcaagaaacctcccagatagtatgatgatcagcaatgactctgtccttgtgccttgtaatctgattgcttggagctcagttgtggtccatcagctgttttttacgtgtgcgctccagtaaattctatagccccaagcaggccaagacatgtgggagtggcttaaggcggtcttgatgccgagggcgtggtcctggttgatatcacctgacacttttagtcaaggccgataaccaattttggaataggcctttttctac

SEQ ID NO: 84761 - DNA, 521 bp, Zea mays
  unsure (1)..(521): unsure at all n locations
tggagagagaagtcctgatgctttccccgccaacgacagttacgccactgaccgctttcnngatgtacaaattagtccgtacgcgttactaatatatcaaaaatagtaataatactagaagtaacctatattattaccaataattcatattggaggggtactcaagccatttctgtacgaaaactcgaatatgctattgaacaccttaccaacgcaatagtgctgaatccactctcagcaatcatgtatggtactagagcatctgtgtttataaaaatgaagaaaccatctgctgccattcgtgatgtcaatgctgctctacacatcaacccatactctgcaaaatgctataaaactcgtggaatggcatatgccatgcttgtcaaatgggaggaagctgctcatgatctgcacacagcatctaacatggattacgactaggagatcaatgctgagctcaagaacgtggagcctaatgctcacaagatagtggaaacatctcaggaagtttgaaaggctcc

SEQ ID NO: 84762 - DNA, 513 bp, Zea mays
  unsure (1)..(513): unsure at all n locations
nggatgagtgtttgttatgcgggacggggcgagaacgctaatactcgttcggaattcccgggtcgacccacgcgtccgcaacaagcaacatagaaagtggaatccagtagcaacaatagagcaacaatggagaccaagatattttccctccttatgctccttgctctttctacatgtgttgctaacgcgacaattttccctcaatgctcacaagctcctatagcttccctttttcccccataccttccatcaattatagcttcagtatgtgaaaacccagctcttcaaccatataggcttcaacaagcaatcgcagcaagcaacatacctttatcgcccttgttgtgtcaacaatcgccagccctatctttggtgcagtcattggtacaaaccatcagggcacaacagctgcagcaactcgtgctacctgtgatcaaccaagtagctctggcaaacctttctccctactctccgcaacaacaatttcttccattcaaccaactgtctacactg

SEQ ID NO: 84763 - DNA, 513 bp, Zea mays
  unsure (1)..(513): unsure at all n locations
agtaaactattctgattgntnntcgaaattnntcgatcnancaactccgataaaccaccggacccactcgatctcaagaatcaacatataaagttcaatcctttaatatcaatacagcaacaattcatatcagcatgttttcactacttatgctccctactctatctacatatgttactaacaccacaattttccctcaatgctcacaagctcctataacttccctttttcccccataccttccatcaattataactacaatatcttaaaacccaactcttcaaccatatacgcttcaacaaacaatctcaactaacaacatacctttataccccttaatatatcaacaatcacctaccctatcttttatacaatcattgatacaaaccatcatatcacaacaactacaacaactcctactaccctttatcaaccaattaactctcacaaaactttctacctacatttcccatcaaccaattctttcatttaacccaatttctaacattaaat

SEQ ID NO: 84764 - DNA, 508 bp, Zea mays
  unsure (1)..(508): unsure at all n locations
cggccagcgcctgtctacgtggccgcgggaggcgggtacgtctcgntcggaattcccggctcgacccacgcgtccggggttggcttctcctccccctccggttcgggttcgggttcgtgagggtcttccgggttgggggtcctgggtgaacggatcgagatggccgcgtcggatgttgagtaccgctggttcgtcggcggcctcgcctgggccacggacgaccactccctccacaacgccttcagcacctacggcgaggtcctcgagtccaagatcatcctcgatcgggagacgcagaggtcccgcggcttcggcttcgtcaccttctccacggaggaggcgatgcggaacgccatcgagggcatgaacggcaaggagctggacggncgcaacatcaccgtcaacgaggcccagtcccgcggcggccgtggaggcggcggcggtgggtacggtggtggccgtggaggcggcggctacggcggtggcgggcgccgtgatggcggtggcg

SEQ ID NO: 84765 - DNA, 510 bp, Zea mays
  unsure (1)..(510): unsure at all n locations
ggtcagtcttttaccgcggcagggagacgctagtcatggntcggaattcccggctcgacccacgcgtccgggagcaggaaggctgttgtgatccacgttccataccgcttgcgcaaggccttcangaagatccatgtcaggatcgtcagggagctggagaagaaattcagcggcaaggatgtggtaattgttgccacaaggaggatcgtgaggccgcccaagaagggttcagctgttcagcgccctcgcaccaggactctgactgctgtccatgatggcatcctggaggatgttgtcttcccagctgagattgtggggaagcgtgtcaggtaccgtctggatggtgccaagatcatcaagatcttcttggacccaaaggagaggaacaacaccgaatacaagctggacacctacactacggtctaccgcaggctgtgtgggaaagatgtggtctttgagtaccctatggncgaaaatgcataaatatgacgcccggatattcccattttn

SEQ ID NO: 84766 - DNA, 509 bp, Zea mays
  unsure (1)..(509): unsure at all n locations
tagcttttatgtacgaagtggcgagaaaagtaggnacgcactcggtttcggaattcccggctcgacccacgcgtccgatcggcaggctcgtggccagggtcgccctgcagagcgaggatgtcgagctcgtggccgtgaacgaccccttcatcaccacggattacatgacctacatgttcaagtacgacaccgtgcacggccaatggaagcacagcgacatcaccctcaaggactccaagacgcttctcttcggcgagaagccggtcaccgtctttggcatcaggaaccccgaggagatcccgtggggtgaggctggtgctgagtatgtcgtggagtccaccggtgtcttcactgacaaggacaaggctgctgcacatctgaagggtggtgccaagaaggttgttatctctgccccaagcaaagatgcacccatgtttgttgttggtgtcaatgaggacaagtacaccttcgatgttaacattgtttccaatgctagctgcaccacaaac

SEQ ID NO: 84767 - DNA, 512 bp, Zea mays
  unsure (1)..(512): unsure at all n locations
tggttgcgctcttacttcagtcctgaccgatagctagntctactcggtcggattcccggccgacccacgcgtccgcgcaaattgcaccaagaaatccatcgataggccgtcgacaggggaattaatggggtcggcgtctagcagcagccaccgccgcctcatcctcgcagccgccgtcctgctctccgtgctcgcggctgccagcgccagcgccgggacctcctgcgtgccggggtgggccatcccgcacaacccgctcccgagctgccgctggtacgtgaccagccggacctgcggcatcgggccgcgcctcccgtggccggagctgaagaggagatgctgccgggagctggcggacatcccggcgtactgccggtgcacggcgcttagcatcctcatggacggcgcgatcccgccgggcccggacgcgcagctggagggccggctaaaggacctgccgggctgcccgcgggaggtgcagaaggggattctccgccaccctagtcacggcg

SEQ ID NO: 84768 - DNA, 507 bp, Zea mays
gggtagcttctctcacgcgtttgttgggaggggcagctgcactcggttcggaattcccggctcgacccacgcgtccgggtcgccgtcctcgcaagcagacccgccgcgcccagcgcggagggatgctttggatgggtcgaccgtagcggctacgctggcgcatgagttgtcttggacccgtgactgcttggaggacccccgctgccgtgcggccgactcccggcgcccgtgtcccatcgctcgtgcgggcatcccgtgcctgctgcgttgagaagtgcttgcgtgctgctacccgtcccacgggaagccgtgctcgatacacgttgccttcgtcgagctcaccccccggggtgcggctcgtcggctcgagagcgcccgcggcgtttgcctcgtgccgccgtcggcctatggccggcggcaccgaggacacctcgctggcgcttttggtctcggatgtggctcacgctgaaggccggagacgcgttggcgtcacgcgcccaagaatcg

SEQ ID NO: 84769 - DNA, 516 bp, Zea mays
  unsure (1)..(516): unsure at all n locations
nggaaagctttgttttacgatcganacgtacgtcanaacgtactcggttcggaattcccggctcgacccacgcgtccgcgcgatctgcttccagagccccccgccgtcgctgcgccctcctctcggtcctgccgtcggtcgaggtaaaaggacagcatggtgagggtcagcgtgctcaatgatgctctcaagtccatgtacaatgctgaaaagatagggaaacgtcaggtcatgatcaggccgtcatccaaggtgatcatcaagttcctgacggtcatgcagcgccatggttacattggcgagttcgagtacgtggatgaccacagagctgggaagatcgtggtggagctgaatggaagactgaataaatgtggtgttattagcccacgttttgatgtaggtgttaaggagatcgagggatggacggcgaggcttcttccatctcgccagtttggctacatcgtcctaacaacttctgctggaattatggaccatgaagaggcccgccgtaagaat

SEQ ID NO: 84770 - DNA, 522 bp, Zea mays
  unsure (1)..(522): unsure at all n locations
aggcaganggatgccactgggctgctgttttcatnacgcaccaacaagctacgcctatacccgcttcgaattcccggcccgacccacgcgtccggaaagtggaatccagtagcaacaacagatcaacaatggcgaccaagatattttccctcgttatgctccttgctctttctgcatgtgttgctaacgcgacaattttccctcaatgctcacaagctcctatagcttcccttcttcccccataccttccatcaatgatagcttcagtatgtgaaaacccagctcttcagccctataggctccaacaagcaatcgcagcaagcaacatacctttatcacccttgttgtttcaacaatcgccagccctatctttggtgcagtcattggtacaaaccatcagggcacagcagctgcagcaactcgtgctacctgtgatcaaccaagtagctctggcaaacctttctccctactctcagcaacaacaatttcttccattcaaccaactgtctacactgaaccctg

SEQ ID NO: 84771 - DNA, 508 bp, Zea mays
  unsure (1)..(508): unsure at all n locations
acgggtnngtggctgactcgttttctggaccaccagtacgccatttccgtttggaattcccggctcgacccacgcgtccgccttgctctttctacatgtgttgctaactcgacaattttccctcaatgctcacaagcgcctagagcttccctttttgccccataccttccatcaattatagcttcagtatgtgaaaacccagctcttcaaccatataggcttcaacaagcaatcgcagcaagcaacatacctttatcgcccttgttgtgtcaacaatcgccagccctatctttggtgcagtcattggtacaaaccatcagggcacaacagctgcagcaactcgtgctacctgtgatcaaccaagtagctctggcaaacctttctccctactcttcgcaacaacaatttcttccattcaaccaactgtctacactgaaccctgctgcttatttgcagcaacaactattaccatttagccagctagctactgcctactctcaacaacaac

SEQ ID NO: 84772 - DNA, 493 bp, Zea mays
  unsure (1)..(493): unsure at all n locations
gtgaggaggatatgtgttttcaaatgtgctggncattcgtttcgattcccggccgacccacgcgtccggtgagcggatcgagatggcggcgtctgatgttgagtaccgctgcttcgtcggcggggtcgggtgtgccacggacgaccactccctccacaacgccttcagcacctacggcgaggtcctcgagtccaagatcatcctcgatcgggagacgcacaggtcccgcggcttcggcttcgtcaccttctccacggaggaagcgatgcggaacgccatcgacggcatgaacggcaaggagctggacggccgcaacatcaccgtcaacgaggcccagtcccgcggcggccgtggatgccgcggccgcgggtactgtggcggccgtagaagcggccgatacagcagccgtcggcgccgtcaaggccgttggggttaaccgcgggggcgacgattaccgtggaggcagctggtaccgtgggtggtggcggccacc

SEQ ID NO: 84773 - DNA, 517 bp, Zea mays
  unsure (1)..(517): unsure at all n locations
ngtgaagcggcctctgcaacaccgcattatcagctacgcctcaccggttcggaattcccgggtcgacccacgcgtccgcggacgcgtgggcggacgcgtggggtttactacccgtatacggaaaccgacaagagactgactgccttccatcctgaaatcgaggagctcatctacagcgacgtcgagaactccgagcacaagttcgtgctgaaagacaagaagaagccgatcatcttctcgatggggcgtcttgaccccgtgaagaacatgacaaggctgggcgagatgtacggcaagaacccgcgcctgaaggagctggcgaaccttgtgaacgttggcggcgaccacgggaaggagttcaaggacagggaagagcaagccgcggtgttaaagaagttccacagtctcgtcgaggaccacatgtagaggcgccatctgcggaggatctcggcgaagaaccacccgtgttcgcaacggggaggtgcaccgctacattagcgatacgaagggcgcattt

SEQ ID NO: 84774 - DNA, 504 bp, Zea mays
  unsure (1)..(504): unsure at all n locations
tggaacgctttctgtcggtaagtcctnatgncagacgtactcggttcggattcccggccgcccacgcgtccggggttggcttctcctccccctccggttcgggttcgggttcgtgaggttctccggggttggggttcgtgggtgagcggatcgagatggcggcgtcggatgttgagtaccgctgcttcgtcggcggcctcgcctgggccacggacgaccactccctccacaacgccttcagcacctacggcgaggtcctcgagtccaagatcatcctcgatcgggagacgcagaggtcccgcggcttcggcttcgtcaccttctccacggaggaggcgatgcggaacgccatcgagggcatgaacggcaaggagctggacggccgcaacatcaccgtcaacgaggcccagtcccgcggcggccgtggaggcggcggcggtgggtacggtggtggccgtggaggcggtggctacgggcgtggcgggccccgtgatggcggtggcg

SEQ ID NO: 84775 - DNA, 517 bp, Zea mays
  unsure (1)..(517): unsure at all n locations
gagggaggaggcttcttatgtacagacgtccaggggacgggtaggctgcaccggtttcggaattcccggctcgacccacgcgtccgcccacgcgtccgcggacgcgtgggggactttttggaaactgaatttatagttgggcccgtaccantagatgatggaaatggaaaagaagtagcaactgaaattgttacaaacatggttacaaacaaaacattctacactgattccagtggacgtgatttcatcaaaaggataagagattatcgatcggagtggaagattgaagtgcaccagcctattgctggaaactattatcctgttaatcttggcatctatgtggaggatggcagcaaagagctgtctgtactggtagacaggtcaattggaggttccagtataaaggatggacaaatagagctaatgctacacaggaggctactccatgatgatgggaaaggcgtcgccgaggcgctaaatgaaacagtctgtctcgataagcaatgtgaaagactan

SEQ ID NO: 84776 - DNA, 520 bp, Zea mays
  unsure (1)..(520): unsure at all n locations
ngggagagcctctgctaccgcaggcgggggagatcgggtacgctctaccggttcggaattcccgggtcgacccacgcgtccgagacgcagtcggctgccgcagactggtagtagccggcgcgccgtcaccgtatcctcagatcagcggcgagcagataccacaccactctactgacgcccgacgagcagtgtaacattttccttcagccatgggtaaggagaagactcacatcaacattgtggtcattggccatgtcgactctggcaagtcgaccaccactggccacctgatctacaagcttggaggtattgacaagcgagtgattgagaggttcgagaaagaggctgccgagatgaacaagcggtcattcaagtatgcgtgggtgcttgacaagctcaaggctgagcgtgagagaggtattacaattgatattgccctgtggaagttcgagaccaccaagtactactgcactgntattgatgccccgggacaccgtgacttcatcaaaaatatgatcac

SEQ ID NO: 84777 - DNA, 496 bp, Zea mays
gggaggagtatatgttacagaacaaagtacgctattccgtttggaattcccggctcgacccacggtccggcaacagccatccttagtgcatctgtatctccaaagaatcgcggcacaacaactacaaggacagttgctaccaacaatcaatcaagtagttgcagcgaaccttgttgcttacctcgagcaacaacagtttcttccattcaatcaactagctggggtgaaccctgctttctacttgcaggcacaacagctactaccatttaaccaacttgtcgggagcccttatgccttcttactgcaacaacagcttctgccattccatctgcaagctgtggcaaacattgctgctttcttgagacaacaacatttgttgccattttacccacaggttgtgggaaacattaatgccttcttgcaacagcaacaattgctaccattctacccacagaatgcggcaaacatttgtgcctttttacaacaacaacaattg

SEQ ID NO: 84778 - DNA, 495 bp, Zea mays
  unsure (1)..(495): unsure at all n locations
agggttcagagacttgatttactntgtacgntngctatttcttttgattaccggccgacccacgcgtccgccagcgttcgcggcgcgtgggtttgtctgcataccccctgcaattattattgaaggaccgcaattagtgcagcatggttttaaagatgcaattgccaaagttggattaacaaagctgatttctaatttttttgtggtgggcttattctatcacctttataaccagtatgctacaaacacattgtagctggtagcccctttaacacatgccatcggcaatgtgttgaaacgtgtcttcgtcattggcttttccatcatcgcattctgcaacaagatcaccacacatactggaatcggcacttgcattgctgtttctggcgttgccctctactcatttataaaggctaagattgacgacaaaaagcaccttaagagtgcataaagtgctggctgatgtggatgctgttgcttcgtcgctttgatggg

SEQ ID NO: 84779 - DNA, 521 bp, Zea mays
  unsure (1)..(521): unsure at all n locations
ggaggttccggcctctattttacttacgcccccactacgctatgancgctcggaattaccggctcgacccacgcgtccgccgacgcgtncggtgaggacacaaactcttgtgaagagtgccattgtgcaagttgatggtgggccattcaagcagtggtacctcactcactatggagttgacattggtaggaagaagaaaacccctgctgcaaagaaggataatgctgagggacaagaggttgaggcagcagctgaggaaacgaaaaagagcaaccatgtcacgaggaagcttgagaagcgcaaggagggacgtacccttgacccacacattgaggagcaatttggcagtggacggttgctggcatgcatttcttcccgccctggacagtgtggccgagctgatgggtacatccttgagggtaaagagcttgagttctacatgaagaagctacagaggaagaagggcaagagcgctgtagcttagagcattctcatggattgtcttgcaccgaaatgtgtgt

SEQ ID NO: 84780 - DNA, 552 bp, Zea mays
  unsure (1)..(552): unsure at all n locations
ggtggtaagagtgctcggtgttgactgnntaacggtnactgacngntcaggaccgatactcggttttcggaattacccgggctcgacgccacgccgtcccggttgcgatgggtgcctctnngaacgtggtatgttatacgagttccagaaaccaacctggtacggctacgcgnngaggatccacttgcatgctttcttcgtaccgctccagtcatctctgcntgagaaggggcctaccacgagcnnagctctctgtggctgagatcaccaacagcgccttcgagccatcttccatgatggccaagtgcgacccacgccatggcaagtacatggcctgctgcctcatgtaccgtggtgatgtggtccccaaggatgtgaatgctgctgtggccaccatcaagaccaaacgcaccatccagttcgtggattggtgcccgactggcttcaagtgcggcatcaactaccagcctnctagcgttgtgcctggtggcgacctggccaaggtgcagcgtgccgtgtgcatgatctncaacttcaccagtgttggggagg

SEQ ID NO: 84781 - DNA, 478 bp, Zea mays
  unsure (1)..(478): unsure at all n locations
ttttttgtttttcatggattcccatcggcggctcgagtcacgcgtgcgtccacgcgtccgccacgcgttcgacaagcacatagaagtggaaccgggtacggcaacagagcaacaatggcgaccaagatattttccctccttatgctccttgctctntctgcatgtgttgctaacgcgacaattttccctcaatgctcacaagctcctatagcttcccttcttcccccataccttccatcaatgatagcttcagtatgtgaaaacccagctcttcagccctataggctccaacaagcaatcgcagcaagcaacatacctttatcacccttgttgtttcaacaatcgccagacctatctctggtgcagtcatcggtacaaaccatcagggcccagagcttgagcaactcgggctacctgtgaacaaccaagtagctcttgcaaacctttctccctactgttaggaataccaattttttcg

SEQ ID NO: 84782 - DNA, 502 bp, Zea mays
gtgggtaaaggcttactgcacccagaacaactacgctataacggtttcggaattcccggctcgacccacgcgtccgacaaattgtaccagctctgactcagctagctgtggcaaaccctgctgcctacttacagcaggggcttccattcaaccaactggctgtgtcaaactctgctgcgtacctacaacagcgacaacagttacttaatccattggcagtggctaacccattggtcgctaccttcctgcagcagcaacaacaattgctgccatacaaccagttctctttgatgaaccctgccttgcagcaacccatcgttggaggtgccatcttttagattacatatgagatgtactcgacaatggtgccctcataccgacatgtgtttcctagaaataatcaatatattgattgagatttatctcgataaaaaaaaaatacatgcaatatgcatatataactaaatatttctaggttaaacaatttgaatatgcaaggtag

SEQ ID NO: 84783 - DNA, 505 bp, Zea mays
  unsure (1)..(505): unsure at all n locations
naggagttgaggttttgtttctgcacgatcagtactgcttttccgtttggaattcccgggtcgacccacgcgtccggcagaagccaccgatcggcgtgccgcgtgcgtgaggcgatcggagcatcccgtcccggggaggaagacaaccggcgacgcggggggaacatggggaagacgccggtgcggatgaaggcggtcgtgtacgcgctgtcgcccttccagcagaaggtaatgccggggctgtggaaggacatcaccaccaagatccaccacaaggtcaccgagaactggatctccgccacgctcctcctcacccccgtcgtcggcacctaccaatacgccatgtggtacaaggagcaggagaagctttcccacagatattaaatgcgctgcccttcacagacagcacttggatttaacatttgtttgatcaatttcagttcaacgccttttcatcgttccatatgcatgtatggtatccgtgtctggcanacttatnttgagg

SEQ ID NO: 84784 - DNA, 505 bp, Zea mays
  unsure (1)..(505): unsure at all n locations
ggagacgtctgtcttagacccgaacgacagtacgncgtactcggttcggaattcccggctcgacccacgcgtccgatgggattaggccagggaccacagcatctggattggcgaaactgaaaccagtttgtaggaaggatggaactacaactgcaggcaattccagtcaagtgagtgatggtgctggagctgttcttctcatgaaaagatctgtggctctgaagaaagggctgcccattcttggtgttttcaggagctttgcggctgttggagtggatccagctgttatgggtgttggtcctgctgtggccattcctgctgctgtgaagtctgcaggccttgagattggcgacattgatctgtttgaactgaatgaggccttcgcctctcagtttgtctattgctgcaacaagttggggctggaccgttctaaagtaaatgtaaatggaggcgcgattgcccttggacaccctctgggtgcaacaggttgcccgtgtgtggctac

SEQ ID NO: 84785 - DNA, 520 bp, Zea mays
gagtaagcgtcttgctcaccaagccaaagtatagctaaactctatccggtcggaattcccgggtcgacccacgcgtccgcccacgcgtccggcagctgcagcaactcgtgctacctgtgatcaaccaagtaggtctggcaaacctttctccctactctcagcaacaacaatttcttccattcaaccaactgtctacactgaaccctgctgcttatttgcagcaacaactattaccattcagccagctagctactgcctactctcagcaacaacaacttcttccatttaaccaattggccgcactgaaccccgctgcttatttgcagcagcaaatactactaccatttagccagctagctgcagcaaaccgtgcttccttcttgacacagcaacagttgctgcctttctaccagcagtttgcggctaaccccgcaaccctcttacaactacaacaattgttgccctttgtccaacttgctttgacagacccagcggccttctaccaacaacacatcattgg

SEQ ID NO: 84786 - DNA, 502 bp, Zea mays
  unsure (1)..(502): unsure at all n locations
cggtgggtaaggggtanacttcagccccccgcacaacagtactaacgtctcgaattcccggctcgacccacgcgtacgggttggcttctactacccctgcgggtcgggttcgggttcgtgaggctctccgggttgggatgcgtgcatgaccggatcgagatggctgcatcagatgttgagtaccgttgattcgtcggcggcctcacctgggccacggacgaccactagctacacaacgccttcagcaactacggcgaggtactagagtccaagatcatcctcgatccggagactcataagtccgccgattatgctacgtcaccttctccacggaggaggcgatgcggaacgccatagacggcatgaactgcaaggagctggacggccgcatcatcaccgtcaacgaagcccagttccgatgatgtcgtggatgcagctgtagaaggtacggttgtagacttagaggcagaagctacggtagcagaagatgccgtgatggcan

SEQ ID NO: 84787 - DNA, 512 bp, Zea mays
  unsure (1)..(512): unsure at all n locations
agagagtttgagggcctctatgtctagctcagcacgtcactgccatttccgtttcggaattcccgggtcgacccacgcgtccgatttgcattcacaaccgcagaagctggaaactacgttgcatgcttctgggttgatagtgcagagaaaggatcaggagtatctgtgaatcttgactggaagattgggatcgcaacaaaagattgggatgctattgctaagaaggaaaaaattgagggtgtagaactagagcttcggaaacttgaagtggcagtgcaggccattcatcagaacttgatatacctcaaagaaagggaagcagagatgcgaactgtgagtgagacaacaaattcaagggtcgtctggttcagtactctgtcgctatgggtctgcattgcggtatcggttttgcaagtccgacaccttcaagggttcttcagaaagaagaagctcatttagagtctctctgtaagatgttgcgctgtggttcagatgttgttcaccttggaagn

SEQ ID NO: 84788 - DNA, 519 bp, Zea mays
  unsure (1)..(519): unsure at all n locations
ggagtntaaaggttttgattaaagacaagaaaagtattgctactaccggtccggaattcccgggtcgacccacgcgtccgcgaaaagtttaactgctggagtttgcttgccaaagggcaacaaggatgataaaggcctggaaacagagacctggtatgatctagctctcttatacctaggtatggcacaatggagggatgcagaggtttgtgtattgaagataagatccatcagtccttattctgcattggcttggcatgctacaggaaaaatatatgaagcaaaaggtcttagaaaagaagctttgggagcttttttcagagccttagatcttgatcctaaacatgtcccaagtttaatatcaactgccactgttctacaacaacttggtgacaggccattgccttctatacggtgcttcctgactgatgcattacaactggatagaactaatcatgttgcgtggttcaatcttggccttctttacaaagaggaaggtggcaggtcagcagctgaggc

SEQ ID NO: 84789 - DNA, 528 bp, Zea mays
  unsure (1)..(528): unsure at all n locations
gaggtaaggacaggggtcngantaccgaatctctatggcaactctcaaanactcctngnanttnncagttcccggctcgacccacgcgtccgtagcaacatagaaagcacaatagtgtaccaacaatggcagccaaaatattttgcttccttatgctccttggtctttctgcaagtgttgctaccgcaaccattttcccacaatgctcacaagctcctatagcttcccttcttcccccatacctctcaccagcggtgtcttcaatgtgtgaaaacccaattgttcaaccctacaggatccaacaggcaatcgcaacaggcatcttaccattatcacccttgttcctccaacaaccgtcagccctattacagcagttacctttggtccatttggtggcacaaaacatcaaggcacaacaactacaacaacttgtgctagcaaaccttgctgcatactctcagcaacatcagtttcttccattcaaccaactggctgcattgaactctgcttgtttattgcaacaaccat

SEQ ID NO: 84790 - DNA, 526 bp, Zea mays
  unsure (1)..(526): unsure at all n locations
agggtaagaaggcctgntgctgctgtacccccgccatatataagcacngcctcgtaccggttcggaattcccggctcgacccacgcgtccgcaatgattcccgtgagaagcagcgcaaatttgttgaaaccattgagctacaaattgggctgaagaactatgaccctcaaaaggacaagcgcttcagcggttctgttaagctgcctcacatccctcgccctaagatgaaggtttgcatgcttggtgatgctcagcatgttgaggaggcagagagaatgggtatagacaatatggatgtggaagccctcaagaagatgaacaaaaacaagaagctagtgaagaagctggcaaagaagtaccatgctttccttgcatctgaggctatcattaagcaaattcctcgtcttcttggtcctggtcttaacaaggcaggaaaattccctaccttggtgacacaccaggaatcccttgagtccaaggttaatgagacanaggctacagttaagttccagctgaagaagtgctn

SEQ ID NO: 84791 - DNA, 490 bp, Zea mays
  unsure (1)..(490): unsure at all n locations
tagtttaagagtcgtgtatgatttctatgctagcttagncacgtctgtaccggtccggaattcccgggtcgacccacgcgtccgccgacatcgtcccttcgtccccacgagcaaccgataatccgccggcgttgagatgttggtttatcaggatctcctatctggcgacgagctcctgtcggattcattcacctacaaggagctcgagaacggcgtcctgtgggaggtcgagggaaagtgggtcacccaaggtcctgttgatgtggacattggtgccaatccatccgacgagggtggtgaggacgaaagcgttgatgacacagctgcgaaggtggttgatattgctgacacattccgtctacaggagcaacctccttttgacaagaaatcatttgtgtcttacatccaacaatacatgatgaatctcactgctgtggtggagccagagaaagcggatgagttcaaaagggtcgtcagggtgcaaccaact

SEQ ID NO: 84792 - DNA, 521 bp, Zea mays
  unsure (1)..(521): unsure at all n locations
gagtgagangagggtctnnttagcgcgatgggggagtaaaaagtagtcactcttcggaattcccgggtcgacccacgcgtccgaggaatgagggatgtgatatttgctgatattccaaagctcattccatttattgatctggaggatatgagcctattcagttgcttctacgattttgttttcttcatctgccgtgaaaaggtcaaaagagtgtcactattcagagagctgtagcagcatggaggattgttctaagtggaaggttccgtttgcttgatcgatggtgtaacttcgttgagaagtaccaacgccataacatatccgaggatacttggcagcagctgctagctttcagcaggtgtgtaaatgaagatctggaaggttatgacccacgaggtgcttggcctgttctgattgatgattttgttgagcaaatgcacagaatttatcactccactgacttgcacagtgcgatggaatcacagtgtaacatttccagtaccctttaaggactggccccc

SEQ ID NO: 84793 - DNA, 529 bp, Zea mays
  unsure (1)..(529): unsure at all n locations
tggaggggtagagttaggggcaggactggttacagagcggcgcgggggaaaaggtatcctctccggaattcccgggtcgacccacgcgtccggcttaaactgaatgggattgatacttctgctttcctatcacccgtagatctgacacgaggatcaattgagagaaatctccaaatcgctgcagttctgggagggctttctgtatcagctgcattggaactttctcaactccaaatcctgtttctcatactaggtctactatctttgtggtccgtggactttgtatattttggtggtggggtgagaaacttggttcttgatacaattggtcactatcttagccagaagtatcacaacagagttatccagcatgaagctggtcacttcttgatagcttacttgcttggagtgcttccaaaaggatacacaatcacaagcttagatacacttatgaatcaaagatcgcttaatgtgcaagcttgaacacactttgtggactatgagtttcttgaagagatcaatacaggcn

SEQ ID NO: 84794 - DNA, 511 bp, Zea mays
aatgctgtctacgacccgccaagtaccagcatagctcgtaccggtccggaattcccgggtcgacccacgcgtccggaccaactagcaacatacaaagcacaatagtgtaccaacaatggcagccaagatatggtgcctgcttatgctccttggactttctgcaagcgctgctacggcgaccattttaccgcaatgctcgcaagctcctatagcttcccttcttccgccgtacctctcaccagcggtgtcttcagtatgtgaaaacccaattcttcaaccctacaggatccaacaggcaatcgcagctggcatcttacctttatcacccttgttcctgcaacaatcatcagccctattacaacagttaccttcggtgcatttattggcacaaaacatcatggcacaacaactacaacaacttgtgctagcaaaccttgctgcctactctcagcaacagcagtttctttcattcaaccaactaggttcattgaactctgcttcttattagcac

SEQ ID NO: 84795 - DNA, 531 bp, Zea mays
  unsure (1)..(531): unsure at all n locations
ggggttagtgtgcaagagttgntngtaatggtatccccgcactatacagcaattgctcgtaccggtccggaattcccgggtcgacccacgcgtccgcggacgcgtgggcgcaaattgcaccaagaaatccatcgagaggccgtcgacgggggagattaatggcgtcgtcgtctagcagcagccaccgccgcctcatcctcgcagccgccgtcctgctctccgtgctcgcggctgccagcgccagcgccgggacctcctgcgtgccggggtgggccatcccgcacaacccgctcccgagctgccgctggtacgtgaccagccggacctgcggcatcgggccgcgcctcccgtggccggagctgaagaggagatgctgccgggagctggcggacatcccggcgtactgccggtgcacggcgctgagcatcctcatggacggcgcgatcccgccgggcccggacgcgcagctggagggccgcctagaggacctgccgggctgcccgcgggaggtgcaaaggggattcgccgccc

SEQ ID NO: 84796 - DNA, 521 bp, Zea mays
  unsure (1)..(521): unsure at all n locations
agtgtaaaagacctgtnctaccgaacggggggaaaaaagtagtgctcgtaccggtccggaattcccgggtcgacccacgcgtccgcccacgcgtccgcccacgcgtccggattgaagggctaaaacgccatccaaggtatggagctcgaattgagagcagcacatacaagggcatgtaccatgccctaaaggagattgtcgcaaaggagggatttggaggcctttataagggccttttcccctctttggtgaaatcggcccctgctggtgctgtgacatttgtggcatatgaatacatctcagactggttagagtcgatactgatgtgaaaatcttcaatgcagatagggagcaaggctggagttgagtgaggtcttgatggatcatggagctatcaagataccatgacgagaactttttgcacaccgtggacatggaggatggagaccggaaggtcaatcgtcaagtgcatacaattcctagagatccgatacatgtaaagccttacatagaaaagagcn

SEQ ID NO: 84797 - DNA, 488 bp, Zea mays
  unsure (1)..(488): unsure at all n locations
ngaggggtaagaggatgctcggtgtacagacgacgggggggaaacagtattgctcttaccgattcccgggtcgacccacgcgtccgggtctccatccagggcctcgtgctgaatgacaggccatacttcaatgagccaggatgcaagagctcggctgaaacgacaggtggtgagaggtgttccctggcttacaatcagacggccttcgtcagatcatgcaagacgatgctgtattcactccggaagcctccaatgcattttgagacccttgtgttgtggcacttccacgagcatgagcgtgccatcctcgacgcttgcagggcttacatgtctgggacagtcgttgggtcgtctgctgggactgggagcaaccgcagatacgtccatgacaagtgctttgcagaattccacaagtcgctgacgctctacactgaacatctcagggctgagtttgctgcaaacacaagacgagtgatggagcttgaaac

SEQ ID NO: 84798 - DNA, 471 bp, Zea mays
  unsure (1)..(471): unsure at all n locations
gaggtttagggcttgttccgcgggggaggtattgtcatcctcgtccggaattcccgggtcgacccacgcgtccgcccacgcgtccgccgccgccggttcatctgccgccgccaccatgccactaccctactgaaccgccccggcctcagcctcatccccagccacacccatgcccgtgccaacagccgcatccaagcccgtgccagctgcagggaacctgcggcgttggcagcaccccgatcctgggccagtgcgtcgagttcctgaggcatcagtgcagcccgacggcgacgccctactgctcgcctcagtgccagtcgttgcggcagcagtgttgccagcagctcangcaggtggagccgcagcaccggtaccaggcgatcttcggcttggtcctccagtccatcctgcagcagcagccgcaaagcggccaggtcgcggngctgttggcggcgcagatagcgcagcaac

SEQ ID NO: 84799 - DNA, 519 bp, Zea mays
  unsure (1)..(519): unsure at all n locations
tagttacgtntaagatgggtgtcacgccacaaagacctacctgcatctcttctcggaattcccgggtcgacccacgcgtccgcccacgcgtccgcccacgcgttcaatgttttccggatgaagcttcttggtgcagaggggacgggggtacattctgggacagcaaccctgaaggatgcaacttcagaggctatccgtgactgggtcacaaatgtggagaccacacactatatcttgggctctgttgccggtccgcacccgtacccgatgatggtgagggagatccataagggacttggcaaggaaacccggaggcaggccatggacaagtggggtggcaagccggacgtattggttgcctgcgtcggcggtggatcgaacgccatgggcttattccatgagtttgttgaagaccaagatgtgaggctggttggagtggaggcagctggccatggcgtagacaccgacaagcatgcggcgactttgacaaaaggccaagtccgaagtcttcattgatcc

SEQ ID NO: 84800 - DNA, 516 bp, Zea mays
  unsure (1)..(516): unsure at all n locations
agttaagtttgtgttcacgaaagaaaagtactgctcatccggttcggaattcccgggtcgacccacgcgtccgatgtccagcagcaaatactactaccatttggccagctagctccaccaggnccggttggcttgttgacccaccaccaatggcttccgttctaccagcagtttgtggctaaccccgcaacccttttacaactgcaacagttgctgccctttgtccaacttgctttgacaaacccagcagccttctaccaacaacacatcattggcggtgccctcttttagattgcttattagttgtcattcaataatgaagttttttggctgatgtatgtggcctcctagaaataagaagttatatttccaaaaaaaaaaaaaaaaaaaaaaaaaaaaaaaaaaaaaaaaaaaaaaaaaaaaaaaaaaaaaaaaaaaaaaaaaaaaaaaagggaaaaaaaaaaaaaaaaaaaaaaaaaaaaaaaaaaaaaaaaaaaagggcggccccttttaaaa

SEQ ID NO: 84801 - DNA, 522 bp, Zea mays
  unsure (1)..(522): unsure at all n locations
agtttaggagcatggtcntcttacgaatccgggcgtaaacaggattgctcgtaccggtccggaattcccgggtcgacccacgcgtccggtgaaccttatgatttgtcactgcaccatccccggcaagcaagggactgattgggagggtggatacttcccactcacccttcatttcagtgaggattaccctagcaagcctcccaagtgcaagttccctcagggtttcttccacccaaatgtctatccttctggaacagtctgtctttcgatccttaatgaagatagtggttggagaccagctattactgttaagcagattctcgtcgggatccaggacttgctagatcagccaaatcctgctgatcctgctcaaacggatggctatcacctttttatccaggatcctacagaatataagaggcgtgttaaactgcaggcgaagcagtatcccgcgttggtctgagaacttcgccctactaaggatccaagctgcacattcgcatagntgntgctagggtcttg

SEQ ID NO: 84802 - DNA, 517 bp, Zea mays
  unsure (1)..(517): unsure at all n locations
nggttagatgctgtattacgacccgaatatatagcattgatgtaccggtccggaattcccgggtcgacccacgcgtccggagaccaactagcaacatagaaagcacaatagtgtaccaacaatggcagccaaaatggtttgcctccttatgctccttggtctttctgcaagtgctgctaccgcgaccattttcccgcaatgctcacaagctcctatagcttcccttcttcccccgtacctctcaccagcggtgtcttcggtatgtgaaaacccaattcttcaaccctataggatccaacaggcaatcgcagctggcatcttacctttatcacccttgttcctccaacaatcatcagccctattacagcagttacctttggtgcatttattggcacaaaacatcagggcacaacaactacaacaacttgtgctagcaaaccttgctgcctactctcagcaacagcagtttcttccattcaaccaactagctgcattgaactctgctgcttatttgcan

SEQ ID NO: 84803 - DNA, 510 bp, Zea mays
  unsure (1)..(510): unsure at all n locations
gggtagtcctgatgtggtaacgccacgacagtactgtcatcncgttcggattcccgggtcgacccacgcgtccgctcttccagaggaaatttatgcgaagcttgtagctgcaaagaatttccgtgctggcggcttgagcctgcgtcagatacgatttgccagtgtagatatggagcttcatacaagttatgaccccaatggctcagtgtccatatatgatgtggaccaaagagttgcagaacggacacaagttcttgctcctctgccggaggacagattcctgtgcagctttagccatatttttgcaggtggctatgctgctggatactacagttacaagtgggctgaagtactgtcagctgatgcattctcagcttttgaagacgctggtttggatgatgagaaggcaatcgaggaaactggcagacgattcagagacactgttcttgcgcttggaggtgaaaagtctcgcttgaggtgttcgtttcattccgagggacggagcctttc

SEQ ID NO: 84804 - DNA, 518 bp, Zea mays
  unsure (1)..(518): unsure at all n locations
agtatgagttatcntgttaaaagaacgcgaaagtattgctatnaccggttcggaattcccgggtcgacccacgcgtccggtattcaaaaacacaccaagcgaaacatattagctacaacctaacaacaatggctaccgagagtgtattccttcatggcgcttttgggctttttgggagcgcaacatatgcgttcattattccacaatgctcacttgctacaagttccattattacacaggtcctaccaccagatacttaatgggctttgacacccagctgtgcaagcctatatgctacaacaagcaattgcggcgagcgtcttacaacaaccaattttccagttgcaacaacaatccttggcacatctaacaatacaaaccatcgcaacgcaacagcaacaacaattcctaccagcactgagccacctagccatggtgaaccctgtcgnctacttgcaacagcagttgcttgcatcaaacccacttgctctggcaaacgtagttgcaaaccagccact

SEQ ID NO: 84805 - DNA, 512 bp, Zea mays
gttagggaggcttggtaacgaacagacagtactgtcaactcgtccggaattcccgggtcgacccacgcgtccgagctttatctactccagagcgcagaagaacccgatcgacaccatgagggtgttgctcgttgccgtcgctctcctggctctcgctgcgagcgccacctccacgcatacaagcggcagctgcggctgccagccaccgccgccggttcatctaccgccgccggtgcatctgccacctccggttcacctgccacctcctgtgcatctcccaccgccggtccacctgccgccgccggtccacctgccaccgccggtccatgtgccgccgccggttcatctgccgccgccaccatgccactaccctactcaaccgccccggcctcagcctcatccccagccacacccatgcccgtgccaacagccgcatccaagcccgtgccagctgcagggaacctgcggcgttggcagcaccccgatcctgggccagtgcgttgagttcctga

SEQ ID NO: 84806 - DNA, 513 bp, Zea mays
agtaaaggtacttgttaatgcacagacagtactgctatacctgttcggaattcccgggtcgacccacgcgtccgagcgttatctactccagagcgcagaataacccgatcgacaccatgagggtgtagatcggtgaggtcgctcttctaggtctcaatgttagcgccacctgcacgcatacaagcagcagctgcagatggcagccaccaacgacggttcatgtaccggctttacaacatctgccacctgaaaacacctgcgatctcctatgcatctgccaccgacgagacacctgtttgtcgccggtccacctgtaaccgacaggccatgtcccatcgccctttcatacgacgccgccaccatgacagtacattactcaaccgctgcagcctcagactaatccccagccacaccgatgctactgccaacaggagcattaaacttggaccacctgtaggaacctgctttgctggcagtaccttgattctgcgccaaattggccagtttttcacc

SEQ ID NO: 84807 - DNA, 523 bp, Zea mays
  unsure (1)..(523): unsure at all n locations
agtntaagcaagtctgncgtacagtatcacagcattatcagcatagctcgtaccggtccggaattcccgggtcgacccacgcgtccgcccacgcgtccgcccacgcgtccgcttgctgcctactctcagcaacagcagtttcttgcattcaaccaactagctgcattgaactctgctgcttatttgcaacaacaactaccattcagccagctagctgctgcctacccccaacaatttcttccattcaaccaactggcatcattgaactctcctgcttatttacagcagcaacaactactaccattcagccagctagctggtgtgagccctgctgccttcttgacacaacaacagttattgccgttctacctgcacgctgcgcctaacgctggcaccctcttacaactgcaacaattgctgccattcaaccaacttgctttgacaaacccagcagcgttctaccaacaacccatcattggtggtgccctcttttagatttcttatgagttatagttcaataata

SEQ ID NO: 84808 - DNA, 462 bp, Zea mays
agtttgtgtcttgataccgcacgacagtattctcatccgtccggattccgggtcgacccacgcgtccgcccagcgtccgagcttttgcgcttcgcaagctgcctttgaccaaggctaagcgatgccttgaggatgttattgctcacaagcaggcaattcccttccggagatactgtggaggtgttggtcgcaccgcacaagcaaagtctcgccactccaatgggcagggtcgctggcctgttaagtcagccaggttcatattggatttgctgaagaatgctgagagtaacgctgatgtgaaaggcttggacgtggacaacctctatgtttcacacatccaggtgaaccaagcccagaagcagaggcgccgcacctaccgtgctcacggacgcattaacccttacatgtcctccccttgccacattgagctgattctgtcagagaaggaagagcctgtgaaga

SEQ ID NO: 84809 - DNA, 415 bp, Zea mays
  unsure (1)..(415): unsure at all n locations
agtntagaaggctgtatcacgaaagggcgtaatgtataccgtccggaattccggtcgaccagcgtccgccaccgtccgcccaccgtcgcggaccgtggcgtgcggagcacgacggccagggcagaccacagttccgggcccctgcttcgcggtcaactggccacatctgcaaaacccagggttccccggcggcaggtgccgcggcttacgcgcgatgttctgacacaacactgccactgattcgtcgccagcggcggctgcgtcgcatcatcgcgccgtagcgaccagaccattctcatgcatgaataacaaggcgtgccgttgtgatgccaaatgatactatcgtcagagccgaacggctatcgagctcaactatgtcccgggaaacccagctggcttacggataggccgaaac

SEQ ID NO: 84810 - DNA, 515 bp, Zea mays
gagtttagtaggctgtgtacgaagggggggagaagtagtgctctaccggtccggaattcccgggtcgacccacgcgtccgcctgctggactcggactacacggcgaagctgtcggatttcgggctagcgaaggctggacctggagaagacgagacccacgtgtcgacccgagtcatgggcacgcagggctacgccgcacccgagtacatcatgacagggcatctaacgaccaagagcgacgtgtacagcttcggcgtcgtgctcctggagctgctaacggggcggaaggcgttggacaagaaccggccgccgcgagagcagagcctggtggaatgggcgcggccatgcctgcgcgacgctcgccggctggagcgcgtcatggaccggaggctgccgcgccccaccacgcccacccgagcagcccaaaaggccgccgggatagcccaccagtgcctcagtgtcagccccaaatcccggccccaaatgtcccacgttgtacaggccctggagtcgct

SEQ ID NO: 84811 - DNA, 516 bp, Zea mays
  unsure (1)..(516): unsure at all n locations
tgaagatgctgntctcaagaggtggggggaaaagtagactcgtaccggtccggaattcccgggtcgacccacgcgtccgcatgttcaggatatgatcactgctggaatggacacaacagtcatctcagtcgagtgggcgatggcagaactggtcaggaaccctagggtgcagaagaagctgcaagaggagctcgaccgtgtggttggccgtgaccgcgtcatgctagagaccgacttccagaacctcccctacctacaggccgttgtcaaggaatcactccggctgcacccgccgacgccactcatgctcccgcacaaggccagctcgaacgtcaagatcggaggttacaacatccccaagggcgccaacgtgatggtgaacgtgtgggcggtggcgcgtgatcccaaggtctggagcaacccgctggagtacagaccggagcgcttcctggaggagaacatcgacatcaagggcagcgacttcagggtgctgccgttcggtgctggccggcgtgt

SEQ ID NO: 84812 - DNA, 515 bp, Zea mays
ggagagaagctgtatactgacacgcatataaagcattgctcgtaccggtccggaattcccgggtcgacccacgcgtccgcggacgcgtgggctagcaacatagaaagcacaatagtgtaccaacaatggcagccaaaatattttgcttccttatgctccttggtctttctgcaagtgttgctaccgcaaccattttcccacaatgctcacaagctcctatagcttcccttcttcccccatacctctcaccagcggtgtcttcaatgtgtgaaaacccaattgttcaaccctacaggatccaacaggcaatcgcaacaggcatcttaccattatcacccttgttcctccaacaaccgtcagccctattacagcagttacctttggtccatttggtggcacaaaacatcagggcacaacaactacaacaacttgtgctagcaaaccttgctgcatactctcagcaacatcagtttcttccattcaaccaactggctgcattgaactctgctgcttat

SEQ ID NO: 84813 - DNA, 472 bp, Zea mays
gagctagaagactggtacttcctaaccccgccatcgcatttcctttcggaattcccggctcgacccactcgtccgagaaggtagcaatgtcgtgaagcgtacgtgaactggaaacggatggacaagtatatgtgcaggttgatgtggtgtttccggatcgtgtgtttgtctcagatgaaaaatatacaatattttgagtccaagttaatcaatgttccatttgcctatactgagctcaatttgctaggtcgcatgttccatgtaattactatatctgcctatatcaattttcaagctcttttagatgtgcttaatacttaaccggtctaacctcatctacatgctaagggacctctttcctcagtacccaatcttacgcaagtgcgaatacgactgcatatctattgtatagcctcacaaatattcaaaccacttggctaaagttccacaacctgtagtttagtaaaacctg

SEQ ID NO: 84814 - DNA, 474 bp, Zea mays
  unsure (1)..(474): unsure at all n locations
gagtngagggaaggatcttatccaccaaagacccatagcagtatagatgtacggaattgcagtttcgacccacgcgtacgctctcctgcccaccgccatcgcccctcctacgctctgcgctgccacagcctcaccccggcgcccccgccgattcacgtaggcctttgttggaaggaacgatggagcagaccttcatcatgatcaagcccgacggcgtccagcggggcctgatcggcgacatgatcagtctccttcgagaagaaagggttctacctcaaggggatgaagctcatgaacagtgagagggccttcgcgcagcagcactacgctgacctttacgacaagcctttattcactcggttgaacagatacattatgtccggccccgtagtggcgatggtgtgagaggcgaatgacatcatgttgactggccgcaggatcattggggccaccaggccttgagaggcagacccc

SEQ ID NO: 84815 - DNA, 471 bp, Zea mays
agtttatgaggatctgataaccgaacggaagtaacgtcatacccgtccggaattcccgggtcgacccacgcgtccgcacacactcgagaactccatttcgatctcatttgaaatcaacccatcctcgtttccggcgtgtagcagcctctcaccctcatggccaagatcaagatcgggatcaatgggtttggcaggatcggaaggctggtggccagggtggccctgcagagcgacgacgtcgagctcgtcgccgtgaacgaccccttcatcagcaccgattacatgacctacatgttcaagtatgacactgtgcacggacagtggaagcaccatgaggtcaaggtgaaggactccaagacccttctctttggtgagaaagaagttgctgtgtttggctgcaggaaccctgaggagatcccatggggttcggttggcgctgaatatgcttgtgagtctactggtgttttcacc

SEQ ID NO: 84816 - DNA, 520 bp, Zea mays
  unsure (1)..(520): unsure at all n locations
nagttntnagaaggcgtgtgtactgatcccgcatatacagtattgctcgtaccggtccggaattcccgggtcgacccacgcgtccgggtgggttggcttctcctccccctccggttcgggttcgggttcgtgaggttctccggggttcggtttcgtgggtgagcggatcgagatggcggcgtcggatgttgagtaccgctgcttcgtcggcggcctcgcctgggccacggacgaccactccctccacaacgccttcagcacctacggcgaggtcctcgagtccaagatcatcctcgatcgggagacgcagaggtcccgcggcttcggcttcgtcaccttctccacggaggaggcgatgcggaacgccatcgagggcatgaacggcaaggagctggacggccgcaacatcaccgtcaacgaggcccagtcccgcggcggccgtggaggcggcggctgtgggtacggtggtggccgtggaggcggcggctacggcngtggcgggccccgtgatggcngctgt

SEQ ID NO: 84817 - DNA, 524 bp, Zea mays
  unsure (1)..(524): unsure at all n locations
agggaaaagcctggagtcacagcacgggcagctatacagtcattgctcgtaccggtccggaattcccgggtcgacccacgcgtccgcccacgcgtccggcaaagcggcagtgcgtagagaggatcgtcgaacagaacagcatggagatggtcatcgttctcgtcgtgtgcctggctctgtcagctgccagcgcctctgcaatgcagatgccctgcccctgcgcggggctgcagggcttgtacggcgctggcgccggcctgacgacgatgatgggcgccggcgggctgtacccctacgcggagtacctgaggcagccgcagtgcagcccgctggcggcggcgccctactacgccgggtgtgggcagacgagcgccatgtaccagccgctccggcaacagtgctgccagcagcagatgaggatgatggacgtgcagtccgtcgcgcagcagctgcagatgatgatgcagcttgagcgtgccgctgccgncagcagcagcctgtacgagccagctctgatgcagcaa

SEQ ID NO: 84818 - DNA, 473 bp, Zea mays
gaggttaggagtgcttggtaccgacagggagatatctcacctcttccggaattcccgggtcgacccacgcgtccgggtgggttggcttctcctccccctccggttcgggttcgggttcgtgaggttctccggggttcgggttcgtgggtgagcggatcgagatggcggcgtcggatgttgagtaccgctgcttcgtcggcggcctcgcctgggccacggacgaccactccctccacaacgccttcagcacctacggcgaggtcctcgagtccaagatcatcctcgatcgggagacgcagaggtcccgcggcttcggcttcgtcaccttctccacggaggaggcgatgcggaacgccatcgagggcatgaacggcaaggagctggacggccgcaacatcaccgtcaacgaggcccagtcccgcggcggccgtggaggctgcggcggtgggtacggtggtggccgtggaggctgc

SEQ ID NO: 84819 - DNA, 469 bp, Zea mays
agtgagggagtactataatccagcacgacagtatctcatctcgtccggaattcccgggtcgacccacgcgtccgcccacgcgtccgatccggagcagccgcagtcccaccgaccccgccgccggtcgccctgcatgtgctcgccgctgcctctcgtttctcttttcaataatcaagatgagccgtggtggtagtgccggtggtggtcaaagttctctgggttatctctttggaagcggtgagccccccaaaccagcagtggcaccagctgcaagtgctccacctgttgagaaaccatctgctgcaaagactgatgcggccaagcaggttgctgctggggttaccagccaaaccaataactaccacagggctgatggtcagaacactggcaacttccttacggaccgtccttcaaccaaggtccacgctgctcctggcggtggctcttccctgggctacctgttcggtgg

SEQ ID NO: 84820 - DNA, 515 bp, Zea mays
  unsure (1)..(515): unsure at all n locations
nagttttagggttcttggacccgcacgacgtactctctaccgcgtccggaattcccgggtcgacccacgcgtccgctttgacaaacccagcagcgttctaccaacaacccatcattggtggtgccctcttttagattgcttatgagttatagttcaataataaagttttttgtctgatgtttgtggcttcccagaaataagaaagtacatttctagattctaaaaaaaaaaaaaaagggcggccgctctagaggatccaagcttacgtacgcgtgcatgcgacgtcatagctcttctatagtgtcacctaaattcaattcactggccgtcgttttacaacgtcgtgactgggaaaaccctggcgttacccaacttaatcgccttgcagcacatccccctttcgccagctggcgtaatagcgaagaggcccgcaccgatcgcccttcccaacagttgcgcagcctgaatggcgaatgggacgcgccctgtagcggcgcattaagcgcggncggtgt

SEQ ID NO: 84821 - DNA, 521 bp, Zea mays
  unsure (1)..(521): unsure at all n locations
agttnttagtaagcgtcgtctacgtaccccgctatatagtattgctcgtaccggttcggaattcccgggtcgacccacgcgtccgcaagaagatgaacgacatctacggcgactggccggaacaggactgagagcgcgtacgaggcatcacctgctcgatcgaagctaccatgtctaccttcctgcctttgatcaccgtgatcgacaacatcagattgttacaggctcctatagcttnccttcttcccccgtacctctcaccagtgttgtcttcagtatgtgaaaacccaattcttcaaccctacaggatccaacatgcaattgcatcaggcatcttacctttatcacccttgttcctccaacaatcatcagccctattacagcagttacctttggtgcatttattggcacaaaacatcagggcacaacaactcgtgctagcaaaccttgctgcctactctcagcaacatcagttacctttggtgcatttgttggcacaaaacattatggcacaacaactg

SEQ ID NO: 84822 - DNA, 529 bp, Zea mays
  unsure (1)..(529): unsure at all n locations
tggtttttaggaaagagcttgtgttccggtccacgcctcgctacgctattgcctgtaccggttcggaattcccgggtcgacccacgcgtccgtacatagtgaagtacactagcaacatcttagcaccaatggcagccaagatttttgccgtccttgccctccttgctctttcagcaaacgttgctaccgcgactattattccacaatgctcacaacaatacctctctccggtgacagccgcgagatttgaatacccaactatacaatcctacaggctacaagaggccatcgcagcaagcatcttacggtcgttagcattgactgtccaacaaccatatgccctattgcaacaaccatccttagtgaatctatatctccaaagaatcgtagcacaacaactacaacaacaattgcttccaacaatcaaacaagtagttgcagcgaaccttgatgcttacctncagcaacaacaatttcttccattcaatcaactagctggggtgaaccctgctgcttacttgcaggcaca

SEQ ID NO: 84823 - DNA, 515 bp, Zea mays
ggttttggagtgttttgaaccagcaagatgtactctcgtacccgttcggaattcccgggtcgacccacgcgtccgtgccagctttggttatgattacttgcttaggcagtgccgcctaagaggcaaaatagactcgaatggtgttgttgccgcatacttggaagagaggttgaacatgggtgtcaacttccttctatctgctgagattgaccattgtaagaagaactacaagtttggttttggaatgaccgtaggagagtaattctgccaaaacaattgctgtgagcgcacatgagatacttatgcagtcggcttcgcgcgtatgttgacttgttaaagatatttcaggtctcagttttgactgatcaggttttgccattgcgccgtggaaaaacacaggccgttgctgctttacagggttttgtatttcagtgttttttcagctacttgagcatgggggccatgattctttggtcatcttggatgtaactagctgattggtgttccaacaatgt

SEQ ID NO: 84824 - DNA, 524 bp, Zea mays
  unsure (1)..(524): unsure at all n locations
naggaagggtgnttnnnttctgagatgaaggtaactgtaaagctcgtacgcgattcgcagttccgaggctacgacgtacgatcagtgcagcccgacggcaacgccttaatgttggcctcaatgccagtcgttgcggcagcagtgttgccagcagctaaggcaggtggagccgcagcaccggtaccaggcgatcttcggcttggtccctccagtccatcctgcagcagcagccgcatagcggccaggtcgcggngctgttggcggcgcagatagcgcagcaactgacggcgatgtgcggcctgcagcagccgactccatgcccctacgctgctgccggcggtgtcccccactgaagaaactatgtgctgtagtatagccgctggctagctagctagttgagtcatttagcggcgatgattgagtaataatgtgtcacgcatcaccatgggtggcagtgtcagtgtgagcaatgacctgaatgaacaattgaaatganaagaaaaagtattggtccaaaaaaaaaa

SEQ ID NO: 84825 - DNA, 527 bp, Zea mays
  unsure (1)..(527): unsure at all n locations
gagtnttagatagagctgntataacgatatgcgggcagatgacgagaaatgctcgtaccggtccggaattcccgggtcgacccacgcgtccggggagaggctttacccttgaggagttgaaggctgcgggcattccaaaaaggcttgctccaaccattggcatttctgtggatcaccgccgcaagaacaaatcccttgaggggctgcaggccaatgtccagaggcttaagacatacaaggccaagctggttatcttcccaaggcgtgctcgcaaggtcaaggctggtgactctactctggaggagcttaccactgctacccaggtacagggtgactacatgccaattactcgcggtgagaagcgctctgtagaggttgtgaaggtcacagatgagatgaaggcgtttgcggcctatggcaagctccgccttgagcggatgaacaagaagcacctcggtgcccgccagaagaaggcagctgaggcagagaaggaagacangaagtgaagcagccaaactttgtagcct

SEQ ID NO: 84826 - DNA, 516 bp, Zea mays
agtgggtaggggttcctacgaacccgcagttaacagtattgctcgtaccggtccggaattcccgggtcgacccacgcgtccgccttgatggagctaatgttgaaataagagaggaggttggagaagataatttcttcctgttcggtgccaaagccgatgaagttgctgggctgaggaaggatagagaaaatggtctgttcaaaccagacccacgttttgaagaagccaagcagtttataaggagtggcgcttttggcagctatgactatgaacctctcttggattcccttgaagggaattctggatttgggcgtggtgattatttccttgttggctatgacttcccaagctacatcgatgcacaggatcgggtggatgcagcctacaaggataagaagaagtggaccaagatgtccatcttgaacacagctgggagtggcaaattcagtagcgatcggaccatcgcccagtatgccaaggagatatgggacatcaaggctagccctgtcgtgtgaa

SEQ ID NO: 84827 - DNA, 526 bp, Zea mays
  unsure (1)..(526): unsure at all n locations
gttaagagttttnnnnnnttgngaattcgatgctatgtctannccgctnngtntcggaattcccgggtcgacccacgcgtccgcgcaacatcaccgtcaacgaggcccagtcccgcggcggccgtggaggcggcggtggtgggtactgtggtggccgttgaggctgctgctacggcggtggctggcgccgtgatggcggtggcggctacggcggtggctgcagatacggtggcggctagaagctactgtggttgtggccagcgctacgtgtgtggcaaccgtggcggcggttacggcaactccgactgtaactggaggaactgagcggtggggcccgtgcggtcaagttatctctgttcgctaccgtgatgtttaccctagtccagatggtttatcttcgttcgtgtcgtgttagttgctgcccatctgcgtttttgattgcaaggtcgctctgtgtcagttagtagtgctgagttcatacttcggtttagcagacccatgcattaaacagcatggactggaggtn

SEQ ID NO: 84828 - DNA, 480 bp, Zea mays
  unsure (1)..(480): unsure at all n locations
naggggagttagctttctgattaacgacaagaacagtactgctctaccggtccggaattcccgggtcgacccacgcgtccgcggacgcgtgggcttgatcttggccattgaagcaccgataaacttcgccaactccaactacctgaatgaaaggattaaaagatggatagaggaagaatcttttgaacaggataaacatactgaactccatttcataatcttggatctgtcagctgttcctgcaattgacacaagtggcatagcgttcctcattgacataaagaaatcaatagagaaacgtggtctggagcttgtgcttgtcaatccaactggagaagtcatggagaaaatacaacgtgcaaacgaggctgaaaactattttaggccagattgcttgtatctgaccactggcgaagcaatcgcttcactttctgcacttgccaagatgacaaaaccctaaatggattgctgaattgtcat

SEQ ID NO: 84829 - DNA, 501 bp, Zea mays
  unsure (1)..(501): unsure at all n locations
cgtactgtctcgctgccttgaacttgtannatcgngatctactcccgcatctaccgctcgacccacgcgttcgatgaagatagattggtagtgaggaacattacacgattagtggcacaagattatatttgaatagaaggattgtattttggtgagacaattctcatgttgcaagattagaggcaatatgggttcttcttgcttatgcttgtgcttacaacattaaactctaccaaatggatgtaaatgacgttttttctaaatgctaagattagtgaactagtgtatgtggagcaacctctcggttctgaggacccccaaagcatttccacatgttcaagctttctaaaccttctatgggcttaagcaagctccatgcacttggtttgaaaggcttatagaattcttgttttccaaattctttaaaattgtcaaggttcgcaccttttgttcactaaaaaattggccaagatttatttgcttgtcaaatctaccttgacg

SEQ ID NO: 84830 - DNA, 506 bp, Zea mays
  unsure (1)..(506): unsure at all n locations
gtagagaggagctagtttttatgccccacgtacgncgtactgctttcggaattcccggctcgacccacgcgttcgcgagcttcgtgttgcaccagaggagctctcctgtgttgctcactgaggctcctttgaagccagaggccaacagggagaagatgacccaaattatgtttgagactttcaatgttcctgccatgtatgttgcaatccaagcagttctatcactctatgctagtgggcgtactactggtattgttcttgactctggtgatggtgtgagccacactgtgcccatttacgaaggatatgcccttcctcatgccattcttcgtttggatcttgctggtcgggacctcacagactccctcatgaaaatcctgactgagaggggttactccttcacaacctctgccgagcgagaaattgtaagggacatcaaggagaagctggcatatatagcccttgactatgagcaagagttggaaactggcaagaacagctcctta

SEQ ID NO: 84831 - DNA, 507 bp, Zea mays
  unsure (1)..(507): unsure at all n locations
ggcagggggaggtctgagtcctggacgaatggctnagtcatgtcgtaccggtctcggaattcccggctcgacccacgcgtccgcccacgcgtccggtctatccacttgatgctgtctacgattcccctgatgatgtgcctgaagatgtcaaatcgaacaaaagatatgcaggggcatcaaactggacagtaaaggaagttgttgaatcagtgaggaatgattttggcagcattgacatactagtgcattctcttgctaatggcccagaggtaacgaagcctttgttggaaacctcaagaagaggctatcttgcggcaatttctgcatccagttactcctatgtttcattgcttcagcacttccttcctataatgaatcccggtggtgctagcatctctctaacatacattgcatctgaaagggcgattcctgagtatggtggtgggatgagttctgctaaagcagatctagagagcgattcacggttgcttgcattcgaagctggca

SEQ ID NO: 84832 - DNA, 504 bp, Zea mays
  unsure (1)..(504): unsure at all n locations
agtcgtcagggcctgataaactgttctngtgctagtcatgtctgtccggtctcggattcccggccgacccacgcgtccgagaccaactagcaacatagaaagcacaatagtgtaccaacaatggcagccaaaatatggtgcctccttatgctccttggtctttctgcaagtgctgctacggcgaccattttcccgcaatgctcgcaagctcctatagcttcccttcttcccccgtacctctcaccagcggtgtcttcggtatgtgaaaacccaattcttcaaccctacaggatccaacaggcaatcgcagctggcatcttacctttatcacccttgttcctccaacaatcatcagccctattacaacagttacctttggtgcatttattggcacaaaacatcagggcacaacaactacaacaacttgtgctagcaaaccttgctgcctactctcagcaacagcagtttcttccattcaaccaactaggttcattgaactctgcg

SEQ ID NO: 84833 - DNA, 520 bp, Zea mays
  unsure (1)..(520): unsure at all n locations
cgagtgagtgacgcctgtcgcatcctntaaatctngatnagncgattacgtctccggttcagaatccgcggcgggagccacgcgtgcgcttgttgctggcagcaatgattattcattatatgtctatgatcttcatgcaagcaaagtgacattacgttgatgtgctcatacatctgatgtcaatacagtagcatttgctgatgaaaccggccatctcatatattctggaagtgacgacactttatgcaaggtctgggacaggcggtgtttgtccgcatgacaggctgccggagttttgactggacatttgcatgggataacacatattgacagtcgtggacatggacgaagtctcatatccaatggaaaagatcaagcgggggggcctgttctatatcacgaaaatgatgtcctatgcccgatagttctgcacattgatccccaatcctgtgaccacatcactttccaagttttcctactcatcatatccaccttaagcctacctctcatcacctcatcc

SEQ ID NO: 84834 - DNA, 528 bp, Zea mays
  unsure (1)..(528): unsure at all n locations
agtagtaacctaaactttttccccnttttatcatgattcatatccggtcagaatacccagctggacgccacgcatcctggcaccaccaatgatgggttgttggtataacactgttgaattataattcaatgatcgatttttttggatgatgggcgagccattccacaaataagaaagtacatttctaaaaaaaaaaaaaaaaaacaaaaacaaaaaaaaaaaaaataaaaacaaaaaaaaatataatacacaacaaataaaaaaaaaatttaaaaaaaataaaaaaacagcctcacacttttaaagatccaaactacactactttataatacaaataaaaaactattattacataataaccaaaaatatatataattgggcaggctatttaaaaacattttatcattaaaaaaaccccttactatacccaaactttatatacatatcaaaaaaaatcaacattttctacaaattaattaaatatctaaaaaataccccaaacttaaaccactttttaaaaaacaatcc

SEQ ID NO: 84835 - DNA, 514 bp, Zea mays
  unsure (1)..(514): unsure at all n locations
acgttagcactcttaacatttttttggcaaattntttngncgnattcgntcccgaattaccggctcgacccacgcgtccgggcgcgtggccctggtgaactacgggtatgactatggccgtctcgttgtcatcgtcgatgtgatcgaccagaacagggcacttctggatgcccctgatatggtcaggtgccaggtgaacttcaagcggctctcacttactgacatcaagattgacatcaaacgtgtccccaagaagacagccctgatcaaggcgatggacgaagctgatgtgaagaccaagtgggagaacagctcatggggcaagaagctgattgtccataataggaaagcattcgttaatgactttgataggttcaaagtcatgcttgcaaacattaaaacgcgctagtgttatcatgcaagaactttccaatctgaataatgcgtccaccgccttaaagagtccctttccctgaatctcatcttataacttattttttattaaatccgaact

SEQ ID NO: 84836 - DNA, 508 bp, Zea mays
  unsure (1)..(508): unsure at all n locations
cgtaagagagggcctgnagtacgttaccccgccatatacagtactatcgcaccggttcggaattcccgggtcgacccacgcgtccgcccacgcgtccgcggacgcgtgggtgctgacgctgggttttcagatgttacaaagaatgtcttggctgtcctggcggacaatggcaggctgaaatatattgaacgcattgcggagagatttgttgatttgactatggaacataagggggagatgaaggttgtggtcaggacagttatttcactcaccaaggaggaggagaaagaactcaaggaaaccttgcaggatatccttggggaaaacaaaactattttggttgaacagaagattgactacagcatcatgggaggattagtgattgaattcgggcagaaggtgcttgatatctcaattaggaacaaggcgaagccaatggaggcgttcttgaggcaaccacttgactttttacaaccttttggattaaagaaggctcatcggattgagc

SEQ ID NO: 84837 - DNA, 512 bp, Zea mays
  unsure (1)..(512): unsure at all n locations
ngggcggggagaggctatactgactgacaacgacacgtacagtcatgacgtaccggtttcggaattcccggctcgacccacgcgtccgcctgcattggccatcatcgcaaaggttgaagacgtcgcaaaagcactgaatctcaggggaaggaagaaggacaacaacactgtcagcattcaagggaggaaggaggggggcaatggtgtccttaagtttgacacgcaaatctttgagatcacaccatcctgccatctcgttcagattaaacaaaccagtggcgatctacttgagtacgagaaactgttggaagagggcatccgaccagggttaaaggacgttgtctcggcctggcatagagatgatctgcagcagaagtagcttcggatgtctcccgtagattctgttctagtacatttcattccttatttttttagcagctacattccttttttgtattggtggtgatatgaaccattagcttgtgttttggttagtaataattggtgaggag

SEQ ID NO: 84838 - DNA, 504 bp, Zea mays
  unsure (1)..(504): unsure at all n locations
agttacgccttactaccctttttgtaaccttnngntgatcaacaccatccgaacaccgccggagccagcatgctagtggctgcattgaactctgtttcttttttgcaacaacaactaccattcagggatcggtctactgtctaccccgagcaactacttccattcaaccaactggcagcattgaactctgctgcttatttacaacaacagcaactaccaccattcagccagctagctgatgtgagccctgctgccttcttgacacagcaacagttgttgtccttctactcgcacgcttctcctaacgctagcaccctcttacaactgcaacaattgctaccattcaaccaacttgctttgacaaacccagcaggcgtctaccaacaacccattattgatcgcgccctcctttaaattgcttatgacttattattaaataacaacatctattgccacaccatacattcccatcccaatctttataaaaccacatctctcaactcc

SEQ ID NO: 84839 - DNA, 520 bp, Zea mays
  unsure (1)..(520): unsure at all n locations
cgtggttagtgatcgcttgtagctgcctttaagggcttntnangnctagttcgtatccggttcggaatccgcggcgggacgccacgcgtgcggagcgattgcggcggcggaagtatagattcgatggggcactccaacgtgtggggctcgcaccccaagaactacgggcccggatcccgcgtctgccgggtctgtgcgaaccctcatggactgatcaggaagtacgggctgatgtgctgcaggcagtgcttccgcagcaacgccaaggacattggcttcatcaagtaccgctgaagtcagctgggcgggctatctgaatgccatctcttggacagtgtagtagaagcgatgccacaattttaattactgtcatttagatgttcccttggagactctgctatttaagttccccatgtttgtgatgggaaaaaatattcttacaaccaataaataggtctccgttctataagatcccagtttacttacagcttgcattgtaacttataactttttttatacc

SEQ ID NO: 84840 - DNA, 515 bp, Zea mays
  unsure (1)..(515): unsure at all n locations
agcaaacgactctngctttttnnaaccctttannatttcantctacatccgcgaattaccggcgcgagccacgcgtccgaggttcagccttgctgccatgtacggttttgctgtggctgctcttggaatgctcaagacaagcgctactggcctggccattgatgcctatggtcctatcagtgacaatgctggaggaattgctgaaatggctggcatgagccacagaatccgtgagagaactgatgctcttgatgctgctggaaatactactgctgccattgggaagggttttgcaataggttcagcagccttggtgtctcttgccctctttggtgcttttgtcacccgtgctgaaatctctactgttgaagttcgggggcccacagtttcattgagactgattgatcgtgtccattctcccatactggtctcttaaccgatgacactttaacacagcttgcaacttcatctctcaaataggtcaaaggaaatccctatgcacatacacccacccc

SEQ ID NO: 84841 - DNA, 539 bp, Zea mays
  unsure (1)..(539): unsure at all n locations
aagtaagtgtacgcctttagagctgnnnnnaaggcctntnngatngatcagcttcggttcggaatcgccggcgcgagccactcattcgggcatggtctggcaccacgactaggctgatccggacttcggttcctgccaggccaaggagcttctgtagcatggcgagaacgtgctggccaacgaacccgtggtggtgaagagaggccagcacatcgtggaggtgaacccccagggcattagcaaaggcgtggtggtggacagcctgctgcctttcattgtgaaggcaagttgaaacccactgactttaatgcttttcattatgtttacaacctgtctgtaccaagaactatgttcaaaaagacttcctctatcccgctcctccatattggggcgggcgtggaagttccccatcaatataccatgagtctcatttcacccctttctcaaaaaaccctatcctagtgccaattctctcattttaacaaacatcccactactctctacaaaatatctctacacccctctctcacaaacccccg

SEQ ID NO: 84842 - DNA, 514 bp, Zea mays
  unsure (1)..(514): unsure at all n locations
taggggagtgaagggtatattgactgttccgttnnacccagtcattgactgtaccggtttcggaattcccggctcgacccacgcgtccgggccaacaacaagctggacaggagcggtcacaatcaggctctggtgcaggcaatgtcggcctcaacaccttgatgaacatgttcagcgggcttggtgctggtggtggcctaggtgttccaaatgctcctaatgcaccgccagaagaactgtacgccacacaattagctcagctccaagaaatgggtttctttgacacacaagagaacatccgagccttggccgctaccgctggaaatgttcatgctgcagtggagcgacttcttggaaatatgggctaatagaatatgatgatcataactgtactcagatattgtgatttttattcatccttgatcacacaatctagacgccagctttcatcttcaggagtctataccaatgaaacatacctcgtctcacaatgttctactcttaactcatcatc

SEQ ID NO: 84843 - DNA, 493 bp, Zea mays
  unsure (1)..(493): unsure at all n locations
aggagggagtcattcnatgctggtacccganncattccagntcttccggttcggattccgggtcgactacgcgttcggcggagtgttccgtcgctggaggctgggcggcgcggtcgctgctgccggtgctgaagcccgtggaggagtgctggcagccggcggacttcctcccggactcctcgtccgagatgttcgggcaccaggtccgcgagctgcgcgcccgcgccgcggggcttcccgacgagtacttcgtcgtgctcgtgggcgacatggtcacggaagaagcgctgtccacgtaccagaccatgatcaacacgcttgacggggtccgttacgagaacggggccagcaactggccctgggcggtctggacacgcgcctggaccggccaggagaaccggcacggggacatccttgggaaggacatgtacctattcggtcgcgtagacatgcccattggtctagaaacacgtccaggcctcattgggttccg

SEQ ID NO: 84844 - DNA, 510 bp, Zea mays
  unsure (1)..(510): unsure at all n locations
naggggggtaaagcacttagctctgtaaccccgcactcacgcctagntcctaccggttcagaatacccggccggagccacgcgttcgcaggcatagtgaagtacactagctacattttatcaccaatgggagccaagagggctagcctacttgccctcgttgctctttcatcaagcgctgctacctcgacttttattccacaatgctcacaacaatacctctctccggagacagccgcgagatttcaatacccaactatacaatcctacatggaacaagaggccatccaagcaagcatcttacggtcattagcattaaccctccaacaaccatatgctctattgcaacagccatccttagtgcatctgtatatgcaaagaataggggcacaacaactacaacaacagttgctaccaacaatcaatcaaatagtagcagcgaaccttgatgcttacctagagcaacaacaatttcttacattcaatcaactagctggcgagaaacctgccc

SEQ ID NO: 84845 - DNA, 515 bp, Zea mays
  unsure (1)..(515): unsure at all n locations
cgtagacaggagtgggnngagtctttatttacgacacgcactcacgcatgacgtaccggtccggaattcccggctcgacccacgcgtccggcaaaatacatagtgaagtacactagcaacatcttagcaccaatgggagccaagattggttccctccttgccctccttgctctttcagcaagcgctgctacctctactattattccacaatgctcacaacaatacctctctccggtgacagccgcgggatttcaacacccaactatacaatcctacatgctacatgaggccatcgtagcaagcatcttacggtcattagcattaaccctccaacagccatatgccctattgcaacaaccatccttagtgcatctgtatctccaaagaatcgcgacacaacaactacaacaacagttgctaccaacaatcaatcaagtagttgcagcgaaccttgctgcttatctccagcaacaacaatttcttccattcaatcaactagctggggtgaaccctgc

SEQ ID NO: 84846 - DNA, 500 bp, Zea mays
tgagaaagccttacttacgacagaacgtcactcatgacgtaccggttcggaattcccggcccgacccacgcgtccgggcacttttgcgatacatccactcgggatcaggaatcaagaaacgagaatatggggagggccctttgccaatagcattggtagagaacagtggaaggtgcaagactaacgagcatggggagaagatacttccggatggaactccgtgggttccaaaactgatgaaagaaattacttgcgatatctcaaactggagcaagcccattcatgttgatcagaacttaattgatggttcaaaccctaacaatcgctggaagatgttcataccaattatacttgctgtggagtacttcttggtagtaaaacgaatccggacggcgatccatgcagatatcgcacatgggaaggtggatgactgacatcagtgttaccgggactaggctgcaagcagggacccctgatgagctaaaaggttctaccacccc

SEQ ID NO: 84847 - DNA, 478 bp, Zea mays
agaaggaggacttactccggaataaccggccggagccacgcgttcgcgggccggcgccgccgtgacggaaggttgaggatgagcaaggagcacgacgcgatagtcaggtcaacgggtggagcgcgcaccctaagaactacggccctggctcccgcgtctgccgggtctgcgcgaaccctcacggtctgatcaggaagtacgggctcatgtgctgcaggcagtgcttccgcagcaacgccaaggacattggtttcatcaagtaccgttgaagaggccactgtgctgctgtggagaactttctacatcaaagaaatgggttcttcattaaaaggcctaaagtgaggcggtggagctctctgatcagaactcgagactcatggtgtaaacctcgacttgtttaagcctttgatggctactttgtggcttggtggaccatctataatcacaagattcgtaaattctttactcaaaaaaaaag

SEQ ID NO: 84848 - DNA, 511 bp, Zea mays
  unsure (1)..(511): unsure at all n locations
tggtacagcctaactgtttttttcgaatntttttgntaggntactatcggctcggaatacccggctcgacgccacgcgtgcgctggtgattaataatactactattacttagccatgctctgtgaagagtattaggaccgtcgctcataaaagctacagttccgtctcttttctcagctatgtaaaacttccaaactgttcatgcttaaaactgagggttttcttggtgtgaggtgtgcatgtcgttgttgaggccattgctgcacattccacctattgaggccctcctcaaattaagcctcgaaaaagctgatatcttttcgtagaaaaaaaaaaaaaaagggcggccgttctataggatccaagcttacgttcgggggcatgcgacgtcataactcttctatagcgccacctaaattcaattcactggcccgacttttacaacctcttaactggtaaaacccctgagtttcccaacttaaatagtcttgtaacacattccccctttccc

SEQ ID NO: 84849 - DNA, 506 bp, Zea mays
  unsure (1)..(506): unsure at all n locations
ttagtgagtaggttatgaagtttttagcttnntagatgntcancgatccgattaagaatcgccagccgcagccactaggtcgcggtggcagccaaaatattttttctttttatgctccttggtatttctgcaagtgctggtacttcgaccattttgccgcactgctcacaagctcctatagcttcccttcttcccccgtacctctcaccagcggtgtcttcggtatgtgaaaacccaattcttcaaccctacaggatccaacaggcaatcgcagctggcatcttacctttatcacccttgttcctccaacaatcatcagccctattacagcagctacctttggtgcatttattggcacaaaacatcacgtcacagcgactacaacaactagagctatcaaaccttgctgcctactatcaacaacaagcacatccttccattcaaccaactacattcattgaaccctgctccttatttgcaacaccaccatctaccattaatccacc

SEQ ID NO: 84850 - DNA, 510 bp, Zea mays
  unsure (1)..(510): unsure at all n locations
aggggggaaaaaccctaagctgacgttcccccgccctaccctcatatctacccgntcagaattacccgccggacgcacgcatacgaggagacacaatagtgtaccaactatgtttacncaaaatattttgcttccttatgctaagtggtctttctggaggtgctgctaccgcaaccattttcccacaatgctcacaagctcctatagcttcctttcttcccccatacctctcaccagcggtgtcttcagtatgtgaaaacccaattcttcaaccctacaggatccaacaggcaatcgcagcaggcatcttacctttatcacccttgttcctccaacaaccgtcagccctattacagcagttacctttggtgcatctgttggcacaaaacatcaaggcacaacaactacaacaacttgcgctaagaaaccttgcttgctactttcaacaacagcagtttctttcattcaaccaactggctgcattgaactctgctgctcatttagaacacg

SEQ ID NO: 84851 - DNA, 513 bp, Zea mays
  unsure (1)..(513): unsure at all n locations
agtacctaaggcgcctgtactgtacgttnccgntcccnacgtncanaccgtaccggtttcggaattcccggctcgacgcacgcgtccgcccttgttgattcaacaatcgccagccctatctttggtgcagtcattggtacaaaccagcaaggcacaacagctgcagcaactcgtgctacctctgatcaaccaagtagctctggcaaacctttctccctactctcagcaacaacaatttcttccattcaaccaactgtctacactgaaccctgctgcttatttgcagcaacaactattaccatttagccagctagctactgcctactctcagcaacaacaacttcttccatttaaccaattggccgcactgaaccccgctgcttatttgcagcagcaaatactactaccatttagccagctagctgcagcaaaccgtgcttacttcttgacacagcaacagttgctgcctttctaccagcagtttgcggctaaccccgcaaccctcttacaacg

SEQ ID NO: 84852 - DNA, 511 bp, Zea mays
  unsure (1)..(511): unsure at all n locations
gtggagtggagtcctctagtgtcagccaacgacaaagtacagctaagcctntaccggttcggaattcccgggtcgacccacgcgtccgatcagtttcttccattcaaccaactggctgcattgaactctgctgcttatttgcaagggcaattaccattcagccagctagttgctgcctacccccagcaatttcttccattcaaccaactagcagcattgaactctgctgcttatttacagcagcaacaactactaccattcagccagctagctgatgtgagccctgctgccttcttgacacaacaacagttgttgccgttctacctgcacgctatgcctaacgctggcaccctcttacaactgcaacaattgctgccattcaaccaacttgctttgacaaactcaacagtgttctaccaacaacccatcattggtggtgccctcttttagattgcttatgagttatagttcaataatgaagttttttggatgatgtttgtggcgttccaan

SEQ ID NO: 84853 - DNA, 513 bp, Zea mays
  unsure (1)..(513): unsure at all n locations
acttacatctctattattgtttnnaacttttttgatgatctatctccatacaaaaacctatccgtagccattaatgctcagctatctacaacaaccaatattatttatttaacacatcaacagatacttagttaagaccattataaaggttggaagcccctaaccatcttacaactacaacaattattaacctttacacaacttactctgacaaacccaacaacctcctaccaacaacacattattcttattcacctcttatcaaattacttattaatatcaatctaataattaaaatctataaaaaattccaaaaaacatccataaattataactaacatcacatatatatacaacaataataaaaatatatcaccaattctcacactatatctaaaataatttcataaaatcattataacacaacttaaacaattataatataaacttcatacaccaaaaatcaaacataattaaaatcaacatcctacttaatataaatctatacaaatc

SEQ ID NO: 84854 - DNA, 498 bp, Zea mays
  unsure (1)..(498): unsure at all n locations
agcgtatagactatcatctttaaggggtctangtantactcactccgattaccaacggagcgcgcgttcgagaaggtatgagttgttccatacattttagtttatgtttgagattgaaccaagaagtgagcattatgctggaggggtggactcgctttgccgtgcaggaatggaagagcgagcttatgagatcatacaggggatgccaatgagaccttccatttctgtctggggagcactacttggggggtgcaagatgcatgggaagacagagctaggaaggattgctgctgacaagttgtttgaacttgatcctcaagatttatgcaatcatgttttgctctctaacatgcttgcatctgctgggcagtgggcataaacatctgatgtgacaaagagatgaaaaatgttaggatcaaaaacgacccatcgctcaacttagatcacttgtaaaaaatcttctccatagttttccacgctcacgtcctctcaacaccc

SEQ ID NO: 84855 - DNA, 508 bp, Zea mays
gtgggtaaagctttagtttacgaccggggcgagtataagcactgacgtaccggtccggaattcccgggtcgacccacgcgtccggcacaatagtgtaccaacaatggcagccaaaatattttgcttccttatgctccttggggtttctgcaagtgttgctaccgcaaccattttcccacaatgctcacaagctcctatagcttcccttcttcccccatacctctcaccagcggtgtcttcaatgtgtgaaaacccaattgttcaaccctacaggatccaacaggcaatcgcaacaggcatcttaccattatcacccttgttcctccaacaaccgtcagccctattacagcagttacctttggtccatttggtggcacaaaacatcagggcacaacaactacaacaacttgtgctagcaaaccttgctgcatactctcagcaacatcagtttcttccattcaaccaactggctgcattgaactctgctgcttatttgcaacaacaatta

SEQ ID NO: 84856 - DNA, 508 bp, Zea mays
cggggaaggagcgctgatatcgtcaacgaatatacctcatgacgtaccggtccggaattcccgggtcgacccacgcgtccggagaatgcatgcagtgagcttggagcccgtatgtctgccatggacagctctagcagaggtgctggcgatatgcttgatcgtctcacgcttacttacaacaggacacgccaagcatccatcaccacagagcttactgagattatatctggtgcatcagcccttgaaggataggccaacgacagtgatgatgccgtgcgcctttgcatattgcaaaaatgatgttctacatctatggtgaatggctggttttcataaatggtgatgatcaatatatgtatcttgcacatgattagcaagttcacgtgaaaaaaaaaaaaaaaaaaaaaaaaaaaaaaaaaaaaaaaaaaaaaaaaaaaagggcggccgctctagaggatccaagcttacgtacgcgtgcatgcgacgtcatagctcttctatagggtca

SEQ ID NO: 84857 - DNA, 513 bp, Zea mays
ggaagggaaggctatattaatgcacgggcgggagtacaagtacgcatcgtaccggttcggaattcccgggtcgacccacgcgtccggaagaaccttgctgaaaaggagccagaaaagtgccagagccacttaagtgcgtacatgatgatgggagtagaggctgatgaaatacaatcgctgtacacgaaggaccatgctgacatcacgagccgatccttccattgataagatcaaccgaagcagtcaccaattgagcgtaagaggtacaaccccaagaagctgacatatgagcagatgaaggccagcctaattgaaaggctcaaccaactcaactgctccggaggtgctgatgacaacgatgaggacgactagtaaaggtaattgccatcgaagtagtgctatctcaatccagcgatcagcaattgtgtactgtcttatgcggggacctgtagtactgcaataggcattattgtttaagtcttgcgaagggaacaaaacttgtttttgttagtt

SEQ ID NO: 84858 - DNA, 510 bp, Zea mays
cgtgagtacatggatctttttttgccccttgtatgatcgatcttactggttcggaattcccggctcgacccacgcgtgcgaggtcgccaacccgcacctgctgttgcttggttagcggcgccatcgcctgcgcggtgggcaggacgtgtgtggcgccgatcgagacgatccggacgcacttgatggtcggcagcatcggcgtcgactccatggccggggtgttccagtggatcatgcagaacgaagggtggaccggcctgttccgcggcaacgccgtcaacgtactgcgcgttgctccaagcaaggctatcgagcattttacctatgacacggccaacaagtttctaacccccaagggctactagccgcccaagatgccgatccccactccgcttgttgcctcaacttttagccgattcctcttaacctttgtgcacctaacccatggagcttaccaagatcagtgtcaccattattaaggacctttcctacaacttattcgcacccttc

SEQ ID NO: 84859 - DNA, 501 bp, Zea mays
  unsure (1)..(501): unsure at all n locations
cagtggataccgtatactccgtaaacccggctnatngccangncgctccgaattacgcgcgcgacgccacgcgttcgcggacgcgtgggcaactagcaacatataaagctcaatagtgtaccaacaatggcaggcaaaagattttgcctccttatgctccttggtctttctgcaagtgctgctacggcgaccattttcccgcaatgctcgcaagctcctatagcttcccttcttcccccgtacctctcaccagcggtgtcttcggtatgtgaaaacccaattcttcaaccctacaggatccaacaggcaatcgcagctggcatcttacctttatcacccttgttcctccaacaatcatcaaccctattacaacagttacctttggtgcatttattggcacaaaacatcaaggcacaacaactacaacaacttgtgctaacaaaccttggtgcctactctcagcaacagcagtttctttcatttcaaccaactaggttcatc

SEQ ID NO: 84860 - DNA, 506 bp, Zea mays
  unsure (1)..(506): unsure at all n locations
gtttagagctctcgtattttttccgaatnttnntcgntcntncntnctcggatataccaaccggacgcacgcgttctccgactcgttctgtgacgacacaaacctcagttaagagtgccattgttcaagttgagctgggccattcaagcagtgggacctcactcactatggagttgacattgataggaagaagaaaacccctgctgcaaagaaggataatgctgaaggacaagaggttgatgcatcagctgacgaaacgaaaaagagcaaccatgtcacgaggaagcttgagaagcgcaaggagggacttacccttgacccacacattgaggagcaatttggcagtggacggttgctggcatgcatttcttcccgccctgtacaatgtggccgaactgatgggtacatacttgaaggtaaagagcttgagttctacatgaacaaacttcacaagaagaaaggcaaaaaccctgtaccttataacattctaatggatagtcttgcac

SEQ ID NO: 84861 - DNA, 502 bp, Zea mays
  unsure (1)..(502): unsure at all n locations
nagtgggcacctatactttttcaggggnactacctnatntcatcggttcgaacaccggctcgaccaccgtccggagaagatggcaggggagctttaatttaacctagagagaagatcacacggtggagtggctccagaaagttgcacacgagtaaaaggacgggcctcggacctccacaagattttgtcaacgtattttttgtatcaaaagaatcacattaacgagagagaaccctgtacttagcaataaaagattatatcaacatatcttgctcatgttaaggggccgaattttttgtattttaatccttttttcgaaacaatttcacgtttaaaaaaaaacaaatctaaacattaacaggaaaggtaaaataactacatttacttcaaaaataaaactcttacattactcattatttattatacatactactactcttttcactattctttctttccatccaacataaccttcttaatactattcctatactcctctccc

SEQ ID NO: 84862 - DNA, 515 bp, Zea mays
  unsure (1)..(515): unsure at all n locations
gaggcgagtgggagacctgtactgccgtntacgnnactctacgtctnaacacaccggtttcggaattcccggctcgacccacgcgtccgcccacgcgtccgggaggaactgtggaattatggcactaggagcaagtgagcagggtggggtaatgaacgcatttgttacttcaatgggcttcgaacacctagctgtgcaagccaacatgcaacaacaagcgcttgcggcgagcgttttacaacaaccaattgcccaattgcaacaacaatccttgccacatctaacaatacaagccatcacaacgcaacagcaacaacagttcctaccagcactgagccacctagccatggtgaaccctgccgtctacttgcaagagcagctgcttgcatccaacccacttgctctggcgaacgtagttgcaaaccagcaacaacaacagctacaacagtttctgccaacgctcagtcaactagccatggtgaaccctgccgnctacgtacaacaacaacaactgg

SEQ ID NO: 84863 - DNA, 527 bp, Zea mays
gcgagtgtagcggagtggagggaagcctgtagttacagtatccgccgacgtaacagctactgatgtaccggttcggaattcccgggtcgacccacgcgtccgcccaggccttgaaggttgccaaggctgtgaagtctgggtcagtaaagaagacgaagaggatccgcacgtccgtgacatttcaccgccccaagaccctgaagaaggctagggaccccaagtacccaagaatcagcactaccggaaggaacaagcttgatcagtaccaaattctcaagtatcccctcaccacagaatcggcgatgaagaagattgaagataacaacactctggtcttcattgtcgacctcaaggcagacaagaagaagatcaaggctgctgtcaagaagatgtatgacattcaggccaagaaggtcaacaccctgatcagacctgatggaaagaagaaggcttacgtgaagcttacgcctgactatgatgctcttgatgtggccaacaaaatcggcatcatctaaagttactgcgtc

SEQ ID NO: 84864 - DNA, 507 bp, Zea mays
  unsure (1)..(507): unsure at all n locations
taggagggtacgactagacttttttctttggccaactcattgccangntcgatccgaattaccggctcgacccacgcgttcgagaccaactagcaacatataaagcacattagtttaccaacaatggcagccaaaatagtttgggtccttatgctccttggtctttctgcaagtgttgctaccgcaaccattttcccacaatgctcacaagctcctatagcttcccttcttcccccatacctctcaccagcggtgtcttcagtgtgtgaaaacccaattgttcaaccctacaggatccaacaggcaatcgcaacaggcatcttaccattatcacccttgttcctccaacaaccgtcagccctattacaagagttacctttggtccatttggtggcacataacatcaaggcacaacaactacaacaacttgtgctagcaaaccttgctgcatactctcagcaacatcagnttctttcatttaaccaactggctgcattgaactctgct

SEQ ID NO: 84865 - DNA, 501 bp, Zea mays
  unsure (1)..(501): unsure at all n locations
gtgggacgtcttcaatcgtttagcctgtacgntgaatcatccggttcgaattcccggctcgacccacgcgtccgggtgggttggcttctcctccccctccttttcgggttcgggttcgtgaggtctgcggggttctgtttcggggtgagcggatcgatatggccgcgtcgatgttgataccgctgcttcgtcggcggtctcgcctgggccacggacgaccactccctacacaacgccttcagcacctactgcgaggtcctcgagtccaaaatcatcctcgatcggcagacgcataagtacctcggcttccgcttcgtcaccttctacacagaggaagcgatgcttaaccccatctacggcattgacggcaaagagctggacggtccgaacattaccgttaacgaggcccaataccttcagtgcccatttaagcactggctgatgatacggtggtcgctcctgaagccctagttttccttattcatttgacccctttaatcc

SEQ ID NO: 84866 - DNA, 505 bp, Zea mays
  unsure (1)..(505): unsure at all n locations
aggtaacagctcgaattttcttgaacctctgctgantgctacgctaaatcagtggcgtggacactaggtctggggcctgatggtcaagtcattaccttttggtcagaaaggtttaggtgcccgcgagagtctgttgcaaccgtgccttgtccgcatggaatcgcctggcgtccatgaggccacgtacaactccatcatgaagtgtgatgttgatatcaggaacgatttgtatggtaacgctgcactcactaagggatctactatgactccatgagcatgcctaatgcaccaaacacagagatcacctcccatgtctcttctcaacttgaacgccatagcacgtgatccatctcaacagtatatcgagtgaacggatccgacattttattctcgcatttatttacattcatataatcaccaagcttatctccccagtaaaaaatatactcaacctgtcctcttacactttatcctataattagccttcaaaacttaccaatacacc

SEQ ID NO: 84867 - DNA, 506 bp, Zea mays
  unsure (1)..(506): unsure at all n locations
agtgaggcggtctgtttttctgggcaccagtacgntcgttatggttcggaattaccggctggacccacgcgttcgcagatatctactatactatactctaggtagcatggacaccaccgccatggcagccaagatgcttgcattgatcgctctcctagctctttgtgcaagcgccactagtgcgacccatattccagggcacttgccaccagtcatgccattgggtaccatgaacccatgcatgcagtactgcatgatgcaacaggggcttgccagcttgatggcgtgtccgtccctgatgctgcagcaactgttggccttaccgcttcagacgatgccagtgatgatgccacagatgatgacgcctaacatgatgtcaccattgatgatgccgagcatgatgtcaccaatggtcttgccgagcatgatgtcgcaaatgatgatgccacaatgtcactgcgacgccgtctcgcagattatgctgcaacagcagntaccattcatgt

SEQ ID NO: 84868 - DNA, 495 bp, Zea mays
  unsure (1)..(495): unsure at all n locations
agggacggggtaaaactgaatcactgcatgcatttctntcggntagnnacggagcggcgggtacccggacacagaaacacaccaagcgaagctacctatcaacgacttaacaacaatggctacgaagagattagccctccttgcgcttcttgccctttttgtgagcgcaacaaatgcgttcattattccacaatgctcacttgctcctagtgccattataccacagttcctccgaccagttacttcaatgggcttcgaacacctagctgtgcaagcctacaggctacaacaagcgcttgcggcgagcgtcttacaacaaccaattaaccaattgcaacaacaatccttggcacatctaaccatacaaaccatcgcaacacaccagcaacaacagttcctaccagcactgagccaactagatgtggtgaaccctgtcggctacttgcaacaacaggtgcttgcattcaacccacttggtctggcaaacgtaacttc

SEQ ID NO: 84869 - DNA, 515 bp, Zea mays
  unsure (1)..(515): unsure at all n locations
nggcaggtttaaaggcctgtactgcttgtcccganccttaccgtcataatcgcaccggtttcggaattcccggctcgacccacgcgtccgctcatggacggcgcgatcccgccgggcccggacgcgcagctggagggccgcctagaggacctgccgggctgcccgcgggaggtgcagaggggattcgccgccaccctcgtcacggaggccgagtgcaacctggccaccatcagcggcgtcgccgaatgcccctggattctcggcggcggaacgatgccctccaagtaactgcgaagagcatagtgcatgaggaatgagcttgtagctagctcatatgtctgaataataagcacagcaagaagatgaatgcatttctcggatcgctcatccggaacaataattaaaggggatccggatttgctcttgtgatactaataacgattcctgctatactcggaagcagctaggctcgtgcccatccaatgcatgcatagatctgacctaccataaaaaac

SEQ ID NO: 84870 - DNA, 524 bp, Zea mays
  unsure (1)..(524): unsure at all n locations
cgcatcattgagggcgagggagcggactacnttgtttcttncagccccacaccaagtactaacgctccggntnggaattccnggccggacgcacgcgtccggtccgtcagcactgggccacatatggtcgccattactacacacgctatgactatgagaatgttgatgcaggggctgctaaggagcttatggcaaacctagtaagcatgcagtcatcactttctgatgttaacaagttggtcaaggagatccggtctgatgtttctgaagtagttgcagctgacgagtttgagtacaaggatcctgttgatggctctgtgtccaagcaccagggcatccgatacctctttggagatggttcacgactggtgttccgcctctctggaaccggttctgttggtgccaccatccgtgtctacatcgagcagtacgagagggactcctctaagaccggcagggattcacaggacgcccttgcttcgctggttgatgttgcgctcaagctcttcaagatgcaagaatac

SEQ ID NO: 84871 - DNA, 504 bp, Zea mays
  unsure (1)..(504): unsure at all n locations
ggctngnnaagagctgtgtgacgaaacgaaataaggtacgctctaccggtttcggaattcccgggtcgacccacgcgtccgcccacgcgtccgctcccgcattgaccacaagttcgacctcatgtacgccaagcgcgcggtcgtgcactggtacgtcggtgagggtatggaggagggcgagttctccgaggctcgtgaggatctggcggcgcttgagaaggactacgaggaggtcggtgctgagtttgacgagggtgaggacggcgacgagggtgacgagtactagacgctctactggcgcggcgtcgtcgggcttgtgtgccactgctatcctgtgatctgccctgagtggctcctatcgtgttatgtttctgtcggttcttatctatctgtcgttgtgtggtttacaacttacgttgtaagactttattcccccgctttgctactgggttattaagtttggcgttattggtttcttaaaaaaaaaacaaaaaaaaaaaaaaa

SEQ ID NO: 84872 - DNA, 501 bp, Zea mays
  unsure (1)..(501): unsure at all n locations
gaggagcaggnntnnntattgaactcataccctcgcattaccctnnnntnggaattcccggctcgacccacgcgtccgcccacgcgtccgctcacgcgttcgcccacgcgtccagggcaatgtcgacgccagtggtgaggacttctgtgtcgagccagctgatgagaggaagcctttgcgtgctctctcggatgatggccttatcaggactacaacagggtaccatgtctttggtgccctcaagggagcattggatggaggcctggatattgctcacagctagaagaggtacgctggattcaagaaggacgacaagcacctgtatgctgatacccaccgcacgtacatgtatggaggccatgatgctgactacatgaagaaccttgctgaagaggagccagataagtaccacagccacttacatgcgtacattaagaagggagttgaggctgatgaaatagaagcgctgtacatgaaggttcatgcttgcattcgtgccga

SEQ ID NO: 84873 - DNA, 505 bp, Zea mays
  unsure (1)..(505): unsure at all n locations
agtagagtgatcagagtcagtnnactttgcatacgatntctttcggattnngaattccagggtcgacccacgcgtccgagcactagagacatcatcatgagggagttccggtctggctcctcccgtgtgctcatgaccactgacctgcttgctcgtggtattgatgttcagcaggtgtccctggtcatcaactatgatcttcccacccagccagagaactacctgcatcgtattggtcgtagtggtcgttttggtaggaagggtgttgccatcaactttgtgacccgcgacgacgaacgtatgctgtttgacattcagaagttctacaacgtgttgattgaggagctgcctgccaatgttgctgaccttctgggatcaatttgagaaaaaacataacaaaaaaaggtggtgagggaacccggtaagggattggttttgtcgaaataccgtgggaagaggtggtgaatagggacggtggggggttctatgttgaaatctgggcaag

SEQ ID NO: 84874 - DNA, 508 bp, Zea mays
agattgtcgtgtgtactaaggtaccgaccgcatcgcatttctgttccggttcggaattcccgggtcgacccactcgtccggtgaaaacccaattcttcaaccctacttgatccaacaggcaatcacagcaggcatcggacctttatcacccttgttcctccaacaatcatcagccctattacatcaattacctttggtgcatttattggcacaaaacatcatggcacaacatctacaacatctcgtgctagcaaaccttgctgcctacgctcagcaacagcagttacctttggtgcaattgttggcacataacatcatggcacatcaactacaacaactcgtgctagcaaaccttgctgcctactctcagcaacagcagtttctgccattcaaccaactagctgcattgaactctgctgcttatttgcaacatcaacatctactaccattcagccagctagctgctgcctaccaccagcaatttcttccattcaaccaactggcagca

SEQ ID NO: 84875 - DNA, 518 bp, Zea mays
  unsure (1)..(518): unsure at all n locations
aggtttagaggctanagctacggttccacgcccgtganatgcattgcctgtaccggtctcggaattcccgggtcgacccacgcgtccgcggacgcgtgggtcatggttgaccacatgaggaagatgaagaacaatgccattgtctggaacattggccaatttgacaatgaaattgatattcttgggccttaaaacttaccttgccttaagcggattaacatataaccccaaaactagacctttgtgtgtccccagacccaaactgtgatatatgtgccctctctgaggctcctgaggaaaccttggtgtgctacagtgcatactactatctgtatagtctgctgattattcactaaccaggtcattgcccaacttgaactgtggaaggagaagagctctggcaagtatgagaagaaggtgtatgtgctccccaagcaccttgatgagaaggttgctgctctccacttgggcaagcttggtgccaagctgaccaagctcaccaaagtctcaggccgact

SEQ ID NO: 84876 - DNA, 484 bp, Zea mays
  unsure (1)..(484): unsure at all n locations
gggaggggaggtgatanaatacgaaacgacggaaacagtatncttctaccggtccggaattcccgggtcgacccacgcgtccgctagcaacatacatagtgaagtacactagcaacatcttagcaccaatggcagccaagatttttgccctccttgccctccttgctctttcagcaaacgttgctaccgcgactattattccacaatgctcacaacaatacctctctccggtgacagccgcgagatttgaatacccaactatacaatcctacaggctacaagaggccatcgcagcaagcatcttacggtcgttagcattgactgtccaacaaccatatgccctattgcaacaaccatccttagtgaatctatatctccaaagaatcgtagcacaacaactacaacaacaattgcttccaacaatcaaacaagtagttgcagcgaaccttgatgcttacctncagcaacaacaatttcttccatt

SEQ ID NO: 84877 - DNA, 476 bp, Zea mays
  unsure (1)..(476): unsure at all n locations
aggggtaggaggctgntataccgtaagggggggaaaaagtagtgctcgtaccggtccggaattcccgggtcgacccacgcgtccggggtgtcgagggtgcaacacagcagtgagattctttttgaactcatccgctttctcgggctccaacacagcagtgagagaaagcggatgagttcaaaaagggtgtcgagggtgcaaccaagtttctccttagcaagctgaaggacctccaattttttgttggtgagtccatgaaggatgatgcgtctgtggtattcgcctattacaaggatggtgccactaatccgacattcctctatttctctcatggtcttaaggagatcaagtgctaggcgtgcggcgaaattagttacccatgttgggtactatctatgtactattattatatccaaaactatagttgtcctggctgaattgaactcaaaagggtttgtctgagaaaaaatgtccca

SEQ ID NO: 84878 - DNA, 518 bp, Zea mays
  unsure (1)..(518): unsure at all n locations
agttaggagtgagtcnnaattactgtagtcacgccatatatcagtcagngctcgtaccggtccggaattcccgggtcgacccacgcgtccgggtgtaattgcgcaaaagatccttcaacatgcagattgtgctggagctgtgttctagtctgtcatgaagagtgcattactggctgcacaatctagtaatgatactcttttgaagacaactgctgacgcacttggcaagtggaaggatcttttgcgcaattacaccaagacagttgatgaagagatggagatacttttaaagtttgaggaaatgtgtcaagagaccacaaaagatttttctccgctgtttccaaagatcttgccatacctctatgatacggaggtagtaagtgaagatgcaattttgagatgggcggaagagaaagaacatgctgatgagtctgataaagtctttgttaaacagtcagaagcttttattcagtggctcaaggaagctgaagaggaagatgacgaagaagaggaatacn

SEQ ID NO: 84879 - DNA, 508 bp, Zea mays
gggtttggaggctctgtttacagaaggagagtactgccagtaccggtccggaattcccgggtcgacccacgcgttcgcgcttccagccgccgccgcgtccgcctcgccaagcgcagcagccgccgcagcacatcgctcgcttgatctcagccatggcggaggtggagcagcaacaggacacgccgaagctcttcaaccgctggaccttcgatgatgtccaggtgaacgacatctcgctgaacgactacctcgctgtgaacgcgacgaagcacgcgatgtacctgccgcacaccgcggggcgctactccaagaagcggttccgcaaggcgcagtgcccgatcgttgagcgccttacaaactccctcatgatgcacgggcgcaacaacggcaagaaggtcatggctgtccgcatcatcaagcataccctggagatcattcacctgctcaccgatgccaaccccatccaggtcgtcgtcgacgcgatcatcaacagtggcccccgtgaggt

SEQ ID NO: 84880 - DNA, 508 bp, Zea mays
  unsure (1)..(508): unsure at all n locations
agtagacgatcgtgtccgtaccccgcccattcgnatctactgtaccggtctcggaattcccgggtcgacccactcgtccgcgcactcgtgctcccacgcgttcgcattgaagggataaaacgccctccaaggtgtggagctctaattgagagcagtacatacaagggcatgtaccatgccctaaaggacattgtcccaaaggacggatttggaggcctttataagggccttttcccctctttggtgaaatcgacccctgctggtgctgtgacatttgtggcatatgaatacatctcagactggtctagagtcaatactgatgtgaaaatcttcaatgcagatactgagcaaggctggatttgagtgacttcttgatggatcatggaactatcaatacaccatgacgagaactttttgcacaccgtggacatggacgatggagaccgcaaagtcaatcgtcaagtgcatacaacttctagagatccgatacatgtaaagtcttacatag

SEQ ID NO: 84881 - DNA, 502 bp, Zea mays
  unsure (1)..(502): unsure at all n locations
ggtagagggtggtgtcagagagggaggtagtgtaactcgtccggaattcccgggtcgacccacgcgtccggtcaggatgcgacaaacgttggggatgaaggtggttttgcacctaacattcaggaaggcaaagaaggccttgaactattgaaggcagccatagaaaaggctggctacactggaaaggtggtcattggaatggatgttgctgcttctgagttcttcggtgagaaagacaagacttatgatcttaatttcaaggaggagaacaacgatggctcaaacaaaatttcaggcgacagcctgaaagacctgtacaagtcctttgtttctgagtaccctatcgagtcgatcgaagatccatttgatcaggatgactggagcacttatgccaaactcactgatgagattggacagaaagtgcagattgtaggagatgatcttctcgttaccaaccccaccagggtcgccaaggccatcaatgagaagacctgcaatgctn

SEQ ID NO: 84882 - DNA, 489 bp, Zea mays
  unsure (1)..(489): unsure at all n locations
ngaggggaaggatgctcnntgtaaggacaccgggcgctacanagtcattgctcgtaccggtccggaattcccgggtcgacccacgcgtccggcaacatagaaagcacaatagtgtaccaacaatggcagccaaaatattttgcctccggatgctccttggtctttctgcaagtgctgctaccgcgaccattttcccgcaatgctcacaagctcctatagcttcccttcttcccccgtacctctcaccagcggtgtcttcggtatgtgaaaacccaattcttcaaccctataggatccaacaggcaatcgcagctggcatcttacctttatcacccttgttcctccaacaatcatcagccctattacagcagttacctttggtgcatttattggcacaaaacatcagggcacaacaactacaacaacttgtgctagcaaaccttgctgcctactctcagcaacagcagtttcttccattcaaccaactag

SEQ ID NO: 84883 - DNA, 480 bp, Zea mays
aggggaagaggctgatgttacgcgatgtgggtgagaaacgggtagtgctcgtaccggtccggaattcccgggtcgacccacgcgtccgctctcatgctgatggagactgtgagaatgacctccaaagcctgataagtgactgcaggacatacgtgatgttcccagctaatccaaaggtccctccttcggatgcttgctgtggtgtcatcaagaaggcaaacgtttcttgcttgtgctccaaggtcaccaaagaaactgagaaggttgtgtgcatggagaaggttgtgtatgttgctgagcagtgtaagaggccatttgagcatggcttccagtgcggaagctacaaggttccagcaaactgatgatatcacaagagggaagcgcttgacgtagtctttagatttcaattgttgcagccgatcaaccttcttagggttgtataatatgaagtcaatgttgagactaatgtgaggtgggaga

SEQ ID NO: 84884 - DNA, 480 bp, Zea mays
ggtaaaagggctcgactacgcagccgaaggttattcgcattgctcgtaccggtccggaattcccgggtcgacccacgcgtccgcggacgcgtgggcggacgcgtgggtccgccgcctcgacatcccctccgcgcgacccggcgccatcctcaactccgccacggggctgggcggcggcggcgccacggccggcgcggcgggtgagaaggcggcggcggcagctgagaagacggtcttcgagctgcggctggaggcctacgatgctgcgagcaagatcaaggtgatcaaggagatccggtcattcactgacctggggctgaaggaggccaaggagctggcggagaaggcgcctgcggcgatcaagggaggcctatccaaggaggaggctcaggcgattgtcgagcgaatgaaggcagtcggcgccaaggtcattattgactgatcagaacaagccttttcagtggtgaagtcctgcaaatc

SEQ ID NO: 84885 - DNA, 505 bp, Zea mays
agttggttgtgtgttcacccgaaaatagtattgctattcctgtccggaattcccgggtcgacccacgcgtccgctgccattcaaccaacttgctttgacaaacctagcagtgttctaccaacaacccatgattggtggtgccctcttttagatttcttatgagttatagttcaataataaagttttttgtctgatgtttgtggcttcccagaaataagaaagtacatttctagattctgaaaaaaaaaaaaaaaagggcggccgctctagaggatccaagcttacgtacgcgtgcatgctacgtcatagctcttctatagtgtcacctaaattcaattcactggccgtcgttttacaacgtcgtgactgggaaaaccctggcgttacccaacttaatcgccttgcagcacatccccctttcgccagctggcgtaatagcgaagaggcccgcaccgatcgcccttcccaacagttgcgcatcctgaatggcgaatgggacgcgccc

SEQ ID NO: 84886 - DNA, 505 bp, Zea mays
agtagaggctgtgtgtacgccagccatattgcattgctgtaccggtccggaattcccgggtcgacccactcgttcggaagactgcagcaaaaccatcagatctagcagaactctctcgacctcatcggggttggcggagcgcgtgttgaccggagatggcgccgagcgggtggaggaggagcgcggcggcgcgggtcgcctggcgcccggccacggtttgcctgtggctcgcgctcgccgtcgtcgcactgacgctcgcccaggctaagaaggacctgacggaggttacccacaaggtctacttcgacatcgagatcgacggcaagcccgcatgccggattgtcatggggctttttgggaagactgttcctaagacggcagagaacttccgagctctttgcacaggagagaaaggggtcggcaagagtggcaaagccctccactacaagggaagtaagttccacagaatcatccccagcttcatgctccaaagaggtgacttcac

SEQ ID NO: 84887 - DNA, 617 bp, Zea mays
ggagttgatgtaattatacttctatctccacgcaattgatcgcattagcgctaccggtccggaattcccgggtcgacccacgcgtccggtcagagtgagcaatgacctgaatgaacaattgaaatgaaaagaaaaaagtgttgtgccaaattaaaaaaaaaaaaaaaaaaaaaaaaaaaaaaaaaaaaaaaaaaaaaaaaataaaaaataaaaagaatccaaactcaaaaaaacgaacaaataactaaataatatatgaaatcaaaatacataaaactaaaccagatattaaacaaaactgacaaactgaagaaaaactcttaaaaataaattcaaaacttaattaaactcttaataacaaatatttaaaaaacaatttagaacaatttatcgacctaaaattaaaccccaaaattaagcccgaaaagtaagagccaatttcagaactccttattcacaaaactaagacccgaaaaaccaaatctatatagaaatataggcaatataaaatgggggcaaaaaactaagcccattatgtccagaaccattatagctaaaactgaaaaagactcaattggtaaagagtcggacatttaaaaaatggaatactaaactcc

SEQ ID NO: 84888 - DNA, 483 bp, Zea mays
  unsure (1)..(483): unsure at all n locations
aggtatatgggctcnattatagacacgggcgggttatctgtcattgctcgtaccggtccggaattcccgggtcgacccacgcgtccgctcaacactattgattctgaaggcgatacgccgctccatcatgctgctagaggagagcatttggatgttgtcaagcttcttctccaggctggggcgtcccccaagaaggagaacacttacgggcagacacccgctgatatggctgaccaagacaccgaagttcgaaccctgttgactgccaagcaaattgaggcaagcacacacatgagtgataattaagcggcattggaatccttagttgcaactggtaatgttgagaaatagccgtaacatcttatctgccatccaaacttcatttgaactgaagtaatactgtaatcagactagtatggaggggttagcttagctacatgatcatgctccttttccttatcgctgcattatactaaagatgaa

SEQ ID NO: 84889 - DNA, 463 bp, Zea mays
agtaaagtactgtatcagagcggcagctattgcatgttgtctggttccggattcccgggtcgacccagcgtccgcggcaccatggaatccatccgtgccggccccttcgcggcatcttccgccggacagctttgtctacggccagtccggcgccgggaacaactgggccaagggccactacaccgagggcgccgagctcatcgactccgtccttgacgtcgtgcgcaaggaggccgagaactgcgactgcctccaagggttccaagtatgccactccctgggtggcggcactggttctggcatgggcacgctgctcatttccaagatccgggaggagtacccggaccgcatgatgctcaccttctccgtgttcccgtcgcccaaggtgtccgacaccgtcgtggagccctacaacgccacgctgtccgtgcaccagctcgtggagaacgccgacgagtgcatg

SEQ ID NO: 84890 - DNA, 498 bp, Zea mays
agtaggttgtttgttttctagctctagtacgttgttctgtccggattcccggtcgacccacgcgttcgcgactcgtccggctttgcttctgggttacattgtactgaatcatgtggatgtgaagcttggcataacaagccacaattgcaaggtactctgcggatggcaacagttttacctctgaaacctgtccaaacattcgaagctggccaagatatagtggaacaagtcataaggtctcctatggatcttattagaagaaaatgcacatgcaagaagtcaggctgccttaagaagtactgcgactgctaccagggaggggcaggatgctccatcaactgtaaatgctatgattgtagaaacccatttgggagaaaagtcggcgttattttggacggtaaaagcaatcttactgcacctatactgcacgaaagaaacggtactgaagttgactcaagcgactaggaaaacgacttctacatgaaatcggcactcttc

SEQ ID NO: 84891 - DNA, 504 bp, Zea mays
  unsure (1)..(504): unsure at all n locations
agtagtagtgtgtattccagccacagaactattgtatactggtccggaattcccgggtcgacccacgcgttcgcggactcctcggcggacgcatctgctgacgcttctgccgtcgcttaggaacccatcgttgctggtgccctctcttagattgcttatgagccatagctcaatcttaaagatttgctgctgacgctgcataccaaacgccataggccgccacttttaaagattccaagttacctacgccttccttccaagttattaactctctataacctcagctaaattccatttactggccgtcgttctacaacgtnccgaccgggaaaaccctgtcattacccaactgaatcggcttgccggaaattcccatttccacaagtggcgtaatcccaatgaggccccgaccaattgcccttcccaacagtttagcaacctgaatggcgaattgaacccgccctgtaacggcccattcaacacgtgcttgccctggttacaaac

SEQ ID NO: 84892 - DNA, 516 bp, Zea mays
  unsure (1)..(516): unsure at all n locations
agttaggatgcctgtagngttggttaacgggcgctacagcattgtcggtaccggttctctgaattcccgggtcgacccactcgtccgaagatctgttatatcatgtgagcggcttgcctccacatgatataacagatcggattgtggtccatgaacaccgtggtcaacctgatggtttgattgtctcccatctaccacatggtccaactgcatactttgggttgctcaatgtggtgacacgtcatgatatcaaggacaggaagactatgggcaaaatgtcagaagcttacccccatttaatactggacaacttctcaacccagattggcgaaaggactgcaactattctgaagcacctctttcctgtcccaaagccagattcaaagcgaataattacatttgctaacagagacgattacatctctttcaggcatcatgtatatgaaaaaccaggtggccccaaatcgattgacctgaatgaggtcggcccccggttcgagttgcggctgtaccaan

SEQ ID NO: 84893 - DNA, 473 bp, Zea mays
  unsure (1)..(473): unsure at all n locations
gagggaggtgatatagtccgtatcccgccatatagtcactgctcgtaccggtccggaattcccgggtcgacccacgcgtccgcggacgcgtgggctcgcgcacgggtgattgctgccctctggcagtatattggagcggggaagcttcagaacccaaatgatccttccttcttcatgtgtgaccctcaattgaagaaggtgtttggggaggacaagctcaagtttgcaatgctgtcacagaggatatctcagcatctgtctgccccgacacccatcaatttggagcacaagattaagctgtcggggaatgaatcgcatagcagtgcttgctatgatgtgctggtggatgttccctatccgctgcagaaagagatgatggcattccttgccaacacagagaagcacatggacattgaggcctgcgactaggtgatatctgcttcgatcatgaagatccatgagcatcgcangag

SEQ ID NO: 84894 - DNA, 476 bp, Zea mays
gagttagagtggttactaagtatcaagcattatagtattgctcgtaccggtccggaattcccgggtcgacccacgcgtccggcagatacaatagagtatactatagcggttgttctctaggctgtagcatgcagtggggactggaaaatgttggggttgctctgttgtcggtagtttacatgcgcatgtcggtatgtgtagctaaagctggtggatctcagttctcagatcggactcgagacggggaaaaccattgcccagttggctggttctctgaagttttgtttggtgtaaagaaatggtggtccatcatctactcaaatttttttctcaaaaaaaaaaaaaaagggggccgctctagaggatccaagcttacgtacgcgtgcatgcgacgtcatagctcttctatagtgtcacctaaattcaattcactggccgtcgttttacaacgtcgtgactgggaaaaccctggcgtt

SEQ ID NO: 84895 - DNA, 508 bp, Zea mays
gagtagtagactttagtacgtcacccgacatattgcatctgctgtaccggtccgtgattcccgggtcgacccactcgtccgggcggcgacccggtcgtgtcggcgttccccgagggggacaacatgctccactgggtgggcaccatcgcgggatccgccgggactgcctacgagggcacctcctaccgcctcgcgctggccttcaccgccgagtacccgtacaagccgcccaaggtgcggttcgacaccccctgcttccaccccaacgtcgacgtgcacggcaacatctgcctggacatcctccaggacaagtggtcctccgcctacgacgtgcgcaccatcctcctctccatccagagcctgctcggagagccgaacaacgactcgccgttcaacacgcaggcggcggcgctttgggcgaaccaggaagagttcaggaagaaggtggagaagctctacaaggccgtcgcgtagaggacagcacacggcgcaaattgccgactaagtt

SEQ ID NO: 84896 - DNA, 503 bp, Zea mays
agtagtttgatgttttcaccacgaaaactattgtcatcctgtccggaattcccgggtcgacccacgcgttcgccgactcgttcgcccacgcgttcgcccacgcgtccgcccacgcgtccgggaaaaacgtgttgggtccaagaaaccaattgttgtgaagtatggccttaaccatgtgacttacctcattgagcagaacaaggctcagctcgttgtcatcgctcatgatgtggatccgattgaactggttgtttggcttccagccctgtgcaggaagatggaggtcccatactgcattgttaaaggaaaggctcgccttggatcgatcgttcacaagaagactgcatcagtcttgtgtctgaccactgtcaagaacgaggacaagcttgagttcaacaagatcttggaagctattaaggcgaacttcaatgacaagtttgatgaagtcaggaaagaatgggggaggtgcatcatggggctcaaagtccaggccaggaccaagt

SEQ ID NO: 84897 - DNA, 510 bp, Zea mays
ggttaggggcgtgtattccagtcgaaagcacatgacgtattgctcgtaccggtccggaattcccgggtcgacccacgcgtccgtggactcgtggtcggacgcgtgggcggacgcgtgggcaactagcaacatagagagcgcaatagtgtaccaacaacggcagctaaaatattctgcctccttatgctccttggtctttctgcaagtgctgctacggcgaccattttcccacaatgctcacaagctcctatagctgcccttcttaccccgtacctatcaccaacggtgtcttcagtatgtgaaaacccaattcttcaaccgtacaggatccaacaggcaatcgcagctggcatattacctttatcaccctcgttactacaacaatcatcagccctattacagcagctacctttggcgcattcattggcacaaaacatcagggcacaactactacaacaacttgtgctagcaaaccttgctgcctactctcagcatcaggcagttttttcc

SEQ ID NO: 84898 - DNA, 476 bp, Zea mays
  unsure (1)..(476): unsure at all n locations
ggggtagagggctgtactacgtaagggggggatgaaagtagtgctcgtaccggtccggaattcccgggtcgacccacgcgtccggcgggcgcgcggggcctgcagctggccgtggtgctgccctgcatgaccacgggcccgatgctgcagcagacgctcaacttcagcaccaaccacgtcgcgcgctacctcatgggcaccaagcgctccatccccaacgccgtcgccgcctacgtcgacgtccgcgacgtcgcgcgcgcgcacgtgctcgcctacgagcgccccggagccaggggccggtacctctgcatcggcaccgtgctgcaccgcgccgacctcgtcgacatgctcagggacctcttcccgcagtaccccgtcacggccaagtgcgaggaggacggcaagccaatggcgaagccgttcaagttctccaaccagaggctcanggacctggggctggagttcactccgctgag

SEQ ID NO: 84899 - DNA, 482 bp, Zea mays
  unsure (1)..(482): unsure at all n locations
ngagtttagaagaggctcgtagtcacgtacccccgccaatataagtatagctcgtaccggtccggaattcccgggtcgacccacgcgtccgcggacgcgtgggggatgatggacgtgcagtccgtcgcgcagcagctgcagatgatggggcagcttgagcgtgccgctgccgccagcagcagcctgtacgagccagctctgatgcagcagcagcagcagctgttggcagctcagggtctcaaccccatggccatgatgatggcccagaacatgccggccatgggtggactctaccagtaccagctgcccagctaccgcaccacctcctgtggcgtctccgctgccattccgccctactactgattcatgatatttgggaaatctcctctatccatccctctctatctatatctgtaataatgcagtaagacgacacacattatcatgtgtggtatgaccaataatatatgcatgatcataat

SEQ ID NO: 84900 - DNA, 522 bp, Zea mays
tggtaagaaggcttgtagtcccagtcccaaagatatacagcattgctcgtaccggtccggaattcccgggtcgacccacgcgtccggccacgcgtccgtacacgcgtccgtagcagcattggcgaccaagatatgggccctccgtaagctgaatagctctatctgcatgcagttgctaacacgacaatgatcactcaatgctcacaagctcctatagctacccgtattcacgcataccttccatcaatgatagcttcagtatgtgaaaacccagcatcttcagccctataggctccaacaggcaatctcagcacgcaacatacctttatcacacttgttgttgcaacaatcgccagtcctatctacggtgcagtcactggcacaaaccatcatggcacagcacctgcagcaactagtgctacctgtgatcaaccaagtaactctgacaaacctttctggataatgtcagcaacaacatatctttacattgaaccaagctgctacactgaacgctgctgctta

SEQ ID NO: 84901 - DNA, 513 bp, Zea mays
  unsure (1)..(513): unsure at all n locations
tggtagaggtcttgattcacgcacagaagttattgtagtactgtaccggttcggaattcccgggtcgacccacgcgtccggaccgcttcagtatgtgaaaacccagcccttcaaccctacaggctccaacaagcaatggcaacaagcaacttacctttatcacccctgttctttcaacaatcgccagccctatctttggtgcagtcattggtacaaaccatcagggcacaacagctgcagcaactcgtgctaccagtgatcagccaagtagctctggcaaacctttctccctactctcagcaacaacaatttcttccattcaaccaactgtctacactgaaccctgctgcttatttgcagcaacaacaactactaccattcagccagctagctactgcctactctcagcagcaacaatttcttccatttaaccaattcgccgcactgaacccctctgcttatttccagcagcaaatactactaccatntggccagctagctacaacaagcncc

SEQ ID NO: 84902 - DNA, 480 bp, Zea mays
gagtatagaatgactcatattcgtacaccgccatgacgcattactgtaccggtccggaattcccggctcgacccacgcgtcctaaccaattaaaaataaaaaaaacaccattcctacaaccctacaaactccaacaagcaatgtcaacatgcaacttacctttatcacccctgttctttcaacaatcgccagccctatctttggtgcagtcattggtacaaaccatcagggcacaacagctgcagcaactcgtgctaccagtgatcagccaagtatctctggcaaacctttctccctactctcagcaacaacaatttcttccattcaaccaactgtctacactgaaccctgctgcttatttgcatcaacaacaactactaccattcagccagctagctactgcctactctcagcaacaacaatttcttccatttaaccaattcgccgcactgaacccctattcttatttccagcatcata

SEQ ID NO: 84903 - DNA, 479 bp, Zea mays
  unsure (1)..(479): unsure at all n locations
naggtaagttaggcgtgtttacgggatgggggggagagggtatgctcgtaccggtccggaattcccgggtcgacccacgcgtccgcggacgcgtgggcggacgcgtgggataaggaagcccctgaaggaagctggacctgcgcagagtgcaacaacctgaactacccattccgcacggtgtgtaacaggaaaggatgctcgtacagcaagccagccccggcgaacaactgaacccaaccttcgcgcatcgtcgagctattgttgtacccgtagattgtatcctagtcgtgtgcaatctttgaactgcacaaagatgtttttgtgcctggagacgagagattcgattcgttacgcttaatttactattatacatttttattaaatgatgaaaactagggaagagcattatatcaaaaaaaaagggcggccgctctagaggatccaagcttacgtacgcgtgcatgcgacgtcatagctct

SEQ ID NO: 84904 - DNA, 478 bp, Zea mays
  unsure (1)..(478): unsure at all n locations
gaggtgaggaagggctcnnattacgtaaccccgccaaagaagtaatgctcgtaccggtccggaattcccgggtcgacccacgcgtccgcccacgcgtccggcaacatataaagcacaatagtgtaccaacaatggcagccaaaggattttgcctccttatgctccttggtctttctgcaagtgctgctacggcgaccattttcccgcaatgctcgcaagctcctatagcttcccttcttcccccgtacctctcaccagcggtgtcttcggtatgtgaaaacccaattcttcaaccctacaggatccaacaggcaatcgcagctggcatcttacctttatcacccttgttcctccaacaatcatcagccctattacaacagttacctttggtgcatttattggcacaaaacatcagggcacaacaactacaacaacttgtgctagcaaaccttgctgcctactctcagcaacagcagtn

SEQ ID NO: 84905 - DNA, 512 bp, Zea mays
  unsure (1)..(512): unsure at all n locations
tggtagccgtctggagttctgccaccncggctactgctatcccgtccggaattcccgggtcgacccacgcgtccgattggaccaactagcaacatagaaagcacattagtgtaccaacaatggcagccaaagtattgtgcctccttatgctccttggtctttctgcaagtgctgctacggcgaccattttcccgcaatgctcacaagctcctatagcttcccttcttcccccgtacctctcaccagtgttgtcttcagtatgtgaaaacccaattcttcaaccctacaggatccaacatgcaattgcatcaggcatcttacctttatcacccttgttcctccaacaatcatcagccctattacagcagttacctttggtgcanttattggcacataacatcagggcacaacaactcgtgctagcaaaccttgctgcctactctcagcaacaacagttaccctttgtgcatttgttggcaccaaaacatcaggcacaacaacttcaacaactn

SEQ ID NO: 84906 - DNA, 509 bp, Zea mays
  unsure (1)..(509): unsure at all n locations
tggtagtagtcttntgtcctgaaccgctcgcatcgctatctcgtctcgaattcccgggtcgacccacgcgttcgtcgcacgcgttcggtcactcctaccggtaccctgggctaacataaatgccagcccgtggcagcgtttaagctgctatagcgatgaccaaccagggcgttcaagtctttccagagataatggttcctcttgttggatcacctcatgaattgggacatcaagtggcccttatccgtcaagtctctaactaagttttcaccagtatggggaaaactattgcgtacatgatcggaacgatgactgagattctcagggcagctctagcggcttacgtgatcgcggagcatgtcataatcattatcctctgtaacgaacgagctagctcggttcagctttctctcctgctcggcttctttttggatttaatccattggtcgtacttaaccccgctgtttattttgagtccctattctgattacttttagtctggtattttt

SEQ ID NO: 84907 - DNA, 517 bp, Zea mays
  unsure (1)..(517): unsure at all n locations
gaggtttagtgagtgtttctgatgtcctagcctcgtactgcatcngctataccggtctcggaattcccgggtcgacccacgcgtccgccgataccttccatcaatgatagcttcagtatgtgaaaacccatctcttcaaccctggaggcgccaacaagcaatcgcatcatgcaacatacctttatcacccttgtttcaacaatcgccagccctatctttggtgcagtcattggttcaaaccatcagggcacagcagctgcagcaactcgtgctacctgtgatcaaccaagtagctctggcaaacctatctgcctactctcagcatcaacaatttcttccattcaaccaactgtctacattgaaccgtgctgcttatttgcagcaacaactattaccattcagccagctagctactgcctactctcagcaacaacaacttcttccatttaaccaattggccgcactgaaccccgctgcttatttgcagcagcaaatactactaccatttagccagctg

SEQ ID NO: 84908 - DNA, 509 bp, Zea mays
  unsure (1)..(509): unsure at all n locations
gttagagttgtatgagtctagccaccgacttagtgcatcgcntcccggtccggaattccaggctcgacccacgcgttcggcaaattgcaccaagaaatccatcgataggccgtcgacaggggaattaatggcgtgggcgtctagcagcagccaccgtcgtctcatcctcgcagccgccgtcctgctctccgtgctcgcggctgccagcgccagctccgggaccttctgcgtgccggggtgggccattccgcacaacccgctcccgagctgccgctggtacgtgaccagccggacctgcggcatcgggccgcgccttccgtggccggagctgaagaggagatgctgccgggagctggcggacattccggcgtactgccggtgcacggcgctgagcattcttatggaccgcgcgatcccgtcgggcccggacgcgcatctggagggccgtctagaggacctgccgggctggccgcggtaggtgcaaaagggattcggcggcaaccttgtcg

SEQ ID NO: 84909 - DNA, 484 bp, Zea mays
  unsure (1)..(484): unsure at all n locations
agtaagtnaagggctttttttacgtaagcgggggaatagaagttactgctcgtaccggtccggaattcccgggtcgacccacgcgtccgcccacgcgtccgcgcacatatctactatactatactctaggaagcaaggacaccaccgccatggcagccaagatgcttgcattgttcgctctcctagctctttgtgcaagcgccactagtgcgacccatattccagggcacttgccaccagtcatgccattgggtaccatgaacccatgcatgcagtactgcatgatgcaacaggggcttgccagcttgatggcgtgtccgtccctgatgctgcagcaactgttggccttaccgcttcagacgatgccagtgatgatgccacagatgatgacgcctaacatgatgtcaccattgatgatgccgagcatgatgtcaccaatggtcttgccgagcatgatgtcgcaaatgatgatgccacaatgtcn

SEQ ID NO: 84910 - DNA, 479 bp, Zea mays
  unsure (1)..(479): unsure at all n locations
agtaagatgaggctcnactaccgatcccgaagttatcagcattgctcgtaccggtccggaattcccgggtcgacccacgcgtccgcccacgcgtccgcccacgcgtccgcccacgcgtccgcggacgcgtgggtttcaatcagagccagtatcctcgcattgttaccgaggacttcttgccacttcccagcaaagggaaatctgggaaggatggctggtatcctcctggtcatggtgatgtgtttccctctttgaataacagcggaaaacttgacatcttattggctcagggcaaagagtatgtctttgttgcaaactcagacaacttgggtgctatagtcgacatcaagatcctaaaccatctgatcaataaccagaacgagtactgcatggaggttactccaaagacgctggctgacgttaagggtggcactctcatctcttacgaaggaagagttcagcttttggagattgcccaa

SEQ ID NO: 84911 - DNA, 475 bp, Zea mays
  unsure (1)..(475): unsure at all n locations
agtgagtaaaggnttgtagtacgtaacggagcttatgcaatgctcgtaccggtccggaattcccgggtcgacccacgcgtccgcaagcacaaggacaagctcccgcccaacttccgcaagcttctgaacgttcagctcaagaagctcgtcgccggcggcaagctgaccaaggtgaagaactcgtacaagctgtcgtccgccgccaccaagccgaatcccaagcccaaggccgccccgaagaagcccaagaccggcgctaagaagcccaaggccgctgccaagaccaaagctaagacccccgccaaggcgaagcccgccacaaagcccaagcccgccgcgaagccgaaagccgtagtgaagccgaagacacccgccaagcccaaggccaagccagctgccaaggcgaagcccaagaccgccggcgctaagccgaatccacttgctaagaaagccggccgtcccgccaaggcggcgg

SEQ ID NO: 84912 - DNA, 501 bp, Zea mays
  unsure (1)..(501): unsure at all n locations
agtagaggttangaaatagtgacggggcgagaagtattctcgtacagttcccgggtcgacccacgcgtccggctatcgcacgctatgttgctcgcttgaaggatgacaaccctctttttgggtcttgccgtattgaacaagcccacgttgagcaatggatggattttgccgcaacagaagttgatcctggtgttgcatggtacttgtatccaaggcttgggtacctcccttatgttagcacaactgaggaaacagctatttcttcattgaagaggtcgcttggtgctctgaacacacaccttgcttcaaacacataccttgttgggcatgctgttactctagctgacattgtaatgacatgcaacctttaccatggaattgcacggatcttgaccaagaccttaacgtntgatttccctcatgtcgaaaggtttttttggaccatggttaaccagcctaacttcaagaaggtcattggtaagggtaaaccggcaaaattct

SEQ ID NO: 84913 - DNA, 504 bp, Zea mays
tagttaggactttttgttcctactcgtatgcatcagctatctcgtccggaattcccgggtcgacccacgcgtccgagcaacatagaaagcacaatagtgtaccaacattggctgccaaaatattttgcctgcgtatgctccttggtctttctgcaagtgctgctacggcgaccattttcccgcaatgctcgcaagctcctatagcttccattcttcccccgtacctgtcaccagcggagtcttcggtatgtgaaaacccaattcttgaaccctacaggatccaacaggcaatcgcagctggcatcttaccttgatcacacttgttcctccaacaatcatcagccctattacaacagttacctttggtgcatttattggcacaatacatcatggcatcatcaactacaacaacttgagctagcaaacctggttgattactttaagaagcagcgtttctttcaatcaacccacttaggtcattggaccctggtttgtaattggcac

SEQ ID NO: 84914 - DNA, 505 bp, Zea mays
agttagaagtctgattcacgagcccgcaatacagtaggctcgtaccggtccggaattcccgggtcgacccacgcgtccgcccacgcgttcgcccacgcgttcggccacgcgtccgattgagaccaacaagcgacatagaaagtggaatccagtagcaacaatagagcaacaatggcgaccaagatattttccctccttatgctacttgctctttctgcatgtgttgctaacgcgacaattttgcctcaatgctcacaagctcctatagcttaccttcttccaccataccttacatcaatgatagcttcagtatgtgaaaacccagctcttcaaccctataggctccaacaagcaatcgcagcaagcaacatacctttatcacccttgtttcaacaatcgccagccctatcttttgtgcaatcattggtacaaaccatcagggcacagcagctgcagcaactcgtgctacctgtgatcaacccagtagctcttgcaaacctttctt

SEQ ID NO: 84915 - DNA, 512 bp, Zea mays
  unsure (1)..(512): unsure at all n locations
gagtagagctgagtaaaagctagccccgatcgcacgtcggactcgtccggaattcccgggtcgacccatttttatgggtacgggagcgagtagatcgtgcgcgcctactacatctccacgaccttgtgatggggtggggctcaccttcacgaagctcttcagccggctcttctccaagaaagagatgaggatccttatggttggtctcgatgcagctggtaagaccaccatcctctacaagctcaagctcggagaaatcgtgaccaccaatcctacaatcgggtttaaatgggaaaactgtgaatacaagaacattagctttactgtctgggatggtggaaggcaggacaagatcaagccattgtggaggcactatttncaaaacacccaaagccttatcttttgtggtgatagcaatgacagagatcgtgctgttgaagcaaaagatgagctccacaggatgctgaacgaggatgaattganggatgctgtcttgcttcgtttcgcaaaca

SEQ ID NO: 84916 - DNA, 475 bp, Zea mays
  unsure (1)..(475): unsure at all n locations
gagtagaagtgctgtattcgtcaccgacagtgacgcatcgctcgtaccggtccggnattcccgggtcgacccacgcgtccggtgctggcgataccgatctcaccttcctaatctacacaaattttggatatcaggcgggtcacattgactaagctcttaaaaccactattcaccaacaaagagatgacgatccttatggcagatctctatgcacatggtaagaccaccatcctctactagctcaagctagtagaaatcgcgaccaccatccctacaatcgggtttaatgtggagactgttgaatacaagaacattagcttcactgtctgggatgttggaggtcatgacaagatcaggccattgtggaggcactatttccagaacacccaaggccttatctttgttgctgatagcaatgacagagatcgtgttgttgaagcaaaggatgagctccacaggatgctgaacgaggatg

SEQ ID NO: 84917 - DNA, 483 bp, Zea mays
  unsure (1)..(483): unsure at all n locations
nggtaagttaaggaagtantgataagctatccccgcatataaagtaattgctcgtaccggtccggaattcccgggtcgacccacgcgtccgatcctgcgtttgctgaacaccaacgtggatgggaagcagaagatcatgttcgccatgacctcaatcaagggtgtcgggcgccgcttctccaacatcgtctgcaagaaggccgacatcgacatgaacaagagggccggcgagctgacgcctgatgagctggagcgcctgatgacggtcgtggccaaccctaggcaattcaaggtgccggactggttcctcaacaggaagaaggattacaaggacggcaggttctcgcaggtcgtctccaacgcccttgatatgaagctcagggacgaccttgagaggctcaagaagatcaggaaccaccgtggtctgcgtcactactggggcctncgcgtccgtggccagcacaccaagactactggcaggcg

SEQ ID NO: 84918 - DNA, 523 bp, Zea mays
  unsure (1)..(523): unsure at all n locations
ggaggtgngtcngatcatgcattgtatgctacgcagtgcctggtccgaattcccgggtcgacccacgcgtccgagctactgcctactctcagcaacaacaacttcttccatttaaccaattggccgcactgaaccccgctgcttatttgcagcagcaaatactactaccatttagccagctagctgcagcaaaccgtgcttccttcttgacacagcaacagttgctgcctttctaccagcagtttgcggctaaccccgcaaccctcttacaactacaacaattgttgccctttgtccaacttgctttgacagacccagcggcctcctaccaacaacacatcattggtggtgccctcttttagattgcttattagttgtaattcaataataaagttttttggatgatgtatgtggccaaccagaaataagaagttacatttccagattctataaaaaaaaaaaananaannaaaaataaaaaaaaaanaaaaaaaaaaaaaaaaataaaaanaaaaatttatta

SEQ ID NO: 84919 - DNA, 702 bp, Zea mays
  unsure (1)..(702): unsure at all n locations
ngagtttggagtgcctgcgtcgatcgcaatagcacatgantgccactgccgngtaccggttctcggaannntcccggcgtcgacccaacgcgtcgcgccgcacgccgtctcgtcccccgcgaatccaatttcagctctngccgccgctgccgtcagcaaggcaggggagcgagcaaggggatgccgtngctggccacgngtngctgcgcnntcgcggacccgcgcgacnnctgttcgcgccgcnctccttccgcaagaaagggggctacatnncccgctcaaccaacctaacctnnccgcacctaccaagaatcggcgaactacgtnncgacgtcaaagggtgaaccggcnngccgtccccacaagggggaatnngccgcacannagttctaaaccacggctcnngcactcggtcgnncgtctgggaacccgtcacnncaagcngccgcnncatcgngcngtnnncgagaaataanaccannagcagggtngaaatggngtcnngcatcaaaatcagggaaagcccgtatcnnccatgtccccgcnngtgngaagcaaatgtngcaagcnnncatcccccgcttgcacccagaaagaaagttcccgcncctganggaagnggtgaaagaaatgacnccagcntgaagggcnggggatgcnannaggnnagcgcnngnncgagggtcaatttcagcacccaan

SEQ ID NO: 84920 - DNA, 540 bp, Zea mays
  unsure (1)..(540): unsure at all n locations
aggcgatgggtangagtactgatatgagagctactctcgtaccgcgtccggaattcccgggtcgacccacgcgtccgaacacaccaagcgaagcgcactagcaacgacctaacaccaatggctaccaagatatgagccctccttgcgcttcttgcccttttagtgagcgcaacaaatgcgttcattattccacagtgctcacttgctcctagtgccattattccacagttcctcccaccagttacttcaatgggcttcgaacatccagccgtgcaagcctacaggctacaactagcgcttgcggcgagcgccttacaacaaccaattgcccaattgcaacaacaatccttggcacatctaaccctacaaaccattgcaacgcaacaacaacaacaacagtttctgccatcactgagccacctagccgtggtgaaccctgtcacctacttgcaacagcagctgcttgcatccaacccacttgctctggcgaacgtagcttcataccaacaaccaccaccggttgcacaagttaatgcaatg

SEQ ID NO: 84921 - DNA, 532 bp, Zea mays
agtaatgttatctgatcatgcatcccgactagcagtacgctgctcccaattcccgggtcgacccacgcgtccgccggggtgtcgctgttcgacacgtgctacgacctgtcggaccggacgagcgtggaggtgcccgcggtgtcgctgcggttcgagggcggcggcgcgctgcggctgccggcgaagaactacctgatccccgtggacggagccggcacctactgcctggcgttcgcgccgacgaacgcggccgtgtccatcatcgggaacgtgcagcagcagggcacccgcgtcagcttcgacaccggcaggggcgccgtcggcttcacccccaacaagtgctagcctagcctagcctaagcctgacttctggctaaccgtgccctgttagccacggatgtcagtagcaatgacaagccggtgtttgactagcgggagaatgattagatggggggtaattgaccggtgggccctgccgaatctggggaggagttaaaggtccaggcttaggcccgtgtatgctcttgccatg

SEQ ID NO: 84922 - DNA, 531 bp, Zea mays
  unsure (1)..(531): unsure at all n locations
tagattaagtgtggtctgatcctcatctccgatgnaatcgcatacctgtccggaattcccgggtcgacccacgcgtccgcccacgcgtccgcccacgcgtccgggcgttggcagcaccccgatcctgggccagtgcgtcgagtttctgaggcatcagtgcagcccgacggcgacgccctactgctcgcctcagtgccagtcgttgcggcagcagtgttgccagcagctcaggcaggtggagccgcagcaccggtaccaggcgatcttcggcttggtcctccagtccatcctgcagcagcagccgcaaagcggccaggtcgcggggctgttggcggcgcagatagcgcagcaactgacggcgatgtgcggcctgcagcagccgactccatgcccctacgctgctgccggcggtgtcccccactgaagaaactatgtgctgtagtatagccgctggctagctagctagttgagtcatttagcggcgatgattgagtaataatgtgtcacgcaataacatgggtggcaatgtca

SEQ ID NO: 84923 - DNA, 514 bp, Zea mays
  unsure (1)..(514): unsure at all n locations
ngaaggctctgtcactaaacgaaatattcaatagtgtccggattcccgggtcgacccacgcgtccgagtgagaccaactagcacatagaaagcacaatagtgtaccaacaatggtagccaaatattgtgcctccttatgctccttggtctttctgcaagtgctgctacgacgaccattttcccgcaatgctcacaagctcctatagcttctcttcttcccccatacctctcaccagcgttgtcttcagtatgtgaaaacccaattcttcaaccctacaggatccaacaggcaatcacagcaggcatcttacctttatcacccttgttcctccaacaatcatcagccctattacatcaattacctttggtgcatttattggcacaaaacatcagggcacaacaactacaacaactcgtgctagcaaaacctgctgcctacgctcatcaacaagcagtacctttggtgcatttgttggcacaaaacattatggcacaacaactactacaactcgtn

SEQ ID NO: 84924 - DNA, 530 bp, Zea mays
  unsure (1)..(530): unsure at all n locations
gggtgagtggtgtgttccctcagcttcnagtcacgctcgtaccggtccggaattcccgggtcgacccacgcgtccgccgcacgcgtccgccagagcgcagaagaacccgatcgacaccatgagggtgttgctcggtgggctcgctctcctggctctcgctgcgagcgccacctccacgcatacaagcggcggctgcggctgccagccaccgtcgccggttcatctaccgccgccggtgcatctgccacctccggttcacctgccacctccggtgcatcttccaccgccggtccacctgccgccgccggtccacctgccaccgacggtccatgtgccgccgccggttcatctgccgacgccaccatgccactaccctactcaaccgtcccggcctcagtctcatccncagccacacccatgcccgtgccaacagccggattccagcccgtgccagcttgcagggacctgctgcgttggcagcaccccgatccctggccaatgcggcaagtttctgaaggcataatgcaccc

SEQ ID NO: 84925 - DNA, 526 bp, Zea mays
  unsure (1)..(526): unsure at all n locations
nagtgntttctggttcacgtagtaagcatgtaatgctataccgctccggttcggaattcccgggtcgacccacgcgtccgcccacgcgtacgcccacgcgttcgcccacgcgtccgcaactagcaacatagagagcagaatagtgtaccaacaatggcagccaaaatattttgcctccttatgctccttggtctttctgcaagtgctgctactgcgaccattttcccgcaatgctcgcaagctcctatagcttcccttcttcccccgtacctctcaccagcggtgtcttcggtatgtgaaaacccaattcttcaaccctacaggatccaacaggcaatcgcagctggcatcttacctttatcacccttgttcctccaacaatcatcagccctattacaacagttacctttggtgcatttattggcacaaaacatcatggcacaacaactacaacaacttgtgctagcaaaccttgctgcctactctcagcaacagcagtttctttcattcaaccaactaggttcat

SEQ ID NO: 84926 - DNA, 531 bp, Zea mays
  unsure (1)..(531): unsure at all n locations
aggtggagtcctgtgtcgacctccccagtccgtaccgncgtgctgtaccggtctcggaattcccgggtcgacccacgcgtccgcccacgcgtccgtcaacgggctttgggcatttcgcaattgctaatgatgatgtgtacgagttagctgagaatatcaaatccaagggtcgtaagatcacccgcgaacctggtcctgtcacgggacgatccactgttcttgccttagcacaagatcctcatgtctacatgtttgagcttattctgaggtctgactcacctgagtctctttgccaatatacgctattggtcttttacctttatcgtgtactaagctgtacgagatggtcctacacatgcaactcctattgatgaaggatgatccaagctacaagagccccatgcacctgaagtgctaagcttgctaatgcaccatcaacattatcttactagatttacaattttaaacttacaactgacgcctatcttcaaaaggtgtattcgctatcgatcctcaaattttttaatttct

SEQ ID NO: 84927 - DNA, 530 bp, Zea mays
  unsure (1)..(530): unsure at all n locations
ggggagagtgnctttcttcatcgatacagaaagtatatgcatgctctaccggtccggaattcccgggtcgacccacgcgtccgcggacgcgtgggcggacgcgtgggtagcaacatagaaagcacaatagtgtacgaacgagtggcagccaaaatattttgcttccttatgctccttggtctttctgcaagtgttgctaccgcaaccattttcccacaatgctcacaagctcctatagcttcccttcttcccccatacctctcaccagcggtgtcttcaatgtgtgaaaacccaattgttcaaccctacaggatccaacaggcaatcgcaacaggcatcttaccattatcacccttgttcctccaacaaccgtcagccctattacagcagttacctttggtccatttggtggcacaaaacatcagggcacaacaactacaacaacttgtgctagcaaaccttgctgcatactctcagcaacatcagtttcttccattcaaccaactggctgcaattgactctgctgctta

SEQ ID NO: 84928 - DNA, 534 bp, Zea mays
  unsure (1)..(534): unsure at all n locations
tggtacgaggtctggntttgcattcgttctanctgcagacactgtctcggaattcccgggtcgacccacgcgtccgcacggcatcgccatccgcgcccgcgggccggtggcggcgacgcaggcccccgcgcgcggacggcaatgccgcgtgtctgcggcggcggtcggcgcgcccgccgcgcgagcccgcgtgacgcactcgatgccgccggagaaggcggaggtgttccgctcgctggagggctgggcggcgcggtcgctgctgccgctgctcaagcccgtggaggagtgctggcagccggcggacttacttccggactcctcgtccgagatgttctggcacgaggtccgcgagctgcgcgcccgtgccgtggggcttcccgactagtacttcgtcgagctcgtgggcgacatggtcactgaagaagcgctagccacgtaccagaccatgatcaacacgctcgacagcgtacgtgacgagaactggatccacaaattgccccgggccggtttggactcacacctggaccgacc

SEQ ID NO: 84929 - DNA, 525 bp, Zea mays
  unsure (1)..(525): unsure at all n locations
gagctaaggggtttgtttacgaaaagaagtattgtcagtccgttcggattcccgggtcgacccacgcgtccgacgcaagccactccgaggccaagtctagggtttgggaatctgtaggaggggagaggggagcgcgctcagggtcagggaggcgaagatgatcgaggtggtgctgaacgaccgcctggggaagaaggtgcgggtgaagtgcaacgaggacgacaccatcggcgacctcaagaagctggtggcggcgcagacggggacgcgccccgagaagatccgcatccagaagtggtacaacatctacaaggaccacatcacgctcaaggactacgagatccacgacgggatggggctcgagctctactacaactaggcgccctgaccccaaccgtgccctgatgtaaggttaatccgaattctgaagtcatgggtgcgcttccagtcgcagcgtctttagctaacaagctcgcatacatataggcaacttgagtgagctattgtatacggatatggttgtgn

SEQ ID NO: 84930 - DNA, 530 bp, Zea mays
  unsure (1)..(530): unsure at all n locations
ngggggagtgcgtctgttttactaagaactacgctattgctatacctgtccggaattcccgggtcgacccacgcgtccgccgacgcgtccgattaagaccaactagcaacatagaaagcacaatagtgtaccaacagtggcagccaaaatattttgcttccttatgctccttggtctttctgcaagtgctgctaccgcaaccattttcccacaatgctcacaagctcctatagcttcctttcttcccccatacctctcaccagcggtgtcttcagtatgtgaaaacccaattcttcaaccctacaggatccaacaggcaatcgcagcaggcatcttacctttatcacccttgttcctccaacaaccgtcagccctattacagcagttacctttggtgcatttgttggcacaaaacatcaaggcacaacaactacaacaacttgtgctaggaaaccttgctgcctactctcagcaacagccagttcttccattcaaccaactggctgcattgaactctgctgcttatttcc

SEQ ID NO: 84931 - DNA, 521 bp, Zea mays
ggtagttttgtccctcgacctttgttccgctactatggtctcggaattcccgggtcgacccacgcgtccgtcgttggtattgatattgacccacagtcacttgaacttgctcaagaaaatgctgctggtctggagctggacatcgatttagtttggtctgacataaagaacttaaatctgaaaggcgtccatgttgatactgctgtcatgaatccttcctttggtacacgaaggaatggagcagacatggagttcctctctatggccttgcaagttgcttctcaagctgtctattctctacacaagacttccactagagaacatatcaagaaggcaaccttgcgtggcttcaatgccatcagtgctgatgttctatgcgagctgcgttacaatctaccgcggacgtacaaattgcacacgacaaaagagactgacattgcaaacgatctgtggctcttttgatctaacgcccaacgtcgcatctagcgcgctcgctattggcgatgtgcacaagtaatgtg

SEQ ID NO: 84932 - DNA, 522 bp, Zea mays
  unsure (1)..(522): unsure at all n locations
nggaaagcgtgtctgatccacgaatagaagtaggtgatancggtccggaattcccgggtcgacccacgcgtccgattgagcttctgtaaattagagaacaggataatctctgttgagcgcatttatcaatattgcaggcttcctagtgaagcaccattgattattgagaactgccgtccaccatcatcatggcctcagaatggaaacattgaactgattgatctcaaggtccgctacaaggacgatctaccattagttcttcatggtgtaagttgtatgtttcctggcgggaaaaagattgggattgtagggcgtactggaagcggtaaatctactcttattcaggcccttttccgcctaattgagcccactggagggaagattataattgacaacattgacatctctgcaattggccttcatgatctgcggtcacggttgagcatcattccccaagaccctacattatttgagggtactatcagaatgaaccttgatcctcttgaatagtgcactgatcaa

SEQ ID NO: 84933 - DNA, 519 bp, Zea mays
gttgactggtgctataatgaaagtatgcactgctcgtaccggtccggaattcccggtcgaccgacgcgtccggcagcggatggacctgtgccgcaagtacgcctttgggaagatgctcgtgataggctgtgagccacccttcaagctgaagggcctttggctcttacgtggccaggatgttcccaagtttgtaatggatgaggtctatgacatggagctctacgagtggaccaaggtggacatctctgatgaggcccagaacgagcgtgtcaatgcgatgattgaggaccacgatccctttgagggcgaggccttgcttgacgcgaaatgcttcaagtgagtgtgcttgccttgagacagaaatgtttagctctttgatttgcctaatgaaagagttgcccttatactagtgtcgatgctgatctggtataccctgcctatgacttgtttaaggttgtgccctgtttgagaattcttgtgcatcttgcgatacctcagtcttcatcatttaaatgttaa

SEQ ID NO: 84934 - DNA, 537 bp, Zea mays
  unsure (1)..(537): unsure at all n locations
cggtagagtgttttnnttgaaagtcgcagctcgngtcagcactancggtaccggttcggaattcccgggtcgacccacgcgtgcgcccactcttcacgaccacgcgttcgatggtcttgccgagcatgatgttgcataggatggtgccacatatgtcactgccactccttcttgcagatcatgctgcaacaataattaccatctatgaataaccaaattgccatgactaatctacccatgctcttacaggaacatttaccattagctgcatattagatagatatatttgtgtcgtaccaaataatagatttgacatgctatggcgtactgacaaattattaatatcatcttattccagccctttttagcatcattgatcccactggagggcagattatcattaacatccttgacatctcttcaattcgtcttcatgatctgcggttacggttgtacatcaattcccaataccctacattatttttaggtactatcagaatgaacctttgatctttttgacaaatgcactgatacatt

SEQ ID NO: 84935 - DNA, 585 bp, Zea mays
  unsure (1)..(585): unsure at all n locations
gagttagtcgtgtctgatccctgccattcgtcgctagcgtgcatacnctggtccggaattcccggtgtcgactccacgcccgtccgaagatactgaactcaactctattgnngtgtggatagttcaaatccgttggaatttcaaccactttaactgtgggtagagatcaagtgttctaagctgctgggatactctgcagggcaaggagaagatttggtggccctcagtggataggatacctatagtccatggccaagtgtgtcgatcatncatcgtttgatgtaactctcaagggcttacttacacagaatggttcctaacgtggcatagggacactgtgcagtggtctgtgaaaaccatactcattgtcctctgcggtaataaggttgatgtgaagaacaggcaggtcaaagccaagcaggttactttccacaggaagaagaatcttcagtactatgaaattactgccaagagcaactacgactttgagaaacctatcctgtaccttgcaaggaagctggctggtgatccgaaccttcacttttgtgaaacctgttgttttaaagccttgggagttaccatttc

SEQ ID NO: 84936 - DNA, 530 bp, Zea mays
  unsure (1)..(530): unsure at all n locations
gagtagagtgtttttgtcctagctaggacgtagtgctcataccggtccggaattcccgggtcgacccacgcgtccgcggacgcgtgggtgccggccggcgcccagcactggctgtacaacgacggcgacgcgccgcttgtggcggtctacgtcttcgacgagaacaacaacatcaaccagctcgagccttccatgaggaaattcttgctggctgggggcttcagcaaggggcagccccacttcgccgagaacatcttcaaagggatcgacgcccggttcctgagcgaagccctgggcgtcagcatgcacgtcgccgagaagctgcagagccggcgtgaccagcgaggcgagatcgtccgcgtggagccggagcacggctttcaccagctgaatccgtcgccgtcgtcgtcgtcgttttcgttcccatcgtcacaagtccagtaccaaacgtgccagcgcgacgtcgacaggcacaacgtctgcgccatggangtgaagcacaacgtcgaaccgcttggacaagcccacct

SEQ ID NO: 84937 - DNA, 522 bp, Zea mays
ggtaaaggctgtagtctactcagaaaattgatgctacgctgtaccggaattgccgggtcgacccacgcgtacgatcagcaaagcggcagtgcgtagagaggatcgtcgaacagaacagcatgaagatggtgatcggtctcgtcgtgtgcctggctctgtcagctgccagcgcctctgcaatgcagatgccctgcccctgcgcggagctgcagggcttgtacggcgctggcgccggcctgacgacgatgatgggcgccggcgggctgtacccctacgcggagtacctgaggcagccgcagtgcaacccgctggcggcggcgccctactacgccgggtgtgggcagacgagcgccatgtaccagccgctccggcaacagtgctgccagcagcagatgaggatgatggacgtgcagtccgtcgcgcagcagctgcagatgatgatgcagcttgagcgtgccgctgtcgtcagcagcaggctgtacgagccagctctgatgcaacagcagcagcaactgtgggcaa

SEQ ID NO: 84938 - DNA, 521 bp, Zea mays
ggaaagggtgttacctcctactctttgttcgctataccggtccggaattcccgggtcgacccacgcgtccggcgacgcgtccggccagtcgttgcggcagcagtgttgccagcagctcacgcaggtgtgaccgcatcaccggtaccaggcgatcttcggcttggtcctacagtccattctgcagcagcagccgcaaagcggccaggtcgcggagctgttggcagcgcagatagcgcaacaactgacagcgatgtgcggcctgcatcaaccgactccatgcccctacgctgctgccggcggtgtcccccactgaagaaactatgtgctgtattatagccgctggctagctagctagtagaagcatttaccggagatgattgagttataatgtgtcacgcattagcatgggtggcagtgtcagtgttagcaatgaccttgatgaaacaattgaattgaccgaacaaagtattggtgcaaatacatgattgaaaattgaatcaatgaaggttcttgggggcgaa

SEQ ID NO: 84939 - DNA, 518 bp, Zea mays
agttttaggtgttgttctaccgacactagttgctatactgtccggaattcccgggtcgactcacgcgtccggttgggtagagggatctagaacctcttcactgcaaaaaggatataactttgtgctgctgtgatggtgttaagtgccggtgggctcggccttcttataagtctaagtacttcttctatacttcttattgaggatggtcacttgagctagcatatatttcaaacttatagttttgtaatcactccgataaaataatgtaaattttttgtaacctgtaaaatttggtaataagatttccgctgcaaactattggtgtgtgatttgtgttacttaatcccgcggttctggttgtaagtggtgtatccgatgtccttggacaatctgacggatcctgttaagttatctggtgcacatgcatagctgtctgaggtctttgagacaagaacaggtgcatgtgggcccaataaacttgggagtttttgcacaacccaccaaagggttttttgatc

SEQ ID NO: 84940 - DNA, 516 bp, Zea mays
  unsure (1)..(516): unsure at all n locations
aggaagggttgtctatagaatagagtatgctctacggtccggattcccggtcgacccacgcgtccgaagtgatctggactcagagcgctggccaaactcgcactggcgttctgtgaaggttgggggggatgagtctacagctggtgataaacagccaagagtttcactctgggagattgagccactgacaacctttccgatgtacccaactgcttttccattaaggctaaagcgtccgtgggcttcaggactacctatgttcaatggtgggaggagcgacgagttcgctcgttattcttctctcatgtggcttcgagatggaaaccgaggggctcagtcactgaacttccagggacttggagcatcaccatggcttcagccaagaatagattatccattgttgagtctgaagccagatacttaccagcagatggctgccgccgcactagaagaaattagagctggggatcatttgaagcangcatcttctcttctgccagttcaccagactcaaac

SEQ ID NO: 84941 - DNA, 526 bp, Zea mays
gggaaagtctttgtccatgataagacaatattgcattgctcgtaccggtccggaattcccgggtcgacccacgcgtccgcccacgcgtccggctggccgttgcgggcgaaccgaaaatcacgggcgcgagagatcggagcacggcatgtcggaggagcagttcctcgccgtggcggtggaagccgccaagagcgccggcgagattattcgcaagggattctaccagaccaagaacgtcgagcacaagggccaggtggatttggtgacggagacggacaaggcctgcgaggacctcatcttcaaccacctccggaagcacttcccggaccacaagttcatcggggaggaggagtccgcggcgctcggggccaccgatgacctcaccgacgaccccacctggatcgtcgatcccctcgacgggaccactaatttcgtccatgggttcccatttgtatgtgtctccgttggcctcaccattgggaaaattcccactgtcggagtcgtcttccacccccatcatgaacga

SEQ ID NO: 84942 - DNA, 528 bp, Zea mays
  unsure (1)..(528): unsure at all n locations
cggaaatcttgncttgccttcatcgtctgcttcgccatagcaggtaccgttccgaaattccggtgtagccacccggggcgcggtcatgtcactctttatcttcatttttgctactagcattctagaaatgatgtgcggtggtcttggaattgatgactgctggaggaatgagcacttctgggtcattggaggtctgtcctcacacctctttgctgtgatccacggacttctcaaggtcatagctggtgttgatacaagcttcaccgtgacatccaacggtggcgatgatgactgagttctcacagctatatacattcaaatggactaccttattgatacctactaccaccttgcttctattgaacttcattgctgtggacgctggcgtttcaaatgcgatcaataactgatcttagtcatggagctcccctttttgggaagctattctctgcattttgggcgatcgtccatctttatccctttttcaaaggtttggtggtaagcacaacaagacacccacgaatgttg

SEQ ID NO: 84943 - DNA, 533 bp, Zea mays
  unsure (1)..(533): unsure at all n locations
aggcaggatggcctgtcgtgcctggctctatctcggttcgctactgatcgtaccggttcggaattcccgggtcgacccacgcgtccgcgctcctcccccaaaatcccccaaaacctgacgcgctggagggccgatccggggctcgccgccgccttatccgagcagtctcctcggcccagccggggatccaagcgggatggggtacttgagctccgtgatcgggcaccccaccgatggatcctccgtcagcggcggcggcctcagccagaatggtagatttagctatggctatgcaagctcccctggtaaaagggcatccatggaagacttctatgagacaaaaattgattgtgttgatggtcagatagttggtctttttggagattttgatggtcatggcggtgctaaggtagcagagtatgttaaagaaaacctggtcaacaatcttgatagtcatccaaagttcatcagtgatactaaagtcgctatagatgatgcttataaaagcaccgacagtgaattctaagatcttn

SEQ ID NO: 84944 - DNA, 536 bp, Zea mays
tgtagtcttgtgtaagctccgtattcccgtctagctgacatacctgtccggaattcccgggtcgacccacgcgtccgaatattttgagcattcagaaacacactaagcgaagcgcactagcaacgacctaacaggaatggctaccaagatattagccctccttgcgcttcttgccctttttgtgagcgcaacaaatgcgttcattattccacaatgctcacttgctcctagtgccattattccacagttcctcccaccagttacttcaatgggcttcgaacacctagctgtgcaagccaacatgcaacaacaagcgcttgcggcgagcgtcttacaacaaccaattgcccaattgcaacaacaatccttgccacatctaacaatacaagccatcacaacgcaacagcaacaacagtttctaccagcactgagccacctagccatggtgaaccctgccgtctacttgcaagagcagctgcttgcatccaacccacttgctctggccaacgtagtttcaaaacacacaccaccttctg

SEQ ID NO: 84945 - DNA, 530 bp, Zea mays
tgtagcgggtctgtcctagctcggacgtaggtgcataccggtccggaattcccggtcgacccacgcgtccgttgagaccaactagcaacatagaaagcacaatagtgtaccaacaatggcagccaaagagattgtgcttccttatgctccttggtctttctgcaagtgctgctaccgcaaccattttcccacaatgctcacaagctcctatagcttcctttcttcccccatacctctcaccagcggtgtcttcagtatgtgaaaacccaattcttcaaccctacaggatccaacaggcaatcgcagcaggcatcttacctttatcacccttgttcctccaacaaccgtcagccctattacagcagttacctttggtgcatttgttggcacaaaacatcaaggcacaacaactacaacaacttgtgctaggaaaccttgctgcctactctcagcaacagcagtttcttccattcaaccaactggctgcattgaactctgctgcttatttgcaaccacaacttccaattaat

SEQ ID NO: 84946 - DNA, 536 bp, Zea mays
aggaagagctgttttctgatcttacgccatagtgacggtattgctcataccggtccggaattcccgggtcgacccacgcgtccgcggacgcgtgggcccgtgccagctgcagggaacctgcggcgttggcagcaccccgagcctgggccagtgcgtcgagttcctgaggcatcagtgcagcccgacggcgacgccctactgctcgcctcagtgccagtcgttgcggcagcagtgttgccagcagctcaggcaggtggagccgcagcaccggtaccaggcgatcttcggcttggtccttcagtccattctgcagcagcagccgcaaagcggccaagtcgcggggctgttggccgcgcaaatagcgcagcaactgacggcgatgtgcgggctgcagcagccgacttcatgcccctacgctgctggcggcggtgtgccccactgaagaaactatgtgctgtagtatatccgctggctagctagctagttgagtcatttatccgcgatgatttgggaataatgggtaaccgctaaccttg

SEQ ID NO: 84947 - DNA, 527 bp, Zea mays
gaaggaggtgtctgttctatgatagtattgtattgctagtaccggtccggaattcccgggtcgacccacgcgtccgcaccaagcgaagcacattagcaacaacctaacaacaatggctaccaagatattatccgtccttgcgcttcttgcgctttttgcgagcgcaacaaatgcgttcattattccacaatgctcacttgctccaagttccattattacacagttcctcccaccagttacttcaatgggcttcgaacacccagctgtgcaagcctataggctacaacaagcaattgcggcgagcgtcttacaacaaccaatttcccagttgcaacaacaatccttggcacatctaacaatacaaaccatcgcaacgcaacagcaacaacaattcctaccagcactgagccacctagccatggtgaaccctgccgcctacttgcaacagcagttgcttgcatcaaacccacttgctctggccaacgtagttgcaaaccagccacaacaacagctgcacaagtttctgc

SEQ ID NO: 84948 - DNA, 526 bp, Zea mays
  unsure (1)..(526): unsure at all n locations
tggatgatactgtctcgatgttaagtncagtacgncattacgtatcgattcgcattcccacccaacctacccatgcaaggacacacattaacaacaacttaacttcaatgcctaccaacatcttatcgcggtctggtccttcttgcactttttgcgagcgctacaaatacattcattattacacaatgctcactcgctccaagttccatcattacacacatcctaccaccagttacttcaatgggcttccaacacccaactgtgcaagcctataggctacaacaagccatttccgccagcgtcttacaacaaccaattttccatttgcaacaacaatccttggcacatctaacaatacaaaccatcgcaacgcaacaacaacaacaattcctaccatcacttaaccacctaaccattgtaaaccctgccgtctacttgcaacagcaattgcttgcatcacacccactttctcttgcaaacttatatcaaaaccatcatcaccaacaacttcaacaaattctttccn

SEQ ID NO: 84949 - DNA, 506 bp, Zea mays
  unsure (1)..(506): unsure at all n locations
ggagagctttctcaactcccaccnagtagncagacgcaccggtccggaattcccggtcgacccacgcgtgccggacgctggcggcgcttttgcttgcttacatcctcatgacgcgggatcgctgcgtccccgaccccacttgaaggcccgctaaaagaacttgcgggcttgccgccggaagtgcagagggattcgccgtcacccttgtcacggagccgagtgcaaccttggcaccatcagcggcgtcgccgaatgcccctggattctcggcggcggaacgatgccctccaagtaactgcgaagagcatagtgcatgaggaatgagcttgtagctagctcatatgtctgaataataagcacagcaagaagatgaatgcatttctcggatcgttcatccggaacaataattaaaggggatccggatttgttcttgtgataaaaaaaaaaatttaaattaaataattaatttatatattttattattttattataaatattttaaataa

SEQ ID NO: 84950 - DNA, 531 bp, Zea mays
  unsure (1)..(531): unsure at all n locations
ngggaaaggctgtgtccatgtttagcctagttagtactgccgtaccggttcggaattcccgggtcgacccacgcgtccgacagcagttaccattcatgttcaacccaatggccatgacgattccacccatgtgcttgacagcaaccctttgttggtgctgcattctagatagaaatatttgtgttgtaccgaataatgagttgacatgccatcgcgtgtgactcattattaacaataaaacaagtttcctcttattaaaaaaaaaaaaaaaaaaaaaaaaaaaaaaaaaaaaaaaaaaaaaaaaaaaaaaaaagggcggccggtttataggatccaagcttacgtacccttgcatgcaacgtcatagctattctatagggtaacctaaattcaattcactggccgtcattttacaacgtctggactgggaaaaccctggcgttacccaacttaattgccttgcatcacattttcctttggccagcttgcgtaatagcgaacaggcccgaaccgatngtcctttccaaaagt

SEQ ID NO: 84951 - DNA, 527 bp, Zea mays
  unsure (1)..(527): unsure at all n locations
ggaaagggtcngtttatgaaagacgnatgattgcactgctcgtaccggtccggaattcccgggtcgacccacgcgtccgcggcgctggcgcggtccccgcgggagttcagctacaaggagctgagcgccgccgacgcggggcttcgacgcgtcccgcgtcatcggcaacggcgcgttcggcaccgtgtacaagggcatcgtgccggacacgggcgccatggtggccgtgaagcgctgcagcagcaccggcgcgcgcggcggaggcaacgcgagcggcgagcaggcgcggtcggagttcctgtcggagctgtccatcatcgcggggctccggcaccgcaacctgctccggctgcaggggtggtgctacgagaagggggagatcctgctggtgtacgactacatgcgcaacggcagcctggaccgggcgctgttcgacgcgtcggcgcccgtgctgccgtggcgccaccggcgcgaggccctggcnncgcgttgcgtcgcgcttgcgtaccttcaccacgaatgccagg

SEQ ID NO: 84952 - DNA, 537 bp, Zea mays
  unsure (1)..(537): unsure at all n locations
agtacctttttgagnncttaagctcttccagtcgcatctcgttcgtattcccggtcgacccacgcgtccgctgctatactatactctaggaagcaaggacaccaccgccatggcagccaagatgcttgcattgttcgctctcctagctctttgtgcaagcgccactagtgcgacccatattccagggcacttgccaccagtcatgccattgggtaccatgaacccatgcatgcagtactgcatgatgcaacaggggcttgccagcttgatggcgtgtccggacccgaagcctgagtaactgatggccttaccggttcagacgatgccagtggtgctctactactatgagggtgcgcaacacgcactccattgtttgattcttttctgcttcaattctttcattattctttttatgctttattgtcttttaatattgtttttcctaatttttttaattatttttgctatttttgttatccctttccttcttttattactttttataatcacatttttatattcttataaaatatactg

SEQ ID NO: 84953 - DNA, 525 bp, Zea mays
  unsure (1)..(525): unsure at all n locations
gaaagggtgggttcctctagttcntagctacgctacgtacnggtccggaattcccgggtcgacccacgcgtccgcggacgcgtgggcggatatggatatggacaccatcaccatcagcatgaccaccacaggatggcaccgattcgagcagggcgacgtggtggccatgccggccggcgcccagcactggctgtacaacgacggcgacgcgccgcttgtggcggtctacgtcttcgacgagaacaacaacatcaaccagctcgagccttccatgaggaaattcttgctggctgggggcttcagcaaggggcagccccacttcgccgagaacatcttcaaagggatcgacgcccggttcctgagcgaagccctgggcgtcagcatgcacgtcgccgagaagctgcagagccggcgtgaccagcgaggcgagatcagccgcgtggagccggagcacgggtttcaccagctgaatgcgtcggcgtcgtcgtcgtcggtttcgttcccatcgtcaccaggacagttacc

SEQ ID NO: 84954 - DNA, 528 bp, Zea mays
tggagatgctgtgtgcatgaaaagaaagttagcactgctcgtaccggtccggaattcccgggtcgacccacgcgtccgatgatgactgccaaaatcggagagagggatagtaaagaggagctttcaaaagcgattgcgcattattgatcaagatggaaatggaaagatttctaacattgatatccagaggattgccaaagagctgggtgtaaatctcaccctcgatgagatccaagacatggtgcaagaggctgatagaaatggtgacggtgaaatagactttgacgagttcatcaggatgatgaggaggaccagctttggctactaggtgcatttatctgcgagtgcttgacgcttccagtttgtttatgactaccgtgcgtgtgttaatcaactggtgtggttactatgaacaatgtgctctggtttcgcttttatatataattttaatttaattttaattaaaaaaaaaaatttaaaaaaaaaagggcggccgctctagaggatccaagcttacgtacgcgtgca

SEQ ID NO: 84955 - DNA, 530 bp, Zea mays
  unsure (1)..(530): unsure at all n locations
gagaggctcttgtgtacgaaacgaanatgatagcaccgctcgtaccggtccggaattcccgggtcgacccacgcgtccggcaacatagaaagtggaatccagtagcaacaacagagcaacaatggcgaccaagatagtgttccctccttatgctccttgctctttctgcatgtgttgctaacgcgacaattttccctcaatgctcacaagctcctatagcttcccttcttcccccataccttccatcaatgatagcttcagtatgtgaaaacccagctcttcagccctataggctccaacaagcaatcgcagcaagcaacatacctttatcacccttgttgtttcaacaatcgccagccctatctttggtgcagtcattggtacaaaccatcagggcacagcagctgcagcaactcgtgctacctgtgatcaaccaagtagctctggcaaacctttctccctactctcagcaacaacaatntcttccattcaaccaactgtctacactgaacccttgctgttatttgcaa

SEQ ID NO: 84956 - DNA, 528 bp, Zea mays
  unsure (1)..(528): unsure at all n locations
ngggaggtgtctgtccacgtagtagagacgtgattgctatgctcgtaccggtccggaattcccgggtcgacccacgcgtccgcaagaaaaagagactcgtccagtcgcccaactccttcttcatggatgttaagtgccgggggtgcttcagcataaccactgttttcagccactcccagactgttgttgtgtgccctggctgccaaactgtcctctgccaacccacaggaggaaaggcaaggctcactgagggctgctctttccgcaggaagggagactagagcggatgtggtcttcaagttttgctctatgccagatactagcgtcatgaactgcctttagctaagattttccataagttgttctcgagcagctatgtgttgcatgttggctacttccaaacttatatctggtttggtttggattgtgatgaactaatggctctttgaatttatattatgatgttgacgatatttggtgaaaaaaanaaaaaaaagggcggccgctctagaggatccaagcttacgt

SEQ ID NO: 84957 - DNA, 530 bp, Zea mays
  unsure (1)..(530): unsure at all n locations
ggtaggaggcgtgncgtcatgacggggggagttattgtcatacctgtccggaattcccgggtcgacccacgcgtccgaattggtgcactattaggtacctgttggaggatgttacaggcttattgatatccctgtgagtgactgcttcaacagtggtataaataagatatttgtgatgagtcagttcaattctacttcgcttaaccgccatattcatcgtacataccttgaaggcgggatcaactttgctgatggatctgtacaggtattagcggctacacaaatgcctgaagagccagctggatggttccagggtacagcagactctatcagaaaatttatctgggtactcgaggattattacagtcacaaatccattgacaacattgtaatcttgagtggcgatcagctttatcggatgaattacatggaacttgtgcagaaacatgtcgaggacgatgctgatatcactatatcatgtgctcctgttgatgagagccgagcttctaaaaatgggcttatggagaatg

SEQ ID NO: 84958 - DNA, 526 bp, Zea mays
  unsure (1)..(526): unsure at all n locations
gagaatattgctgtannttcgatnccgtcacgtcatatcgntccggntaanaatcgcgggtcgacccacgcggtcancgacatataaagtggaatccattagctacaacagagcaacaatggctaccaggatagtttccctccttatgctccttgctctttctgcatgtgttgctaacgcgacaattttccctcaatgctcacaagctcctatagcttcccttcttcccccataccttccatcaatgatagcttcagtatgtgaaaacccagctcttcagccctataggctccaacaagcaatcgcagcaagcaacatacctttatcacccttgttgtttcaacaatcgccagccctatctttggtgcagtcattggtacaaaccatcatggcacagcatctgcagcaactcgtgctacctgtgatcaaccaagtagctctggcaaacctttctccctactctcagcaacaacaatttcttccattcaaccaactgtctacactgaaccctgcttcttaatttcat

SEQ ID NO: 84959 - DNA, 519 bp, Zea mays
  unsure (1)..(519): unsure at all n locations
ggaagagggtatttctagaacgaaagtatgctagtactggccggattcccgggtcgacccacgcgtccggcggcagtgcgtagagaggatcgtcgaacagaacagcatgaagatggtcatcgttcgcgtcgtgtgcctggctctgtcagctgccagcgcctctgcaatgcagatgccctgcccctgcgcggggctgcagggcttgtacggcgctggcgccggcctgacgacgatgatgggcgccggcgggctgtacccctacgcggagtacctgaggcagccgcagtgcagcccgctggcggcggcgccctactacgccgggtgtgggcagacgagcgccatgtaccagccgctccggcaacagtgctgccagcagcagatgaggatgatggacgtgcagtccgtcgcgcagcagctgcagatgatgatgcagcttgagcgtgccgctgncgncagcagcagcctgtacgagccagctctgatgcagcagcagcagcagctggtggcagctcagggtct

SEQ ID NO: 84960 - DNA, 524 bp, Zea mays
  unsure (1)..(524): unsure at all n locations
ggtgaggttcngtcatgataagacatgatgccacgccgtaccggtccggaattcccgggtcgacccacgcgtccgcccacgcgtccgcccacgcgtccgctcgtagagagaaggaaaaatatccccagaccctagctcccgatctcgatggcgaaccctcgcgtcttcttcgacatgaccgtcggcggcgccccggcgggccggatcgtgatggagctgtacgccaacgaggtgcccaagaccgcggagaacttccgcgcgctgtgcacgggcgagaagggcgtgggcaagtccgggaagccgctccactacaagggctccaccttccaccgcgtcatccccgagttcatgtgccagggcggcgacttcacccgcggcaacggcaccggcggcgagtccatctacggcgagaagttccccgacgagaagttcgtgcgcaagcacaccgnccncggtgtgctctncatgggccaacgccggcccaacaccaacggctcccagntcttcatctgcaccgtcgcgac

SEQ ID NO: 84961 - DNA, 528 bp, Zea mays
  unsure (1)..(528): unsure at all n locations
ggtagagggtcgggctcacctcaagatctacgtgcatacccgtccggaattcccgggtcgacccacgcgtccggatcagcaaagcggcagtgcgtagagaggatcgtcgaacagaacagcatgaagatgggcatcgttctcgtcgtgtgcctggctctgtcagctgccagcgcctctgcaatgcagatgccctgcccctgcgcggggctgcagggcttgtacggcgctggcgccggcctgacgacgatgatgggcgccggcgggctgtacccctacgcggagtacctgaggcagccgcagtgcagcccgctggctgctgcgccctactacgccgggtgtgggcagccgagcgccatgttccagccgctccggcaacagtgctgccagcagcagatgaggatgatggacgtgcagtccgtcgcgcagcagctgcagatgatgatgcagcttgagcgtgccgctgccgncagcagcaatctgtactagccagattttgttcaagaactggaacaagctgtttgcagcccc

SEQ ID NO: 84962 - DNA, 530 bp, Zea mays
tgggttggagctttctgtcctcacgtctagagctacgccgtaccggtccggaattcccgggtcgacccacgcgtccgcctgagtcttgtcgctgccgccgggatggccggagtcaccgccaccgggatggccggggttgccgccaccttctcctcagccaccgctcagatcgggggcttcctctcgaagaagccttacgcgccgccgttgtgggccacgcacctcttccccatgccttgccataccttctcgctcggccatttcccaacaccgattcacaagtggaatctgcccaatttgccggaaggaacggaagtgtggatcaagcgagacgatttatcaggcatgcagttgagtggaaacaaggtccggaagctggagttcttgatggcagatgccgtagcacaaggcgcagactgcgttattactggtgggggtatacagagtaaccactgtcgtgccacagacgtggctgctaagtatctcaatcctgaatgctacctgatactacgtacctgcaagcttcttgg

SEQ ID NO: 84963 - DNA, 530 bp, Zea mays
  unsure (1)..(530): unsure at all n locations
gaggtaggtgctantttcatgataagaacagtacgtactactcgtccggaattcccgggtcgacccacgcgtccggcgaatactactaccatttagccagctagctacagcaagccgtgcttccttcttgacgcaacgacagttgctgccgttctaccagcagtttgcggctaaccccgcaaccctcttacaactacaacaattgttgccctttgtccaacttgctttgacaaacccagcagcctcctaccaacaacacatcattggtggtgccctcttttagattgcttattagatgtaattcaataataaagttttttggatgatgtatgtggccaaccagaaataaaaagttacatttccaaaaaaaaaaaaaaaaaaaaaaaaaaaaaaaaaaaaaaaaaaaaaaaaaaaaaaaaaaaaaaaaaaaaaaaaaaaaaagggcggccgctctaaaggatccaagcttacttacgcgtgcatgcgacgtcataaccttttttttagggggaccctaaattaaaatcccg

SEQ ID NO: 84964 - DNA, 526 bp, Zea mays
  unsure (1)..(526): unsure at all n locations
gagttaggaagggtctgtnctattgaatatagtatgctgtacggtccggattcccgggtcgactcacgcgtccgggacaagttcgggcatgtttcttcaaagaggaagggacaaggttattcgagtaattgagaagaggattgcagattataccttcatacctgtagatcatggagagggactccaagtactgcattatgaagtcgggcagaagtatgagcctcactttgattattttcttgatgagtttaacaccaagaatggtggtcagaggatggctactcttctgatgtatctatcagatgttgaagaaaggggcgagactattttccctgatgcaaatgtgaacgtcagttctttaccatggtacaatgagctttcagagtgtgccaagagaggcctttctgtcaaaccaaagatgggagatgcacttcttttctggagcatgaaaccagatgccaccctggacccattaaatttgcatgggggttgtcctgtgattagaggaaataaatggccgccaacc

SEQ ID NO: 84965 - DNA, 524 bp, Zea mays
  unsure (1)..(524): unsure at all n locations
ggttaaggnnttttattcatgcatagatagttcgctataccgtaccggttcggaagtttcgacccaagcgtccggagaatcgaagaagcaatcagacatggctgtaatgatcttaagatacttcaatgtgagtgggtcggacccagaggggcgactaggagaagctccaaggccagagctacgcgagcatggacggatatccggtgcttgctttgatgcggctttgggaatcattccagggctaaaggttcgtggaactgattactccactgcagatggaacttgtattagggactacatcgatgtcacagaccttgtagatgcccatgtcaaagctcttggtaaagctcagccaggcaaagttggaatctacaacgtcggaacaggccaaggtagatcggtgaccgagtttgtagaagcttgcaagaaggcaacgggagctttcattcaagtcgaatatnctgcccgtagacctggagattacgccgaggtatacagcgacccgtcgaaaatgctcatggcct

SEQ ID NO: 84966 - DNA, 524 bp, Zea mays
  unsure (1)..(524): unsure at all n locations
ggagggcgtttcgttccaccagcaaaaggttcgcataccgcttccggttcggaattcccgggtcgacccacgcgtccgcccacgcgtccgcccacgcgtccgcggacgcgtgggctcgagtccaagatcagcctggatcgggagacgcagaggtcccgcggcttcggcttcgtcaccttctccacggaggaggcgatgcggaacgccatcgagggcatgaacggcaaggagctggacggccgcaacatcaccgtcaacgaggcccagtcccgcggcggccgtggaggcggcggcggcggctacggtggtggccgtggaggcggcggctacggcggtggcgggcgccgtgatggcggcggcggctacggcggtggcggcggcggctacggtggcggcggtggctacggtggtggtggtggcggctacggcggtggcaaccgtggcggcggctacggcaactncgacgggaactggaagaactgagcggtggggcccgcgctggcaagttatcctgttcgctaccg

SEQ ID NO: 84967 - DNA, 529 bp, Zea mays
  unsure (1)..(529): unsure at all n locations
ggantgagggctccttgcatgatcgaacgctcagcatgccgtaccggtctcggaattcccgggtcgacccacgcgtccgcccacgcgtccgcaaccctctcgagagccaaatttgaggaactatgttcaggcgttagggacaggcttaaaactcctgttaataatgccttaagagatgccaagttgtctgtcagtgatctagatgaagttattcttgtgggtggatccacccgaatccctgcagttcaagaacttgtgaggaagcttactgacaaagatcccaatgttacggtcaaccctgatgaggttgtatctcttggggcatctgtgcacggtggcgttttggcacgagacgtgaaagacgtagttcttctggatgttactccattatctcttgtttcggagacattggcaggagtgatgacaaagataatcctcatgaataccacactgncaaccctcaaattcggacgttatcttaacagctgcagaatgacagactagcgttgagattaatgttctccacgag

SEQ ID NO: 84968 - DNA, 521 bp, Zea mays
gagtaggaggcttcgatgcctttaaccgcccatcgcatagcttctcggattcccgggtcgacccacgcgtccgcggtactggccgtccctctactgctccaaatctggaacatgcttcatcggcaaggggctctggtggactcacgagtgggagaaacatggcacctgctctgcccctgcggttcacgatgaattacagtatttcacccttgcccttgacctctactacaagtatgacgttacagaaatgctgtcacgtggagggatacatgtttcaaatggcaaagaatatgcactgaacgatgtcatcgataccatcgaacatgcttatgggggatcaccacaaattgcttgcctgacgggctcaatcgaagaactaatgttactcatcgacagaaaaatgaaccctcttgattgccttacaaactatttgcgaatggaactgtatgacaaagcatgcactaggcgtctagcatcagttgccaacgtatgatccccctgtggttggcattcaaatgtga

SEQ ID NO: 84969 - DNA, 531 bp, Zea mays
  unsure (1)..(531): unsure at all n locations
ngagtagagttgttggcggactgcagtaggaatatatcattgtcgtaccgattcccggttcgacccacgcgtccgcagctcttcaaccctataggctccaacaagcaatcgcagcaagcaacatacctttaggacccgggtttcaacaatcgccagccctatctttggtgcagtcattggtacaaaccatcagggcacagcagctgcagcaactcgtgctacctgtgatcaaccaagtagctctggcaaacctttctccctactctcagcaacaacaatttcttccattcaaccaactgtctacattgaaccgtgctgcttatttgcagcaacaactattaccattcagccagctagctactgcctactctcagcaacaacaacttcttccatttaaccaattggccgcactgaaccccgctgcttatttgcagcagcaaatactactaccatntaaccagctagctgcagcaagccgtgcttacttcttgacacagcaacaggtgcttgcctttctacaagaagttggcg

SEQ ID NO: 84970 - DNA, 527 bp, Zea mays
  unsure (1)..(527): unsure at all n locations
naggtagagttttttgtgcctacncgatagctacgctataccgtccggaattcccgggtcgactcacgcgtccgcggacgcgtggggcaacatagaaagcacaatagtgtaccaacaatggcagccaaaatggtttgcttccttatgctccttggtctttctgcaagtgctgctaccgcaaccattttcccacaatgctcacaagctcctatagcttcctttcttcccccatacctctcaccagcggtgtcttcagtatgtgaaaacccaattcttcaaccctacaggatccaacaggcaatcgcagcaggcatcttacctttatcacccttgttccttcaacaaccgtcagccctattacagcagttacctttggtgcatttgttggcacaaaacatcaaagcacaacaactacaacaacttgtgctaggaaaccttgctgcctactctcagcacagcagtttcttccattcaaccaactggctgcattgacttttctgcttatttgccacaaccactaccttttn

SEQ ID NO: 84971 - DNA, 532 bp, Zea mays
  unsure (1)..(532): unsure at all n locations
ggtggttgtggggacgagctgtgtctgatgacgaaatcactagnattgccgtaccggtccggaattcccgggtcgacccacgcgtccggcaaattgcaccaagaaatccatcgagaggccgtcgacaggggaattaatggcgtcggcgtcgagcagcagccaccgccgcctcatcctcgcagccgccgtcctgctctccgtgctcgcggctgccagcgccagcgccgggacctcctgcgtgccggggtgggccatcccgcacaacccgctcccgagctgccgctggtacgtgaccagccggacctgcggcatcgggccgcgcctcccgtggccggagctgaagaggagatgctgccgggagctggcggacatcccggcgtactgccggtgcacggcgctgagcatcctcatggacggcgcgatcccgccgggcccggacgcgcagctggagggccgnctaaaggacctgccgggctgcccgcgggaggtgcagaggggattcgccgncacccttgtaccgaaggccgattcg

SEQ ID NO: 84972 - DNA, 513 bp, Zea mays
  unsure (1)..(513): unsure at all n locations
gctgtagtctgcgcctacgtctagtagtatgcacgctcgtactcggtccggaatggctggacccacgcgtccgaagtgcaccaagaaatccatcgagaggtcgttgacaggggaatcaatggcgtcgtcgggtagcancagccaccgccgcctcatcctcgcagccgccggcctgctctccgtgctcgcggctgccagcgccagcgccgggacctcctgcgtgccggggtgggccatcccgcacaacccgctcccgagctgccgctggtacgtgaccagccggacctgcggcatcgggccgcgcctcccgtggacggagctgaagaggagatgctgccgggagctggcggacatcccggcgtactgccggtgcacggcgctgagcatcctcatggacggcgcgatcccgccgggcccggacgcgcagctggagggccgcctagaggacctgccgggctgcccgcgggaggtgcagaggggattcgtcgtcaccctcgtcacggaggccgagtg

SEQ ID NO: 84973 - DNA, 519 bp, Zea mays
  unsure (1)..(519): unsure at all n locations
gttcggagcttcgtcgcctagctagnctcacgtactgtccggttcggaattcccggctcgacccacgcgtccgtggatttgtgagccttcttacttcagatggcaacactaaggatgatcttagactccgagctgatgagactcttgtggcccagattaaggaagggttcgaaagcgggaaggatcttgttgtgactgtccagtctgcgatgggggatgagcagatctgcgcgttgaaggatgttggccccaagtaacttccttggctttggagacggaaccctactgtatctcaacttaaatcggaaaagaagtgtatcaccaaaggattgctaccgagacattcacctggcttgagctggcttttgctatagcgtgcaaggggttgctgggtgtcgtacctacctgacttatcattatctgtggttacattctggaccctgtattttctatgctttcatgtctctctactttctagtattaattatcaataagttggtttggaatggttgcatcgcn

SEQ ID NO: 84974 - DNA, 519 bp, Zea mays
  unsure (1)..(519): unsure at all n locations
ngagctgngttttcccttgaatctcttcgatagnacncctnnnntnnntcggaattcccgggtcgacccacgcgtccgaggaaactgaagaagcagaactcaaaatgctgagaaagagtttgaatttcaaggcaacaccaatgccaagcttttataaggaaccaacccctgccaaggttgaattgaaaaagatccccccaaccagagctaaatcaccaaagcttggtcggtctaaaaacaagtccatatcagagactgaagaaaatactactacggaccaacctgcccgtctgagccttgacgaaaaggtttctcaaaacggtgtgaaaaaaccaaccccgtcgagttcagcaaagaagccccagagaaagtcactccccaggctgccatctgaagaaacttgtccgcttgatgccacctcaaggcagctgaagaacaacaaactggatgaagttaatgctcaggagacaggatcagctacagggcaggtacaaggaagtgagacgganacagattctt

SEQ ID NO: 84975 - DNA, 667 bp, Zea mays
  unsure (1)..(667): unsure at all n locations
agggatagtgagtgtnttcgtccgatgctcagctcagtanagncactgcctgtaccggttctcggaattcccgggntcgactccacgccgtnctcgagcgcagctanngctactgcnctnnactctcaactnnnacaacaacntntgcttcccatttttaacnncagattggggcnnngcactgannnaccccgnnctgcttaaatttgcagcnanngcaaatacctttactaccanntttagccagcttanngctacagcaannngccgtgccttnnccttctnntgacacnnaacaacangnnttgctgcnncgttctaaaccagcagtnnttgcggctttaaccccnnngcaaccctttcttacccaactacccaacaattnnngttgcccttttggtcnccaacttggcnntttgacanannacccagnncagcctcctttaccaaccaacccacatcattgnngtggtgcccttcttttagaattggcttaattagatgtnaattcaatananntaaagttttttgggatgaaatgtatgtggccatannncagaaataaaaaggttacaaatttccagaattcttaannaaaaaaaaanannnaaaaaaaaaaaaaaaaaaaaaaaaaaaaaaaaaaanaaaaaaaaaaaaaaaaaanana

SEQ ID NO: 84976 - DNA, 521 bp, Zea mays
  unsure (1)..(521): unsure at all n locations
nggttgagtcttcgtcgatgctagccatgatgtatgctcgtaccggttcggaattcccgggtcgacccacgcgtccgaccaactagcaacatagaaagcacaatagtgtaccaacaatggcagccaaaatattttgcttccttatgctccttggtctttctgcaagtgctgctaccgcaaccattttcccacaatgctcacaagctcctatagcttcctttcttcccccatacctctcaccagcggtgtcttcagtatgtgaaaacccaattcttcaaccctacaggatccaacaggcaatcgcagcaggcatcttacctttatcacccttgttcctccaacaaccgtcagccctattacagcagttacctttggtgcatttgttggcacaaaacatcaaggcacaacaactacaacaacttgtgctaggaaaccttgctgcctactctcagcaacagcagtttcttccattcaaccaactggctgcattgaactctgctgcttatttgcaacaacaacta

SEQ ID NO: 84977 - DNA, 496 bp, Zea mays
  unsure (1)..(496): unsure at all n locations
agtaaggagtgntnnattctgcagctgacgcaatgctctaccggtttcggattcccggctcgacccacgcgtccgcgacgattatggggccatcagatagcccatacgctggtggcgtatttttggtcactggtcactttccaccggactacccattcaaaccaccgaaggttgcattcaagacgaaggtttaccacccgaatatcaacagcaacgggagcatctgtcttgatatcttgaaggagcaatggagccctgcactgacagtttctaaggtcctcctctcaatttgttcccttctgacggacccaaaccctgacgatccgttggtcccagagattgctcacttgtacaagactgatcgcgtgaagtacgaatctactgctaggagctggactcagaaatatgcaatgggctgacaagctattggtctctcatagacccttctgtaactganaccagatgtctaaattaaatttgtcattcgtgcatcgaa

SEQ ID NO: 84978 - DNA, 505 bp, Zea mays
  unsure (1)..(505): unsure at all n locations
tgatagnaaagtgagaatgattatgattttcaaattgtacgttatgctatcccgtttcgaattaccagctggacccactcgtacgcagacaaagtgaagcgcactagcagcttcccaacaccaacggctaccaagatattaagcctcgttgcacttattgccgttttagagagctcatcaaatgcgttcattattccacagtgctcacttgctcctagtgccattattacacagttccttttatcagttacttcaatgggcttctaacattcagccgtgtaagccttctgactacatctagcgctttcagagagcgccttacaacaaccaattgcccaattgcaacaacaatccttggcacatctaaccctacaaaccattgcaacgcaacaacatcaacatcaacagtttctgccattactgagccatctacccgtggtgaaccatgtcacctacttgcaacaacaactgctcgcttacaacccacttgctctggcgaacaaag

SEQ ID NO: 84979 - DNA, 519 bp, Zea mays
  unsure (1)..(519): unsure at all n locations
ggtacagtgcctgtgtcaatgcctagcctcagttagncatgctgtaccggttttgccgggtcgacccacgcgtccggccctgctcatactgcttgccctcgccgtatcgtccacccgcaacgcacaggaggatgccatggccgacaacaccgggacgttggcgggcggcatcaaggacgtgccggggaacgagaacgaccttcacctccaggagctcgcccgcttcgccgtcgatgagcacaacaagaaggccaatgctcttctggggttcgagaagcttgtgaaggccaagacacaagtggttgctggcacgatgtactatctcactattgaagtgaaggatggcgaagtcaagaagctctacgaagctaaggtctgggagaagccatgggagaacttcaaggagctgcaggaattcaagcctgttgaagagtgtgctagcgcctaaggatctctccttcaccatgtgcgagcctgaagctcanagcaaagttgcagaataaggagccggctcacaac

SEQ ID NO: 84980 - DNA, 522 bp, Zea mays
  unsure (1)..(522): unsure at all n locations
ngagtctctcgtcttataagaaatgatcgtaaggcatctctccggtccggaattcccgggtcgacccacgcgtccgacgatccactcgagcaccaagccgagggaaggtgaggagcgatggcgcgcggcgtggggtcggcgaagggcggcgcggtcgcgggcaagaagaaggggtcggtttccttcacgatcgactgcaccaagccagtggaggacaagatcatggaggtcgcctcgctcgagaagttcctgcaggagcgcatcaaggtcgccggcggcaaggctggcaacctcggcgactccgtcaccatctctcgcgagaagaccaaggtcaccgtcacctctgacggacccttctccaagaggtacctgaagtacttgaccaagaagtacttgaagaagcacaacgtgcgggattggctacgcgtggttgctgccaacaaggaccgaaacgtctatgagctccgctacttcaacattgctgagaacgagggcgaggaagaagattagattgcactacgc

SEQ ID NO: 84981 - DNA, 515 bp, Zea mays
ggggagctttgtctaaagacagattgtaggcatccccggtccggattcccgggtcgacccacgcgtccggccagaagttcccaatcatgccttttactgctagggcattagaagagaagcgtgcgcgtttaagcttggtggaatgcatgaaccatgaactattgcagccgtaccctgtacttcatgagaagccaggcgatcttgttgcacacataaagttcactgtgctgctgatgcccaatggatcagataagataacatcacatcctctacaggagttaaagcccaccaaatccattgaagacaatgcagagataaaggcatggcttgctttggggacgaaatcaaagaagaagggtggtgggaagaagaagaaaggcaagaaaggagatgcagcagaagcagatcccatggaggaggcgacaaacggtgctacaagccaagaataattctgatttttggaattactgccaccagcttttttcttggttcttcgctgcatctgatgggtgtat

SEQ ID NO: 84982 - DNA, 520 bp, Zea mays
  unsure (1)..(520): unsure at all n locations
nggtagaagtcttnngtccttgactgaagcctacagcatngctgtaccggtccggaattcccgggtcgacccacgcgtccgctccttggtctttctgcaagtgctgctacgacgaccattttcccgcaatgctcacaagctcctatagcttctcttcttcccccatacctctcaccagcgttgtcttcagtatgtgaaaacccaattcttcaaccctacaggatccaacaggcaatcacagcaggcatcttacctttatcacccttgttcctccaacaatcatcagccctattacatcaattacctttggtgcatttattggcacaaaacatcagggcacaacaactacaacaactcgtgctagcaaaccttgctgcctacgctcagcaacagcagttacctttggtgcaattgttggcacaaaacatcagggcacaacaactacaacaactcgtgctagcaaaccttgctgcctactctcagcaacagcagtttctgccattcaaccaactagctgcat

SEQ ID NO: 84983 - DNA, 516 bp, Zea mays
  unsure (1)..(516): unsure at all n locations
ngaaggcttctgtctatgaaaagacatagatagcatngctcgtaccggtccggaattcccgggtcgacccacgcgtccgtgaaattattgtttctcctcctgttgtgtccttccgtgaaaccgttcttgagaagtggtgccgcactgtcatgagcaagtcacctaacaagcacaaccgtctgtacatggaagcgcgccccctggaggagggtcttgctgaggcaattgatgatggccgcattggcccacgtgatgatcctaaggtgcgctcccagatcctctctcaagagtttgggtgggacaaggatcttgccaagaagatttggtgcttcagacctgagaccaccggtccaaacatggttgttgatatgtgcaagggagtgcactatctcaatgaaatcaaggattctgttgtggctggtttccagtgggcatcgaaggagggtgcactggctgaagagaacatgcgcgggatctgcttcgaggtctgcgatgtcgttcttcatgctgatgctn

SEQ ID NO: 84984 - DNA, 500 bp, Zea mays
  unsure (1)..(500): unsure at all n locations
agtntttaggttaggcgtctggtacagtatacccgccaaagaaagtagtctctaccgattcccggctcgacccacgcgtccgcccacgcgtgcgcccacgcgtacgtgattgctgttattgagcctgatgagcatgtggggagagctatgaatgagatcaatgcagctgctaggctgaggttggctgccagcgagaaagctgatgcagagaagatactgcagatcaagagagccgaaggtgatgcagaatccaagtacttggcgggtctgggtatcgcaagacagcgccaggctatagtggatgggctcagagacagtgttcttgctttctctgagaatgtgcctgggacctctgcaaaggatgtcatggacatggttctggttacccagtacttcgacaccatgaatgacattggggcctcgtccaagtcctggtcagttatcatgcctcatggaccaggtgctgccagagacattgcaacgcagataagggatggtca

SEQ ID NO: 84985 - DNA, 522 bp, Zea mays
  unsure (1)..(522): unsure at all n locations
gggaagaggtgtcntanctatgaatatactgtaggctctcccggttcggaattcccgggtcgacccacgcgtccgcaaagcggcagtgcgtagagaggatcgtcgaacagaacagcatgaagatggtcatcgggctcgtcgtgtgcctggctctgtcagctgccagcgcctctgcaatgcagatgccctgcccctgcgcggggcttgcaggcttgtacggcgctggcgccggcctgacgacgatgatgggcgccggcgggctgtacccctacgcggagtacctgaggcagccgcagtgcagcccgctggcggcggcgccctactacgccgggtgtgggcagccgagcgccatgttccagccgctccggcaacagtgctgccagcagcagatgaggatgatggacgtgcagtccgtcgcgcagcagctgcagatgatgatgcaacttgagcgtgccgctgccgncagcagcagcctgtacgagccagctctgatgcagcagcagcagcagctgctggcaggcc

SEQ ID NO: 84986 - DNA, 516 bp, Zea mays
  unsure (1)..(516): unsure at all n locations
nggtagagcttcttctaaagaaatgatagtatagcatctctccgtccggaattcccgggtcgacccacgcgtccgtcgagagctactcaggtgattttgtcgtgggagcaccaaaagcagaaaagaactggtgttgtcttctctctctctagattctgacgagtggtggtctgcactcgtcgtaatgtcgtttgcctaaactgattttgatggaacaggaaatcttgctggtcttgccaaaaaaaaaaaaaaaaaaaaaaaaaagggcggccgctctagaggatccaagcttacgtacgcgtgcatgcgacgtcatagctcttctatagtgtcacctaaattcaattcactggccgtcgttttacaacgtcgtgactgggaaaaccctggcgttacccaacttaatcgccttgcagcacatccccctttcgccagctggcgtaatagcgaaaaagcccgcaccgatcgcccttcccaacagttgcgcagcctgaatggcgaatgggacgcgccctt

SEQ ID NO: 84987 - DNA, 513 bp, Zea mays
  unsure (1)..(513): unsure at all n locations
aagtnttnctcaatgtaaagaaatgattgcatcgctcgtaccggtccggaattcccgggtcgacccacgcgtccgcccacgcgtccgcccacgcgtccgcggacgcgtgggtgcgactcaattataacttcgatactgccctgggatgaaaggctgatagttggactatccaacagggaaataaaggtttactacaaggcatcatgactctttgcttcaaccccatgtatacattgtgaatagttcagtatacagtaaacgtgagatagaggattggaatccccaggactagaatacatcaaaagtacaatccgtgtttttttctttaaacaacaggggcgttcgtgtcccctccttttttttatattttctacaaagggatagtatacaaggggcctgtttggttcagcttttttctgaccagcttttctgaaaatctggctgtggggagaatctggctgtgggagagaatctgggtatcattacgattacctgtggaggaagataaagttg

SEQ ID NO: 84988 - DNA, 525 bp, Zea mays
  unsure (1)..(525): unsure at all n locations
ngagggaggtgttgtccgatggacgcagcagtacagtatcgctcgtaccggtccggaattcccgggtcgacccacgcgtccgcagagggctactctttgtggttctgtgactacaagtacaatgatgagaacaccgtctcctttgtgaccctgaacaaggttggtggattcctgcagcggatggacctgtgccgcaagtacgcctttgggaagatgctcgtgataggctctgagccacccttcaagctgaagggcctttggctcttccgtggccaggatgttcccaagtttgtaatggacgaggtctatgacatggagctctacgagtggaccaaggtggacatctctgatgaggcccagaaggagcgtgtcaatgcgatgattgaggaccaggagccctttgagggcgaggccttgcttgacgcgaaatgcttcaagtgagtgtgcttgcctggagacagaactgtttagcccttgaaattgcctatggaagagtttgcccttttactagtgtcgatgttgatn

SEQ ID NO: 84989 - DNA, 500 bp, Zea mays
  unsure (1)..(500): unsure at all n locations
aagggtnntnntgagaggtgtgttatactgaaggacaggttacgcttatacccgtccggaattcccgggtcgacccacgcgtccgggcaattgcaacttgccttttaaccttttcacccttgttcctccaacaatcatcaggcctagtacagcagttacctttggtgcatttattggcacaaaacatcagggcacaacaactacaacaacttgtgctagcaaaccttgctgcctactctcagcaacagcagtttcttccattcaaccaactagctgcattgaactctgcttcttatttgcaacaacaacaactaccattcagccagctatctgctgcctaccctcagcaatttcttccattcaaccaactgacagcattgaactctcctgcttatttacagcagcaacaactactaccattcagccagctagctggtgtgagccctggtaccttattgacacaaccacaggtgttggcggtctaacaacacgcttggccc

SEQ ID NO: 84990 - DNA, 496 bp, Zea mays
  unsure (1)..(496): unsure at all n locations
naggggnnnngagtgatgtggtaaggggagggagagtacgcttctacccgttcggaattcccgggtcgacccacgcgtccgatctcactgctgtgttggagccagagttagcggatgagttcaaaaagggtgtcgagggtgcagccaagtttctccttagcaagctgaaggaccttcaattttttgttggtgagagcatgaaggacgaagcgtccgtggtattcgcctattacaaggatggtgccactaatccgacattcctctatttctctcatggtcttaaggagatcaagtgctagattagttacccatgttgggtactatatatgttctattgttatagccacaactatagctgccctgcctgaactgaactcaggtttttttaagaaaaaactgtccaagattggattgcttgttaaagctaaatattgntattgacgtgttattgcttagttgtcattngtcaaaaaaaaaaaaaaaaaaaaagggcgga

SEQ ID NO: 84991 - DNA, 518 bp, Zea mays
  unsure (1)..(518): unsure at all n locations
atgttattaccctcagttcccagtagnatcgtcgcgatccggaattcccgggtcgacccacgcgtccggttcttgtgatataattaacgattcctgttatacttggaaataactaagctcgtcccgatgcaatgcaagcaaagatctgatcaaaaaaaaaaaaaaaaaaaaaaaaaaaaaaaaaaaaaaaaaaaaaaaaaaaaaaaaaaaaaagaggaaccaaaaacaataataacaaaaaaagacaacagcattaatacgaatctaaatgatgatataagatgctacaaaggctaacaactatgaaaagataacacatcacataaaaccaaacaatatattaggaacatatgatagataacttctgggacattcgcaaataaacggactggataaccaaaaaaacataaaagttaaaggttaatgccaaaaagcaataagctcattaagactcaaaaaaaatacctaaaggaatggcaaataatgcgaaggatgaaattacaaattaaaattcgacc

SEQ ID NO: 84992 - DNA, 518 bp, Zea mays
ggagagaggtttatattaagcacaggtagatagcatcgtctcggtccggaattcccgggtcgacccacgcgtccgcccacgcgtccgcccacgcgtccgcctacgcgtacggaaaggggagagagagagagagacgagagagagaagagagagagagagagaggagtgcgagacccgcgagaggctgccgtgtaaggaccgtagactcagcgactgcgaaggatggataaggggatggccgggatcggaccgatcaggcaggactgggagccggtcgttgtgcggaagaaggcacccaccggcgtcgccaagaaggatgagaaggccgtcaacgccgcgcgccgcgccggtgctgagatcgataccatgaagaagtacaacgctggtacgaacaaggcggcatccagcggtacatccctcaacaccaagcgcctcgacgacgacaccgaatacctcgcccatgagcgagttccaagtgatctgaagaagaatctcatgcatgcaaggctcgataagaa

SEQ ID NO: 84993 - DNA, 503 bp, Zea mays
  unsure (1)..(503): unsure at all n locations
ggaaagtgtctcaaaatgacagatgatgcatcctcggccggaattccggtcgacccacgcgtcgcaatatctgaaggaaagtgcgtgagctaactggagatgttctggtcccagttcaggacgtgcattcacagaaacctatgaagggagagggcatgggtgggcacgtggacaggatcctcaagcatggcgtgttcctcaaatccggacccgtggagagcatcttcctggctgagaagtcgatgagtaattacaagtacataagtggggagaatgcgatgttcatgaacgaccactcgaagctggagaaagacaccgncgtgcgcttcaaggtcctagggttccgctggatggaggctgaccgccaattccagctccttgctacgatcgctggtgacttccttgggccgctgtgaactgcttccacaggtcaaacaggttctaatgtacattgctcgttagatggtggatggatggttggatctgatgtgtagaattaaact

SEQ ID NO: 84994 - DNA, 518 bp, Zea mays
  unsure (1)..(518): unsure at all n locations
agtgttcttccctcgtacagcaagtattagtatcgctcgtaccggtccggaattcccgggtcgacccacgcgtccggggctcgcagggtcctgcccaagcccagaacctgagagattcactggctgaagccaagtcagatattgttgtgaagattggtctccggaaaggatccaaatcttttgaggaagcacgtgccgctggattcaccgaagagagcggaaccttgggcgatatttgggaaaccgtctccggcagcgatcttgtgttgctgctgatatccgatgctgcacaggctgacaactatgagaagatcttctctcacatgaaaccaaacagtatccttggtttatctcatggatttcttctgggacatttgcaatcactcggactcgatttcccaaagaacatcagtgtgattgctgtatgccccaaaggaatgggtccatccgtccgcaggctttatgttcagggcatggaagtcaatggcgctggcatcaactctagctntgctgtgcac

SEQ ID NO: 84995 - DNA, 528 bp, Zea mays
  unsure (1)..(528): unsure at all n locations
ngggtaagatatgcttncttctatggagggaggtagaaaagtaatgctcgtaccggtccggaattcccgggtcgacccacgcgtccgcccacgcgtccggaccatacatctcacttcgccaaaaaaatttcgtcaacagttgaagttatacccatggcaaaactactcttgggtttgctccttgcccttgctattctagggacaacatcggctgctggttgtgtacaagacgcggaagacatgaaacgagagtgcaagcagtttgagctattcccagcgaacccaaagttgccaccgtcggcagcatgttgtgctgtgtggaagagggcagatgttccatgcctatgcaaatatgttaacaaggaagtagagaaggtatggtgcatggagaaggttgtgtacgtcgccaactattgtaagaagccgtttcaacctggctacaagtgcgggagttatacagttcctcttagtatgtaaaaggaagtggttgggacatgtggtactctcttctagaactttaattngaan

SEQ ID NO: 84996 - DNA, 521 bp, Zea mays
  unsure (1)..(521): unsure at all n locations
agtgttcgtctgtattatagaaanagtgataagcatcgctcgtaccggtccggaattcccgggtcgacccacgcgtccgcccacgcgtccgcccacgcgtccgtttgagcattcagaaacacaccaagcgaagctagctagcaacgacttaacaacaatggctaccaagatattagccctccttgcgcttcttgccctttttgtgagcgcaacaaatgcgttcattattccacaatgctcacttgctcctagtgccattataccacagttcctccgaccagttacttcaatgggcttcgaacacctagctgtgcaagcctacaggctacaacaagcgcttgcggcgagcgtcttacaacaaccaattaaccaattgcaacaacaatccttggcacatctaaccatacaaaccatcgcaacacaacagcaacaacagttcctaccagcactgagccaactagatgtggtgaaccctgtcgcctacttgcaacagcaggtgcttgcatccaacccacttgctc

SEQ ID NO: 84997 - DNA, 498 bp, Zea mays
  unsure (1)..(498): unsure at all n locations
agttngttnnnggacgttgctaacagaaaaggaagctataggtcatcctgcttcggaattcccggctcgacccacgcgtccggtgtacactgaaccctgctgcttatttgcagcatcaacaactactaccattcagccaggtagctactgcctactctcagcagcaacaatttcttccatttaaccaattcgccgcactgaacccctctgcttatttccagcagcaaatactactaccatttggccagctagctacaacaagccccgcttccttcttgacacaacaacaattgcttccgttctaccagcagtttgtggctaaccccgcaacccttttacaactgcaacagttgctgccctttgtccaacttgctttgacaaacccagcagccttctaccaacaacacatcattggcggtgccctcttttagattgcttattagttgtcattcaataatgaagttttttggctgatgtatgtggcctactagaaataaa

SEQ ID NO: 84998 - DNA, 455 bp, Zea mays
  unsure (1)..(455): unsure at all n locations
ataggngaaagtatctatacagaagggaggggtactgtataccgtccggattcccggtcgacccacgcttcgttgtttgttaaataatttgtcctgaaggactgtaggaccttggtgcctggggggtattgaatactaggcagaatcatttattcaaatcctactttattgtatggaactactataattggaaccaaggtctaagaatgaaaagttaaagtctctgatccatgaaccgttgcagtggaaatgtggtcgtggacagtataaagtacacagatgtggtccacataccctgagatactgatgataagacagtgcccaaggatagtgtgactccaacgtttgctgctgaggagcttttcataaataatgccagatgggatggagttgcctatcttatgaaagctgggaaagctttgcacacaaaacgagctgagatcagggtacagttc

SEQ ID NO: 84999 - DNA, 514 bp, Zea mays
  unsure (1)..(514): unsure at all n locations
gaggggnnnnnncccacggtgnacttacacgacagagagcagctatatgttatacctgctccggaatttcccgggctcgacccacgcgtttcgccaatgctngtatttgtagccctcaagcatgatggtccaagtgtgtacccaaggcacgtgagagtacgtggcttgctgcttgatgtaccgcggtgatgttgttcctaaggatgtcaacgctgcagttgcaaccatcaagaccaagagaactgtccagtttgtggactggtgccccactggattcaagtgtggcatcaactatcagccaccctctgttgtccctggaggtgacctggcaaaggtccagcgtgccgtgtgcatgatcagcaacaacaccgccgttgccgaggtgttctcacgcatcgaccacaagtttgaccttatgtacgccaagcgtgcattcgttcactggtatgtcggtgagggtatggaagagggtgagttctcagaagcccgtgaggacttggctgctcttgagaan

SEQ ID NO: 85000 - DNA, 530 bp, Zea mays
  unsure (1)..(530): unsure at all n locations
nggaggaagagagtgctctgttaacagaggaaggcaagacttacggttccatacctcgnttccgggaattttcccgtggtgcggactccgacgtcgttntcggacgcaagtcccgtcaacattaaatcattctttcattttacttaattcttttggaacactggcctgaagataccgtggncaagtcgaccgcgatgtttgtagccgccctggccctggtggtggtgatggcgacgacgagcacaggcggtggcagggcggcagcggcgtgcgatcccaagccgctggtggtgtgcgatccggcgttcatggacggagcgaaacccgcggcagcatgctgctgcaccctgcgtgcgcatgacgcatgcttgtgcgtgtacgccaaagaccccaagtttgcaaaatacatcatcaaccccaacaccgacaaaacctttacctcgtgcggcatagccatccgcaaatgctaagcaagcgctctgcgtcgtcgcttcgcttgctcttgctcttgtgtgtaacatatncagctt

SEQ ID NO: 85001 - DNA, 523 bp, Zea mays
  unsure (1)..(523): unsure at all n locations
gtagaagttttcttanctaccgaacatgatagtacggatcgtacncggtccggaattcccgggtcgacccacgcgtccgtctagatcgcgggcggccgctcgcgatctacgctcttcacggccgtcctactcgtgaggcggctgctgctgtccgcaaaggtcgggccggtggcggtggccgaggcgcggacgtgccagtcgcagagccacaggttccggggcccctggctgcgccggtccaactgcgccaacgtatgcaagaccgaggggttccccggcggcaggtgccgcggcttccgccgacgctgcttctgcaccacgcactgacactgattcgctcgcccagcggccggctggcgtcgacgtcgatcgcgcgcgtcgcgaccagtccatggctgcatgcatgaataacaagggtgtgcagttcgtgatgccaaattgtatgctctcgtcacgtgttgaagcgttcgatcgtcggtctagtagcgtgcctgtgagcagcggcgtgctgatgtacgtacct

SEQ ID NO: 85002 - DNA, 512 bp, Zea mays
  unsure (1)..(512): unsure at all n locations
agtatcttaaaaagtagaggattgttgncatcgctcggtccggaattcccgggtcgacccacgcgtccgcccacgcgtccggggaaaattcttcctgaagggatcggtgaggttcaagaaatcatggacatgtgtgattatgctgtggggctaagtcgccaactaaatggatccattataccatctgaacgaccaaaccatatgatgatggaagtgtggaatccccttggagttgtgggtgttataacggcatttaatttcccttgtgctgtgcttggttggaatgcttgcattgctttggtctgtggaaattgtgtcgtctggaaaggtgctccaacaactccactgatcactattgcaatgacaaaaatagtggctagtgtattggagaagaacaacttgccaggcgcaatttttacatctttttgtgggggcactgaaattggtcaagcaattgcccttgacattaggatacctttggtttcattcactggaagtacaagggctggtct

SEQ ID NO: 85003 - DNA, 547 bp, Zea mays
  unsure (1)..(547): unsure at all n locations
atgtttcttccgctactagaactatgtactagtatcgctcgtaccggttctcggaattcccgggtgcgactccacgtcgnttccgcaggatcacctcgtgaaaattacttctccagtgttggaagtatttcccacttgggaaatgagaaggtgttccattgangaattgagatnttggtccaaaagatctggcaaacaaacaaggtgcgtgttgtccgccgggacaactggtgcaaaaggttgacattccctgtgaccaatttggttgaagaggttaaagtgttactggatgagattcaaaaaaatctgttcaaaacagcccaagaaaagagagatgcctgtgttcatgtcgtgaacacttgggatgaattcacaactgctctgaataacaaaaagttgatcttggctccatggtgtgatgaagaggaaattgagaaagatgtaaaaactcggacaaaaggggaaacttggagctgcgaaaacattgtgtactccatttgagcagccagaactttcagaaggtaccctgtgctttgcatctggaagc

SEQ ID NO: 85004 - DNA, 520 bp, Zea mays
  unsure (1)..(520): unsure at all n locations
gggtaggagcttcgtctaagatcgacaagaaagcaggctcgtaccggtccggaattcccgggtcgacccacgcgtccgcccacgcgtccgcggacgcgtgggccgctgccgcacaaagacgagaggaagagggtcggggcgcctccaccaccatgtcgtcgatgatgaacgcgctggcgaactggctggcgaacccgcgccgcaacccgctggcgcgcctccacatgcacgccgtctcctcgcgcctcaggaaatacggactgaggtacgacgacctctacgacccctacttcgatctggacatcaaggaggcgctcggtaggctgcctagggaggtggtcgacgcccgcatccagcgcctcaagcgtgccatggacctctccatgaagcaccagtacctcccggaggacctccaggcacagcaggttccattcagaggatatttgggtgacatgttggcgttggtgaaaaaggaaagcgccgagcgtcagtcactgggagcccttncactataccagag

SEQ ID NO: 85005 - DNA, 516 bp, Zea mays
  unsure (1)..(516): unsure at all n locations
agtgtcgtcttaaatagaaaatgaagccatcctcgtaccggttcggaattcccgggtcgacccacgcgtccgctctttgcgcttcttgccctttttgtgagcgcaacaaatgcgttcattattccggagggctcacttgctcctagtgccattattccacagttcctccctccagttacttcaatgggcttcgaacacccagctgtgcaagcctacaggctacaacaagcgcttgcggcgagcgtcttacaacaaccaattgcccaattacaacaacaatccttggcacatctaaccatacaaaccatcgcaacgcaacagcaacaacaatttctaccagcactaagccaactagctgtggtgaaccctgtcgcctacttgcaacagcagttgcttgcatccaacccacttgctctggcaaacatagttgcataccaacaacaacaacaattgcaacagtttctaccagcgctcagtcaactagccatggtgaaccctgccgnctacctacaacag

SEQ ID NO: 85006 - DNA, 492 bp, Zea mays
  unsure (1)..(492): unsure at all n locations
gggaaggtagcgacttaaaccgacacgaaagtactctctaccgctccggaattcccgggtcgacccacgcgtccgcccacgcgtccgcccacgcgtccgcccacgcgtccgatggcccaagtatactcaacgatattgggttactcttttttccttaaaaattgtgttccctgtttctcagttatcatgaaaatagagtattatttcattccatagtgccggcttttcgcaacgtcattgatgtgcctcttgtggttagaggattacgcaaatctagatctgaggtgaggaaggaactaggaattgaggagaatgctaaggtgctcgtttttaattttgggggtcagccagcaggatggaaactgaagcaagaatgtctccctgatggttggatttgtttggtctgtggtgcctctgattctcaagatgttccaccgaacttcattaagcttgcgaaagatgcttacacacctgatgttatggcagcatctn

SEQ ID NO: 85007 - DNA, 513 bp, Zea mays
aggtcgtacaaagtaggcgacggttggatcctccggtccggaattcccgggtcgacccacgcgtccggcgctccgcaggcagcatcaagcatggcggacacgaaggcgtcacccgcggtgacgctgcggacgcccaaggtcatgaccaaccggcttctttcccgcaagcagttcgtgctcgaaggtctccaaccgggccgggccaacgtctctaaagcggagctcaaggagaggctggctaagatgtacgaagtgaaagatcccaactgcatcttcgtcttcaagttccgcacccacttcggaggcggcaagtctaccggattcggtctcatctacgacaacgtcgactcagccaagaagttcgagcccaagtacaggcttatcaggaacggtcttgctaccaaggtggagaagtcgcgcaagcagatgaaggagaggaagaacagggcgaagaagatccgcggtgtgaagaagacaaaggctggggacgccaagaagaaatgagccaggttt

SEQ ID NO: 85008 - DNA, 523 bp, Zea mays
gagcgtcttctgtatctccgaaaattgatagtatcgctcgtaccggtccggaattcccgggtcgacccacgcgtccgcagctagctggtgtgagccctgctaccttcttgatacaaccacagttgttgccggtgtaccagcacgctgcgcctaacgctggcaccctcttacaactgcaacaattgctgccattcaaccaacttgctttgacaaacccagcagcgttctaccaacaacccatcattggtggtgccctcttttagatttcttatgagttatagttcaataataaagttttttgtctgatgtttgtggcttcccagaaataagaaagtacatttctagattcttaaaaaaaaaaaaaaaaaaaaaaaaaaaaaaaaaaaaaaaaaaaaaaaaaaaaaaaaaaaaaaagggcggccgttctagaggatccaagcttacgtacgcgtgcatgcgacgtcatagctcttctatagtgtcacctaaattcaattcactggccgtcgttttacaacgtcgg

SEQ ID NO: 85009 - DNA, 523 bp, Zea mays
  unsure (1)..(523): unsure at all n locations
nggtagggagggttncttctatgaacagcatatatagcatgctctaccggtccggaattcccgggtcgacccacgcgtccggggatccagaaaattgatgccaggatacctgctgggttcttagaagggatgacaagagttattccaggcttggctggagctaatattatggaaaggcttcggaatgctcctgttgatacaaaccatcagggcacagcagctgcagcaactcgtgctacctgtgatcaaccaagtagctctggcaaacctttctccctactctcagcaacaacaatttcttccattcaaccaactgtctacactgaaccctgctgcttatttgcagcaacaactattaccattcagccagctagctactgcctactctcagcaacaacaacttcttccatttaaccaattggccgcactgaaccccgctgcttatttgcagcagcaaatactactaccatttagccagctagctgcagcaaaccgtgccttcttcttgacacagcaacagttg

SEQ ID NO: 85010 - DNA, 518 bp, Zea mays
agtgtcttccataggagggggtaggaaaggattgctcgtaccggtccggaattcccgggtcgacccacgcgtccgaagatgaagggtgattactacagataccttgctgagttcaagactggagctgagagaaaggacgccgctgagaacacgatggtggcatacaaggctgcccaggacattgctctggctgagcttgctccaactcaccctattaggcttggactggcacttaacttctcagtgttctactatgagattctgaactcacctgatcgcgcctgcagtcttgcaaagcaggcttttgacgaggccatctcggaactggacaccctgagcgaggagtcctacaaggacagcactttgatcatgcagctccttcgtgataacttgaccctatggacctctgacatctcggaggaccctgctgaagagattagggaggcgcccaagcgggactcgagtgaggggcagtaaagccggctttatgtgcctagaaactagtagctagtgtttgc

SEQ ID NO: 85011 - DNA, 493 bp, Zea mays
tgtagagggaggggaagcttgttacagaagggaggtagtgtcatcctcttcggaattcccgggtcgacccacgcgtccgagagcaatggaaggagaagtttgaagataactcaatatggtatgagcacaggttgatggatggcatggtggcctatgctgtgaaaagtgatggtgggtatgtttgggcttgcaaaaactatgacggagatgtacagagcgattttcttgcccaaggttttggttctctgggtttgatgacttctgtgctgttgtcttctgacgggaaaacattacaggctgaggctgctcatgggactgtcactagacatttcaggctacatcagaaaggacaggagacaagtaccaacagtattgcctccatattcgcttggacccgtggacttgaacacagggcaaagctggataaaaatgatagtctgctggatttcacacacaaacttgaatctgcatgtgttgaaacggtggaatctgg

SEQ ID NO: 85012 - DNA, 495 bp, Zea mays
ggaggaggttaaggctggataacagatgtgggggaaaaagtaatcctctttcggaattcccgggtcgacccacgcgttccattggcccgaactgacccccgttgctatttggcagcagcaaatcctactaccattaaggcagggtactgcagcaaaccggcttacttcttgacacagaatcagttgctggctttctaccatcagtttgcggtcaacccgcaaccctcttacaactacaacaattgctgccctttgtacaacttgctctgacagacccagcgggctcctaccaacaacacatcattggtggtgccctcttttagatagcttattagctgcaattcaataatcaagttatctggatgatgtatgtggccaaccagaaataagaagctacatttacagattctagaggcaaaactggataaaaacgatagactgctggatttcacacacaaaccttgatctgcatgtgttgaaacggtggaaactgag

SEQ ID NO: 85013 - DNA, 491 bp, Zea mays
  unsure (1)..(491): unsure at all n locations
ngtagaggagggagagattgttaagacgggggggtagtgtaaccctccggattcccgggtcgacccacgcgtccggctgttcgagaaaatctgctcagcaggtcgattcagtgaagatgagtccaggtatttgttccgacatctgatatcaggggtcagctactgccattctatggaaatttgtcaccgtgatcttaaacttgagaacaccctccttgatgggagtccaacacctcgtgtgaaaatttgcgactttggttactcaaagtctgctttgctgcattccaaaccacaatcaacagttggaactccagcatacatagcccccgaggttctttccagaaaagagtatgatggaaaggtagcagacgtctggtcctgtggtgtcacgctgtacgtgatgctcgtgggatcatatccatttgaagatcctgaggatccaaggaacttccggaaaacgatcagcagaattcttggcgtgcaatactccc

SEQ ID NO: 85014 - DNA, 508 bp, Zea mays
aagagagggatataggtacttgtttacagatggaagggagggggtagctttctaccgcgttcggaattcccgggtcgacccacgcgtccgggcgtcggcggatagcgctactgctagtaggagaggaagcggaaagggcggcggcggggcttgtggtcagtcaaagatccaacctccggactcgcgatggggcggcggatcctcaacgatgctctgcgcacgatggtcaacgcagaccggcggcggaacgcgtcggcgcttctccgacccatctccggcgtcatggtctccttcctcaacatcatgaagtaccgagggtatatcaaaaaatttgaggtcattgatgagaatagagctgggaaaattagagtggagcttgatggacgtcttaaagattgcaaagctctcacctacaggcaagacctcaaagctaatgagatagaacgatacagagttaggatgctcccaacacgccagtggggctatgttgtgattactactacgaatt

SEQ ID NO: 85015 - DNA, 526 bp, Zea mays
  unsure (1)..(526): unsure at all n locations
gggttagtaaggctcttatcaaagtangcccgtcatgtactaccgtactggntccaaattccgggcgcgacccactcgtgcgcggatccagaaaattgatgccattatttctgctgggttcttagaatggatgacgggaggtattccaggcttggctggagctaatattatggaaaggcttcggaatgctcctgttgatacaaaccatcagggcacagcagctgcagcaactcgtgctacctgtgatcaaccaagtagctctggcaaacctttctccctactctcagcaacaacaatttcttccattcaaccaactgtctacactgaaccctgctgcttatttgcagcaacaactattaccattcatccagctagctactgcctactttcagcaacaacaacttcttccatttaaccaattggcctcactgaaccccgctgcttatttgcagcaacaaatactactaccatttagccagctagctgcagcaaaccgtgcttccttcttgacacaacaacaattgct

SEQ ID NO: 85016 - DNA, 525 bp, Zea mays
  unsure (1)..(525): unsure at all n locations
ggggtttagaagtgtttcttattacagaaacatagctagnatctctcggtccggaattcccgggtcgacccacgcgtccgcccacgcgtccgcttgttaagctcattggttattgctcagatggtgacaaccggcttgtggtgtatgaatttatgcccaagggaagtttggagaaccatctgtttagaagaggtgctgatcctttgtcatgggcaataaggctcaaagttgccattggagctgctaggggcttgtcatttttacatgatgccgaaaaccaagtcatatatcgtgatttcaaggcatcaaacattcttctcgattcggaattcaacgcaaaactttcagattttggcttggcaaaagccggtccaactggggataaaacccatgtatccacacaagtcatgggtactcatggatatgcagctccagagtacattgcaacagataacggtcagttggtggagtctgaaagagttgcaggtgaagaccctgagcagcagtcggttggttaaggttgtc

SEQ ID NO: 85017 - DNA, 516 bp, Zea mays
  unsure (1)..(516): unsure at all n locations
atgttgcgtcttacgaaggaagaaggaaagcatgcctcgtgtccgtaattcccgggtcgacccacgcgtccggccatcatctgccaggagaatggtctggtgccaattgttgagcctgagatccttgttgatgggcctcatgacattgatcgctgcgcttacgtcactgagaccgtccttgctggctgctacaaggcgctcaacgagcaccatgtcctcctggagggtacccttctgaagcccaacatggtgactccaggcttcgacttccagaaggtgactcctgaagtgattgctgagtacaccgttcgtacccttcaaaggaccgttcctgctgctgtgcctgctgttgtcttcctctctggtggacagagcgaggaagaagccacccgcaacctcaatggcatgaacaaactcagcaccaaagagccctggtccctgtcttctcctttcgccgtgcccttcaggcgagcaccctcaagcctgngctggcaaggtggagaactttgaaaaggc

SEQ ID NO: 85018 - DNA, 527 bp, Zea mays
  unsure (1)..(527): unsure at all n locations
ggttacgaggggttcattcgatgaaaagacatatatagtatcgctcgtaccggtccggaattcccgggtcgacccacgcgtccggcggcagtgcgtagagaggatcgtcgaacagaacagcatgaagatggtcatcgttctggtcgtgtgcctggctctgtcagctgccagcgcctctgcaatgcagatgccctgcccctgcgcggggctgcagggcttgtacggcgctggcgccggcctgacgacgatgatgggcgccggcgggctgtacccctacgcggagtacctgaggcagccgcagtgcagcccgctggcggcggcgccctactacgccgggtgtgggcagacgagcgccatgtaccagccgctccggcaacagtgctgccagcagcagatgaggatgatggacgtgcagtccgtcgcgcagcagctgcagatgatgatgcagcttgagcgtgccgctgccgncagcagcagcctgtacgagccagctctgatgcagcagcaacagcagctggtggcagctc

SEQ ID NO: 85019 - DNA, 520 bp, Zea mays
  unsure (1)..(520): unsure at all n locations
agtgtcatcgtaaagtcggagatagatagaatcgctcgtaccggtccggaattcccgggtcgacccacgcgtccgcggaagcgtggggagctgaacagtctgcgaagcaacagaagattaagatatgggagaactatgtcgagggtgaaaatgcttccaatggatccacacctgaatctaaacaaaagcaaattctcaaggttgttgtcacggaagttcttggtggtgggaagttttatgttcagacaatgggtgaccagagggtggcttcaattcaacagcagcttgcatctttgaaacttaaagatgcgccggtcattggtgcttttaatcctgtgaagggagagatagtcctcgcacaatttagcgttgacaactcctggaacagagctatgattgttaatggacctcgttctgttgaatctccggacgacaagtttgaagtattctatattgactatggcaaccaagaggtggttacctacagtcgtttacgacctgtagacccatctngttnctn

SEQ ID NO: 85020 - DNA, 521 bp, Zea mays
  unsure (1)..(521): unsure at all n locations
aggggnnnnnnnnatcgcaagtacatcgttagtcacgctcgtaccggtccggaattcccggatcgacccacgcgtccacgcgtgcgaactactttcatctaacccgcttgcggtgggcaatgcacctacgtgcctgaaacaacagttgctggaacaaaatggaccaactctgactcaactagctggggcaaaccctgctgcctacttacaacagttgcttccattcaaccaactggctgtgtcaaactctgctgcgtacctacaacagcgacaacagttacttaatccattggcagtggctaacccattggtcgctaccttnctgcagcagcaacaacaattgctgccatacaaccagttctctttgatgaaccctgccttgcagcaacccatcgtttgaggtgccatcttttagattacatatgagatgtactcgacaatggtgccctcataccgacatgtgtttcctagaaataatcaatatattgattgagatttatctcgatttaaanaaaaaaaaa

SEQ ID NO: 85021 - DNA, 530 bp, Zea mays
  unsure (1)..(530): unsure at all n locations
aggtggaggaaggctgtcttcaatgtctagccnagtanagtcacgctcgtaccggtccggaattcccgggtcgacccacgcgtccgcggacgcgtgggttcacggcgcatgattacaacgccaccgtggagttctactgggcggccttcctggtggagtccaactcggatgacccgcaggcgcacagcgtcatgaaccgtgtcatcgcctggcgcgccatcgccaagcacgccaagaactggaagggcgtggactacctcgtcttcaactcatacatctggtggctcaacacattcgagatgaaagtcattcgccgtcatcagcatcagcttgaaaaggaggaggagggggtgaggtggagcaagtacgcccttgtggaccggccggtggcgtaccgggaggtgctcaagacgtgggccaggtgggtggaccgccacatcgaccccaaccgaacaagagtcttcttcatgggcatgtcgcccaaccacgtcacgccgtgggcgtggggtaacgaccgcggcatcaagtgn

SEQ ID NO: 85022 - DNA, 530 bp, Zea mays
  unsure (1)..(530): unsure at all n locations
gaaggaggngtcnntcncactagaaatgatagtaaagcatcgctcgtactgngtnngnnnnnccggcgcgagccacgcgtgcgaggcttcaaccctataggatccaacaggcaatcgcagctggcatcttaccttggtcagccttgttcctccaacaatcatcagccctattacagcagttacctttggtgcatttattggcacaaaacatcagggcacaacaactacaacaacttgtgctagcaaaccttgctgcctactctcagcaacagcagtttcttccattcaaccaactagctgcattgaactctgctgcttatttgcaacaacaactaccattcagccagctagctgctgcctacccccaacaatttcttccattcaaccaactggcatcattgaactctcctgcttatttacagcagcaacaactactaccattcagccagctagctggtgtgagccctgctgccttcttgacacaacaacagttattgccgttctacctgcacgctgcgcctaacgctgcn

SEQ ID NO: 85023 - DNA, 527 bp, Zea mays
  unsure (1)..(527): unsure at all n locations
ggtggaggaaggccttcttcaactgaaagaatatantgtattgctctaccggtccggaattcccgggtcgacccacgcgtccggcactggaaacagaacttaaaaacaaattgtctatacttggtctgatgccatctgcagctttggcagaggtactgaagcaattgaaggacaaatcattaaagcgagcagggctgactgaagaacaattgcaagagcagattgagcagagaaatgtcgcaaggaagaataagcagtttgagatatctgatggaatcaggaaaaaccttgctaccaaaggcatcgccctgatggacgaaccttctggtacagtatggagaccatgcgaaccagagcggtctgaagagtcatgattagctcactgactcaacaagtgatggcggtgtaaaatgagatttttgcctgagggcagttatcgcattttgaagactaacaaaaatcgccatctcttgatgtggtattctacagggtaagggttccaaggtgactcaccagttaaaacatgc

SEQ ID NO: 85024 - DNA, 521 bp, Zea mays
  unsure (1)..(521): unsure at all n locations
aggggnnnnnntttgattgattccnttagtnacanccncnnnnnnttnnnnnnnccgngtcgacccacgcgtccggtgccgggatgatactgctggggggtgatagtactggtcacacgactattgcggcgggccatgtcctgccggcgtcgtatctgaactcccaagacgccgccgccgtcagacagtacatcaacacgtccagcaagccgactgcctccatcgtcttcaacggcacggcgctgggcaccgctccagctcccgtcgtcgcctacttctcatccagggggcctagcactgcgagccctggcatcttgaagccagacgtcattgggcccggcgtcaacgtcgttgcggcatggccgttcaaggtcgggccaacaacaaacaccgtcggccgtgaccgtgacgacgacgaccaacatggagcagcagcagctactttcaactccgtatctggaacatccatgtctgcacctcacctcagcggcatcgcagctgtcatcaagagcgcacaccct

SEQ ID NO: 85025 - DNA, 504 bp, Zea mays
  unsure (1)..(504): unsure at all n locations
ngtagagggggagggagaagggtctattaaaagacaagacagtaactgtcatcctcttcggaattcccggctcgacccacgcgtncgtagaaagcacaatagtgtaccaacaatggcagccaaaatattttgcctccttatgctgcttggtctttctgcaagtgctgctacggcgaccattttcccgcaatgctcgcaagctcctatagcttcccttcttcccccgtacctctcaccagcggtgtcttcggtatgtgaaaacccaattcttcaaccctacaggatccaacaggcaatcacagctggcatcttacctttatcacccttgttcctccaacaatcatcagccctattacatcagttacctttggtgcatttattggcacaaaacatcagggcacaacaactacaacaacttgtgctagcaaaccttgctgcctactctcagcaacagcagtttcttccattcaaccaactagctgcattgaactctgcttcttattt

SEQ ID NO: 85026 - DNA, 502 bp, Zea mays
gttgggggagaagggaaggttcttgtacagaatgtggggggggaagtatgctcttcggaattcccgggtcgacccacgcgtccgagcaaatactgatccttgttattctgcatttcacgatgaagagtggggagttcctggtcacggtgacaggaagttatttgagctgctagtactgtcaggggcattagctgaactgacatggccagcaattctgaataagagagacatattcagggaagttttcatggattttgacccagtatcagtctcaaaattaagtgagaagaagattatcgcacctggaagccctagcagttccttgttatccgaacagaaactgcgcggtgttattgaaaacgcacgccaaatactcaagatcatagaggaatttggatcgtttgataaatactgttggagcttcgtgaatcacaaacctatattgagccggttcaggtactcccgtcaagtgcctgtcaaaacatcgaaagcagacgccata

SEQ ID NO: 85027 - DNA, 541 bp, Zea mays
ggaatatgatatcaaaagacgggacacgaagagaattctccggttcggaattcccgggtcgacccacgcgtccggaccaccaatgcgttactggattcagactttcaggcacatgtaggcgatttcgatctgatgagggttattcctgatggaatggatcatgaaaagattaccagcgaaagccaacgaggctatctggctcctgagtacattatgttcgacaaaccaactgcaagttgtgatgtatacagctttggaataatactattggagcttgctagcggcaaactgccgatagaaaagtcatgctctgttaagacatatggaattcgaaactcgttgctcccgctggcaaggcacggcagatatgatgaaattgcagactcataactgagcgacaaggtctctgaatctgaactgacatgaatggccatagcagggctagcatgtactcattcagactctgacagatgacccacgattgcttgaaattgcgcccttgcatgaaaggctaatcacaagtacaccctttttaagcgtt

SEQ ID NO: 85028 - DNA, 531 bp, Zea mays
  unsure (1)..(531): unsure at all n locations
agatatgttaaagcggggatgtagcatgctctaccggttcggaattcccgggtcgacccacgcgtccgattcctcccatctcccaagacctcctcagacccgagaagcgcagctgcggccatggacgccaccggcactggagctggagggaaggcgaagaagggagcggccggtcgcaaggccggcgggccgaggaagaagtcggtgacgaggtccgtgaaggccgggctccagttccccgtcggccgcatcgggcgctacctcaagaagggccgctacgcgcagcgcgtcggcagcggtgcccccgtctacctcgcggccgtcctggagtacctcgccgctgaggtcctggagctcgccggcaacgctgccaaggacaacaagaagacgcgcatcgtcccgcgccacgtgctgctggcgatccgcaacgacgaggagctcgggaagctgctgaccggcgtgaccatcgnccacggcggcgtgttgcccaacatcaacccggtcctgctgcccaagaagacggcggagaaa

SEQ ID NO: 85029 - DNA, 545 bp, Zea mays
  unsure (1)..(545): unsure at all n locations
tatggtctgtgatagaaggggggggaagaagtgctctacctggtnntncnnnnccggcgggacccacgcgtccggtgggatgaacaacaacagtacgtgctggacacgtcggtgctgccgcacgagccggagagcatgcgtgagctgcggctggtgaccgacaagcacgagtgggggttcatgcagtcgtccccggacgaggcgtcgctgctgcggatgctgatcaagctgagcggcgcgcggcggacgctggaggtgggcgtgttcacgggctactcgctgctggcgacggctctggcgctgcccgccgacggcaaggtcatcgcattcgacgtgagccgcgagtactacgacatcggccgccccttcatcgagcgcgccggggtggcgggcaaggtggacttccgggagggcccggcgctggagcagctggacgagctcctcgccgacccggccaaccacggcgccttcgacttcgccttcgtcgacgccgacaagcctaactacgtncggtaccacgagcagctgctncgncttgtgcgcgt

SEQ ID NO: 85030 - DNA, 502 bp, Zea mays
  unsure (1)..(502): unsure at all n locations
tgggatgtnaaaatgctaaagttacgaccacgccattattgcaatgactgtaccggttcggaattcccggctcgacccactcgtccgagcaacatagaaagtggaatacagtatcaacaatagagcaacaatggcggccaagatgttttccatccttatgctccttgctctttctgcatgtgttgctaacgcgaccatttttcctcaatactcacaagctcctatagctgcccttcttcccccataccttccatcaatgaccgcttcagtatgtgaaaacccagcccttcaaccctacaggctccaacaagcaatcgcaacaagcaacttacctttatcacccctgttctttcaacaatcgccagccctatctttggtgcagtcattggtacaaaccatcagggcacaacagctgcagcaactcgtgctaccagtgatcagccaagtagctctggcaaacctttctccctactctcagcaacaacaatntcttccattcaac

SEQ ID NO: 85031 - DNA, 495 bp, Zea mays
  unsure (1)..(495): unsure at all n locations
aggggnnnagagggtaagttacgacggggggaaaaagcatgctctaccggtccggaattcccgggtcgacccacgcgtccgcgtgaacccgccgccgacgcagcagcaggagacgcgccaaggagagcccgcaaggaggcgactatgagggccaagtggaagaagaagcgcatgaggaggctgaagaggaagcgccgaaagatgaggcagagatccaagtaggctgatggggattgtggatggtggtgtcggcatagttgtgttacgtttcttcgatgcgtgagttcatggagagatgtcacatcctagttcgtcgtcaccgtttgccatgggtccaatggctcgtcttggaaacctgcacttcagtaggccatctatcgtggtttctagctatatccagagttttgtgctaagacaaatcagtcagtcgttttgtgaacctattatgatggagctttatttgctgctaatatcgacctacctgttaagtaaaaa

SEQ ID NO: 85032 - DNA, 545 bp, Zea mays
atggtcatctaaaggtggggagagtgtgagataccttctactcggaatgcccgggtcgacccacgcgtccggctgaatttgaagaaaatgaagtctatgcaatcgatattgtcaccagcactggggaggggaagcccaagttattggatgagaagcagaccaccatctacaaaagggctgtagacaagaattataacctgaagatgaaagcgtcaagatttattttcagtgaaatcagccagaagttcccaatcatgcccttcactgctagggcattagaagagaagcgtgcacgcttaggcttggtggaatgcatgaaccatgagctattgcagccgtaccctgtacttcatgagaagccaggtgaccttgttgcacacataaagttcactgtgctgctaatgcccaatggatcggataggattacatcatatccgctacaggagttaaagccaacaaaatccattgaagacaatgctgagattaaggcatggctttgcttggggacgaaattcaagaaaaaaggtggtggaaagaagaagaaa

SEQ ID NO: 85033 - DNA, 529 bp, Zea mays
aatgattgattcatcgcaacaaagtagtcatcctccggttcggaattcccgggtcgacccacgcgtccgggatctcctatctggcgacgagctcctgataaaccaacatctcaacgccggcgtattggagggtgttctgtgggacgtagaggcaaagttgctcacgcgaggtgctgttgatgtggacataggtgccaattcatacgtcgagggtggtgaggacgaaagcgttgatgacacagctgcgaacgtggttgatattgttgacacatttcgtgtacaggagcaacctccttttgacaagaaatcatttgcgtcttacatcaaaaaatacatgaagaatctcactgctgtgttgcagccagagaaagcggatgagttcataaagggtgtcgagggtgctaccaagtttcttcttagcaagctgcatgacctccaaatttttgatggtgagtccatgaaggatgatgcgtgtggggtattcgcctattacaggatggtgccaattaatccgacattcttctatttt

SEQ ID NO: 85034 - DNA, 540 bp, Zea mays
atgtcgtcttaagtggaggaagatagtatacttctctggttcggaattcccgggtcgacccacgcgtccgcttgctgattcagatctggtctatgaaaagtctgttgcttttacaaagtcaattccgcgaagactggtttttgagaatactcgaaggaagtccagtgccaggagaaatgtgccagacaatcatgcaagaactaaaacacatcttgtagaaaataaaatgttgagcagttctgttgaaaataaatttatcgttaatggaggatctgcaatgcagacagaccatggacaagagtttctttctgatgttgttcatcaaggtaccttaagagtagatgaactagcaaagttactagcttgagaggtgattgctcttttatcaaccacatagaccagtatcaacatcctttgaaacatatgcaagatttgcatgaactctgaattggttaaaacaggtctcaagtctgttgcgtcgtggtgagtcctttttaaccttgaaatactgaactataatcctgtgcgatgtacaaacca

SEQ ID NO: 85035 - DNA, 528 bp, Zea mays
  unsure (1)..(528): unsure at all n locations
agatatcgatggggggaaagaagagaagtctctaccggttcggaattcccgggtcgacccacgcgtccgaagcacaatagtgtaccaacaatggtagccaaaatattttgcctccttatgctccttggtctttctgcaagtgctgctacgacgaccattttcccgcaatgctcacaagctcctatagcttctcttcttcccccatacctctcaccagcgttgtcttcagtatgtgaaaacccaattcttcaaccctacaggatccaacaggcaatcacagcaggcatcttacctttatcacccttgttcctccaacaatcatcagccctattacatcaattacctttggtgcatttattggcacaaaacatcagggcacaacaactacaacaactcgtgctagcaaaccttgctgcctacgctcagcaacagcagttacctttggtgcaattgttggcacanaacatcagggcacaacaactacaacaactcgtgctagcaaaccttgctgcctactctcagcaacag

SEQ ID NO: 85036 - DNA, 546 bp, Zea mays
  unsure (1)..(546): unsure at all n locations
taggtcttctgatagtggggggaaggagaggaggcttctaccggttcggaattcccgggtcgacccacgcgtccgcccacgcgtccgtgcagcccgacggcgacgccctactgctcgcctcagtgccagtcgttgcggcagcagtgttgccagcagctcaggcaggtggagccgcagcaccggtaccaggcgatcttcggcttggtcctccagtccatcctgcagcagcagccgcaaagcggccaggtcgcggggctgttggcggcgcagatagcgcagcaactgacggcgatgtgcggcctgcagcagccgactccatgcccctacgctgctgccggcggtgtcccccactgaagaaactatgtgctgtagtatagccgctggctagctagctagttgagtcatttagcggcgatgattgagtaataatgtgtcacgcatcaccatgggtggcagtgtcagtgtgagcaatgacctgaatgaacaattgaaatgaanaanaaaaaaaagggcgggcgctctagaggatcccagcttacgtacgcg

SEQ ID NO: 85037 - DNA, 535 bp, Zea mays
  unsure (1)..(535): unsure at all n locations
atgatcttcagtatttagaacaattgaaggcattcctctaccggttcggaattcccgggtcgacccacgcgtccgctataggatccaacaggcaatcgcagctggcatcttacctttatcacccttgttgctgcaacaatcatcagccctattacagcagttacctttggtgcatttattggcacaaaacatcagggcacaacaactacaacaacttgtgctagcaaaccttgctgcctactctcagcaacaacagtttcttccattcaaccaactagctgcattgaactctgcttcttatttgcaacaacaacaactaccattcagccagctatctgctgcctacccccagcaatttcttccattcaaccaactgacagctttgaactctcctgcttatttacagcagcaacaactactaccattcagccagctagctggtgtgagccctgctaccttcttgacacaaccacaattgttgccgttctaccagcacgctgcgcctaacgctggcaccctcttacaactgcaacan

SEQ ID NO: 85038 - DNA, 502 bp, Zea mays
aggttaaggtagaaggtagttaaggggatgtgggggtaatagtaatactctaccggttcggaattcccgggtcgacccacgcgtccggaacgaacggcgatcatttctcccaatatataaagatgcaaaattaagagtcacaagtaactctgaaagaaaatacaaaattaaccaaggtactacaaaggtggctttgatgaggtctcggaatgacacttagttccttttcagcgtttgccaccgccgccacccaacttggggcctttggaacccttctgaacagcacccttcgtctgcgccttctgggacttggacacctcagccttcttcgccttcttctcatccttggtcttcttgatgcgctccttgatctcacgaagagcagcttctctagcagcatctcggacttcaggcttctcagctctcttcttctggatcacttccaaggaagcacccacaatggacctcgagtatggcttcttggtggcgctgcgcctcttcc

SEQ ID NO: 85039 - DNA, 498 bp, Zea mays
  unsure (1)..(498): unsure at all n locations
ggtngggnagaagtggtacgagagggggggagtaacgagaaagcttctaccggtccggaattcccgggtcgacccacgcgtccgcggacgcgtgggaccatacaaaccatcgcaacgcaacagcaacaacaatttctaccagcactgagccaactagctgtggtgaaccctgtcgcctacttgcaacagcagttgcttgcatccaacccacttgctctggcaaacatagttgcataccaacaacaacaacaattgcaacagtttctaccagcgctcagtcaactagccatggtgaaccctgccgcctacctacaacagcaacaactgatttcatctagccctctcgctgtggttaatgcacctacatacctgcaacaacagttgctgcaacagattgtaccagctctgactcagctagctgtggcaaaccctgctgcctacttgcaacagctgcttccattcaaccaactgactgtgtcgaactcttctgcgtaccta

SEQ ID NO: 85040 - DNA, 493 bp, Zea mays
  unsure (1)..(493): unsure at all n locations
ggtgggggggagtgtgtctacgatgtgggggaaaagtatgctctaccggtccggaattcccgggtcgacccacgcgtccgcccacgcgtccgcccacgcgtccgcccacgcgtccgacggccagaggaagctaccagggtcgatcgatcgagagagagagagagagagcatggctggcaggagtttcctgattcggtcccccaaggaggaggagtccaacgccgccgtcagagaagctgtactgctgggagcaaagaacgccgcaatagctggtactgtggttgcagttcccacgttggttggctgccgtgtccttccttgggctaaggcgaatctcaactacactgcacaagcactcattatatctgcagcctgtattgctggcttcttcatcactgctgacaaaaccattctacggaacgcacgacaaatcaccatcgggaagcttgacaagtcaacttgatgcatagatgtagctgaagctgaaagggtn

SEQ ID NO: 85041 - DNA, 549 bp, Zea mays
  unsure (1)..(549): unsure at all n locations
gggggaagatcatctaagaacggaagtgagatagcatttctcggttcggaattcccgggtcgacccacgcgtccgcccacgcgtccggagaccaacaagcaacatagaaagtggaatccagtagcaacaacagagcagcaatggcgaccaagatattttccctccttatgctccttgctctttctgcatgtgttgctaacgcgacaattttccctcaatgctcacaagctcctatagcttcccttcttcccccataccttccatcaatgatagcttcagtatgtgaaaacccagctcttcagccctataggctccaacaagcaatcgcagcaagcaacatacctttatcacccttgttgtttcaacaatcgccagccctatctttggtgcagtcattggtacaaaccatcagggcacagcagctgcagcaactcgtgctacctgtgatcaaccaagtagctctggcaaacctttctccctactctcagcaacaacaatttcttccattcaaccaactgtctacactgaaccctgctgcttatntgcagc

SEQ ID NO: 85042 - DNA, 533 bp, Zea mays
  unsure (1)..(533): unsure at all n locations
tatgatatgaatgaggggaggaggaggagagtgttgtaccgcgccggaatggctggaccgacgcagctgccgtgcggctagtcgtcgccctcccgttcgggttcggggtcgagaggttctacggcgttcgggggcgtgggtgagcggatcgagatggcggcgtcggatgttgagtaccgctgcttcgtcggcggcctcgcctgggccacggacgaccactccctccacaacgccttcagcacctacggcgaggtcctcgagtccaagatcatcctcgatcgggagacgcagaggtcccgcggcttcggcttcgtcaccttctccacggaggaggcgatgcggaacgccatcgagggcatgaacggcaaggagctggacggccgcaacatcaccgtcaacgaggcccagtcccgcggcggtcgtggaggcggcggcnngtgggtatggtggtggccgttgaggcngcggctaccggngtggccggcgccgtgatggcggttgcggctaccgcngtggcggcggctaacgtggcg

SEQ ID NO: 85043 - DNA, 528 bp, Zea mays
agatttgctactgcaggatagtaggatcctccggtccggaattcccgggtcgacccacgcgtccgcggacgcgtggggcacaatagtgtaccaacaatggcagccaaaatattttgcctcctgtgggctccttggtctttctgcaagtgctgctacggcgaccattttcccgcaatgctcgcaagctcctatagcttcccttcttcccccgtacctctcaccagcggtgtcttcggtatgtgaaaacccaattcttcaaccctacaggatccaacaggcaatcacagctggcatcttacctttatcacccttgttcctccaacaatcatcagccctattacatcagttacctttggtgcatttattggcacaaaacatcacggcacaacaactacaacaacttgtgctagcaaaccttgctgcctactctcagcaacagcagtttcttccattcaaccaactagctgcattgaactctgcttcttatttgcaacaacaacaactaccattcagccagctacctgctgc

SEQ ID NO: 85044 - DNA, 543 bp, Zea mays
ggaaaaggtgtcttaagtagggaagatagcatgctctaccggtccggaattcccgggtcgacccacgcgtccgcggacgcgtgggcggacgcgtgggcggacgcgtgggtttgcaacaacaacaactaccgttcagccagctacctgttgcctacccccagcaatttcttccattcaaccaactggcagcattgaactctcctgcttatttacagcagcaacaactactaccattcagccagctagctggtgtgagccctgctaccttcttgacacaaccacagttgttgccgttctaccagcacgctgcgcctaacgctggcaccctcttacaactgcaacaattgctgccattcaaccaacttgctttgacaaacctagcagtgttctaccaacaacccatcattggtggtgccctcttttagatttcttatgagttatagttcaataataaaagtttttgtctgatgtttgtggcttcccagaaataagaaagtacatttctagattcaaaaaaaaaaaaaaaagggccggccgctctag

SEQ ID NO: 85045 - DNA, 489 bp, Zea mays
  unsure (1)..(489): unsure at all n locations
aggggnnngagctgtctaagaaccgccagaaagtactctctaccggttcggaattcccgggtcgacccacgcgtccgagacaaagaaatgggctgagcctcatctggaaactgctaacacacaatggatgcctggtgctaaacaaaaatgggctaccttgaagaaacatgcacaggcctatgatcaaatggcctcagagaaatcattggatgcttatcaaacatcaagtgactctagaaggcctcatcttgttaatgcacatcaagtctgttgatccctattctcaggaagccaataaatcatccaagccatatgttgatcaaatagctacagctactaaaccacatgtcgagaaagtcacaactgctctcaagccttatactgaaagatcacgacatgtatatggacagtttcttgagacagctactacatatcatccagcagctcacgcaactatctcggattaccttcaccggcatgagtttacaa

SEQ ID NO: 85046 - DNA, 543 bp, Zea mays
  unsure (1)..(543): unsure at all n locations
gagcatcttacctattgacaagacgtatggatcgtctcggtccggaattcccgggtcgacccacgcgtccggaggctcaagacgtacgagggcgtcccgccgccgtacgacaagaccaagcgtatggtgatcgctgacgctcttaaggttctgaggctacagcctggacacaagtactgcctcctcggcgagctctctaaggaggtcgggtggaactaccatgacaccatcagggaacttgaggagaagaggaaggagaaggccaaggttgcctacgagaggaagaagcaattggccaagctgcgtgtcaaggccgagaaggcagccgaggagaagttggggtctcagttggagattcttgcccctatcaagtactgaagagctgtgctttgtcatcagttttggggaacatctagtctttgttttaagtgttcggtaacagtttgtgacagtataatctggtaaaccgtgttattnttctgccactcctatttgaacacattttctaaanaaaaaaaaaaaaaaagggcggccgctctaaan

SEQ ID NO: 85047 - DNA, 531 bp, Zea mays
  unsure (1)..(531): unsure at all n locations
agatttgataatgaatgatagtagnactcctccggtccggaattcccgggtcgacccacgcgtccggaagattgagtcaattgctaagctgtatggtgctagtggcgttgaatattccgagcagggtgaaaagcagattgagatgatcaccaagcaagggttatgcagcctccgcatttgcatggcgaagactcagaactcattctcacatgtaccgtacatgaagggcgctccgaccaggctgtgctatgtcgataagagacgtgagggccaacatcggcgctgggcacatctacccgatcgatgggcaccatgagcacgatgcctggccttctgaccagaccatgcgtttaccagatcgacgtcgacactggcatcgggaaggtcatggggctgtcatgaattgaacgacgtgatggtatcattcagagaacgtatattcggtggcatccctggatcgagttaacataagagtcgatcctggcattctgcaagctcagtgccacttactattactcgattttgaagacc

SEQ ID NO: 85048 - DNA, 552 bp, Zea mays
ggtgtaatagtatcttctgactgaggaggagtataaggatcgctcgtaccggtccggaattcccgggtcgacccacgcgtccggttgttgatgaacatttcaatactgtactcctgaactgttatgatgcaattggcatagggcttatgatcagaataattcatcagcaccagctcatcatgtttaagcggcgaatcccatgtttggactcttacctagacaaagttaatatgtcactctggcctcgcttcaagatggtgttcgacttgcatttgaacagcttgcgaaatgcaaatattaaaacactttgggaggatgatgtccatccacactatgttacaaggagatatgctgaatttacagcttctctagttcatctcaatgttgagcatggggacggtcagcttgatctaaatttggagcgattgcggatggccattgaggatttgcttgttaagttggctcaagatgttttccaaaccgaagctacaaactgtctttctgataaacaactatgatttaacaatttccattttgaaggaagctggaact

SEQ ID NO: 85049 - DNA, 532 bp, Zea mays
agcatgtgagtattcgaacaactgtaggatcctcgtaccggtccggaattcccgggtcgacccacgcgtccgcccacgcgtccgtgcgcctctacatttcttctctctctgctcctccgcctccgcctgagccatccaagacagggatcgccatgtcggactcggaggagcaccacttcgaatcgaaggccgacgctggggcgtccaagacctacccgcagcaggctggcaccgtccgtaagaacggcttcatcgtcatcaagaaccgcccctgcaagggtgtggaggtttctacctccaagactggtaagcatggccacgccaaatgccactgtgtcgccatagacatattcaatgggaaaaagcttgaagatattgttccttcatcacacaactgtgacattccgcatgtgaaccgcactgagtatcagctgattgatatttctgaggatggatttgtgagccttcttacttcagatggcagcactcaggatgatcttagactcccaactgatgagactcttgtgggcca

SEQ ID NO: 85050 - DNA, 536 bp, Zea mays
  unsure (1)..(536): unsure at all n locations
agtatgtcttattgcaagattatagnatccttctaccggttcggaattcccgggtcgacccacgcgtccggagattgtgaaggaagtctcttcctacctgaagaaggttggatacaaccctgatgagatctacttcgttccaatctctggttttgaaggtgacaacatgattgagaggtccaccaaccttgactggtacaagggcccaaccctacttgaggctctggacttgatcaatgagccaaagaggccttcagacaagcccctgcgtctcccccttcaggatgtgtacaagattggtggtattggaactgtccctgttggacgtgttgagactggtgtcattaagcctggtatggttgttacttttgggcctactggtcttactactgaggttaagtccgttgagatgcaccatgaggctctccaggaggcccttcccggtgacaatgttggcttcaacgtgaagaatgttgctgtgaatgatctgaagcgtgggtatgtggcctncaactccaaggatgaccctggcaagn

SEQ ID NO: 85051 - DNA, 506 bp, Zea mays
  unsure (1)..(506): unsure at all n locations
gagtnnnntnntcagaggtgtttctaaagaatgtggggggaaaacagttaggcttctaccggttcggaattcccgggtcgacccacgcgtccgcatctctagggctcctgtttctccccatcctccccccaccctaccccgcaccaaacgggttcaatccgacatgacaagcatccatgtcgtcgtcacgccggagctcgagccccgacagcaacgacacgacggacgagcgcaagcggaagcggatgctgtccaacagggagtcggcgcggcggtcgcgcgcgcggaagcagcagcggctggaggagctgttggcggaggtggcccgcctgcaggcggagaacgcggcgacgcaggcccgcaccgcggcgctggaacgcgacctgngcagggtggacggcgacaacgctgtgctgcgcgcccgccacgccgagctgaccggccgcctgcagtcactgggcggcgtcctcgaagtgctccagatggccggcgccgncgtcgacatc

SEQ ID NO: 85052 - DNA, 492 bp, Zea mays
gagggggtgaaggtgtgctacgacgtgggggggaaggtacgctctaccggttcggaattcccggctcgacccacgcgtccgattcctcccaacaccacctcgcctgcgatcttcgtagcctccgtcgcgtcgagcatgtatcatgtcggcctactgcggaaagtacaaggatgagctcatcaagaatgctgcctacattggcacccctggcaagggtatccttgctgctgatgagtccactggcaccattggcaagcgcctttccagcatcaatgtcgagaacgttgaggagaaccgccgtgccctccgtgagctcctattctgctgccctggtgctctccagtacatcagcggtgtgatcctcttcgaggagaccctgtaccagaagaccaacgatggcaagccttttgttgatgtcctcaaggagggaggcgtgctccctggcatcaaggttgacaagggcaccattgagggtgttggcactgataagga

SEQ ID NO: 85053 - DNA, 496 bp, Zea mays
  unsure (1)..(496): unsure at all n locations
ngggggagggaaggtcgtttcgcgatgtcggggaagagggagagcttctaccggttcggaattcccgggtcgacccacgcgtccgcccacgcgtccgggatgccctaaatgcaaccaaggctgctgttgaggaaggtattggggttggtggaggatgcacccttttgcggcttgcagctaaagtcgatgccatcaaggatacactggagaacgatgagcagaaggttggagctgaaatagtaaggagggccctgagctacccacttaaattgattgctaaaaatgccggtgtcaatggcagcgtcgtcactgagaaggtcctttctaacgataacttcaagtatggttacaatgctgctactggacagtacgaggacttgatggctgctggtatcattgatcctactaaggtggtgagatgctgtttggagcatgccgcgtcggtggccaagaccttcctgacatctgatgttgtggtcgtcgatattaaggagcc

SEQ ID NO: 85054 - DNA, 536 bp, Zea mays
  unsure (1)..(536): unsure at all n locations
agatctgtctatgcaagatctcaggatcgtcncggttcggaattcccgggtcgacccacgcgtccgccgacacatgcgtggcaaacgtagttgcaaaccaggcacaacaacagctgcaacagtggctgccagcgctcaggcaactagccatggtgaaccctggcggctacctacaacagcaacagctgctttcatctagcccgctcgctgtggccaatgcacctacatacctgcagcaacaattgacgcgacagattgtaccagctctgactcagctagatgtggcaaaccctgctgtctacttgcaacagctgcttacattcaaccaactgactatgtcgaactctgatgtgtacctacaacagtgacgacagttgcttaatatactagcaatggctaacccattggtcgatgccttgctactgtaacaacaattgctagcctagcaccagctatttttgatgaaccgctgtttgtctaggcagtgacccatcgttggaggtggcatcttctagatgacatatgaaatgtcctct

SEQ ID NO: 85055 - DNA, 551 bp, Zea mays
ggggaatagtgtcttctgataatcgaaatatgataggatgcgctcgtaccggtccggaattcccgggtcgacccacgcgtccgcccacgcgtccgatgactccaacagcaaccgtctgcctcatgtcacggacagcagaacgacccataggaggatactgagagaaggtctcaaccaccatgggcttagtgggaatcatcttcaccataccggcatcaccattcttcaggaacttgggctccttctcaagctccttgccagaccgcctatcgatcttggttatgagctcagcaaacttgacagcaatgtgggaggtgtggcagtccagcactgtggcatagccattgccaatctgcccagggtggttcatgatgatgacttgggaggtgaagctagcagcctacttggcagggtcatccttagagttggaggccacgtacccacgtttgagatccttcacagcaacgttcttcacattgaagccaacattgtcaccaggaagggccttccggacgcgtggggcatttacaccgtgtgaataccagtttgtc

SEQ ID NO: 85056 - DNA, 495 bp, Zea mays
  unsure (1)..(495): unsure at all n locations
ggggagggggggaaagtttttagcgagtggggagaggtaatctctaccggtccggaattcccgggtcgacccacgcgtccgcccacgcgtccgcccacgcgtccgcccacgcgtccgcagttacttcaatgggcttcggacacctagctgtgcaagcctacaggctacaacaagcgcttgcggcgagcgtcttacaacaaccaattaaccaattgcaacaacaatccttggcacatctaaccatacaaaccatcgcaacacaacagcaacaacagttcctaccagcactgagccaactagatgtggtgaaccctgtcgcctacttgcaacagcaggtgcttgcatccaacccacttgctctggcaaacgtagctgcataccaacaacaacaacaattgcaacagtttctgccagcgctcagtcaactagccatggtgaaccctgccgnctacctacaacagcaacaactgctttcatctagccctctcgttgtgg

SEQ ID NO: 85057 - DNA, 502 bp, Zea mays
  unsure (1)..(502): unsure at all n locations
ggggnagggagggggaggctttttagcgatgtgggggaagagggagagcttctaccggtccggaattcccgggtcgacccacgcgtccgcccacgcgtccgcccacgcgtccgaagaccctgcgttgtctcaagggagtcaaaagagtgcgcgttgtgggtcaggcgaatccggttaagaagcagactgctgccacgctgagttacatacagtcttggaacaagttgcagtcggagataagaaaccgacgtgctttcatggtcaccgaaggacgcaacaggaagaagaagcaggagaaccaaatgaaacttgaggcaaaactgcataatttgcagattgaatggaatggaggctcggatactatggatgaaattcttgctaggatacaacaacgggaagaagcagcagtaaagcgtgagcgagccatggcgtacgcgttcaaccatcagtggagagcaaggtctgccacaagtctaggaaacttcagctatgaagtcggtaa

SEQ ID NO: 85058 - DNA, 497 bp, Zea mays
  unsure (1)..(497): unsure at all n locations
naggaaggggaaggctnnagtaccgacagggggggtaaaagtacgctctaccggtccggaattcccgggtcgacccacgcgtccggaccaactagcaacatagaaagcacaatagtgtaccaacaatggcagccaaaataggttgcctccttatgctccttggtctttctgcaagtgctgctaccgcgaccattttcccgcaatgctcacaagctcctatagcttcccttcttcccccgtacctctcaccagcggtgtcttcggtatgtgaaaacccaattcttcaaccctataggatccaacaggcaatcgcagctggcatcttacctttatcacccttgttcctccaacaatcatcagccctattacagcagttacctttggtgcatttattggcacaaaacatcagggcacaacaactacaacaacttgtgctagcaaaccttgctgcctactctcagcaacagcagtttcttccattcaaccaactagctgca

SEQ ID NO: 85059 - DNA, 524 bp, Zea mays
  unsure (1)..(524): unsure at all n locations
caggtcatcttaactgagaaaaagaaagtagtactcctactcggtaagactancgggcgccaggcatgcgtgggaggcaagatacagcaactagtgctactttgcaactggcgagactgcacatgggctgggcacctaggtgcaatggttggcacaaaacatcagggcacaacaactacaacaactcgtgctagcaaaccttgctgcctactctcagcaacagcagtttctgccattcaaccaactagctgcattgaactctgctgcttatttgcaacaacaacaactactaccattcagccagctagctgctgcctaccaccagcaattgcttccattcaaccaactggcagcattgaactctcctgcttatgtacaacaacaactactaccattcagccagctagctgctgagagccctgctgccttcttgacacagcaacagttgttgccgttctacctgcacgctgcgcctaacgttgcaccctcttacaactgcaacatttgctgcattcaaccaacat

SEQ ID NO: 85060 - DNA, 525 bp, Zea mays
agctgtgaaggagaaggggaaagattgttcgtaccggtccggaattcccggggcgacccacgcgtccggcgccctgccggagagaaagtttaccatgtcttcgacaatcaattccctgtagcggtggaacgattgcagtttgatgaacaactctctatggaaaatgtgacgacgcttataacagaggctgatggataccagcctcacttgatagctccagaacaaggatatagacgccttatagaatcttgtcttattagtatcagaggtcctgctgaggcggctgttgacgcggtccatgcaattctcaaggaccttgtccgcaaggctatcaatgaaacacatgaactgaagcagtttcccacccttcgtgtggaagtaggcaatgcagcttttgagtcattggatagaatgagggatgaaagcaagaaaaatacattaaagctagttgacatggaatgcagctacttgacagtagatttcttcaggaagcttcctcaggatgttgagaagggtggaaatcca

SEQ ID NO: 85061 - DNA, 529 bp, Zea mays
  unsure (1)..(529): unsure at all n locations
atgatcgtcttaggagggggagagggaggggagtgttctaccggtccggaattcccgggtcgacccacgcgtccgcctcaagatccagtacactcgggtgccgtgcaactggcgagggctggacatcgggttgaaggtggacgccggctcgaacccgaactacttcgcggtgctcatcgagtacgagtccggggacggcgagctggagtccgtggagctcatgcagcgcggcggcggcggcgggggggcgtgggcgccgatgcagcagtcgtggggcgcggtgtggcggtacaactccggcgacaccctgcaggcgcccttctccgtccgcctcacctccggctccggcaggacggtcgtcgccagcaacgtcatccccgcggggtggacgcccggcgccacgtaccgctcggtcgtcaacttcgacaactaacgaggacggacggacggaccgaaattaacggacgcccgcccgtccggccgntcggccggtcgtcgggatggccgtgaagggcgtggcgctatagct

SEQ ID NO: 85062 - DNA, 503 bp, Zea mays
gggtggaggaaaaggttttagtacagacaccgaggggtagaaagtaatgcttctaccggttccggaattcccgggtcgacccactcgtccgcccactcgtccggctgtctccatagaataaatctctacatgtctcttgtaacctttgctggtgaagatcgtgtcgcgatgaatctataagttaccgtttgttttctaaaaaaaaaaaaaaaaaaaagggcggccgctctagaggatccaagcttacgtacgcgtgcatgcgacgtcatagctcttctatagtgtcacctaaattcaattcactggccgtcgttttacaacgtcgtgactgggaaaaccctggcgttacccaacttaatcgccttgcagcacatccccctttcgccagctggcgtaatagcgaagaggcccgcaccgatcgcccttcccaacagttgcgcatcctgaatggcgaatgggacgcgccctgtatcggcgcattaagcgcggcgggtgtggtggtt

SEQ ID NO: 85063 - DNA, 500 bp, Zea mays
  unsure (1)..(500): unsure at all n locations
ngtagggggaggggaaaaggtgtataccgactgtgggaggaagggtaggctctaccggttcggaattcccggctcgacccacgcgtccgcaggtgagggataaacaaattgtgcgagtacttgggaaggcaccaacaatagcagcggctgcctacttgagattagcaggaagacctcccgtccttcctttaaatactctatcttattcagagaacttcttgtacatgctggactctttgggtgacagaacatataaaccaaatcctcgacttgctcgagctctagatattctttttattctgcatgctgaacatgaaatgaactgctccactgctgctgttaggcaccttgcttcaagtggtgtggatgtatttactgctctttctggtggtgttggagctctatatggtcctctgcatggcggcgcaaacgaggcagtacttaaaatgttaaatgagattggaagcatggaaaatattccagatttcattgtaggagtg

SEQ ID NO: 85064 - DNA, 533 bp, Zea mays
atggtttttcgtaagacggcaagagggaggaggagtgctttctacccggaattcccgggtcgacccacgcgtccggcattcagaaacacacctagcgaagcgcactagcaacgacctaacaacaatggcttccgagacattatccctccttgcgcttcttgccctttttgtgagtgcaacaaatgcgttcattattccacaatgctcacttgctccgagtgccattattccacagttcctccctccagttacttcaatgggcttcgaacacccagctgtgcaagcctataggctacaacaagcgcttgcggcgagcgtcttagaacaaccaattgcccaattacaacaacaatccttggcacatctaaccatacaaaccatcgcaacgcagcagcaacaagcactgagccacctagccgtggtgaaccctatcgcctacttgcaacaacagctgcttgcattcaacccacttgctttggcaaacgtagctgcattaccaacacaaccacagttggcacagtttctgcaacgct

SEQ ID NO: 85065 - DNA, 538 bp, Zea mays
  unsure (1)..(538): unsure at all n locations
nggaagcatcatcttcatagagagagaaggatagaagtcgctcgtaccggttcggactggctggagccacgcgtccgccatcagggcacagcagctgcagcaactcgtgctacctgtgatcaaccaagtagctcgtggcgaacctttctccctactctcagcaacaacaatttcttccattcaaccaactgtctacactgaaccctgctgcttatttgcagcaacaactattaccattcagccagctagctactgcctactctcagcaacaacaacttcttccatttaaccaattggccgcactgaaccccgctgcttatttgcagcagcaaatactactaccatttagccagctagctgcagcaaaccgtgcttccttcttgacacagcaacagttgctgcctttctaccagcagtttgcggctaaccccgcaaccctcttacaactacaacaattgttgccctttgtccaacttgctttgacagacccagcggcctcctaccaacaacacataattggtggtgccctcttttagat

SEQ ID NO: 85066 - DNA, 539 bp, Zea mays
  unsure (1)..(539): unsure at all n locations
ngggaaggtttctgatgagggggtagtatgagatgctctaccggttcggaattcccgggtcgacccacgcgtccggagagagtgtgtgtgatcggtacaaggatcaccgctgtgcctgcgcgtgctgctgcaccgaatcgagtcagatcctgtccgaatccgagctaagggatggcaaccggtagtgaagcctcgaaggcagctgaggctgtggttgactggcataaacacgacagcaagaggatgctccatgcggtttaccgtgttggggatctggaccgcacaatcaagtactacacggaatgctttgggatgaaactgctgaggaaaagggatgttcctgatgagaagtacaccaatgccttccttggctttgggccagagaacaccaactttgcagttgaattgacatacaactatggcgttgaccagtatgacaattggaccgggctttgggcatttcgcaattgctaatgatgatgtgtacaagttagctgagaatatcaaatccaagggtggtaagatcacccgcgaacctg

SEQ ID NO: 85067 - DNA, 535 bp, Zea mays
gggaaagatgtcttatggaggagaagatagcatgctctaccggtccggaattcccgggtcgacccacgcgtccggattcctgcagaactggagctgccactaatgtcatttttgggcttgctctgggggacagatcagtcattatcccaatttttgctattgcgtttagtatcttccttagcttcagccttgctgccatgtatggtgttgctgtggctgctcttggaatgctgagtaccattgccacaggccttgctattgatgcctatggccctatcagtgataatgctggaggcatagctgaaatggctgggatgagccataggattcgtgagagaactgatgctctagatgctgcaggaaacaccactgctgcaattggaaagggttttgctattggctctgcagccttggtatcccttgcactcttcggtgcctttgtaagccgggctgctatctccactgttgacgttctgactcctaaagtattcattgggcttattggtggtgctatgctcccatactggttctcggg

SEQ ID NO: 85068 - DNA, 529 bp, Zea mays
  unsure (1)..(529): unsure at all n locations
tagtgtcatcctacgagggaggggaaattatcctcggttcggaattcccggctggcgggacccacgcgtccgcggacgcgtgggcggacgcgtgggttacaacaaccaatttcccagttgcaacagcaagccttggcacatctaacaatacaaaccatcgcaacgcaacagcaacaacaattcctaccagcactgagccacctagccatggtgaaccctgccgcctacttgcaacagcagttgcttgcatcaaacccacttgctctggcaaacgtagttgcaaaccagccacaacaacagctgcaacagtttctgccagcgctcagtcaactagccatggtgaaccctgccgnctacctacaacagcaacaactgctttcatctagcccgctcgctgtggccaatgcacctacatacctgcaacaacaattgttgcaacagattgtaccagctctgactcagctagttgtgcaaaccctgctgcctacttgcaacaggtggttccattcaccaactgactatgtcgaaa

SEQ ID NO: 85069 - DNA, 497 bp, Zea mays
  unsure (1)..(497): unsure at all n locations
tggagtaggaagctctgtacgacaagagacgctactgctanaccgtaccggtccggaattcccgggtcgacccacgcgtccggcaacatagaaagcacaatagtgtaccaacaatggtagccaaaatattttgcctccgtatgctccttggtctttctgcaagtgctgctacgacgaccattttcccgcaatgctcacaagctcctatagcttctcttcttcccccatacctctcaccagcgttgtcttcagtatgtgaaaacccaattcttcaaccctacaggatccaacaggcaatcacagcaggcatcttacctttatcacccttgttcctccaacaatcatcagccctattacatcaattacctttggtgcatttattggcacaaaacatcagggcacaacaactacaacaactcgtgctagcaaaccttgctgcctacgctcagcaacagcagttacctttggtgcaattgttggcacaaaacatcagggcn

SEQ ID NO: 85070 - DNA, 535 bp, Zea mays
  unsure (1)..(535): unsure at all n locations
cagtatctgaaaagtggggatgagggaggagagtactcgtaccggtccggaattcccggctcgacgcatgcgcggacgcgtgggttcggcctctgtcccttgcaagttcaatctcacctccaaccatgggtgagagagaagtcccacatcaacattgtggttattggccatgtcgactctggcaagtcgaccaccacaggacaccttatctacaagcttggaggcattgacaagcgtgtgatcgagaggtttgagaaggaagctgctgaaatgaataagcggtccttcaagtacgcgtgggtgctcgacaagctcaaggctgagcgtgagagaggtatcaccattgatattgctctgtggaagtttgagaccaccaagtactactgcacggtcattgatgcccctggacaccgtgacttcatcaagaacatgatcactggtacctnccaggctgactgtgctgtccttatcattgactccaccacttggtgggtttgaggctggtatctncaaggatggccagacccgtgaacat

SEQ ID NO: 85071 - DNA, 533 bp, Zea mays
agatatcattattgaaaattatagtatcactcgtaccggttcggaattcccgggtgcgacccacgcgtccggagctgtgcttctctgttgtctcattgctctggcagaagctcatagcttctcccgaaggcagatgtctgcagaaagtacatcagctcaccaaggatggaggaaggttgtggatgcactttgtgatgtcgtttcagcctcaccaaccaaggcctcagctgctatcgttctccaggccgagaaggacttgcagccttggattgctagagacgacgaacaaggccagaagatgtggagagtcaaccaacgtatagtgaagcttatagcggagctcatgaggaaccatgacagccctgaagccttggtgatactcgctagtgcttctgaccttctacttcgtgctactgatggaatgcttgttgacggtgaagcttgtactttgccacagcttgagcttctcgaagtaaccgctcgagcagtccatcttattattgaatggggagatccaggtttatcagttgctt

SEQ ID NO: 85072 - DNA, 503 bp, Zea mays
  unsure (1)..(503): unsure at all n locations
gaggggagnnnnnaagagtgnttctacgatgtggggagggagaggagagcttctaccggttcggaattcccggctcgacccacgcgtccggggatggcaataaatggggcagacccaacagctggtcatccaagtccctacatgccggcaccttccccttggatgaatcagaggccgctgggtgttgatgtgaatgtcgcttatgtggaaggccgtgaagatcctgacaggggcgtgcagcctcagccactgactcaggattttttgatgatgtcttctgggaaacgcaagagggatgagtatcctggtcagctcccttctggttcttttgtaccacaacaagatggaagtgctgatcagatagtagaatttgttgtgtcaaaggaaaatgcgaatcaactttggagttccatcggcaataagcttgaaacaccaaccaagacaatcactccagttattccgcagcgtgatgggattcaagataactacaatgatcaattntt

SEQ ID NO: 85073 - DNA, 505 bp, Zea mays
  unsure (1)..(505): unsure at all n locations
gaggggagcnnnagaagtgtntatttacgaatcccgccattaagggtaggcttctaccggttcggaattcccggctcgacccacgcgtccgcagcagggcacaacaactacaacaacttgtgctagcaaaccttgctgcctactctcagcaacagcagtttcttccattcaaccaactagctgcattgaactctgcttcttatttgcaacaacaacaactaccattcagccagctacctgttgcctacccccagcaatttcttccattcaaccaactggcagcattgaactctcctgcttatttacagcagcaacaactactaccattcagccagctagctggtgtgagccctgctaccttcttgacacaaccacagttgttgccgttctaccagcacgctgcgcctaacgctggcaccctcttacaactgcaacaattgctgccattcaaccaacttgctttgacaaacctagcagtgttctaccaacaacccatcattggtgg

SEQ ID NO: 85074 - DNA, 506 bp, Zea mays
  unsure (1)..(506): unsure at all n locations
atgggaggagagtggntnnnaatttgnanctcgtttgccatctgctanntccntnnnntttnngntnaggnggctggacccactcgtccgagaagggttcagctgttctgcgccctctcaccaggactctgactgctgttcgcgatggcatcttggaggatgttgtctacccagctgagattgtggggaagcgtgtcagataccgtctggatggttccaagattatcaagattttcttggacccaaaggagaggaacaacactgaatacaagctggagacctgcactgcggtctaccgcaggctgtgtgggaaagatgtggtctttgagtaccctatgaccgaaaatgcataaatatgatgccctctggatatctccactctatttcgttgattctgaatgttatgttgggtctccctatgtacttcaaaaaacatagttttgatgctaaagttgcctaggaatttggtacggtgaagtggcagtggacgtgaacaatgttaagtt

SEQ ID NO: 85075 - DNA, 515 bp, Zea mays
agtgtgtctgacactagataatgaagtaacgctgctaccggtccggaattcccgggtcgacccacgcgtccggcccgtcgtccgtcgtcatggccgccgtggaggtgtgcgtgaaggccgccacggggaaggccgacacgctcggcgactgcccgttctcgcagagggtgctgctcacgctggaggagaagaaggtcccctacgaggtgaagctcgtcgacctcgacaacaagcccgaatggtttctgaagatcagcccagagggtaaggtgcctgtgttcaacggtggtgatggcaaatgcattgctgattctgatgtaatcacccaaaccattgaggagaagttcccaactccatctctggtcactcctgtagaatatgcatcagtgggatcaaagattttcccagccttcatcacattcttgaagagcaaggatgctagtgatggttccgagaaggcgcttctggatgagctgcaggcactggatgagcatctcaaagctcatggcccctac

SEQ ID NO: 85076 - DNA, 514 bp, Zea mays
  unsure (1)..(514): unsure at all n locations
agtgtatctgaaaatcgaatataaagaatgctctaccggttcggaattcccgggtcgacccacgcgtccgatgacttctggtgaggctgtcaagtacaagagctcattggacgcattccagcagatccgtaanaaggaaggccccaagtccctgttcaagggtgctggtgctaacattcttcgtgccattgctggcgctggtgtgctttctggctacgaccagctccagatcctcttcttcggaaagaagtacggctccggcggtgcttaaatggagaaaaatgatgacgaacaagagcagttcgctcccggtccagcccagtcaggatctggtcaagtttttgcctttcatatcgaagaaattaataatttatgtaggagaatttttccaacattcgttttgggcggagacattgatctcaaaacactcgtaactgtcctactaggtggtggcatgggtccccaaaacatggtcatagggtgtgtctagtctgcccttcgttgcagccgggca

SEQ ID NO: 85077 - DNA, 523 bp, Zea mays
  unsure (1)..(523): unsure at all n locations
aggttttttcnaagatatagccgctacgnacagctccnccnnnnnnnnnnnnnnnnncggnngnnnnnnnncgnggacgcgtgggagacggccaaggactggaagggcctccgcgtcaccgtcaagctcaccgtccagaaccggcaggccaaggtctccgtcgtcccctccgccgcggcgctcgtcatcaaggcgctcaaggagccagagagggaccgcaagaaggtcaagaacatcaagcacagcggcaacatcagcctcgacgacgtcatcgagatcgccaggaccatgaggcacaggtccatggccaaggaattggccggcaccgtcaaggagatcctcggtacctgcgtcagcgtcgggtgcaccgtcgacggcaaggaccccaaggacctgcagcaggagattgacgacggcgaggtggagatcccgtccgcttaagaaggattggtgtccaggactgtgttatctttgctgctgaagccattctctgcctagattttctcatatttatttgaggtgg

SEQ ID NO: 85078 - DNA, 518 bp, Zea mays
  unsure (1)..(518): unsure at all n locations
agtnnttcncctaagtaggtgaagaaaagtgtgtaccggttcggaattcccgggtcgacccacgcgtccgtagcaacatagaaagcacaatagtgtaccaacaatggcagccaaaatattttgcttccgtatgctccttggtctttctgcaagtgctgctaccgcaaccattttcccacaatgctcacaagctcctatagcttcctttcttcccccatacctctcaccagcggtgtcttcagtatgtgaaaacccaattcttcaaccctacaggatccaacaggcaatcgcagcaggcatcttacctttatcacccttgttcctccaacaaccgtcagccctattacagcagttacctttggtgcatttgttggcacaaaacatcaaggcacaacaactacaacaacttgtgctaggaaaccttgctgcctactctcagcaacagcagtttcttccattcaaccaactggctgcattgaactctgctgcttatttgcaacaacaactaccattcagtc

SEQ ID NO: 85079 - DNA, 517 bp, Zea mays
agtgtctctgattactgaaatatacagtaacgcttctaccggttcggaattcccgggtcgacccacgcgtccgcccacgcgtccggcaagtgctgctaccgcgaccattttcccgcaatgctcacaagctcctatagcttcccttcttcccccgtacctctcaccagcggtgtcttcggtatgtgaaaacccaattcttcaaccctataggatccaacaggcaatcgcagctggcatcttacctttatcacccttgttcctccaacaatcatcagccctattacagcagttacctttggtgcatttattggcacaaaacatcagggcacaacaactacaacaacttgtgctagcaaaccttgctgcctactctcagcaacagcagtttcttccattcaaccaactagctgcattgaactctgctgcttatttgcaacaacaactaccattcagccagctagctgctgcctacccccaacaatttcttccattcaaccaactggcatcattgaactct

SEQ ID NO: 85080 - DNA, 516 bp, Zea mays
  unsure (1)..(516): unsure at all n locations
ngggtatttgcatatagggagggggagaaagcttgcaccggtccggaattcccgggtcgacccacgcgtccgatacgctccattttataaccaaccggcggtccatctgaggaggaccaagaaacatagagagagcggttctacgtccgagtcgtcgcatcaggtcccctcgattcgccggcggcgccaccaaccaagctcatacatctgaattgactagtcaaactcagtgatctctttggggactaatcaaactcaagaactaagtttcatgtctgatctcgacgtccagcttccatctgcttttgatccgtttgcagaggcaaatgctgaggactccagtgctggtgctggatcaaaggactatgtgcacgtgcgtattcagcagcgcaacggaaggaagagtctgacaactgttcagggcttgaagaaagagtacagctacaacaagatcctcaaggatctcaaaaaagagttctgctgcaatggtactgtagtccaggatccagagctagg

SEQ ID NO: 85081 - DNA, 512 bp, Zea mays
atgttctgaatgagagtgtagagatacttctaccggtccggaattcccgggtcgacccacgcgtccgaagcaacatagaaagtggaatccagtatcaacaatagagcaacaatggagaccaagatgttttccctccttatgctccttgctctttctacatgtgttgctaacgcgacaattttccctcaatgctcacaagctcctatagcttccctttttcccccataccttccatcaattatagcttcagtatgtgaaaacccagctcttcaaccatataggcttcaacaagcaatcgcagcaagcaacatacctttatcgcccttgttgtgtcaacaatcgccagccctatctttggtgcagtcattggtacaaaccatcagggcacaacagctgcagcaactcgtgctacctgtgatcaaccaagtagctctggcaaacctttctccctactctccgcaacaacaatttcttccattcaaccaactgtctacactgaaccctgctgcttc

SEQ ID NO: 85082 - DNA, 509 bp, Zea mays
  unsure (1)..(509): unsure at all n locations
atgtgtaatctgagttattgaaacttatagcaatacttctaccggtctcggaattcccgggtcgacccacgcgtccgccgacgggaacccggacttcgcggcgctcgaggtgctccggcgcagggcctacgacggggccaaggcggacgcgtggtcctgcggggtcatcctcttcgtcctcctcgcgggccacctccccttcgacgacgccaacatcgccgacatgtgccgcagggcgcaccgccgggagtacacggtcccgcggtgggtgtcgcagccggcgcgccgcctcgtggcgcgcctgctggacccgaacccggcgacgcgcctcgccgtcgcggagctcgccggccacccctggttcaagcgctcgctcagcgtggactcccagctcggcggcctcctggacggccaggcggagcgcgagctggcgttccaggccccgccggcgctgaacgccttcgacatcatctccatgtccccagggctggacctgtcgggcctgttcn

SEQ ID NO: 85083 - DNA, 497 bp, Zea mays
  unsure (1)..(497): unsure at all n locations
aggtcttggaaacgaaaaaaagtatgctctaccggtccggaattcccgggtcgacccacgcgtccgcccacgcgtccgccgaaactccgacagtccgaccacaagaaggatgagtgaagaggatgagactgctgcttctgctgagcagccgaagagggcccctaagctcaatgaaaggatcctctcttctctgtccaggaggtccgtagctgctcatccatggcatgatcttgagatcggtcctgatgctcctgctgttttcaatgttgttgttgagatcacaaagggaagcaaagttaaatatgagcttgacaagaaaactggactgattaaggttgatcgagtcctgtactcatcagttgtataccctcacaattatggtttcgttccaaggactctttgtgaagacaatgacccaatggatgtgttagtcctgatgcaggagcctgttgttcctggttcgttcctgcgagcaagagcaatcggccttatgcccn

SEQ ID NO: 85084 - DNA, 506 bp, Zea mays
atggtatctgaatagtgggaggggggaatagcatgctaccggtccggaattcccgggtcgacccacgcgtccgcccacgcgtccgcccacgcgtccggtccaccccagccgccgccatgaagcgcaaccccggcgtcacgagctcccgccggaagtgccgcaaggcgcacttcacggccccgtcctccgtccgccgcgtgctcatgtccgcggcgctatcgacggagctccgccacaagtacaatgtgcgttccatcccgatccgcaaggacgacgaggtgcaggtcgtgcgcggcacctacaagggccgtgagggcaaagtggtgcaggtgtaccgccgtcgctgggtcatccacgttgagcggatcacccgcgagaaggtgaacggctccaccgtgaacgtgggcatccacccttccaaggtcatggttacaaagctgaagcttgacaaggaccgcaaggcgctcctcgaccgcaaggcccggggccgcgccgccgacaggcta

SEQ ID NO: 85085 - DNA, 517 bp, Zea mays
agtgtgtctgagtaatgaaatatagtaaagctctaccggtccggaattcccgggtcgacccacgcgtccgcgcaacgcaacagcaacaacagttcctaccagcactgagccacctagccatggtgaacgctgtcgcctacttgcaacagcagctgcttgcatccaacccacttgctctagcaaacgtagttgcaaaccagcaacaacaacaactgcaacagtttctgccagcgcttagtcaactagccatggtgaaccctgccgcctacctacaacagcaacaactgctttcatctagcccgctcgctgtggccaatgcacctacatacctgcaacaagaattgttgcaacagattgtaccagctctaactcagctagctgtggcaaaccctgttgcctacttgcaacagctgcttccattcaaccaactaactatgtcgaactctgttgcgtacctacaacagcgacaacagttacttaatccattggcagtggctaacccattggtcgctgcctt

SEQ ID NO: 85086 - DNA, 518 bp, Zea mays
  unsure (1)..(518): unsure at all n locations
agtggtgtctgagaaggggggagtgaagagaatgctctaccggtccggaattcccgggtcgacccacgcgtccgcggacgcgtgggcggacgcgtgggcggacgcgtgggcaccaagaaatccatcgagagggcgtcgacaggggaattaatggcgtcgtcgtctagcagcagccaccgccgcctcatcctcgcagccgccgtcctgctctccgtgctcgcggctgccagcgccagcgccgggacctcctgcgtgccggggtgggccatcccgcacaacccgctcccgagctgccgctggtacgtgaccagccggacctgcggcatcgggccgcgcctcccgtggccggagctgaagaggagatgctgccgggagctggcggacatcccggcgtactgccggtgcacggcgctgagcatcctcatggacggcgcgatcccgccgggcccggacgcgcagctggagggccgnctagaggacctgccgggctgcccgcgggaggtgcagaggggattccc

SEQ ID NO: 85087 - DNA, 515 bp, Zea mays
  unsure (1)..(515): unsure at all n locations
agtgttattggatgttgatgggggagataagttttaccggtccggaattcccgggtcgacccacgcgtccggtcgcacatatctactattctatacttttaggagccagggccccaaccgccttggcagcgcagatgcttgcattgttcgctctcctagctctttgtgcaagcgccactagtgcgacgcatattccagggcacttgccaccagtcatgccattgggtaccatgaacccatgcatgcagtactgcatgatgcaacaggggcttgccagcttgatggcgtgtccgtccctgatgctgcagcaactgttggccttaccgcttcagacgatgccagtgatgatgccacagatgatgacgcctaacatgatgtcaccattgatgatgccgagcatgatgtcaccaatggtcttgccgagcatgatgtcgcanatgatgatgccacaatgtcactgcgacgccgtctcgcagattatgctgcaacagcagttaccattcaatgtcaaccac

SEQ ID NO: 85088 - DNA, 510 bp, Zea mays
agttatgtgtaagtgggagaagcatgctctaccggttcggaattcccgggtcgacccacgcgtccgcccacgcgtccggtggatctgtgaaccccatggcgcctctgcttgattaaactgcgagggatacatgataaactaagaccaccactcagatcaccaccatcttattcagatccaaaggaacggacgcagggggagtcgacgatgacggagggagggcggccgaacagaagattagaagctgaatgccgacagataaagttggttgatgctccagtatctggtggtgtgcgatccggcgttcatggacggagcgaaacccgcggcagcatgctgctccaccctgcgtgcgcaggaggcatgcttgtgcgtgtacgccaaagaccccaagtttgcaaaatacatcaacaaccccaacaccgccaaaacctttacctcgtgcggcatagccatccccaaatgctaagcaagcgctctgcgtcgtcgcttcgcttgctcttgctcttg

SEQ ID NO: 85089 - DNA, 521 bp, Zea mays
agttgtttctgagctatgacatgatatgcatgccttctcccgcttcaattcccgggtcgagacacacgcgtgcgccgacgcgtacgattgacaccaactagcaacatagaaagcacaatagtgtaccaaccgtggcagctaatatattcagcttccttatgcttctagatcactctgctatagctgctaccgtaaccattatcccacactgctcacaagctactatagcttactttcttcccccatacctatcaccaaccgcttcttcataattacgaaaacccaatcctttaaccttacacgatccaacatgcaatcaatacaacgtatttcacctttatcaaacttgttcctccaacaataccaagtcttactacagtagctacctcaaacccatttgcctactcacaacatctggttacattaaatccactaactatggctaactatgctgcgtacctactacaacgaccacaggtacttaatacattggcaattgcttacccataactctgctgctt

SEQ ID NO: 85090 - DNA, 512 bp, Zea mays
aggtgtctggtatagaatataaaggatgctctaccggtccggaattcccgggtcgacccacgcgtccgcagaccattagctttatctactccagagcgcagaagaacccgatcgacaccatgagggggttgctcgttgccctcgctctcctggctctcgctgcgagcgccacctccacgcatacaagcggcggctgcggctgccagccaccgccgccggttcatctaccgccgccggtgcatctgccacctccggttcacctgccacctccggtgcatctcccaccgccggtccacctgccgccgccggtccacctgccaccgccggtccatgtgccgccgccggttcatctgccgccgccaccatgccactaccctactcaaccgccccggcctcagcctcatccccagccacacccatgcccgtgccaacagccgcatccaagcccgtgccagctgcagggaacctgcggcgttggcagcaccccgatcctgggccagtgcgtcgagttt

SEQ ID NO: 85091 - DNA, 503 bp, Zea mays
  unsure (1)..(503): unsure at all n locations
nctgtatctgggatattgaaataaaaggatacttctaccggtctggattcccggctcgacccacgcgtccgctggtgctctccagtacatcagcggtgtgatcctcttcgaggagaccctgtaccagaagaccaaggatggcaagccttttgttgatgtcctcaaggagggaggcgtcctccctggcatcaaggttgacaagggcaccattgaggttgttggcactgataaggagaccaccacccaaggccatgacgaccttggcaagcgctgcgccaagtactacgaggccggtgcccgctttgccaagtggcgcgctgttctcaagattggccccaatgagccatcacagcttgccatcgacctgaacgctcagggtctggctcgctatgccatcatctgccaggagaatggtctggtgccaattgttgagcctgagatccttgttgatggccctcatgacattgatcgctgcgcttacgtcactgagaccgtccttgctg

SEQ ID NO: 85092 - DNA, 504 bp, Zea mays
agtgtatctgagataacgaataaaaagtaatgcttctaccggtccggaattcccgggtcgacccacgcgtccgcccacgcgtccgtacagtagcaacaaaagtacaacaatggcggccaagatattttccctgcttatgctccttgctctttctgcatgtgttgctaacgcgaccattttccctcaatgctcacaagctcctatgtgaaaacccagctcttgaacctacaggctccaacaagcaatcgcggcaaacaacttaccattatcacccttgttctttcaacaatcgacatccctatctttggtgcagtcattggtacaaaccatcaaggtacaacagctacaaaatctcgtgctacctgtgatcagccaagtagctctagcaaacctttctccctactctcagcaacaacagtttcttccattcaaccaattgtctacactgaaccctgctgcttatttgcagcaacaacaactactaccattcaactagctagctac

SEQ ID NO: 85093 - DNA, 504 bp, Zea mays
aaggtatctgaatagtgggaaggagaggaggcttgcaccggtccggaattcccgggtcgacccacgcgtccgcagcaaagcggcagtgcgtagagaggatcgtcgaacagaacagcatgaagatggtcatggttctcgtcgtgtgcctggctctgtcagctgccagcgcctctgcaatgcagatgccctgcccctgcgcggggctgcagggcttgtacggcgctggcgccggcctgacgacgatgatgggcgccggcgggctgtacccctacgcggagtacctgaggcagccgcagtgcagcccgctggcggcggcgccctactacgccgggtgtgggcagacgagcgccatgtaccagccgctccggcaacagtgctgccagcagcagatgaggatgatggacgtgcagtccgtcgcgcagcagctgcagatgatgatgcagcttgagcgtgccgctgccgccagcagcagcctgtacgagccagctctgatgcagcagcagc

SEQ ID NO: 85094 - DNA, 502 bp, Zea mays
  unsure (1)..(502): unsure at all n locations
atggttattgnattattgggaaggggagataagcttgcaccggtccggaattcccgggtcgacccacgcgtccgggtcaatcgagctcgctatatgccccaatattcatttataattgctactaagacagttggcgcagaagtatatgtttttgactatagcaagcacccatctaagcctccactagatggtgcatgcaaccctgatttacggctgaagggacataattctgaaggatatggcttatcatggagtatttttaaagagggacatttgttaagtgggtctgacgatgctcaaatttgcttgtgggacattaaagcaaatagtagaaacaaaagtcttgacgccttgcagatttttaagcatcatgatggtgtcgttgaagatgttgcttggcacttgaggcatgagtacttatttgggtcagttggtgacgattatcatcttttgatttgggacctgcggtcnntccgccctactaaaccctgtcaagcaatng

SEQ ID NO: 85095 - DNA, 521 bp, Zea mays
  unsure (1)..(521): unsure at all n locations
agggtatctgnaaaagatgagagagaaagagaatgcttctaccggtccggaattcccgggtcgacccacgcgtccgcggacgcgtggggcaacatagaaagtggaatccagtagcaacaatagagcaacaatggggaccaagatattttccctccttatgctccttgctctttctgcatgtgttgctaacgcgacaattttccctcaatgctcacaagctcctatagcttcccttcttcccccataccttccatcaatgatagcttcagtatgtgaaaacccagctcttcaaccctataggctccaacaagcaatcgcagcaagcaacatacctttatcacccttgtttcaacaatcgccagccctatctttggtgcagtcattggtacaaaccatcagggcacagcagctgcagcaactcgtgctacctgtgatcaaccaagtagctctggcaaacctttctccctactctcagcaacaacaatttcttccattcaaccaactgtctacattgaaccgtg

SEQ ID NO: 85096 - DNA, 514 bp, Zea mays
aggtatctggctatgaatataaagtaatgcttctaccggtccggaattcccgggtcgacccacgcgtccgctctgattattaacaagcttcgtgcaggcatcaaggtctgtgctgtcaaagctcctggttttggggaaaacaggaaggcaaacttacaggacctcgctatccttaccggaggagaggtaataactgaagagctaggaatgaaccttgagaatgttgagcctcacatgctgggttcatgcaaaaaggtgactgtctctaaggatgacactgttattcttgatggcgctggagacaaaaagtctattgaagagagggcagaccagattagatcagcagttgagaacagcacttcagattatgacaaggaaaagctccaggaacggttggcaaagctctctggaggtgttgctgttctgaagattggaggagccagcgaagcagaagttggtgagaagaaggatagagtgacagatgcactgaatgctactaaagctgctgttgaag

SEQ ID NO: 85097 - DNA, 515 bp, Zea mays
aggtgtctgtcctacgctcatattgtatgctcgtaccggttctcggaattcccgggtcgacacacgcgtccggaagaccaatcaaagggaggcaaacgccatagcggccaatcacttggcggcggcggcgtcgatggggcggctgaccgaggagcaggcggcgcgcgaggcgtgctcggcggggaccaacgccacgtccctcaagctcacacaccgcgctctctccgacgtgtcgtgcctgagcagcttcaagaacctggagcacctcgacctcggcttcaactgcctcgtcaccctcgagggtttgtcctcctgtgccaatttgaagtggctttcggttaaggaaaacaagcttgtgagcttaaaaggtgttgaggggctctcaaagctgcaggtactgaatgctggcaagaacgaacttacctgttggaccacgtcacatctttgacaagcttgtgagcattgattattactgctaacaatatcacttacatctgcgagctcgatgaaccgcg

SEQ ID NO: 85098 - DNA, 507 bp, Zea mays
  unsure (1)..(507): unsure at all n locations
agggtaatctgngattagtggggaggggaggtatgcttctaccggttcggaattcccgggtcgacccacgcgtccgatgcgaattcccaggcaggcaggtcggttaggagggcaggaagaccgaagaccgagccgtgcgggggctcgggacgggaacgggacaggaccccaaaatctcagatccttcctgcccgcccgcccgtgcccgtcgacgcgtcgttcttgccggccgcgccccacctccgccctctcctcctccagggggatcggatacgccacaggctgcgcgatggtgctgtgggtcttcggctacggctccctcatctggaaccccggcttcgacttcgacgacaaaatcctcggcttcatcaagggctacaagcgcacctttaatctcgcttgcattgaccacagaggcacaccggagcatccggcgaggacctgcacgcttgaaaccgacgacgaggccatatgctggggaattgcatattgtgtcaagggtggtcc

SEQ ID NO: 85099 - DNA, 501 bp, Zea mays
atggtactcggatgtgggaggagagaatatcttctaccggtccggaattcccgggtcgacccacgcgtccgagaccaactagcaacatagaaagcacaatagtgtaccaacaatggcagccaaaatattgggcctccttatgctccttggtctttctgcaagtgctgctaccgcgaccattttcccgcaatgctcacaagctcctatagcttcccttcttcccccgtacctctcaccagcggtgtcttcggtatgtgaaaacccaattcttcaaccctataggatccaacaggcaatcgcagctggcatcttacctttatcacccttgttcctccaacaatcatcagccctattacagcagttacctttggtgcatttattggcacaaaacatcagggcacaacaactacaacaacttgtgctagcaaaccttgctgcctactctcagcaacagcagtttcttccattcaaccaactagctgcattgaactctgctgctta

SEQ ID NO: 85100 - DNA, 517 bp, Zea mays
  unsure (1)..(517): unsure at all n locations
tagtgttagttgnatgtaggagcgaggagagaacttcaccggtccggaattcccgggtcgacccacgcgtccgcccacgcgtccgcccacgcgtccgggcagccagtcagccagaggagcctagagccagtggcgtcccgtccatcagccgccacaccacaaacacccaccactctgctctcgcccgcttgctttctctcccccgctccagcttatggcggaggcggcgccagcagccggcggcggcatcggggacatcctcgccacgagcgatcgggacttcctcgtccgcaactccggcgagcaggtgaagatcagcagcgttgaggcgagccctgtggccatctacttctccgcctcatggtgcccgccatgcaggaggttcacgcccaagcttattgaagtatacgaaaaactggcctcacagggcaagagcttcgaggtcgtctntgcttcggccgatcgcaatgaggaagctntcaatgaatactntgcaaagatgccatggttggctgtc

SEQ ID NO: 85101 - DNA, 501 bp, Zea mays
  unsure (1)..(501): unsure at all n locations
aagttgtccgtcctagttccttcgcatntcataccgtttcgattcccggtggacccacgcgtccgatgatccagaggagcaacacaacaaccatgttgtagattgcttggtgaatgtatggggctcaatctgcctaagatcatgacaacattgttgctgcaatacctggcagctacttggttgtatcaaacgtgattggagaaaaggcattaccaaagggctgcactgctgccttaggaattcatgacaatttttttagatttgagctactgctatagtacttatagctgcaccttgtactctgtcgctgctcctggcaatgacattgatgctgttgtgatttttcctggccctgctgatattgctgangctgntgtggatgctgctgcttgtcatgaccctggaaatgatgttgatgatcgtgctcatggctctgtccttggtgatgctcatgggttatgtcctaatgtgcacatgggcctgttaacagcggtgacgtgt

SEQ ID NO: 85102 - DNA, 518 bp, Zea mays
atggtatctggctcatgtatcatcattgaattgctcgtaccggtccggaattcccgggtcgacccacgcgtccgcccacgcgtccggaccaactagcaacatagaaagcacaatagtgtaccaacaatgggggccaaaatattttgcttccttatgctccttggtctttctgcaagtgctgctaccgcgaccattttcccgcaatgctcacaagctcctatagcttcccttcttcccccatacctctcatcagcggtgtcttcagtatgtgaaaacccaattcttcaaccctacaggatccaacaggcaatcgcagcaggcatcttacctttatcacccttgttcctccaacaaccgtcatccctattacagcagttacctttggtgcatttgttggcacaaaacatcagggcacaacaactacaacaacttgtgctagcaaaccttgctgcctactctcagcaacagcagtttcttccattcaaccaactggctgcattgaactctgctgcttattt

SEQ ID NO: 85103 - DNA, 515 bp, Zea mays
cagtgtatctgaatgagaggagaggagaatcttctaccggtccggaattcccgggtcgacccacgcgtccgcccacgcgtccgcccacgcgtccggaaaacccaattcttcaaccctacaggatccaacgtgcaattgcatcaggcatcttacctttatcacccttgttcctccaacaatcatcagccctattacagcagttacctttggtgcatttattggcacaaaacatcagggcacaacaactcgtgctagcaaaccttgctgcctactctcagcaacaacagttacctttggtgcatttgttggcacaaaacatcagggcacaacaactacaacaactcgtgctagcaaaccttgctgcctactctcagcaacaacagtttctgccattcaaccaactagctgcattgaactctgctgcttatttgcaacaacaactagtactaccattcagccagccagctgctgcctacccccagcaatttcttccattcaaccaactagcagcattg

SEQ ID NO: 85104 - DNA, 501 bp, Zea mays
  unsure (1)..(501): unsure at all n locations
naggtgtctgaccaccgaaatatagcatgctcaaccggtctcggaattcccgggtcgacccacgcgtccggagaccaactagcaacatagaaagcacaatagtgtaccaacaatggtagccaaaatattttgcctccttatgctccttggtctttctgcaagtgctgctacgacgaccattttcccgcaatgctcacaagctcctatagcttctcttcttcccccatacctctcaccagcgttgtcttcagtatgtgaaaacccaattcttcaaccctacaggatccaacaggcaatcacagcaggcatcttacctttatcacccttgttcctccaacaatcatcagccctattacatcaattacctttggtgcatttattggcacaaaacatcagggcacaacaactacaacaactcgtgctagcaaaccttgctgcctacgctcagcaacagcagttacctttggtgcaattgttggcacataacatcagggcacaacn

SEQ ID NO: 85105 - DNA, 526 bp, Zea mays
agtgtgtcctgtcctagctccctacgtacagacgtaccggtccggaattcccgggtcgacccacgcgtccgcaactagcaacatagaaagcacaatagtgtaccaacaatggcagccaaaatattttgctgccttatgctccttggtctttctgcaagtgttgctaccgcaaccattttcccacaatgctcacaagctcctatagcttcccttcttcccccatacctctcaccagcggtgtcttcaatgtgtgaaaacccaattgttcaaccctacaggatccaacaggcaatcgcaacaggcatcttaccattatcacccttgttccttcaacaaccgtcagccctattacagcagttaccttttggtccatttgggggccacaaaaccatcaagggaccaaccacctaccacaaccttgtgctagcaaaccttggctgcatactctcagcaacatcagtttctttcatttcaaccaactggctgcatttgaactctgctgcttatttgcaacaacaattaccat

SEQ ID NO: 85106 - DNA, 511 bp, Zea mays
aggctttgcatagggagttatgcatgctctaccggtccggaattcccgggtcgacccacgcgtccgcccacgcgtccggccgtcgccgccctacggctcagatcttcgtcgtcatcttctccggggacgagcacccaaagatggtggtccttcaaccagatcggttcctgagcgagctgacgagcatgtacgagcggagcacggagaagggctccgtctgggtcaccatgaagcgatcaactctcaagggcaaggcacagttgcggaagatggagaataaggggcaggaggtagagcacaggtgcctcgtccgcgcctccaatggcaagaagaacatctccacctcggtttctctaaaggagtacacaaagtttcaagcttcatacgcaacagttcttaaggcccatatgcatgctctgaagaaaagggagaggaaagacaagaagaagactgcagatgctgagaaggcaattgagaccgcacccaagaagcagaagaaagcatcttcaaa

SEQ ID NO: 85107 - DNA, 523 bp, Zea mays
  unsure (1)..(523): unsure at all n locations
atgctgtactagtgngtcagtgggtagggaggagatatgcttgcaccggttcggaattcccgggtcgacccacgcgtccgcccacgcgtccggctttgtcttgggaggtgccattgggctatctatgtcattctgcacgtgccgtatcttgacgatgccccatacattcatgagaaattaatcagggaagttttatcacagtattgtgagtcatggagtagagatgatgctcaaaggcaatacattgtagaacttggtataccagaagaatggatgcatgaagctctggctctttatcacgaatactatggagataaacagggtgcactggagaatttgattcagtgtggcaactggaagaaagctcacactattttcgtgacttctgttgctcattctatgtttctgtcatctaaccatcaggaggtctggaagatcacaagtgccttggagaaccacaagtatgaaattgctgactgggaccttggtgccggaatatacatagacttctacgttctgaaga

SEQ ID NO: 85108 - DNA, 509 bp, Zea mays
aggtgtctgatagggaagttagagaacttgctccggtcggaattcccgggtcgacccacgcgtccgggttggcttctcctccccctccggttcgggttcgggttcgtgagggtcttccgggttggggttcctgggtgaacggatcgaaatggcggcgtcggatgttgagtaccgctgcttcgtcggcggcctcgcctgggccacggacgaccactccctccacaacgccttcagcacctacggcgaggtcctcgagtccaagatcatcctcgatcgggagacgcagaggtcccgcggcttcggcttcgtcaccttctccacggaggaggcgatgcggaacgccatcgagggcatgaacggcaaggagctggacggccgcaacatcaccgtcaacgaggcccagtcccgcggcggccgtggaagcggcggcggtgggtacggtggtggccgtggaagcggcggctacggcggtggcgggcgccgtgatggcggcggcggctacggcggtg

SEQ ID NO: 85109 - DNA, 497 bp, Zea mays
  unsure (1)..(497): unsure at all n locations
gtgtctctggcctatgatacatagtaagnctcaccggtttcggaattcccgggtcgacccacgcgtccgtccgcgcttcctccggactgtggtccgtttcgctcactcctgtgcccccgccgattccggtcatcctttgttggaaggaacgatggagcagaccttcatcatgatcaagcccgactgcgtgcatcggggcctgatcggcgacatcatcagtcgcttccagaagaaagggttctacctcaaggggatgaagttcatgaacgtggacaggtccttcgcgcagcagcactacgctgaccttttcgacaagcctttcttcctcgggttggtggagtacatcatttacggccccgtcgttgcgatggtgtgggaggggaaggacgtcgtgttgactggccgcatgatcattggggccaccaggccttgggaggcagaccccggtaccattcgtggggactacgccgtggaagtcggcaggaatgtcatccatg

SEQ ID NO: 85110 - DNA, 501 bp, Zea mays
  unsure (1)..(501): unsure at all n locations
agtagttcngaatgagggaggagggacgacatgcaccggtctcggaattcccgggtcgacccacgcgtccgggcagcgatgagtcgtcagagacgagatatgatgacactgaccataagggttcatctgggcccaagaaaaggaaatctggtaacacgtcggctgaaggtgaaccgtctcaagctgctgttgtgcgctatgctacggttgagtcgccatatcccgcaaagggaaggtctgcctcaaagcttccagtgtctgcacctggcagggcagcgcttcctagtgccaccccgaatctgaacattgggatggacatttggaatacttctcctgccttggctgttcctgcagtgcagggggaagcgaatcctgngttggcgcttgcccgacgtgatagcgttactcaactggatgaacgtgaattgaagagggagaggcggaaacaatctaacagggagtctgcaaggagatctaggttacgcaagcagcaagagtgtg

SEQ ID NO: 85111 - DNA, 520 bp, Zea mays
  unsure (1)..(520): unsure at all n locations
tgtgtcatctaaancctgggatatgccgtntanttcnttaccgtntcggaaatacaaccgcgacccacgcatccgcgcacacatacacggacgcttgcgtgtttttttctttcgcaaacctcatctcctagtggtggcttaaaaagcttgatgagtaccttctcactcgcagctacatcactggctaccaagcttccaaggatgacttggctgtctacacttcattttcatctgctccctcgtccaagtatatcaacgtaacaaggtggtttaatcacattgatgcgctcgtgaggctgatcggaattactgcatagggccaaggtgtgaaggttgaatcgtcagcagttccttcagccccaactccatatgttgctgaagcacatgccccatctgctgatgatgactactacgattaatgttaccctttttgtgaagaaacccaagatgaaaataaagcttcttaatatcgtgcttcatcttccaatgctttttgcaagaagaaagaatctgtgtaata

SEQ ID NO: 85112 - DNA, 521 bp, Zea mays
  unsure (1)..(521): unsure at all n locations
agtgtgttagttgntcgtggggagggaggagtgagcttgcaccggtccggaattcccgggtcgacccacgcgtccggtccaggacaccatcgaccccaacgcacggatcgagttccgcaagaacacccaggacgagccgcacaagcgcaagcccgacatcagccgcgccaaggagttcctcgggtgggagccgaagatccccctgcgtgagggccttcccctcatggtctccgacttccgcaagcgcatcttcggcgaccaagacgctactgccaccaccggaaaccagcaaggttaggatgaaggagcgcacatgacatggaaatttttggtggccctgcttctagctgcttggttgctctctccttactgacaaaagctatgggccacgtagttcgttgggaatgtgttactggaatacctcggctgatgctgtaatgccattctttttttcccctgtattttttctttctcagttctctcagtccttagctatacaaaaaaaaagttcagttgaacag

SEQ ID NO: 85113 - DNA, 520 bp, Zea mays
  unsure (1)..(520): unsure at all n locations
aatgntttctgaaaaggggggtgaggagtatatcttgcaccggtccggaattcccgggtcgacccacgcgtccgcaattggttattgatgaagctgaacgcattctccatgatgcactctgtgtcataaggtgcttggtcagcaagagatttttgattgctggtggtggtgctccagaaatagagatgtcaatgcagctggctgcttgggcaaaggagcttcgagggatggagagttactgcatcaaggagtttgctgaggcgcttgaggtcatcccttacacattggctgagaatgctgggctcaacccaatctccattgtcaccgaactcaggaatcgccatgccagaggtgagaagaacactggcatcaatgtgaggaaagggcagatcacaaacatcctggaggagaatgtcgtgcagccgttgctggtgagcacaagtgccattacgttagcctgcgagtgtgtcagaatgatcttgaagattgatgacattgtcactgttaggtaagagcgtgn

SEQ ID NO: 85114 - DNA, 514 bp, Zea mays
  unsure (1)..(514): unsure at all n locations
agtnttttncccatagaactcattgaatagctctaccggttcggaattcccgggtcgacccacgcgtccgcccacgcgtccgcggacgcgtgggtggcggtttctttcgcaaacctcagctccgagggggggcttaaaaagcttgatgagtaccttctcactcgcagctacatcactggctaccaagcttccaaggatgacttggctgtctacacttcgttttcgtctgctccctcgtccaagtatatcaacgtagcaaggtggtttaatcacattgatgcgctcgtgaggctgagcggaattactgcagagggccaaggtgtgaaggttgaatcgtcagcagttccttcagccccaactccagatgttgctgaagcacaggccccagttgctgaggaggacgacgacgatgatgttgacctttttggtgaggagaccgaagatgagaagaaggctgctgaagagcgtgctgcagctgccaaggcttctggcaagaagaaagaatctgggaagt

SEQ ID NO: 85115 - DNA, 517 bp, Zea mays
  unsure (1)..(517): unsure at all n locations
agtnnattcgaattatatgaggtataaggaagtcttctaccggtccggaattcccgggtcgacccacgcgtccgaagaaagaatctgggaagtcatcagttttacttgatgtgaagccatgggacgatgagagtgacatggccaagctcgaggaagctgttaggagtgtccagatggaagggttgctctggggcgcatccaagcttgtcccagttggatatggtatcaagaagctgcaaatcatgatgaccatcgtcgacgaccttgtctctgtcgacactctcattgaggactatctgtgcgctgagccagttaacgagtacgtacagagttgcgacatagttgccttcaacaagatctaggcgtgactttcgatcagtccttcccctggggtgctggcgatggtggtggctgggcaatgcaccagcctaatttatccatagctatatgtctgctttgtgtggccagtgatattgccgtgagtatttttggatcctattcgagtcgaatgtaccag

SEQ ID NO: 85116 - DNA, 510 bp, Zea mays
  unsure (1)..(510): unsure at all n locations
acttgtttctgggttgtggggatggaggaggagagcttgcaccggtttcggaattcccgggtcgacccacgcgtccgcccacgcgttcgattcttcaacccttcctgatccaaccgggcattcggaacaaggccttctgccttttatcacccttgttcctgcaacaaccgtcagccctattacagcagttacctttggtgcatttgttggcacaaaacatcaaggcacaacaactacaacaacttgtgctaggaaaccttgctgcctactctcagcaacagcagtttcttccattcaaccaactggctgcattgaactctgctgcttatttgcaacaacaactaccattcagtcagctagctgctgcctacccccagcaatttcttccattcaaccaactggcagcattgaactctgctgcttatttacaacagcaacaactaccaccattcagccagctagctgatgtgagccctattgccttcttgacacagcaacagttgttgccgn

SEQ ID NO: 85117 - DNA, 506 bp, Zea mays
atgataatgtgaatactgttgacgaaggttagtcttctaccggtttggatttccgggtcgacccacgcgtccgggttgacaatattacatgtgcaccgaccacaaaccaaataatcagcaaaatggatttcgagtggcatctcaacatgcacaaccttaggtaaaagcttgagatggagaaactaaaagtttccaacagcgaacacaaagagtggctggggctggcctaggaggggaggaagaagagtgccatcacacgaaaaccatgacctcacagcattggtgcagtaacatttcactatttagagcctatgatcaggctttaaagagtggctggggctggcctaggaggggaggaagaagagtgccatcactaacaaaacagcccctcgaaccatggttgttttgcgacctctaaaggtggtaataactaacttggaagaaggaaaagtactagaccttgatggcaaaatgtggcctgatgcttctgatactgatgcttcctc

SEQ ID NO: 85118 - DNA, 506 bp, Zea mays
agctgttattgtgattgtggggatgatgggtgagcttctaccggtccggaattcccgggtcgacccacgcgtccgcactcgtagagagaaggaaaaatatccccaaaccctagctcccgatctcgatggcgaacgctcgcgtcttcttcgacatgaccgtcggcggcgccccggcgggccggatcgtgatggagctgtacgccaacgaggtgcccaagaccgcggagaacttccgcgcgctgtgcacgggcgagaagggcgtgggcaagtccgggaagccgctccactacaagggctccaccttccaccgcgtcatccccgagttcatgtgccagggcggcgacttcacccgcggcaacggcaccggcggcgagtccatctacggcgagaagttccccgacgagaagttcgtgcgcaagcacaccgcccccggtgtgctctccatggccaacgccgggcccaacaccaacggctcccagttcttcatctgcaccgtcgcgacccct

SEQ ID NO: 85119 - DNA, 499 bp, Zea mays
  unsure (1)..(499): unsure at all n locations
tagtagtctctgagtacatgaattatagcatgcttctaccgtccggaattnccggtggacacgcgtccgagcgtggattcgagcgccaagggccgcttttccccagcctcgggggaaagccgtagtggaccgttaccatgtgctcgtcgggacaggctccactcagctctttcaggccgtgctgtacgcgctctcacctgcaagtgacggcacacccatgaacgtcgtctcaccggcaccgtactactcgtcttacccatctgtgaccaactatctaaactctgcgctctaccgttgggctggtgatgccaatacatttgatggcgacacatgtattgagctcgtctgctccccaaacaaccctgatggcggcctccggaagcctgtcatcaaatccaagtctagcacgcctgtatatgacttcgcctactactggccgcagtacacacccatcaccgaggcagctgcccatgacatcatgctgttcaccgtctccaaa

SEQ ID NO: 85120 - DNA, 510 bp, Zea mays
agtgtatctggaaatgaaatatagcatgctgcaccggtccggaattcccgggtcgacccacgcgtccggactgaatcacggatcattcggattgcacgggggtctggtcgtcctgtcagggatgtcgtcgacatgctggaagagtataagcggcttgctaaaatctggggcaagatgaagggtctcaagatcccaaagaaaggggagatgagtgcactgtcccgcaacatgaatgttcagcacatgagcaaggtccttcctccgcagatgcttaaacagattggtggcatgggcggtctgcagtctctgatgaaacagatgggatcgaaggagatgagcggaatgtttggaggcatgggtggcgagcggtaattttacgtcctgtttttggtggatcgtcgctgtgaacttgtgatgctaaattgagagggtttagtgctgtggtctgatcatcgtcagagactcagaggtttccatgaagatcagcctgcgaacaggcttactgtagct

SEQ ID NO: 85121 - DNA, 510 bp, Zea mays
agtgttctgataagaggtaaaagcatgctctaccggtccggaattcccgggtcgacccacgcgtccgccgatcgacaccatgagggtgttgctcgttgccctcgctctcctggctctcgctgcgagcgccacctccacgcatacaagcggcagctgcggctgccagccaccgccgccggttcatctaccgccgccggtgcatctgccacctccggttcacctgccacctcctgtgcatctcccaccgccggtccacctgccgccgccggtccacctgccaccgccggtccatgtgccgccgccggttcatctgccgccgccaccatgccactaccctactcaaccgccccggcctcagcctcatccccagccacacccatgcccgtgccaacagccgcatccaagcccgtgccagctgcagggaacctgcggcgttggcagcaccccgatcctgggccagtgcgtcgagttcctgaggcatcagtgcagcccgacggcgacgccctactg

SEQ ID NO: 85122 - DNA, 500 bp, Zea mays
acagtatctgagtcatcgactaggtagaatgactctaccggttcggaattcccggctcgacccacgcgtccgagcgtggattccaacccgaggtgccgtgtctcccaggctcgtggcgaatgccgttgtgtaccgataccatgtgctcgtcgggacaggctccactcagctctttcaggccgtgctgtacgcgctctcacctgcaagtgacggcacacccatgaacgtcgtctcaccggcaccgtactactcgtcttacccatctgtgaccaactatctaaactctgcgctctaccgttgggctggtgatgccaatacatttgatggcgacacatgtattgagctcgtctgctccccaaacaaccctgatggtggcctccggaagcctgtcatcaaatccaagtctagcaagcctgtttatgacttcgcctactactggccgcagtacacacccatcaccgaggcagctgcccatgacatcatgctgttcaccgtctcca

SEQ ID NO: 85123 - DNA, 496 bp, Zea mays
  unsure (1)..(496): unsure at all n locations
naattgattctcctcgtcatgaccgcaccggtctcggaattcccgggtcgacccacgcgtccgccctggcttccaacgccgaggtgccggtttctccacaggctcgtggggaatgccgttggggacgggtaccatgtgctcgtcgggacaggctccactcagctctttcaggccgtgctgtacgcgctctcacctgcaagtgacggcacacccatgaacgtcgtctcaccggcaccgtactactcgtcttacccatctgtgaccaactatctaaactctgcgctctaccgttgggctggtgatgccaatacatttgatggcgacacatgtattgagctcgtctgctccccaaacaaccctgatggtggcctccggaagcctgtcatcaaatccaagtctagcaagcctgtttatgacttcgcctactactggccgcagtacacacccatcaccgaggcagctgcccatgacatcatgctgttcaccgtctccaaan

SEQ ID NO: 85124 - DNA, 517 bp, Zea mays
agtggtatctggttattgacattaaagtgtagctgcaccggttcggaattcccgggtcgacccacgcgtccgcaacttgtgctaggaaaccttgctgcctactctcagcaacagcagtttcttccattcaggcaactggctgcattgaactctgctgcttatttgcaacaacaactaccattcagtcagctagctgctgcctacccccagcaatttcttccattcaaccaactggcagcattgaactctgctgcttatttacaacagcaacaactaccaccattcagccagctagctgatgtgagccctattgccttcttgacacagcaacagttgttgccgttctacctgcacgctgcgcctaacgctggcaccctcttacaactgcaacaattgctgccattcaaccaacttgctttgacaaacccaacagcgttctaccaacaacccatcattggtggtgccctcttttagattgcttatgagttatagttcaataatgaagttttttggatga

SEQ ID NO: 85125 - DNA, 523 bp, Zea mays
  unsure (1)..(523): unsure at all n locations
aagtgntatctgagcctagctcacatccngatgtactgtaccggtctcggattcccgggtacgacaccacgcgtgcggacgcgtcctccggacgcgtgggcggtctcgttggctctcggtgctcttctacacccaggtccctcctaacatcttctgcaaccgcggcaagctctacgagttctccagcacgcagagcatgccaaaaacacttgaaaagtaccaaaaatgcagttttgcagggcctgaaacagcactccagaatagagagaatgagcaactgaaaagtagccgcaatgagtacctcaaactgaaggcacgtgttgataatttacagcggactcaaaggaacttgcttggtgaagatcttgagtcattaggcataaaagagctggagcacctggagaagcagctcgattcgtccttgaagcacataagatctacaaggacacaacacatggttgatcaactgacagaacttcagaaaaaagaacaaatgttttgtgaagcaaataagtgtcttcca

SEQ ID NO: 85126 - DNA, 521 bp, Zea mays
  unsure (1)..(521): unsure at all n locations
aggtntatctgtgccacgaactgatcgcatnactcccncnnntnttcggaattcccgggtcgacccacgcgtccggcaaggactccgccaagaagactgcgaagaagtcgcgcgtcaagtgcttcatcaagcgggtcaacttcactcacctcatgcccacccgctacaccctcgacgtcgatttcaaggatgtcgccaccggtgggcccgacgcactctctacccacgacaagaaggtcgccgcctgcaagacggccaaagcgcgccttgaggagaggttcaagaccggcaagaacaggtggttctttaccaagctccgcttctagatgctcggcctcccgaatagtcctgctttagctgtcgatttgttgtatcggacacactccatctctgttttcgtattaccatgaatatttcgtgtttagtcctggggctctcagagataaatttgctaagatatgccgttgttgtgttacatgttttcgtgataggtctggttaaaattttgttctgtttaaaan

SEQ ID NO: 85127 - DNA, 513 bp, Zea mays
aggggattctgctactcgacagaatagcattcctctaccggttcggaattcccgggtcgacccacgcgtccgcaaaaacacaccaagcgaagcgcactagcaacgacctaacaccaatggctaccaagatattagccctccttgcgcttcttgcccttttagtgagcgcaacaaatgcgttcattattccacagtgctcacttgctcctagtgccattattccacagttgctcccaccagttacttcaatgggcttcgaacatccagccgtgcaagcctacaggctacaactagcgcttgcggcgagcgccttacaacaaccaattgcccaattgcaacaacaatccttggcacatctaaccctacaaaccattgcaacgcaacaacaacaacaacagtttctgccatcactgagccacctaagccgggggaaccctggtaactacttggaacagcagcttgttggattcaaacccattggttttgccaacgtaactgcatacaagcaacaca

SEQ ID NO: 85128 - DNA, 513 bp, Zea mays
agtgtatctgcaaacgaatatatagcatcctctaccggtctcggaattcccgggtcgacccacgcgtccgcccacgcgtccgcggacgcgtgggctagccatcaagtacaacaaggcagtgcaggagggggacgaactgcctcctgagaaacttgcgatagcaaatgtgggtcggcaagatgcaaaaaaagcatttggaagagcatgtgtcgaatttgatgtcatcaaacatagttcagaccctaggaaccatgctcgacacggttgtcttttagtctactaatagtattgttgtcccaaactgaaacatagccacactatcgaagcacacgtgcgatgagcttgacgccgggtacattttggttctaaggtttgtttttgaatggatttgtctacatttcattgttgttaaacttcctgccttttctatcaaagcttcagtgcgttctagttatgtttaagccaaggtggctccagatgtcagttgggatgtcattgccctgggagaactgt

SEQ ID NO: 85129 - DNA, 505 bp, Zea mays
  unsure (1)..(505): unsure at all n locations
aggnnntntnccccacgctacacagncagaacagtactcgttcggaattcccgggtcgacccacgcgtccgcccacgcgtccgggcgtgtacagcgactacgacgtgcgcaacgacaaagctgcaggcggcagcagcagcagcaggaggccggagatggcgtggtacgagcggcgccggccacggctcgggatcgtgtcgcgcaaggggaggcgcgtggtcgagaaccaggcggccgtggcgcagctggcggcgtcggtcgggttcgacgtggacatcatggagacggccaacggcgcgccgctctcggccgtgtacgcgtccgtgagctcgtacgatgcgctggtgggcgtgcacggcgccgacctgaccacgttcctgttcctgcgccccggccgcgcggcgctggcgcagatcgcgccgctcggcatcaccatgctctcgcgcaacctcttcggcgtgccggcggccaggatggggctgcactacgtgcagtacgacgtgag

SEQ ID NO: 85130 - DNA, 509 bp, Zea mays
  unsure (1)..(509): unsure at all n locations
agtgntatctgagccatcgacaagataggcangcttcaccggttntcggaattcccggctcgacccacgcgtccgcccacgcgtccgcccacgcgtccgcccacgcgtccgcccgcccccaattccaaatccggagtgcccgcggccacagaccgacccccatcacacacgcgcatcgcgccaccccatccgtcaccgtcgacccgcgagcacccatggcgaagggaggaggtggaggccagcgcgagggtagcgccctgaagagggcggcgatcgtcgcaggggggctcgcgctggcctgggtcaccgtggagaccgctttcaggcccttaatgggccgcctccgcgctgccatctgcagctccaccgagaccgcccgcgaccccgaccaggaggagcctcccgcgcctgcctctgcggcggaggcggagaaggcgtccgcaccagaggagcctgccgcggtggatgagaaagtcgaggagaaggtggtcgagttggaggagaaggtg

SEQ ID NO: 85131 - DNA, 504 bp, Zea mays
  unsure (1)..(504): unsure at all n locations
agtgttttctgngcatctgcaattatatgaatgcttctaccggtctcggaattcccgggtcgacccacgcgtccggcaaagcggcagtgcgtacagaggatcgtcgaacagaacagcatgaagatggtcatcggtctcgtcgtgtgcctggctctgtcagctgccagcgcctctgcaatgcagatgccctgcccctgcgcggggctgcagggcttgtacggcgctggcgccggcctgacgacgatgatgggcgccggcgggctgtacccctacgcggagtacctgaggcagccgcagtgcagcccgctggcggcggcgccctactacgccgggtgtgggcagccgagcgccatgttccagccgctccggcaacagtgctgccagcagcagatgaggatgatggacgtgcagtccgtcgcgcagcagctgcagatgatgatgcagcttgagcgtgccgctgccgncagcagcagcctgtacgagccagctctgatgcagcagcan

SEQ ID NO: 85132 - DNA, 509 bp, Zea mays
  unsure (1)..(509): unsure at all n locations
agtgtgttctgtaagggggggaaggggaaactctcccggtccggaattcccgggtcgacccacgcgtccgcccacgcgtccgcggtgagccgtgcgtccctcgaccagaagctcgccctcgccaagcgtggctcccgagaggcgaccctcgccggagccaaggcggcagcggtggcgactatcgcctccgcgatccccaccctggccagcgtgcggatgctgccatgggccaaggccaacatcaaccccaccggccaggcgctcatcgtctccacggtggctgggatggcctacttcatcgncgccgacaagaagatcctgtcgctggcgaggcgccaactcgtcgagcaagcccctgagcacctaaagaacacctccttccaggcaccggccgtcccaacccagctttcttcaggcgtgaaacgagacctcggtcagaaggtaggtccctacctttttttcagttggccaaggaggccccaattggcccccgtggatgcctgataaaa

SEQ ID NO: 85133 - DNA, 516 bp, Zea mays
atgtgtttttggtatatcgacatataagctagctctcccggtccggaattcccgggtcgacccacgcgtccgcggacgcgtgggtcggaaactgcaccacagagcatgccacacgcaacgccttgatcctgtgcgagaaggcaagccatctagaggtcccagtagctgagggcagccatgagcctctcaagggaggaaagccgcacgttgctgacttcgttcatggacctgatggcctcgggaacgtagatcttcctgatcccactatcaagaaagtggaggaaagtgctaccgacttcttggttgataaggtctcgcgatttcctggagaggtctctgtgctcgccttgggtcctctgacaaacatagcattggccatcaagaaggatccctcattcgtgaaaaacgttaagaagatcgttgtgctgggtggagcgttctttgcggctggaaatgccactccttccgctgaagcaaatatccacagtgatccggaggcagccgacatggttttca

SEQ ID NO: 85134 - DNA, 508 bp, Zea mays
  unsure (1)..(508): unsure at all n locations
agtgnatttntcactgcagaaaagatatcttccccgttcggaatcccgggtcgacccagcgttcgcccgatgacctacagctatgatgccgtcttagtcgaaccttgcttattggcctcccggggctcgctgtnaccatcctctgcatcctagtccggtccgncttcgcggagttctggctcgacgagttcaccacggacggcgacgtncgcagagactacgaccgttctggccggcaggtggcgtcgcttgtcctcgaccagcgttctggcgctggcttcaactccacgcgcaagtacctcttcggcgagttcagcgtggagatgaagctcgtcggcggcaactccgctgggactgtcacctncttctacctgacgtnncgcgagggcgacgagatcgacatggagttcatgggcaacttcagcggctccccgaggtgctcaacacgaacatgtgggccaacggcgacagccagaagagcaccccatctacaccgtgggttacaccc

SEQ ID NO: 85135 - DNA, 517 bp, Zea mays
aaggtatctgagatagggggataagggagagctctcccggtccggaattcccgggtcgacccacgcgtccgcccacgcgtccggatttccctcatgtcgagaggtatttctggaccatggttaaccagcctgacttcaagaaggtcattggtgaggtcaagcaggcagagtctgcacctcctattccgaaaaaggctgctccttctaaggagccaaaggcaaaggatgtcaagaaggaggctccaaaggaagcccccaagccaaaggtggttgaggcaccagcagaagaggaagcaccaaagccaaagccaaagaatcctcttgacttgctgccaccaagcaagatggtccttgatgactggaagaggctatactcaaacacaaagactaacttccgggaggttgccatcaaaagtttctgggacatgtacgacccagagggctactctttgtggttctgtgactacaagtacaatgatgagaacaccgtctcctttgtgaccctgaacaaggttgg

SEQ ID NO: 85136 - DNA, 516 bp, Zea mays
agtgtatcgtgtacccgccatatcagatatctctctaccggttcggaattcccgggtcgacccacgcgtccgtattgagaccaacaagcaacatagaatgtggaatccagtagcaacaacagagcaacgggggcgaccaagatattttccctccttatgctccttgctctttctgcatgtgttgctaacgcgacaattttccctcaatgctcacaagctcctatagcttcccttcttcccccataccttccatcaatgatagcttcagtatgtgaaaacccagctcttcagccctataggctccaacaagcaatcgcagcaagcaacatacctttatcacccttgttgtttcaacaatcgccagccctatctttggtgcagtcattggtacaaaccatcagggcacagcagctgcagcaactcgtgctacctgtgatcaaccaagtagctctggcaaacctttctccctactctcagcaacaacaatttcttccattcaaccaactgtctacactg

SEQ ID NO: 85137 - DNA, 519 bp, Zea mays
agtgtctgcgtgtactcgaacatacaagctatcctccgtaccggtccggaattcccgggtcgacccacgcgtccgcggacgcgtgggatctataaatggctatctcccacatatgaactagtctctatcatgagccaatccagatcagcaaagcggcagtgcgtagagaggatcgtcgaacagaacagcatgaagatggtcatcgttctcgtcgtgtgcctggctctgtcagctgccagcgcctctgcaatgcagatgccctgcccctgcgcggggctgcagggcttgtacggcgctggcgccggcctgacgacgatgatgggcgccggcgggctgtacccctacgcggagtacctgaggcagccgcagtgcagcccgctggcggcggcgccctactacgccgggtgtgggcagacgagcgccatgtaccagccgctccggcaacagtgctgccagcagcagatgaggatgatggacgtgcagtccgtcgcgcagcagctgcagatgatgatgcagctt

SEQ ID NO: 85138 - DNA, 516 bp, Zea mays
ggttattctgtactacgaataagaagaatgcctctaccggtccggaattcccgggtcgacccacgcgtccgagaccaactagcaacatagaaagcacaatagtgtaccaacaatggcagccaaaatatgggggcctccttatgctccttggtctttctgcaagtgctgctaccgcgaccattttcccgcaatgctcacaagctcctatagcttcccttcttcccccgtacctctcaccagcggcgtcttcggtatgtgaaaacccaattcttcaaccctataggatccaacaggcaatcgcagctggcatcttacctttatcacccttgttcctccaacaatcatcagccctattacagcagttacctttggtgcatttattggcacaaaacatcagggcacaacaactacaacaacttgtgctagcaaaccttgctgcctactctcagcaacagcagtttcttccattcaaccaactagctgcattgaactctgctgcttatttgcaacaacaac

SEQ ID NO: 85139 - DNA, 504 bp, Zea mays
  unsure (1)..(504): unsure at all n locations
tgtgnatcnaaccatcgatatgaaagtatgcttcaccgggtctcggatattcccgggtcgacccacgcgtccgcgcgtgtcttgctgtagttaggtgctgctgtgtctggtctcctccggtagcaactgtggtctgatggaacagtaacaatgcttattgaatccagctagttgcttatttgtggatcctctctctttgttgttggccacctttatctcgtgatgtttgtgtgcatgtgaatactctgaatgtgcatttcgaagtttgagaagttacgacgcgttaaaaaaaaagcgtgcaccacagcccgtcccgagcgctgcacgacctcacggggatcaagaagcactactgccagaagcacagccagaagaaggtcaagtgctacaggtgcaacatgcgctacgacgtttagtacgacttgaatgcgcacgtcaagacctgcagcgaccgcaagtatctcttccactgcaacgccctcttctccaggtcccgtcctgcgt

SEQ ID NO: 85140 - DNA, 520 bp, Zea mays
  unsure (1)..(520): unsure at all n locations
tatgtatctgngaagggggggaaatgatatatactctcaccggtccggaattcccgggtcgacccacgcgtccggaccaactagcaacatagaaagcacaatagtgtaccaacaatggcagccaaaatatttggcttccttatgctccttggtctttctgcaagtgctgctaccgcaaccattttcccacaatgctcacaagctcctatagcttcctttcttcccccatacctctcaccagcggtgtcttcaatatgtgaaaacccaattcttcaaccctacaggatccaacaggcaatcgcagcacgcatcttacctttatcacccttgttcctgcaacaaccgtcagccctattacagcagttacctttggtgcattcggtggcacaaaacatcaaggcacaacaactacaacaacttgtgctaggaaaccttgcttgctactctcagcaacagcagtttcttccattcaaccaactggctgcattgaactctgctgcttatttgcaacaacaactac

SEQ ID NO: 85141 - DNA, 512 bp, Zea mays
  unsure (1)..(512): unsure at all n locations
aatgtatgtgaatgtgggacagggagcacctccccggttcggaattcccgggtcgacccacgcgtccgcaactagcaacatacatagtgaagtacactagccacatcttagcaccaatggccgcccgggtttttgcccttcttgcccttcttgctctttcaacaaacgttgctaccgcgactattattccacaatgctcacaacaattcctctctccggtgacagccgcgagatttgaatacccaactatacaatcctacaggctacaagaggccatcgcagcaagcatcttacggtcgttagcattgactgtccaacaaccatatgccctattgcaacaaccatccttagtgaatctatatctccaaagaatcgtagcacaacaactacaacaacaattgcttccaacaatcaatcaagtagttgcagcgaaccttgatgcttacctncagcaacaacaatttcttccattcaatcaactagctggggtgaaccctgctgcttacttgcag

SEQ ID NO: 85142 - DNA, 517 bp, Zea mays
  unsure (1)..(517): unsure at all n locations
tatggtatctggataaagacaataaagtatnactgcaccggttcggaattcccgggtcgacccacgcgtccgagacaacactaagggttgatacttcaaggggagaaacacttcgcataaattttgatgtggacctttccagcccttcaatgttctataattagcctggatgcaatggacatcagtggacaggagcacctagatgtgaaacatgatgtattcaagcagcgaattgatgcccatggcaatgttattgcgactaggcaagatgtagttggtgggatgaagatggaggcacctctacaacatcatggtggaaggcttgaacacaatgaaacctattgtggctcttgttatggtgcacaagaatctgatgatcaatgttgtaacacatgtgaagatgttcgtgaagcctacaggaaaaaagggtggggtgtatcgaatccagatttgcttgaccagtgcaaaagggagggctttcttcaaagtataaaggacgaagaaggcgaaagatgcn

SEQ ID NO: 85143 - DNA, 515 bp, Zea mays
  unsure (1)..(515): unsure at all n locations
atggtatctgaatatgaggagaaaaggtagtcctctaccggttcggaattcccgggtcgacccacgcgtccgaagacggacctgtaggtgataaaactcatgtttctactcgagtaatgggaacctatggatatgcagcaccagaatatgtcatgactggtcatctgacatcaaagagtgatgtctacagcttcggggtggtgcttcttgagatgatgtcagggcgcaggtcgatggacaagaaccgcccgaacggggagcacaacctggtggaatgggcgcgccccctcctaggcgagaggcagcggttctacaagctaatcgaccctcgcctggagggcaacttctcggtgaagggcgcgcagaaggcggcgcagctagcgcgcgtgtgcctgagccgggaccccaaggcgcggcccctgatgagccaggtggtggaggtcctgaagccgctgcagaacctcaaggacatggcgagcgcctnctacttcttccagacgatgcaggccgagcgg

SEQ ID NO: 85144 - DNA, 516 bp, Zea mays
  unsure (1)..(516): unsure at all n locations
aggtatctggcaccgaaatattagtcaatctctcgtaccggttcggaattcccgggtcgacccacgcgtccgcaaagataaggctaccgggaaggagcagaacatcaccatacgatcctcgggtgggctggcagaggctgacatccagaagatggtgcaagaagctgagctgcatgcccagaaggaccaggagcggaaagccctcattgacatcaggaacaatgccgacaccactatctacagcatcgagaagagtcttggagagtacagggacaagatcccggcagaggttgcatctgagatcgaggcagccatcgctgacctccgccaggagatggcctcggatgacattgagaagatcaaggccaagcttgaggctgccaacaaggctgtctcgaagattggacagcacatgtctggtggtggctctggcggctcgcagtcaggatctggacctcagggtggcggcgaccaggcgccggaggcagagtatgaggaggttaagaagtgaggctn

SEQ ID NO: 85145 - DNA, 513 bp, Zea mays
aggtatcgtggcctagtccgtccgcactgcggtaccggtctcggaatcccgggtcgacccacgcgtccgcaccactggtggttttgaggctggtatctccaaggatggccagacccgtgaacatgcggtccttgcgttcacccttggagtgaagcagatgatttgctgctgcaacaagatggatgcaaccactcccaaatactccaaggcacgttatgaagagattgtgaaggaagtctcatcctacctcaagaaagttgggtacaaccctgataagattgcctttgttcccatttctggttttgagggtgacaacatgattgagaggtccaccaaccttgactggtacaaaggcccaaccctgcttgaggctcttgaccagatcaccgagcccaagaggccttcagacaagcccctgcgtctgcccctccaggatgtgtacaagattggtggtattggaactgtaccggttggtcgtgtggagactggtgtcatcaagcctggtatggttgg

SEQ ID NO: 85146 - DNA, 504 bp, Zea mays
  unsure (1)..(504): unsure at all n locations
agtgtatctgngcacttgaaaagaacagctatacttctaccggttcggaattcccgggtcgacccacgcgtccgacttactccatatggtggtggcataaatgatacggcaatgttctggggtgtaaaattgtgacaatgatctgctgatgcaagccggcaaacttgggaatgtgcaatcagagctgcttctccgcaaggactcccggactttcactttcgaaaagggatgggccttcccacgccgagtttacttcaatggtgataattgtgtcatgccatctcctgaaaattatccatggctgccgaatgcaagccctctaacaaaaccattggcactcccattcttggtattctgggttgccttggctgctctgctggcttatgcatgattagtgggatcaagaggtttagcaagtttcaagttgatgtcagattccatgaggtgcactgcaacaagtcatttgttcattcaattccatggttgcacagaaaagatgaggcg

SEQ ID NO: 85147 - DNA, 497 bp, Zea mays
aggtattggatgtgggtaaaagttatcttctaccggtctcggaattcccgggtcgacccacgcgtccggcagtacgaggagcctgagcaaccgatgcagagcatggatgagatcatgcagatcctggctgaggcgaccattccagcagctggtccccatggactcaatcagttcctgaacgacggccttgacctcgacgatgacatggacgacctggactcagataccgatcttgacctggaaagcagtggggaaatcgtgtatgctatttgacagcagcgaggcaatgcgtatcatcagtcgtgctcagatcgtttgttgcgccgcaggttaccgagataattagagagacaggggggaggtatctgctggagatgctgctcgtgtctgatgccgtgatgcccccctttttttcatcctgttatgtttggctgttgtttggttgtggtgcacctccagtgttttacaacagtttggcccttcggaattggttgtgc

SEQ ID NO: 85148 - DNA, 506 bp, Zea mays
agtgtattctgagcataagaaatagagaagccatacttctaccggtctcggaattcccgggtcgacccacgcgtccgagccgctccatcagcgagcacgtcgagcaggggcagacggtggccgcgtacggcggcggcgggatggtcctgatgaacaaggcggcggaggggtacaccaccttcgccgacgcgcacgtgctggccgcgtcgcacgtgagccacgccgcggggtcgaggatcgcggcgtacgccaggtcggcgcccaggcccacggcgtccatcgcgttccggggcacggtgatggggtcgtccccggcgccgtccgtggccttcttctcgtcgcgcgggcccaacagggcgagcccgggcatcctgaagccggacatcacggggcccggcatgaacatcctggcggcgtgggcgcccagcgagatgcacccggagttcgcggacgacgtgagcctgcccttcttcgtggagtccgggacgtccatgtcgacgccgcac

SEQ ID NO: 85149 - DNA, 516 bp, Zea mays
  unsure (1)..(516): unsure at all n locations
ttcgttttctgcgnttcggtnttcattgnangagcaaccggttctgaataaccggctcgacccacgcgtccgagagcaactatcatcatagaaagcacattattgtaccaacactggcacccaaaatatttggcctccttatgcttcttggtctttatgcaagtcctgataccgcgaccattttcccacaatgctcacatgctcctataactacccttactaccccgtacctctcaccaacattgtattcggtatgtgaaaacccacttcttcaacactatacgatccaacaggcaatatgcactggcatcatacctttatcacccttactacttcaacactcatcacacctattacagcagttacctttgctgcatacatttgcacaaaacatcactgcacaacatctacaacaactcgtgctagcaaaccttgctgtctactctcagcaacagcaagttcttccattcaaccaactacctgcatagaactatgctgcttatactcaacaacaag

SEQ ID NO: 85150 - DNA, 512 bp, Zea mays
aatgattctgtagagcacgaaaggggaactctcccggtccggaattcccgggtcgacccacgcgtccgcttatcacaatgggtttaggatgagaggtctatcttaatttcatgggaaatgagtttggacatccttaatggatagatttttcaagaagtccgcaaagacttccaaagtggtaggttattccaaggaataacaacagctatgacaaatgtcgtcgaagatttgacctgggggatgcagactatcttaagtatcaattgtatcaagaattttgatcaggcattgcaacatcttgagcaaaaatatgaattcatgacatctgatcaccagtatatttcccggaaacatgaggaggataaggtgattgcgttcgaaaagggagatttggtatttgtgttcaacttccactgcaacaacagctattttgactaccgtattggttgtcgaaagcctgcggtgtataaggtggtcttggactccgacgctggactatttggtggatttaa

SEQ ID NO: 85151 - DNA, 513 bp, Zea mays
  unsure (1)..(513): unsure at all n locations
atgtatctgaatagttgaggaagggggatcgtccccggtccggaattcccgggtcgacccacgcgttcgcggacgcgtgggccctggtcatcaactatgatctttccacccagccagagaactacctgggtcgtattggtcgtagtggtcgctttggtaggaagggtgttgccatcaactttgtgacccgcgacaaccaaacgtttgctgtttgacattcagaagttctacaacgtgttgattgaagaactggctggcaatggttcttaacctttgggatcaattttgaggaaaaaccataccaaaaaaggttggtgagggaacttggtaaggcttggttttgtcgaaataccgtgggagagggggtgataaggccggtggggtttctatgttgaagtcgtggtcatggacaatttgtgattntttctcctttatgccatgttttggaatttttgtagctgcctaggccttgtggtaatgtgctgctgtgggggttcattagtgtgaagagga

SEQ ID NO: 85152 - DNA, 514 bp, Zea mays
  unsure (1)..(514): unsure at all n locations
agtgtttctgccatatgaataaagaggatacatctaccggtccggaattcccgggtcgacccacgcgtccgcccacgcgtccgcccacgcgtccgcgcaaattgcaccaagaaatccatcgagaggccggggacaggggaattaatggcgtcgtcgtctagcagcagccaccgccgcctcatcctcgcagccgccgtcctgctctccgtgctcgcggctgccagcgccagcgccgggacctcctgcgtgccggggtgggccatcccgcacaacccgctcccgagctgccgctggtacgtgaccagccggacctgcggcatcgggccgcgcctcccgtggccggagctgaagaggagatgctgccgggagctggcggacatcccggcgtactgccggtgcacggcgctgagcatcctcatggacggcgcgatcccgccgggcccggacgcgcagctggagggccgnctagaggacctgccgggctgcccgcgggaggtgcagaggggattcgccg

SEQ ID NO: 85153 - DNA, 508 bp, Zea mays
  unsure (1)..(508): unsure at all n locations
aaggtatcgtgtatccgcaaaaaagatactctctaccggccggaattcccgggtcgacccacgcgtccggcattcattggcacacaccatcagggcacacaactacaacaactagtgctagcggccttgctgcctactctcagcaacagcagtttcttccattcaaccaactagctgcattgaactctgctgcttatttgcaacaacaactaccattcagccagctagctgctgcctacccccaacaatttcttccattcaaccaactggcatcattgaactctcctgcttatttacagcagcaacaactactaccattcagccagctagctggtgtgagccctgctgccttcttgacacaacaacagttattgccgttctacctgcacgctgcgcctaacgctggcaccctcttacaactgcaacaattgctgccattcaaccaacttgctatgacaaacccagcagcgttctaccaacaacccatcattggcggtgccctattttn

SEQ ID NO: 85154 - DNA, 504 bp, Zea mays
  unsure (1)..(504): unsure at all n locations
acggtatctgnaattgtgggatagagagtagtctttctaccggtccggaattcccgggtcgacccacgcgtccgtaccgcgaccattttcccgcaatgctcacaagctcctatagcttcccttcttcccccgtgacctctcaccagcggtgtcttcggtatgtgaaaacccaattcttcaaccctataggatccaacaggcaatcgcagctggcatcttacctttatcacccttgttcctccaacaatcatcagccctattacagcagttacctttggtgcatttattggcacaaaacatcagggcacaacaactacaacaacttgtgctagcaaaccttgctgcctactctcagcagcagcagtttcttccattcaaccaactagctgcattgaactctgctgcttatttgcaacaacaactaccattcagccagctagctgctgcctacccccaacaatttcttccattcaaccaactggcatcattgaactctcctgctta

SEQ ID NO: 85155 - DNA, 513 bp, Zea mays
  unsure (1)..(513): unsure at all n locations
aggatcnggaagaggggacgtggtgatctttcccggttcggaattcccgggtcgacccacgcgttcgcgagaaagggcaaactgggggggacctacccgaagtccgaggcagggcaaaaaggccggtgcccncctcccggcggttggcgggctcgtgccacggtgcggtagccccgtcgacgccggcggacagcgtgcactatgggttgcttcttcttcgggccagctaggaaatactgaagggctgaacactatcagcaacgatagctctccagacgccagttcaaaggacttgcgtgctaagttggtattgctgggagactcaggtgttgggaaaagttgcattgttcttcgttttgttcgtggtcagtttgatcctacttccaaggtaactgttggcgcatcttttttatcacaaacattggcattggaggattcaacaatagtgaagtttgaaatttgggatactgctgggcaagagaggtatgctgccttggcgccactttactacaa

SEQ ID NO: 85156 - DNA, 512 bp, Zea mays
  unsure (1)..(512): unsure at all n locations
agtgnattctgccctcagttcatagcgagntcctccggtccggaattcccgggtcgacccacgcgtccgggcttctcctccccctccggttcgggttcgggttcgcgaggttctccggggttcgctggggtgggtgagcggatcgagatggcggcgtcggatgttgagtaccgctgcttcgtcggcggcctcgcctgggccacggacgaccactccctccacaacgccttcagcacctacggcgaggtcctcgagtccaagatcatgctggatcgggagacgcagaggtcccgcggcttcggcttcgtcaccttctccacggacgacgcgatgcggaacgctctcgagggcatgaacggcaaggagctggacggacagcacatcacgcgtaacgaggcccagtcccgcgggcgccggggaagccgcagcggtgggtaccgtggtggccggggaagcggcggctacggctgtggcgggcgccgtgatggcggcggcagctacagcggtggcgg

SEQ ID NO: 85157 - DNA, 512 bp, Zea mays
aggattcggtaagtggagaaagggtatctctctaccggtccggaattcccgggtcgacccacgcgtccgcccgatcgacaccatgagggtgttgctcgttgccctcgctctcctggctctcgctgggagcgccacctccacgcatacaagcggcagctgcggctgccagccaccgccgccggttcatctaccgccgccggtgcatctgccacctccggttcacctgccacctcctgtgcatctcccaccgccggtccacctgccgccgccggtccacctgccaccgccggtccatgtgccgccgccggttcatctgccgccgccaccatgccactaccctactcaaccgccccggcctcagcctcatccccagccacacccatgcccgtgccaacagccgcatccaagcccgtgccagctgcagggaacctgcggcgttggcagcaccccgatcctgggccagtgcgtcgagttcctgaggcatcagtgcagcccgacggcgacgccctact

SEQ ID NO: 85158 - DNA, 516 bp, Zea mays
tatgtgtttctgaataagtaggtaaaaagaatgcctctaccggtccggaattcccgggtcgacccacgcgtccgcccacgcgtccgagctggcatcttacctttatcacccttgttcctccaacaatcatgaggcctattacatcagttacctttggtgcatttattggcacaaaacatcagggcacaacaactacaacaacttgtgctagcaaaccttgctgcctactctcagcaacagcagtttcttccattcaaccaactagctgcattgaactctgcttcttatttgcaacaacaacaactaccattcagccagctacctgctgcctacccccagcaatttcttccattcaaccaactggcagcattgaactctcctgcttatttacagcagcaacaactactaccattcagccagctagctggtgtgagccctgctaccttcttgatacaaccacagttgttgccgttctaccagcacgctgcgcctaacgctggcaccctcttacaactg

SEQ ID NO: 85159 - DNA, 519 bp, Zea mays
  unsure (1)..(519): unsure at all n locations
atggtatgngcgatagtgggggtatggaagtatctcttctaccggtccggaattcccgggtcgacccacgcgtccgcggacgcgtggggtcttcacccaatcagggatgaggatgccaagttcaagctctgcggggtgaggtctgttcagtttggccagaagggcatcccctacctgaacacctacgacggccgcaccatccgctaccccgacccgctcatcaaggccaacgacaccatcaagatcgatctggagaccaacaagatcatggacttcatcaagtttgacgtcggcaacgtggtcatggtgaccggcgggaggaacaccgggcgtgtaggtgtgatcaagaacagggagaagcacaagggcggcttcgataccatccacgtcgaggactccatgggccaccagttcgccacccgcatgggcaacgtgttcaccatcggcaagggcaacaagccgtgggtgagcctgcccaagggcaagggtatcaagctcagcatcatcgaggagcagagg

SEQ ID NO: 85160 - DNA, 504 bp, Zea mays
  unsure (1)..(504): unsure at all n locations
agtgtattcnggtttgtgggtaaatgagtatgcttctaccggtccggaattcccgggtcgacccacgcgtccgggcgtttaaaaaatgggcaccatcagagtaagaatctggttacacttccaggatattgggtttctggaaccattggtcataagttgatgtgtgggaaacctacaagggttgattacgaggacactcatattgatgtcagatgtcagatccatcagctagcattcagtcctcatacagactccaaagggattatggatctgacagaattcctgtcacccaaacatgtaattctcgttcatggtgaaaagcctcagatggcttttcttaaggagaggatcgaatctgaattggggatgccttgctactacccagggaataatgaatccgtctccattccgacaacccagaaccttaaaatgagtgctacagaaaggttcattacaagctgtgctgtggagcaaggtaaacgtagcctgcacaagcggaacctt

SEQ ID NO: 85161 - DNA, 516 bp, Zea mays
taggtatctgaaaagtgggagaaatgagatagctccaccggttcggaattcccgggtcgacccacgcgtccgcaaatggttggagagcatcttctgcaccacgcacctactggcctcccccaccaactgaggctgagagcaatggctacttgcgcgttcggtgcaatggtggcttgaaccaacaacgtaatgcaatatgtaatgcttgtggtgctgcacggatcatgaatgctacactggtgctgccagaattagacacaaattcattctggcatgatgaaagtggctttgtaggtatttatgatgttccccacttcatcaagacactgaaatatgacgtccgaattgttatgagcattcctgaaatcactacaaatggaaagaccaagaagctcaaaggccagcagcttcggccaccaagagatgcaccggtatcttggtatgcaactgatgctttggagacgatgaagaagtatggagctatatatttaagtccattttcacaccgtttggcag

SEQ ID NO: 85162 - DNA, 508 bp, Zea mays
  unsure (1)..(508): unsure at all n locations
aggattctgactgaagataaagtatactctcccggtccggaattcccgggtcgacccacgcgtccggattgagcagtccttccaggttcatcgtagttatggaagtatgcttgaaggcgaggctgatgaactcaagagggttttccttgaaggaaatccttatcttcttggattgaccatgattgtttctctattacactctctgtttgatttcctggccttcaaaaatgatattcagttctggaacaagaacaagtccatggaaggtctatcggcaaaatctgtggttctgaattttgtgtgtcaactaattgttttcctgtaccttcttgacaatgacacttcatggatgatccttgctagctctggaattggtgtttgcattgagttttggaagatcggaaaggcgatgcatattgaagtcgatagaagtggaaaaattcccatgttgaggttccgagatcgtgaatcatatgcacagaataagaccaaagagtacgatgctatn

SEQ ID NO: 85163 - DNA, 517 bp, Zea mays
agagtgtctgaactaagaaatataagaggaaaccttctaccggtccggaattcccgggtcgacccacgcgtccgtgtgaccctacgtcagccgcgtcgcgtcgcatcctacgatccaaagctctctctgctgggaggtcgcagccatggcgaagaactacccgaccgtgagcgccgagtacagcgaggctgtggacaaggccaggcgcaagctccgagccctcatcgccgagaagagctgcgccccgctcatgctccgcctcgcgtggcactccgcggggacgttcgacgtgtcgtcgaggaccggcggtccattcggcacgatgaagcatcagtcggaattggctcacggcgctaacgcggggctggacatcgcggtgcggctgctcgagcccatcaaggaggagttcccaatcctctcttacgccgatttctaccagctcgcgggagttgtggccgtggaggtcaccggtgggcctgagattcccttccaccccggtagggaagacaagcctcaa

SEQ ID NO: 85164 - DNA, 518 bp, Zea mays
tatgtacttgtgtaagggggaagatagggagaagtgctctaccggtccggaattcccgggtcgacccacgcgtccggtccctctctgatttttggacgagcagaacatacctgagacgacaggtagaagacgacggactgcctcgagcagcagagatcagggaggccgagggcgggatgacgatccggttcgtgctgttcgtcaacaagcagggccagacgcggctggcgcagtactacgagcacctctccctcgacgagcgacgggccctcgagggcgagatcgtccgcaagtgcctcgcccgcactgaccagcagtgttcgtttgtggagcaccggaactacaaggtcgtttacaggcgctacgcctcccttttcttcctcgtcggcgtcgacagcgatgagaatgagttagctatccttgaattcatacatcttctggtggaaactatggatcgccacttcggcaatgtgtgcgagctcgatatcatgttccatctggagaaagtgcacttcatg

SEQ ID NO: 85165 - DNA, 497 bp, Zea mays
  unsure (1)..(497): unsure at all n locations
gttatctggcatcgaatattaagaangctctaccggttcggaattcccggctcgacccacgcgtccgacaggatccaacaggcaatcgcagcatgtcatcttacctttatcacccttgttcctccagcaccgtcatccctattacagcagttacctttggtgcatttgttggcacaaaacatcagggcacaacaactacaacaacttgtgctagcaaaccttgctgcctactctcagcaacagcagtttcttccattcaaccaactggctgcattgaactctgctgcttatttgcaacaacaactaccattcagccagctagctgctgcctacccccagcaattacttccattcaaccaactggcagcattgaactctgctgcttatttacaacaacagcagctaccaccattcagccagctagctgatgtgagccctgctgccttcttgacacagcaacagttgttgtcgttctactcgcacgctgcgcctaacgc

SEQ ID NO: 85166 - DNA, 501 bp, Zea mays
agtgtgtctgacatacgtataaaaaggatacttctaccggtctcggaattcccgggtcgacccacgcgtccgcccacgcgtccgcgcaagcacggcctatgccatatcaagaaaagagtctcagtaaaatggttgggaacggacgagcaaggtctggaattattgtgctaccttgtggtgctggcaagtccttggttggtgtatctgcagcctgtcgtattaagaagagctgtttatgtttggccacaaatgctgtctccgtagatcaatgggcatttcagttcaagctttggtcgaccataaaagatgagaacattagtcgttttacatctgataacaaggagaagtttacagggatggctggtgtggttgttactacatataacatggttgcattcggtggtaaaaggtctgaagattcggagaagatcattgaagaaatccgaaacagagagtggggcttgcttctaatggatgaggtccatgttgtccctgcacatt

SEQ ID NO: 85167 - DNA, 506 bp, Zea mays
  unsure (1)..(506): unsure at all n locations
ataatttctgagnnntttaagngttcgttannatcattacgattcggaatacccagcgcgacccactcattcgaagactctttcgcgcaagcacagcctataccatatcaagaaaagagtctcaataaaaggtttattatacaagactatcaaggtctgtaattattgtgctaccttgtggtgctggcaagtccttggttggtgtatctgcatcctgtcgtattaataagagctgtttatgtttgtccacaaatgctgtcttcgtagatcaatgggcatttcagttcaagctttgatccaccataaaatatgacaacattattcgttttacatctgataacaagcagaaatttacatgcatctctgatctatttattactacatataacatggttgcattctgtgttaaaaggtcttaatattcatataatatcattgaaaaaatcctaaacacttactgtaaccttgctactaatgcattaagttcatttttgtacctacacatt

SEQ ID NO: 85168 - DNA, 507 bp, Zea mays
attattttgtcagtgggaggagaaattctccggtccgtaattcccgggtcgacccacgcgtccggacgccgccgccgcaagccgtccgccttgctcttcacgaaggcttggtcctcctcctggtgtctccactccccccttcacagatccgttcctccagctagggttagcgttcctctgcagcgatggcgatcaagcggactaaggcggagaagaagatcgcgtacgacaagaagctgtgcagcctgctcgatgagtacaccaaggtgctcatcgccctggccgacaacgtcggttccaagcagctccaggacatccgccggggcctcaggggcgactcggtggtgctcatggggaagaacacgctcatcaggcgttgcatcaaggtgtacgccgagaagaccggtaaccacacctttgacccgctcatggacctcctggtcggcaacgtaggcctcatcttcaccaaaggagacctcaaagaggtgcgcgaggaggtcgccaagt

SEQ ID NO: 85169 - DNA, 514 bp, Zea mays
  unsure (1)..(514): unsure at all n locations
tatctatctgtgaaggcgcgggatagggggaactcttctaccggtccggaattcccgggtcgacccacgcgtccgcttcattgagatgtactttgtgttcacatcattctggaactataaggtgtattatgtgtatggcttcatgttgctggtctttgtcatccttcttatagtcaccatctgcgtcactattgtgggtacttatttcttgctgaacgccgagaactaccattggcaatggacgtcgttttcttctgcagcctcaaccgctctgtacgtgtatctgtactccatctactactaccatgtgaagacaaagatgtcaggcttcttccagacaagtttctatttcggctacacgctgatgttctgccttggcctaggcatactttgtggagctattggctatctagggtcaaccctttttgtaaggagaatctacaggaatatcaaatgtgattaaatccctgctgcttaagctagcaacaganaaatcatatgtattgtcaggagg

SEQ ID NO: 85170 - DNA, 516 bp, Zea mays
  unsure (1)..(516): unsure at all n locations
tgagatttctgagnaagcctttganngncanactatacacgttcggaattaccggctcgacccacgcgtccgacgggatccaacaggcaatcgcagctattatcttaccttcatcacccttgatcctgcagcaaccttcatccctattacagcagttacctttggtacatttgctgacacaaaacatcagggcacaacaactacaacaacttgtgctagcaaaccttgctgcctactctcagcaacagcagtttcttccattcaaccaactggctgcattgaactctgctgcttatttgcaacatcaactaccattcatccagctatctgctgactaccctcagcaattactttcattcaaccaactggcagtattgaactctgctgcttatttacaacaacagcatctaccaccattcagtcagctagctgatgtgagccctgctgacttcttgacacagcaacagtggttgtcaatctactcgcacgctgatcctaacgctggcacgctgttac

SEQ ID NO: 85171 - DNA, 497 bp, Zea mays
  unsure (1)..(497): unsure at all n locations
tggtttcngggcctgctctgacgccangctctaccggttcggaattcccggctcgacccacgcgtccgttggcttctcctccccctccggttcgggttcgggttcgtgaggttctccggggttcgggttcgtgggtgagcggatcgagatggcggcgtcggatgttgagtaccgctgcttcgtcggcggcctcgcctgggccacggacgaccactccctccacaacgccttcagcacctacggcgaggtcctcgagtccaagatcatcctcgatcgggagacgcagaggtcccgcggcttcggcttcgtcaccttctccacggaggaggcgatgcggaacgccatcgagggcatgaacggcaaggagctggacggccgcaacatcaccgtcaacgaggcccagtcccgcggcggccgtggaggcggcggcggtgggtacggtggtggccgtggaggcggcggctacggcggtggcaggcgccgtgatggcggtggct

SEQ ID NO: 85172 - DNA, 511 bp, Zea mays
ttgaatctggatgaaggagagagaagctccaccggtccggaattcccgggtcgacccacgcgtccggcgagagggtttcctcttccctccacggctccaacgagcccccggcccctccgcctcagagcccacgcgcccggttggccgccgcccccgccatggatgtggatctgtggatctccaaagtcaaggaaggccagcacctcgccgagcacgagcttcagtcgctctgcgaatacgtgaaggagatcctcatcgaagagtcgaacgttcaaccggtgaatagccctgtgacggtttgcggtgacatccatgggcagttccatgacctgatgaagctcttcgcgacggggggccacgtcccagagacgaactatattttcatgggtgattttgtggaccgtggcttcaacagtctggaggttttcaccatcctgttgctactaaaagcgaggtatcctgcacacataacccttctgcgtggaaatcatgaaagtaggcagttgacaca

SEQ ID NO: 85173 - DNA, 518 bp, Zea mays
tatttatctggtagtggggatagatgatgctctcaccggtccggaattcccgggtcgacccacgcgtccgagaaagcacaatagtgtaccaacaatggcagccaaaatatttcgcctacttatgctccgtggtctttctgcaagtgctgctaccgcgaccatgttcccgcaatgctcacaagctcctatagcttcccttcttcccgcgtacctctcaccagcggtgtcttcggtatgtgaaaacccaattcttcaaccctataggatccaacaggcaatcgcagctggcatcttacctttatcacccttgttcctccaacaatcatcagccctattacagcagttacctttggtgcatttattggcacataacatcagggcacaacaactacgacaacttgtgctagcaaaccttgcttgctactctcagcaacaagcagttcttccatgcaaccgactagcttgctttgaactcttgctgcttatttgcaacatcaactacgattcagccagctacc

SEQ ID NO: 85174 - DNA, 513 bp, Zea mays
atgtatctggcatccgtatcatagaattctcgtaccggtctcggaattcccgggtcgacccacgcgtccgcccacgcgtccggaggcacttaagatggaaattattccaaaccccaaggaagttgatggggtgaaagtccttcaacttgaaactgcagctggtgcagctattcgtttctttgacaaagcgattggaattaatgttccccgctcaagatttctcccggtgaaggctacatctgatttattgcttgtgcagtctgatctttacaccttggttgatggctttgtcatccgcaatccatccagagcgaatccagctaacccttcgattgagcttggacctgagttcaagaaggttgccaatttccttgctcggttcaagtccatccccagcatcgtcgagcttgacagcttgaaggtttctggtgatgtctggtttggttctggaattacgctcaagggcaaggtgacaatcaccgccaagtctggagtgaagttggaggttccaga

SEQ ID NO: 85175 - DNA, 514 bp, Zea mays
  unsure (1)..(514): unsure at all n locations
ggtnttttccatgtgggggaatggtggatcctcnncnntnnnnnnnnnnccnnntcgacccacgcgtccgcgaccctccctccttcgctccttccccgccgcctcccggccgtcgccgccatggtgaagtactcgcaggagccgggcaaccctaccaagtcggctaaggccatgggcagggatctgagggtccacttcaagaacacaagggagacagcctttgcgcttcgcaagttgtctttgaccaaggctaagcgataccttgaggatgttattgctcacaagcaggcaattcccttccggagatactgtgggggtgttggtcgcaccgcgcaagctaagtctcgccactccaatgggcagggccgctggccggttaaatcagccgggttcatcctggatttgctgaagaatgctgagagtaacgctgatgtgaaaggcttggatgtggacaacctctatatttcacacatccaggtgaaccaagcccagaagcagaggcgccgcacctacc

SEQ ID NO: 85176 - DNA, 517 bp, Zea mays
  unsure (1)..(517): unsure at all n locations
ggggtgtcngtgcatccgatatataagttatcctcctaccggttcggaattcccgggtcgacccacgcgtccggccacatggagacgccacagcagcaattcgccgccgccgccgccgccgccgcccacgggcaggacgacggcgggtcgccgccgatgtcgccggcctccgccgcggcggcggcgctggcgaacgcgcggtggaacccgaccaaggagcaggtggccgtgctggaggggctgtacgagcacggcctgcgcacccccagcgcggagcagatacagcagatcacgggcaggctgcgggagcacggcgccatcgagggcaagaacgtcttctactggttccagaaccacaaggcccgccagcgccagaggcagaagcaggacagcttcgcctacttcagcaggctcctccgccggcccccgccgctgcccgtgctctccatgccccccgcgccaccgtaccatcacggccgcgtcccggcgccgnccgcgatgccgatgccgatgccgc

SEQ ID NO: 85177 - DNA, 508 bp, Zea mays
  unsure (1)..(508): unsure at all n locations
ntgttgatcactnttcgtanctccgccngttctcgaattcccgggtcgacccacgcgtccgggcacgcctccgggacaacttgggtttagccctcaacgggttgcttccttccccaggacgtggggctgaattccgtttcttgctccccttttcagggccccgatcgctaggctagctgcaactcaagtgcttgtctgacggtgcctctgctcgttggcagccggatcgcctgctgttggtgcatctggtgattaataatactactatgacagagccatgctctgtgaagagtattagtagcagcgctcataaaagctacagttccgtctcttttctcagctatgtaaaacttccaaactgttcatgcttaaaactgagggttttcttggtgtgaggtgtgcatgtcgttgttgaggccattgctgcacattccacctattgaggccctcctcaaaataagccttcaaaaagctgatatcttttaaaaaaaaaaagaatacacaaaaa

SEQ ID NO: 85178 - DNA, 500 bp, Zea mays
agtgtatctgaataagaagtaaaagcagtctctaccggtctcggaattcccgggtcgacccacgcgtccgattgagaccaacaagcaacatagaaagtggaatccagtagcaacaatagagcaacaatggcgaccaagatattttccctccttatgctccttgctctttctacatgtgttgctaacgcgacaattttccctcaatgctcacaagctcctatagcttcccttcttcccccataccttccatcaattatagcttcaatatgtgaaaacccagctcttcaaccatataggcttcaacaagcaatcgcagcaagcaacatacctttatcgcccttgttgtttcaacaatcgccagccctatctttggtgcagtcattggtacaaaccatcagggcacaacagctgcagcaactcgtgctacctctgatcaaccaagtagctctggcaaacctttctccctactctcagcaacaacaatttcttccattcaacca

SEQ ID NO: 85179 - DNA, 520 bp, Zea mays
  unsure (1)..(520): unsure at all n locations
agagtagagatgtctgagttcgtnacttagcatgccgtaccgtccgtattcccggtcgacccacgcgtccgccacgcgtccgcggacgcgtgggctgacacgtgttcggacgcatggggcgagctgcgcgcccgggccgcatctctccccgacgagtacttcctcgtgctcgtgggcgacatggtcacggaagacgcgctgcccacataccataccatgatcaacacgctcgacggcctccgcgactagactcacgccagcaactgcccctggccagtctgtacgcgcgcctggaccgacgaagagaaccgccacggtgacatcctctgcaagtacatgtacctatccggccgcgtcgacatgcgcatggtcgagaagacccgtcagtacctcatcggctccggcatggattctcgtacggataacaacctctcccttggcttcatgttcacaaaccttcatgaactcacctacagccgttttgaacaggaaccaccttgcgaatcgcccagggctcacc

SEQ ID NO: 85180 - DNA, 526 bp, Zea mays
  unsure (1)..(526): unsure at all n locations
ngagtagtnaaggggttgattacagcaggaggaggtactgtatacctcgtccggaattcccgggtcgacccacgcgtncggccagaactaactggcccccggcttacgaatcccaaagccttcatggggacccaacggcactggcttccaattcttcctcttctggccgnncgcctcgccgncgtccctgctcgcgcggcgctgggcggcgggcgcggcccgctgctgggcgggtggaacccgatccctgacgtgagcgactcgcacatccaggagctaggcgggtgggcgctggggcaagcgaagcaccagaagctggccgncgacgggctgcggttccgccgcgtggtgcgcggcgagcagcaggtcgtgtccgggatgaactaccgnctctacgtcgacgccgncgaccccgncggccgcaccgtgccctacgtcgccgtcgtgtacgagcaggtctggacccgcacccgncagctcgcctncttcaccccgtgccccgngcccactgaaaccttacgcacac

SEQ ID NO: 85181 - DNA, 528 bp, Zea mays
  unsure (1)..(528): unsure at all n locations
tagagtantgagcgatcagtggtccggttaaagtntacttagctagtacactaccggttcagaataaccggctcgacgcacgcggacgcgtgccaaataaaaggaaaaagtgaggcatccccagaagaatgtgatcaggctgtggagtgcctcagcactgcaaaagctaaggctaaagctaaacaggtacaagaatctctgaaggttggccaatcaattatacagaaattttgggcaagagtactgtgtgtcggccctgctcttcatgctgatgcttcaatgagcagggctgattgtgcagcaaaacttaagcattggacggatgaattcgcttgtacactgcagcactactggttagggacaaaactactctgcgcagatgttaggatctcatcaagattgctggtgaaacttgctgggggaaaagcctttcaagattagacaggccacaatttgacacgcacaacagcatatatctccaggcatgttccgtatggtgagcacgttaatgccccatatatggtattt

SEQ ID NO: 85182 - DNA, 519 bp, Zea mays
gagtagggagctgtatacgagggggggaaagtatgctctaccggtccggaattcccgggtcgacccacgcgtccgacacacctagcgaagcgcactagcaacgacctaacaacaatggcttccaagacattaggcctccttgcgcttcttgccctttttgtgagtgcaacaaatgcgttcattattccacaatgctcacttgctccgagtgccattattccacagttcctccctccagttacttcaatgggcttcgaacacccagctgtgcaagcctataggctacaacaagcgcttgcggcgagcgtcttagaacaaccaattgcccaattacaacaacaatccttggcacatctaaccatacaaaccatcgcaacgcagcagcaacaagcactgagccacctagccgtggtgaaccctatcgcctacttgcaacaacagctgcttgcatccaacccacttgctttggcaaacgtagctgcataccaacaacaacaacagttgcaacagtttcttgcc

SEQ ID NO: 85183 - DNA, 536 bp, Zea mays
  unsure (1)..(536): unsure at all n locations
agtttagtggtagtgcttattaagtttggaacccgcncgtacagctatgatgtactcggtctcggaattcccgggtcgacccacgcgtccgcccacgcgtccgactagttctagctcgtgatggccgccctttttttctatttcggttgctttttttttgtagaatctggaaatgtaacttcttatttatgcatggccacatacataatccaaataactttattattgaattacaactaataagcaatttaaaatacggcaccaccaatgatgcattgatgttagcaagcctacttgtttgtcaaagcaagttggacaaacggcatcaattgtcgtatttctaaataaccagcgcagagagccacacgtatcatgtcaccatttgtgcttaagcaatattttctaatagattatcatctgaatcttggaaccttattccaatggacccaatatctattgatgacataaaacccaatttcattcgtctaagtttcatgatagaaaacatctcaacactcataatattatatgtcgtg

SEQ ID NO: 85184 - DNA, 640 bp, Zea mays
  unsure (1)..(640): unsure at all n locations
agtagggggcgtagatgtgaaaacaagacatagaagggtaggctggcaaccgctctcggaattcccgggctcgactccacgtcgtctcgtaatgcgcatcgagaaagggccgtcgacaggggggatattaatgggtcgtcgnntcgtctagccagtcagctcacgcgtccgcgctgcaaatcctcgtcagctcgtccgtccctggctcnttccgtgccctcgtcggctggtccatgcgtccatgcgtccgggacccctcctggtcgtgtccggggtggggccccatcccgcatcaactctcgtctcccgagtctgccccgctggtacccgtgactcagccccggaccctgcgntngcatcgggcccgtcgccctttcccgtggccccggagccctgaagaaggagatgcnttngccgggagcctgtngcggacatcnnccggcgtacctgcnccggttgcacgnngcgctnngagcatnnnctcatgggaccgggcgcgaattccctgncggggccccggtaccgctgcatgcttggaagggcccggncctagaggaaccttgcncgggcctgnccccgccgggagggtgccanaanggggattccggccgncaacccttcgttaaccggagggcccgaa

SEQ ID NO: 85185 - DNA, 522 bp, Zea mays
  unsure (1)..(522): unsure at all n locations
nagggaggtaggatttataaagaagggagagtactgtatactcgtccggaattcccgggtcgacccacgcctacgaaagaagccaagccaggggctggtcacttaatcctgcgcaagaacttgcttttggagaaaaaaaccccggaagccattatggaaggaggtgcccgtgccagccaaaaaaggaccgtgcttgtcaccggggccttcggcttcgtcggctcctggctcgtcatgaaacttctccaagccggctacaccgtccgggcgaccgtgcgcgatcccgcgaacgttgggaagaccaagcccttgatggaccttcccggagcaacggaacgcctgtccatatggaaaagccgacctgcggaagaaggcagcttccacgacgccatcaggggctgcaccggcgtcttccacgtcgccacgcccatggacttcctgtccaaagaccctgagaatgaggtaatcaagccgacggtggaagggatgataagcatcatgcgggcatgcaaggaggccggc

SEQ ID NO: 85186 - DNA, 516 bp, Zea mays
agagggagaggttgtgtaccgcaccagactattgtatactcttcggattccgggtcgacccacgcgtccgcggacgcgtggggcagtttctttcattcaaccaactagctgcattgaactctgctgagtattggcaacaacagcaactaccattcaagcagctacctgctgcctaccaggagcaatgcctttcattcaaccaactggcagcattgaactctgctgcttatttacagtagtaacaactactaccattcagccagctagctggtgtgagccctgctaccttcttgatacaaccacagttgttgacgttctaccagcacgctgcgcctaacgctggcacactgttacaactgcaacagttggtgccattcaaccaacttgctttgacaaacccagcagcgttctaccaacaacccatcattggtggtgccctattgtagatgtcttatgagttatagttcaatcataaagtgtgtatgactgaagttatgcggtttatcagaagtaaca

SEQ ID NO: 85187 - DNA, 527 bp, Zea mays
agagttataaggtcggtgtcggatcacgcccctacgtattgctgtaccggtccggaattcccgggtcgacccacgcgtccgaggaaacccagccgacggcgcatcggtcttccaggtaagcagtagcgttcacgtcaggggccgtcatgaagcgcaacccccgcgtcacgagctttcgccggaagtgccggaaggcgcacttcacggcccagtactctgtccggcgcgtgctcatgtccatggcgctatcgacggagctatgacacatgtacaaatgtgcgttccatcccgatcctgcatagacgacaaggtgcaagtcgtgcgcggtacctacaagggacttgaggtcaaattggtgcacgtgtaacgacgttgctatgttatacacgtatagcggaacactcgcaagattgtgcacggctgcatcgttaacgtgggcttataacttctctaggtcatggttacaatactgtagcttgacaaggactcataggtgcctcttcgaccggaaggaccagggggcgccc

SEQ ID NO: 85188 - DNA, 527 bp, Zea mays
  unsure (1)..(527): unsure at all n locations
nggagttggaggctgtattatgacccgcatatatagcatagctcgtaccggtccggaattcccgggtcgacccacgcgtccggtctctccaccaagcttttcgtggtcctcctcctgctcgtttgttacaccgggacgcaaggcgggccggtgactatggtgtcggcgaggaagtgcgagtcgcagagcttccgcttcaagggaccttgctcgagggacgccaactgcgcaaacgtctgcctgaccgaaggtttcaccggcggcgtgtgcaagggcctacgccaccgctgcttctgcaccagggactgctagtactgcctcgcctcgtgtcctgcgtgtgcatatatagccgcagcggatcagtaaaacatgcatgcatgcgttaccaaatatttggcagtaccagcaagttaatgaattaaaatattaaataatatgtcatggaaaaaaaaaaaaaaaaaaaagggcggccgctctagaggatccaagcttacgtacgcgtgcatgcgacgtcatagctcttctan

SEQ ID NO: 85189 - DNA, 503 bp, Zea mays
agtagaatgacttattaaggacgcggggcgtggaaggtaatactcccggaattcccgggtcgacccactcgtccgcccactcgtccgagaccaacaagcaacatagaaagtggaatccagtagcaacaatagagcaacaatggcgaccaagatattttccctccttatgctccttgctctttctacatgtgttgctaacgcgacaattttccctcaatgctcacaagctcctatagcttcccttcttcccccataccttccatcaattatagcttcaatatgtgaaaacccagctcttcaaccatataggcttcaacaagcaatcgcagcaagcaacatacctttatcgcccttgttgtttcaacaatcgccagccctatctttggtgcagtcattggtacaaaccatcatggcacaacagctgcagcaactcgtgctacctctgatcaaccaagtagctctggcaaacctttctccctactctcagcaacaacaatttctcc

SEQ ID NO: 85190 - DNA, 490 bp, Zea mays
gagaaggcttagcttgaaaaagaacggaggtagtgtcacaccccggattcccgggtcgaccagcgttcgatccgcacctataatatctgggctttaaaaaccccactaaccgaacgcactagcggcgcccgtacaacaatggctaccaagatattatccctccttgcgattcttgcccttttagtgagcgcaacaaatgcgttcattattccacaatgctcacttgctcctagtgccattattccacagttactaccaccagttacttcaatgggcttcgaacacccagttgtgcaagcctacaggctacaacaagcgcttgcggcgagcgtcttacaacaaccaattgcccaattacaacaacaatccttggcacatctaacaatacataccaatcgaacgcaacagcaacaacagttcctaccaacactgagccacctagccatggtgaaccctgccgcctacttgcaacaacaactgcttgcatccc

SEQ ID NO: 85191 - DNA, 529 bp, Zea mays
agtaggggggagttctgagttttgcaagtccgctagagctatactgttccggattcgaatcgcgagcgacgcgcacgcggccaggctcttcaccaagcttatcgttgtctttctgctgctcgtttgttacaccggggcacgggtgcgaccggtgactatggtgtcagcgaggaagtgcgagtcgcagagcttccgcttcaagggaccttgctcgagggacgccaactgcgcaaacgtctgcctgaccgaaggtttcaccggcggcgtgtgcaagggcctacgccaccgctgcttctgcaccagggactgctagtactgcctcgcctcgtgtcctgcgtgtgcatatatagccgcagcggatcaattaaacatgcatgcatgcgttaccaaatatttggcagtaccagcaagttaatgaattaaaatattaaataatatgtcatggaaaaaactaaagcagaaaaagggccgtacgctttaaaggatccaagcttaagtacgcgtgccttcgacgtaataactattttat

SEQ ID NO: 85192 - DNA, 526 bp, Zea mays
  unsure (1)..(526): unsure at all n locations
agtgtaatggaaggcgtcgtgttccagcccaaagcactcattgtcattcacagttcggaattcccgggtcgacccacgcgtccgcccacgcgtccgatctgaatgacaaagtaaacgttgaggctagcaaaataagtgtgggtgtcaggtccatattctgtattgtagaaaaagctgaggccaaatggtggaagaaacttgttcgagatgatcaaagggcacctcactttgtgaaagttgattgggacaaatgggttgacgaagatgatgatggtgctgatgtcaacttggatgggatggacttctcgaattttggcggtatgggtggtatgggtggcatgggtgatatggctggcttgggtggtcttggtggcatgggtggaatgggcggtatgggtggtatgggaaatggatgatttgaggatgatagtgntgaanaagaagtgttgaaaccttaagcttgcggacatgctgcttaagccgagaagactgagtcggctgaagccaagaatgagtcgcttaaatg

SEQ ID NO: 85193 - DNA, 508 bp, Zea mays
  unsure (1)..(508): unsure at all n locations
gagggagancntcagatctgataagagggaggggggggaaacagtattactcccggaattcccgggtcgacccacgcgtccggctcgtgcggctcgtcaaggagaacaaggtcaaccaagatcgaggagatctacctccacgtgatgggccgtcaaggagcaccaaatcatcgagaccctagtgccggggctcaaggacgacgtgatgaagatcacgcccgttcagaagcagacccgcgccggacagcgcacccgcttcaaggcctttgtcgtcatgggcgactgctacggccacgtcggcctgtgagtcaagtgcgccaacgaggtggccaccgtcattccgcggcgccatcattctcgacaagctctacgctgttcccgtcaggaaaggctactggggaaacaagattgggcagtcacacaccgtgccctgcaaagtcacacgcaagtgcgggtacgtcaccgagcgtatagtgcctgagcccaagggttcntgcataatccgcgc

SEQ ID NO: 85194 - DNA, 520 bp, Zea mays
  unsure (1)..(520): unsure at all n locations
nggagattatcaggtttgatcaccgcacgcaagtactgtcaacacgttcggaattcccgggtcgacccacgcgtccgaaaggaccgcggcgccctcgtcgagttctacgccccctggtgtggtcactgcaagaagcttgctcctgagtatgaaagacttggtgcaagttttaagaaagctaaatctgtcttgattgctaaggttgattgtgatgagcacaagagtttgtgcagcaagtatggagtttccgggtatccaacaatccaatggttcccgaaaggatccttggagcccaaaaagtatgaaggacaacgcactgcagaagcccttgctgaatttctcaatactgaaggaggcacaaatgtaaagctggcaaccattccttcaagtgttgtggttctcaccccagagacctttgactcaaatggcttgatgaaaccaaagatgtccttggtgagttctatgccccatggtgtggtcacttgcagagtcttgaccgacgtattagaaggtggcttct

SEQ ID NO: 85195 - DNA, 526 bp, Zea mays
  unsure (1)..(526): unsure at all n locations
aggagggnggaggttgtgactacgacccgcactcatcgcnattgctcgtaccggtccggaattcccgggtcgacccacgcgtccgcagcaaagcggcagtgcgtatagaggatcgtcgaacagaacagcatgaagatggtcatcgttctcgtcgtgtgcctggctctgtcagctgccagcgcctctgcaatgcagatgccctgcccctgcgcggtgctgcagggcttgtacggcgctggcgccggcctgacgacgatgatgggcgccggcgggctgtacccctacacggagtacctgaggcagccgtagtgcagcccgctggctgctgcgccctactacgccggttgtgggcagccgagcgccatgtgccagccgttccggcaacagtgctgccagcagcagatgacgatgatggacgtgcaatccgtcatgcatcagctgcagatgatgatgcatcttgagcgtgccgctgccggcagcagcagcctgtacgagccagctctgatgcaacatcagcagctactgc

SEQ ID NO: 85196 - DNA, 527 bp, Zea mays
  unsure (1)..(527): unsure at all n locations
agtagtntttagtgtgtgagtttgatacgatatattgcattgctgtaccggtccggaattcccgggtcgacccacgcgtccgaagcaacatagaaagtcgaatacagtatcaacaatcgagcaacaatggcggccgagatattttccatccttatgctccttgctctttctgcatgtgttgctaacgcgaccatttttcctcaatactcacaagctcctatagctgcccttcttaccccataccttccatcaatgaccgcttcactatgtgaaaacccagcaccttcaaccctacaggctccaacaagcaatcgcaacaggcaacttacctttatcacccctgttctttcaacaatcgccagccctatctttggtgcagtcattggtacaaaccatcacggcacaacagctgcagcaactcgtgctaccagtgatcagccaagtagctctggcaaacccttctaactactctcagcagcaacaatttcttccattcaaccaactgtctacactgaaccctgctgttt

SEQ ID NO: 85197 - DNA, 527 bp, Zea mays
agagattataaggctcgtggtacgtacagcactcatctggattgctcgtaccggtccggaattcccgggtcgacccacgcgtccgcgtttatgtgatatggacaagtgtgtgtagctgcttgcttgtgctagtgtaatgtagtgtagtggtggccagtggcacaacctaataagcgcatgaactaattgcttgcgtgtgtagttaagtaccgatcggtaattttatattgcgagtaaataaatggacctgtagtggtggagtaaataaaaaaaaaaacaaaaaaaaaaaaaaaaaaaaagaaaaaaaaaacaaaggcaacaagctgcaaaggatcaaaagctcaagtactataaagagcaacgatatatgtcttacatgcagtcattgaaactaatcaactgggctcaggactacgaacaactgattctgaaaactattacgtaactcatttaatagatttgaataaatcttgcattagccacagtatgttatagccaacaagctctctacactgggcctttccgat

SEQ ID NO: 85198 - DNA, 505 bp, Zea mays
  unsure (1)..(505): unsure at all n locations
ggtaaggcnttagacttttatatgaatggggggatgagtagtatcactcctcggaattcccgggccgacccacgcgtccggcaacaaccatccctagtggatctatattttcaaataatcgtagcacaacaacttccacgaccaggggtttcaacaatcaaaccagtaattgcagcgaaccttgattcttaacttcagcaacaacaatttctttcattcaatcaactagctggggtgaaccctgctgcttacttgcaggcacaacagctactaccattcaaccaacttgtcaggagccctgctgccttcttactgcagcaacagttgttgccattccatctacaagttgtggcaaacattgctgctttcttgcaacaacaacaattgctgccattttacccacaggttgtgggaaacattaacgccttcttgcaacagcaacagttgctgccattctacccacaggatgtggcaaacaatgtcgccttcttacaacaacaacaat

SEQ ID NO: 85199 - DNA, 515 bp, Zea mays
  unsure (1)..(515): unsure at all n locations
gcgaaaggaaagatgtgtctactacgctcactcccgcganggatagtaaacaccnctcgggatataccgggccgcgacccacgcgtccggcggcaaccatccttaagtgaatccaaatttcaccattaaaccgtagcacaacaaccacaacgaccatggccttccacaatcaaaccaggtattgcagcgaaccctgatgcttacctncagcaacaacaatttcttccattcaatcaactagctggggtgaaccctgctgcttacttgcaggcacaacagctactaccattcaaccaacttgtcaggagccctgctgccttcttactgcagcaacagttgttgccattccatctacaagttgtggcaaacattgctgctttcttgcaacaacaacaattgctgccattttacccacaggttgtgggaaacattaacgccttcttgcaacagcaacagttgctgccattctacccacaggatgtggcaaacaatgtcgccttcttacaacaacaact

SEQ ID NO: 85200 - DNA, 529 bp, Zea mays
  unsure (1)..(529): unsure at all n locations
aagtagtttcagaggtatctgatttctacctcgtactgtatagctaacccgttcggaattcccgggtcgacccacgcgtccgcagctgcaacagtttctgccagcgctcagtcaactagccatggtgaaccctgccgccggcctacaacagcaacaactgctttcatctagcccgctcgctgtggccaatgcacctacatacctgcaacaacaattgttgcaacagattgtaccagctctgactcagctagttgtggcaaaccctgctgcctacttgcaacagctgcttccattcaaccaactgactatgtcgaactctgctgcgtacctacaacagcgacaacagttacttaatccactagcagtggctaacccattggtcgctgccttcctacagcagcaacaattgctgccatacaaccagttctctttgataaaccctgtcttgtcgaggcagcaacccatcgttggaagtgccaatcttttagatacatatgagatggactcgataatggtgcccttatatccn

SEQ ID NO: 85201 - DNA, 529 bp, Zea mays
  unsure (1)..(529): unsure at all n locations
aggagattnaaagtgtgtgtactgaaacgcaatcacagtatgctcgtaccggtccggaattcccgggtcgacccacgcgtccgcagccagctagctgctgcctacccccagcaatttcttccattcaaccaactagcagcattgaactctgctgcttatttacagcagcaacaactactaccattcagccagctagctgatgtgagccctgctgccttcttgacacaacaacagttgttgccgttctacctacacgctatgcctaacgctggcaccctcttacaactgcaacaattgctgccattcaaccaacttgctttgacaaacccagcagtgttctaccaacaacccatcattggtggtgccctcttttagattgcttatgagttatagttcaataatgaagttttttggatgatgtttgtggctaaaaaaaaaaaanaaaaaaaaaaaaaaaaaaaanaaaaaanaaaaaaanaaaaaaaaaaaaaaaaaaaaaaaagggcggccgttttaaaggatccaacct

SEQ ID NO: 85202 - DNA, 502 bp, Zea mays
  unsure (1)..(502): unsure at all n locations
agtaaggcnttaggttgttaatgctggcggggggtatgtgtaacacctccggaattcccgggtcgacccacgcgtccgaattgttcaaccctacaggatccaacaggtaatcgcaacaggcattttaccattattacccttggttcttcaacaaccggcaggcctattacagcaggtacctttgggccatttgggggcacaaaacatcaaggcacaacaactacaacaacttgtgctagcaaaccttgctgcatactctcagcaacatcagtttcttccattcaaccaactggctgcattgaactctgctgcttatttgcaacaacaattaccattcagccagctagttgctgcctacccccagcaatttcttccattcaaccaactagcagcattgaactctgctgcttatttacagcagcaacaactactaccattcagccagctagctgatgtgagccctgctgccttcttgacacaacatacagtngttgccgttctn

SEQ ID NO: 85203 - DNA, 531 bp, Zea mays
agtaggttgagaggggtctgatttctacctcgcagtgcattgcatacccgttcggaattcccgggtcgacccacgcgtccgcccacgcgtccgcccacgcgtccgcggacgcgtgggttcagaaacacacctagcgaagcgcacgagcaacgacctaacaacaatggctaccaagatattatccctctttgcgcttcttgccctttttgtgagcgcaacaaatgcgttcattattccccaatgctcacttgctcctagtgccattattccacagttcctccctccagttacttcaatgggcttcgaacacccagctgtgcaagcctacaggctacaacaagcgcttgcggcgagcgtcttacaacaaccaattgcccaattacaacaacaatccttggcacatctaaccatacaaaccatcgcaacgcaacagcaacaacaatttctaccagcactaagccaactagctgtggtgaaccctgtcggctacttgcaacagcaagttgcttgcattcaaacccacttgttttg

SEQ ID NO: 85204 - DNA, 535 bp, Zea mays
  unsure (1)..(535): unsure at all n locations
aggtagttacatgtaagcgtacnattgatggtcatcgcagtgcctcngctatnaccagttcggaattcccgggtcgacccacgcgtccgctctcaggaacaacaattccttccattcaacctactgtctacactgaaccctgctgcttattggcagcaacaactattaccatttagccagctagctactgcctactctgaacaacaacaacttcttgcatttaaccaattggccgtactgaaccccgctgcttatttgcagcatcaaatactactaccatttagccagctagctacaacaagccgtgctttcttcttgacacaacaacaagtgctgacgctctaacaagagcttgcggctaaccccgcaaccctcttacaactacaacaattgctgccctttgtgcaacatgctttgacaaaaacaatagcctcctaccaacaacaccttattggaggtgccctattttagattgcttattagatgtaagtcaataattaaagtcattggatgatgtgatttggcccaccagaaa

SEQ ID NO: 85205 - DNA, 528 bp, Zea mays
  unsure (1)..(528): unsure at all n locations
agtaggtnnagagcggtctgagtccagcctcagagcgtaactgcataactgtccggaattcccgggtcgacccacgcgtacggcaaagcggcagtgcgtagagaggatcgtcgatcagaacagcatgaagatggtcatcgagctcgtcgtgtgcctggctctgtcagctgccagcgcctctgcaatgcagatgccctgcccctgcgcggggctgcatggctagtacggcgctggcgccggcctgacgacgatgatgggcgccggcgggctgtacccctacgcggagtacctgaggcagccgcagtgcagcccgctggcggcggcgccctactacgccgggtgtgggcagacgagcgccatgtaccagccgctccggcaacagtgctgccagcagcagatgaggatgatggacgtgcagtccgtcgcgcagcagctgcagatgatgatgcagcttgagcgtgccgctgccggcaagagcaaactgtacgagccaacttttatggcacagcaatacaacttgttggcact

SEQ ID NO: 85206 - DNA, 532 bp, Zea mays
  unsure (1)..(532): unsure at all n locations
aggtggtnnnntaaggctgtgttctgaatcacgcatatatcagtatagctcgtaccggtccggaattcccgggtcgacccacgcgtccgctctcagcaacagcagtttcttccattcaaccaactggctgcattgaactctgctgcgtatttgcaacaacaactaccattcagtcagctagctgctgcctacccccagcaatttcttccattcaaccaactggcagcattgaactctgctgcttatttacaacagcaacagctaccaccattcagtcagctagctgatgtgagccctgttgccttcttgacacaacaacagttgttgccgttctacctgcacgctgcgcctaacgctggcaccctactacaactgcaacaattgctgccattcaaccaacttgctttgacaaacccaacaacgttctaccaacaacccatcattggcggtgccctcttttagattgcttatgagttatagttcaataatgaagttatttggatgatgtttgtggctttccagaaataagaaa

SEQ ID NO: 85207 - DNA, 531 bp, Zea mays
aggagtttaaaaagctgatgtcacgaccaccgcatatatagtattgctcgtaccggtccggaattcccgggtcgacccacgcgtccgcaactagcaacatagaaagcacaattgtgtaccaacaatggccgccaaaatatttagcgctacttatgctccttggactttctgcaagtgctgctactgcgaccatcttgccgcaatgctcacaagctcctatagctccccttctttccacgtacctctcaccagcggtgtcttacgtatgtgaaaacccaattattcaaccctacaggatccaacaggcaatcacagctggcatcttacctttatcacccttgttcctgcaacaatcatcagccctattacatcagttacctttggtgcatttattggcacaaaacatcagggcacaacaactacaacaactagtgctagcaaaccttgctgcctactctcagcaacagcagtttcttccattcaaccaactagctgcattgaactctgcttcttatttgcaacaacaacaat

SEQ ID NO: 85208 - DNA, 538 bp, Zea mays
  unsure (1)..(538): unsure at all n locations
aggaagttnnnttagagcgtgtnctaccgacacgggggcgataacagtagtgctcgtaccggtccggaattcccgggtcgacccacgcgtccgcccacgcgtccggtggcgcataacaaatacacttgtccaatatgctctaaaacagctgttgatttgacacatcattgggaaatgttggatcaagagatcgaagccacgatcatgcctcttgtgtatcgctacaagatttgggtgctttgcaacgattgcaacaaggtctcagaggtgaactttcacgtgattggccacaagtgcagccactgcagatcgtacaacacccgaacgacatcgcgccctgcagatttatcgggaagcagctcaccttcaacagactcatccgacaacaacatatagagaagaaaccattgacagagccaatatgattgaagaaccgaaggaggaaatattgtttcggggcgtgcgtgcttgccaaacttgaagactcccagccgtttattggccctcatcttggctagattcagttcaattcatgaat

SEQ ID NO: 85209 - DNA, 603 bp, Zea mays
  unsure (1)..(603): unsure at all n locations
nggtaagcntcagttgttaggggggctcgtgggagacagtatcctctcggaattcccggctcgacccacgcgttcgcccacgcgtgcgtccacgcgtncgactggaccctggtggttatttgcagcaacaactattaccatgtaaccaggtaggtactggctaattttaagaacaaccacttgttgcatttaacccattgggcggaatggaacccggtggttatttggaagaaccaattctaactacaattaagcagctagcttgaacaaaaccgtgctttccttctttgacaacagcaacatgttgcttggcttttctaaccagcaagtnttgcggggctaacccccggcatacccttctttacatacttaccatnacaattgggttgggcccttttggtcccaaaactttgggcctttggaccagtactcncaatgcgggcccttnccttacncatnacatacnatcaatccaattggggtggggttgcccccttctttttttaggaaatnggcctttaaattaagtttggtaaaatttccattgtaatttaaaaaggtttttttttttgggattgaattgggaattgtttgggccccaaa

SEQ ID NO: 85210 - DNA, 529 bp, Zea mays
  unsure (1)..(529): unsure at all n locations
nagttagtnttaaggtgnnagtaccgtatcacgccattacagtcatgctcgtaccggtccggaattcccgggtcgacccacgcgtccgctgagatcctcgttgatggccctcatgacattgatcgctgcgcttacgtcactgagaccgtccttgctgcctgctacaaggcgctcaacgagcaccatgtcctcctggagggtaccctcctgaagcccaacatggtgactccaggctccgactccaagaaggtgactcctgaggtgattgctgagtacaccgtccgtaccctccagaggaccgtccctgctgctgtgcctgctgttgtcttcctctctggtggacagagcgaggaggaggccacccgcaacctcaatgccatgaacaagctcagcaccaagaagccgtggtccctgtctttctccttcagccgtgccctccaagcgagcaccctcaaggcctgggctggcaaggtggagaacttggagaaggctagagctggcttcctcgccaggtgcaaggccaactctg

SEQ ID NO: 85211 - DNA, 523 bp, Zea mays
  unsure (1)..(523): unsure at all n locations
agttagggtagggttgatttgacgcgtactcgctcagctatcncgttcggaattcccgggtcgacccacgcgtccgcgatatgataaagtttgcgaagaagatgtatccggaggtggatttgatcggtggtaatgtggtgacaattgcacaggcccagaatttgattcaagctggtgtggatggattgcgtgttggaatgggatcgggctcaatttgtaccacccaagaggtttgtgctgttggaagaggacaggcaacagcagtgtataaggtttcatcttatgccaaggatcacaatgtaccggttattgctgatggtggaatttcaaactctgggcatattgtgaaagctctgtcgctgggggcatccactgttatgatgggcagctttttagctggtagtcatgaagctcctggtacttatgagtataaagacggccgccgagtcaaaaaatacagaggcatgggctctcttgaagccatgacaaaagggagtgatgcaaggtaacctggtgatacacn

SEQ ID NO: 85212 - DNA, 527 bp, Zea mays
  unsure (1)..(527): unsure at all n locations
agttaggggtaagattttatacacgagccggggcgagacagtatagctctccggaattcccgggtcgacccacgcgtccgagagccgcaaggccatgctgaagcttggcatgaagcccatcactggtgtcagccgcgtgactgtaaagaaaagcaagaatatactctttgtcatctccaaaccagatgtgttcaagagcccgaattccgacacgtatgtcatattcggcgaggctaagatcgaggacctcagctcccagctgcagacccaggcagcagagcagttcaaggctcctgacttgagccagatgatctcgaatccagagacgtctggcccgggacaggaggacaatgatgaagaggtcgacgaaactggtgttgaggccaaggacattgagctggtgatgacccaggcatctgtttcaaggcccaaggctgtcaaggccctcaaggcttctaatggggacattgtcactgccatcatggatctgacaacctnaggtgatatttctgtccgtgccacttttg

SEQ ID NO: 85213 - DNA, 524 bp, Zea mays
ggttagtagtgtttgtacccgcaggggggaatagtagtctcgtccggttcggaattccgaggctacgacgctcacgcgtaagccgacgcagagggagcgatatggggttcgtcagagacacgatggagtcgatccgctgcatgcagatccgccaagtgctcatgcagatcatcagcctcggtatgattgttacctctgcattaatcatatggaagggtttgatagttttcacggggagcgagtcaccagttgtagtggtgctctcgggtagcatggagcctggatttaaaaggggtgatatcctgtttttgcatatgagcaaagatcctattcgcacaggagaaatagttgttttcaatgtcgatggtcgtgagattccaattgttcaccgagtgattaaggtccatgaacgtcaggacactgcagaagtggacatcctcaccaaaggtgacaataattttggggatgaccgactattatatgcacatgggcagctttggcttcagcaacaccacattatgggg

SEQ ID NO: 85214 - DNA, 522 bp, Zea mays
  unsure (1)..(522): unsure at all n locations
gttaggtagggtttattacgatcccgccatatagtatnactcgtaccggtccggaattcccgggtcgacccacgcgtccgatatcttttagtaacctttcaataggcgtcccccaagaactagtaaacatggcaaaactgttgagcctgttcttagccctctcctttgtagcagctatgtttgccataggctctcatgctgatggagactgtgagaatgacctccaaagcctgataagtgactgcaagacatacgtgatgttcccagctaatccaaaggtccctccttcggatgcttgctgtggtgtcatcaagaaggcaaacgtttcttgcttgtgctccaaggtcaccaaagaaactgagaaggttgtgtgcatggagaaggttgtgtatgttgctgagcagtgtaagaggccatttgagcatggcttccagtgcggaagctacaaggttccagcaaactgatgatatcgcaagagggaagcgcttgacgtagtcattagatgtcaaatgtgcagccgag

SEQ ID NO: 85215 - DNA, 533 bp, Zea mays
  unsure (1)..(533): unsure at all n locations
nagttntagatcgtgttctaatacagacgacggaaagtaactgtcaaaccgttcggaattccggttccaggctacgacccacgcgtccgcggacgcgtgggcggacgcgtgggtcgtggaagaggataaacttgagctcgcaacttctcttattgagaaggcgaaggcaaagggggtttctcttttgcttcccactgatattgtagtagcggacaagtttgcagctgatgctgagagcaagattgtccctgccactgctatccctgatgactggatgggtcttgatgttggccctgatgccaccaaaacattcaacgaagcattggacaccaccaagactgttatttggaacggccccatgggagtgtttgagttcgagaagtttgcagctggcactgaggcgattgccaagaagctagctgagcttacaaccacgaagggtgtcactaccatcatcggcggcggcgattctgtcgctgctgtcgagaaggctgggctggccgacaagatgaagcacatttcaaccggcgggg

SEQ ID NO: 85216 - DNA, 502 bp, Zea mays
  unsure (1)..(502): unsure at all n locations
agttaagcnaggcttgataagaggaggggggggaaatggtaccactcttcggattcccgggtcgacccacgcgtncggggcccaccagccaccttgaaagggggattcaattgccaccattgaaccaccattggggaccaggattttttccctcctaatgctcctggctctttcggcatgtgtggctaacgcgacaattttccctcaatgctcacaagctcctatagcttcctttcttcccccataccttncatcaatgatagcttcagtatgtgaaaacccagctctttaaaccctatanggctccaacaagcaatcgcagcatgcaacatacccttatcaccctttgttccacaatcgccagccctatctttggtgcagtcatgggtacaaaccatcaaggcacatcagctgcagcaactcgtgctaactgtgatcaaccaagtagctctggcaaacctttctccctactctcagcaacaacaatttcttccattcaacc

SEQ ID NO: 85217 - DNA, 485 bp, Zea mays
aggaggcctagttatgataaacgccaatgcggaaaaatagtaagtctgcaccggttcggaattcccggctcgacccacgcgtaccgggggtacaatgccgttgttagctcgtttagaagagtatcggctatgtgcaagggatggcgatatgcattcaaccaacttgctttgacaaacccagcagcgttctaccaacaacccatcattggtggtgccctcttttagattgcttatgagttatagttcaataataaagttgttgtgatgatgtttgtggcttaccagagataagaaagtacagctctagatgcttatgtgcaaaagcaagattacttaataagcccaaggggaccggtgcccaagaacaacttgaccactgagcccatgaacgacattagccataaaccttctgagaatgcgcgcacggattaaagatccactctagcatcgctagcgaatccaaggacccaacaccgggtggccat

SEQ ID NO: 85218 - DNA, 527 bp, Zea mays
  unsure (1)..(527): unsure at all n locations
ggggtgaggagaagtgtgtctgattcacgcacagaagtaactcgctactcggtcggaattcccgggtcgacgccacgcgtccgggaggagcaaggagcacgactcgatgggtcactccaacgtttggaactcgcaccctaagaactacggccctggctcccgcgtctgccgggtctgcgcgaaccctcacggtctgatcaggaagtacgggctcatgtgctgcaggcagtgcttccgcagcaacgccaaggacattggtttcatcaagtaccgttgaagaggccactgtgctgctgtggagaacttcctacatcaaagaaatgggtccttcattagaaggcctaatttatgcgctntagctttttgttcagaacttgagactcatgtgttaaactcgacttgttaaagttttgatggctactttgtgcttgttggaccagctttaatcagaagattgaaantttcttactaaaaatgacaaaaacaaaaagggcggcccgttctaaaggatccaagcttacgtcccc

SEQ ID NO: 85219 - DNA, 505 bp, Zea mays
  unsure (1)..(505): unsure at all n locations
ggtaggtcttgatcacgaaaacgaatagnctcaactcgttcggaattcgggtcgacgccacgcgtccggcctggtcgagatgtacggcaagaactctcgcctgagggagctggcgaacctcgtgagcgttgccggcgaccacggcaaggagtccaaggacagggaggagcaggcggagttcaagaagatgtacagcctcatcgacgagtccaagttgaaggcccatatccggtggatctcggcgcaaatgaaccgcgtccgcacgggggagctgtcccgctacatttgcgatacaaagggcgcattcgtgcagcctgcgtcctacaaaccgttcggctgactgtgatcgagtccatgacctgccgtctggccacgatccgcaacttgcattgtggcccttgtgaaaacatcgttgaccgggtattttgccttgacattgaccttaacaacagaaccaggcgccgatatcctgtcaacctctttgaacaatgcangggagatcccg

SEQ ID NO: 85220 - DNA, 506 bp, Zea mays
  unsure (1)..(506): unsure at all n locations
agtaggagtcttgatccagccaagacagtagtgtcatacctttcggaattcccggctcgacccacgcgttcggagaccaactagcaacatagaaagcacattagtgtaccaacaatggcagccaaaataggttgcttccttatgctccttggtctttctgcaagtgctgctaccgcaaccattttcccacaatgctcacaagctcctatagcttcctttcttcccccatacctctcaccagcggtgtcttcagtatgtgaaaacccaattcttcaaccctacaggatccaacaggcaatcgcagcaagcatcttacctttatcacccttgttccttcaacaaccgtcagccctattacagcagttacctttggtgcatttgttggcacaaaacatcaaggcacaacaactacaacaacttgtgctaagaaaccttgctgcctactctcagcaacagcagtttcttacattcaaccaactggctgcattgaactctgctgcttattn

SEQ ID NO: 85221 - DNA, 516 bp, Zea mays
  unsure (1)..(516): unsure at all n locations
ggttagttatgcttntcttctgtacgcccgccacttaccgtcaagcctgtaccggttcggaattcccggctcgacccacgcgtccggccccgtgatgcttttcaaaggatggaaacgactgatccaggacatgattgggagagaagggccctttctggagactgcttgtgtgccatttgctggtcttgctattcttctttggccatttgctgtagtaggagccgttctggcatccatactctccagtgcccctttaggtgcttatgctgcagttgtagcttatcaggaatcctcccttatcctgggaattgcctatgtgttctcgtcagtgtctatatttgatgaatacacaaatgatgttcttgacatggcgcctggttcttgttttccaagatttaaatatcggaagggcaaagatgagtcttcacacgggcacagtgttccattatccagaccagcctcattcaacagggagaagcaagaacggaaaaagacctncttctcgtgttactttat

SEQ ID NO: 85222 - DNA, 511 bp, Zea mays
  unsure (1)..(511): unsure at all n locations
agttagttatctattgatttgnntacccgtnngattganctgatcgtaccggttacgaacacccggctctagccactcgtccttcgacatataaagcacaatattttaccttcaatggcagccaaaatattttgcgtccttgtgctccggggactgtctgcaaccgctgctaccgtgaccattttaccacaatgctcacaagcttctatagcttaccttcttcccccatacctctcatcatcggtgtcttcagtatgtgaaaacccaattcttcaaccctacaggatccaacacgcaatctcatcattcattatacctttatcacccttgatccttcaacaaccttcatccctattacagcacttacctttgatgcatttgatggcacaaaacatcaagacacaacaactacaacaacttgtgctatcaaaccttactgcctactctcataacaatcaaataattcaattaaacaactgactacattgaacattacctctaatttcaacaa

SEQ ID NO: 85223 - DNA, 506 bp, Zea mays
  unsure (1)..(506): unsure at all n locations
agtagaacggtacnaatacgtatcccatcgncacctctgataccntncannttcggaattgccgggtcgacccacgcgtccgcggacgcgtgggccggctacgaccagctgctccgcgcgctccaggacaagtggttctcgcacttcaccatcaggaagttcgccgacgacgagaggaagctggtggacgcggtgaacgggacggagtacgtacccacgtacgaggacaaggatggcgactggatgctcgtcggcgacgtcccctggaagatgttcgtggaaacctgccagcgccttcgtctgatgaaaggttcagaggccgtgaacttggcaccaagagccgnccgatgaggcacactccgttgggcgttggcacgcacgcacgcactggcgtcttgaaggaaagggggactctgctggcttgatgaggatcttcacgtgagataggaacgtgtgtacagttgtcgccttatggtattgagtngaggaaactnggnaagtccatt

SEQ ID NO: 85224 - DNA, 502 bp, Zea mays
  unsure (1)..(502): unsure at all n locations
agtaggcgacttgtcacgaggggagtaactgtatcactgtcggaattcccgggtcgacccacgcgtccgccgacgagtagagctctccactcaaaccatcctaagcctctactgtctcagttggggcgtcgagcacaaggcccttggtgggctttgccagcaggtcggtgtactgctggaacggggccattgagaacttggtctgactccagaattcaggagtgaggaagccgtaggtcttcatcaggcagtcgaaggttgccttgacgaagttgccaagggtcttagtggagccacgggacgaggtgaagacatcctcaatgccagcgaactgcagcaccttcttgggcacgcgcgcggcgacgatgccagaacccctgggcgcgggtaccatgcgcacggtgacggagccacacttgccagtgaccttgcaaggcacggtgtgcggctgtccgatcttgttcccncagtaccctcttctgacggngacgacggagagctt

SEQ ID NO: 85225 - DNA, 506 bp, Zea mays
  unsure (1)..(506): unsure at all n locations
aagtagtagacttgattcacgaaagaaagtattctcatctctnttcggaattcccggctcgacccacgcgtccggtgtctctgaccattgggacatgatgggctcagatcctttggaggccggctcccagggtgctcagctggtgctggatatccgcaagaggaagggtctcaaggaacagatgacccctctttctgagtttgaggacaagctctaaaatttttggctgttggtgatactgtttcatctgccggtttaatcatcaattcgtctactgtaatagcagcgacttcaatattttattttgttttagttgtcaaatgcacctgtttttgaacaaacaaaaaaaaaaagggcggtcgctctagaggatccaagcttacgtacgcgtgcatgcgacgtcatagctcttctatagtgtcacctaaattcaattcactggccgtcgttttacaacgtcgtgactgggaaaaccctggcgttacccaacttaatcgccttgcaac

SEQ ID NO: 85226 - DNA, 516 bp, Zea mays
  unsure (1)..(516): unsure at all n locations
ggagcggctcngagtacgtcaatcgacgcagatcgntacancagtaccggttcggaattcccgggtcgacccacgcgtccgcgcaaattgcaccaagaaatccatcgagaggccgtcgacaggggaattaatggcgtcgtggtctagcagcagccaccgccgcctcatcctcgcagccgccgtcctgctctccgtgctcgcggctgccagcgccagcgccgggacctcctgcgtgccggggtgggccatcccgcacaacccgctcccgagctgccgctggtacgtgaccagccggacctgcggcatcgggccgcgcctcccgtggccggagctgaagaggagatgctgccgggagctggcggacatcccggcgtactgccggtgcacggcgctgagcatcctcatggacggcgcgatcccgccgggcccggacgcgcagctggagggccgtctagaggacctgccgggctgcccgcgggaggtgcagaggggattcgccggcacccttgtcacgga

SEQ ID NO: 85227 - DNA, 507 bp, Zea mays
  unsure (1)..(507): unsure at all n locations
ggaagtcttgattcatccagcacaatatctcattacgtacgcgttcgactcccggctcgacccacgcgtccgcagttgttcaaccctacaggatccaactggcaatcgcaacaggcatcttacgattatgacccttgttcctccaacaaccgtcagccctattacagcagttacctttggtccatttggtggcacaaaacatcagggcacaacaactacaacaacttgtgctagcaaaccttgctgcatactctcagcaacatcagtttcttccattcaaccaactggctgcattgaactctgctgcttatttgcaacaacaattaccattcagccagctagttgctgcctacccccagcaatttcttccattcaaccaactagcagcattgaactctgctgcttatttacagcagcaacaactactaccattcagccagctagctgatgtgagccctgctgccttcttgacacaacaacagttgttgccgttctacctgcacgctn

SEQ ID NO: 85228 - DNA, 510 bp, Zea mays
  unsure (1)..(510): unsure at all n locations
aattagaatgctgtgtccagtcgcacgaattcatcgcatngccgtaccggttcggaattcccggctcgacccacgcgtccgaactactaccattcagccagctagctgatgtgagccctgctgccttcttgacacaacagcagttgttgccgttctacctgcacgctatgcctaacgctggcaccctcttacaactgcaacaattgctgccattcaaccaacttgctttgacaaactcaacagtgttctaccaacaacccatcattggtggtgccctcttttagattgcttatgagttatagttcaataatgaagttttttggatgatgtttgtggcgtcccagaaataagaaagtacatttctagattcttatgtgcttctagtctccaaatgtggtcgatagttattttgctctaagatcgggagtaatgaagtaaaaaaaaagatataacagaagacaaacactgaagaaaaaaaaaaagggcggccgttctaaaggatccaagtta

SEQ ID NO: 85229 - DNA, 514 bp, Zea mays
  unsure (1)..(514): unsure at all n locations
nggaggcagggaaggcttgattaccgacgaccggaagctntactgcaatnactctaccggttcggaattcccgggtcgacccacgcgtccggaaggattcctcgccaaggtaccgattctgaatggccatgtctactccataaatgacaatgccacagtggaggatgcagcaacagactatgaattcatgatcaggcagctggttaaggtccgcacaataggagtctcagagagaaacgactgtcccaagttcgatctcatccttctcaccatgggctccgatgggcatgtggcctcgcttttcccgaaccaccctgccatggagctgaaagacgactgggtcacctacatcaccgactctccgcagcctcctcctgagaggatcaccttcactctcccagtgatcaactcagcatccaacatagcaatagtgtccactggtgatgacaaagcaaaggctgttcacatagcagtttctgacatggcncgaagtcttgatgctcctacatcactn

SEQ ID NO: 85230 - DNA, 501 bp, Zea mays
  unsure (1)..(501): unsure at all n locations
aggagtnctagctatttacgacctcgcatagcagtcatgctctaccggttcggaattcccgggtcgacccacgcgtccgcccgacgcgtccgggctgcggctgccagccaccggcgccggttcatctaccgccggcggggcatctgccacctgcggctcacctgccacctgcggtgcatatcccaccgccggtccacctgccgacgccggtccacctgccaccgacggtccatgtgccgtcgccggttcatctgccgacgacaccatgccactaccctactcaaccgctccggcctcagcctcatgcccagccacacccatgcccgtgccaacagccgcatacaagctcgtgccagctgcatggaacctgcgagcgttggcagtactcccgatcctgagccagtgcgtcgagtttctgatgcatcacagcagtcagaccgcgacgccctactgctagactcagtgccagtacatgcggcaacagtgttgccagcagatcag

SEQ ID NO: 85231 - DNA, 479 bp, Zea mays
  unsure (1)..(479): unsure at all n locations
ctctcgtcacgctgtcggaattcccgggtcgacccacgcgtccgctctcgcatccaggacacagggtaccatgattgcttctgagggtctgaagcacagagggtttgaggtttgcctagctgatcttcagggcgacgaggatcaagcttacaggaaaatcaggctccgtgctgaagatgtgcagggcaggaatgtgctcacaaacttttggggcatggattntaccactgataaactcagatccctagtgaagaagtggcagacattaatcgaagcccatgttgatgtcaagacaaccgacaactacatgttgcgtctgatctgcatcggcttcaccaagaggcgcccaaaccaagtcaagagaacctgctatgctcaggcatcccagatccgtcagatccgccgtaagatggttgagattatgatcaccaggcttctacatgtgacctggaagaacttgtttcgaaattattccagaa

SEQ ID NO: 85232 - DNA, 497 bp, Zea mays
ggaggagcttggttacgcacgcagtagctcgactctttcggaattcccggtcgacccacgcgttcgctggacactctagtaaagtgaaaaattcacttatattcaacacatttgtattgtgccgggtgtgtaatgaggtcaattctcgtaaaccagaagaactgaacatcttttccggagtttcaagaaatcatcttttcttggcagtagtgagcataactgttgtgatgcaagtgataattattgagttcctcgggaaatttacatcaacagtgagactcaactggaagctttggcttgtttctgtagttattgcttttctaagttggcccttggcttttgttggaaaattcattccagttccgaagactgaattgaaagatctcattgtaaggtgttggcctaaacgtggcgagagtgcatcacaacagactcatgatgacagaatggaagtaccagtgtgaaacttgtcttgagcagcttctcggaaatatcag

SEQ ID NO: 85233 - DNA, 513 bp, Zea mays
  unsure (1)..(513): unsure at all n locations
nagtcagcgtctttttcgaatccagacttatatgcaccactgtaccggttcggaattcccggctcgacccacgcgtcctctgactcgtgggcggacgcttttgtgctctccttgctttcacacttggtgtggagcagatgatttgctgctgcaacaagatggatgctactacacccaagtattcaaaggcccgttatgatgagattgtgaaggaagtctcttcctacctgaataatgctggatacaaccctgatcagatctacttcgatccaatctgttgctttggacgtgacaacatgattgagaagtccttcaaccttgactggaacatgaccccaaccctacttgaagctctggacttgatcaatgagcctatgaggcctcataactatccccttattgtccacctcaaggatgtttccaaatatggtggtttggaacctgcccttgttgaccttattaagaactggtttcattaaccctgattgcgaggtacttttggacctaatagct

SEQ ID NO: 85234 - DNA, 498 bp, Zea mays
tggtagcttgtttcagcacacgaataatagtatgcctgtcggttcggattcccggtcgaccacgcgttcgccagcgtccggtcggttcactttccaggtaaggaagggttcgtctggtggcgccgccgcagccaaagtcgggcctcttcgttggcatcaacaagggtcatgtcgtcaccaagcgcgagctgcctacccgcccgtgccaccgcaaggggaaatcaacgaagagggtgtctatggtcaggggcctgatcagagaggttgctgggtttgctccttatgagaagcgtatcactgagcttctgaaggttggcaaggacaagcgtgccctgaagcttgctaagagaaagcttggaactcacaagagggcaaagaagaagagagaggaaatggggggcgtcctcaggaaaatgaagtcggttggtacgcacactgacaagaagaaatggagagcttttcaagttcatggagccttgccaaaattatgttccaatg

SEQ ID NO: 85235 - DNA, 510 bp, Zea mays
ggtagaagctgagtacgtaccagcacttacgtcatagcagttaccggtctcggaattcccggctcgacccacgcgtccgcagaaacacacctagcgaagcgcactatcaacgacctaacaacaatggcttggaagagattatccctccttgcgcttcttgccctttttgtgagtgcaacaaatgcgttcattattccacaatgctcacttgctccgagtgccattattccacagttcctccctccagttacttcaatgggcttcgaacacccagctgtgcaagcctataggctacaacaagcgcttgcggcgagcgtcttagaacaaccaattgcccaattacaacaacaatccttggcacatctaaccatacaaaccatcgcaacgcagcagcaacaagcactgagccacctagccgtggtgaaccctatcgcctacttgcaacaacagctgcttgcatccaacccacttgctttggcaaacgtagctgcttaccaacaaccacaacat

SEQ ID NO: 85236 - DNA, 503 bp, Zea mays
  unsure (1)..(503): unsure at all n locations
agtaggcatatgtttttaccgatacgcgggggaggagagtagtcttctaccggttcggaattcccgggtcgacccacgcgtccgcccacgcgtccgagaagacatcggctttcaggcggcctccaatcttgatcgtcatcggggacccaacctgtgatcccaagtctctacagcatgctctgggaaagggagccatagagtatgaagagtttctgaaaaccggtgacccggagttcagttggaagccaccgaaggacgagtggcagagcatcgccctaggctacacttctgggactacttccagcccaaagggcgtcgtgttgcatcaccgcggtgcttatctcatggcactcagcgttgccatcgtgtgggggatgcctgaaggggctgtctacttgtggactctgcccatgttccattgcaatggttggtgctacactagggcgctggcagcgttctgcggaacaagcatatgtcttcgccaggtgagcacanaagccatn

SEQ ID NO: 85237 - DNA, 500 bp, Zea mays
  unsure (1)..(500): unsure at all n locations
aggaggcagttgnnnttaagtcatcggagggtatcagtatgctctaccggtttcggaattcccgggtcgacccacgcgtccggtaacatttacggggaacttcaatgagtattttggctttgccaccgatgtagatgcaggggtttacttgatgctggtaaatgatctaattcatggactttatcctgaggctgtaaccattggtgaagatgttagtggaatgcctacatttgcccttcctgttcacgatggtggggtaggttttgactatcggatgcatatggctgtggctgacaaatggattgaccttctcaagcaaagtgatgaaacttggaagatgggtgatattgtgcacacacttacaaataagatgtggttagagaagtgtgtaacttatgcctaaaggcatgatccagcattaatcggccaccagacttatgccgtttgggtgattgaccaggatatgtatgatttcatggccctcgatagaccttcaactc

SEQ ID NO: 85238 - DNA, 510 bp, Zea mays
  unsure (1)..(510): unsure at all n locations
ggagtaagtcntcagctgattacggatatggtgggggaggaggggaaatgcttctaccggtccggaattcccgggtcgacccacgcgtccggagaccaactagcaacatagaaagcacaatagtgtaccaacaatggcagccaaaatatggggcttccttatgctccttggtctttctgcaagtgttgctaccgcaaccattttcccacaatgctcacaagctcctatagcttcccttcttcccccatacctctcaccagcggtgtcttcagtgtgtgaaaacccaattgttcaaccctacaggatccaacaggcaatcgcaacaggcatcttaccattatcacccttgttcctccaacaaccgtcagccctattacaagagttacctttggtccatttggtggcacaaaacatcagggcacaacaactacaacaacttgtgctagcaaaccttgcttgatactctcaagcacatcagtttctttcatttcaccaaactgctgcattgaa

SEQ ID NO: 85239 - DNA, 479 bp, Zea mays
  unsure (1)..(479): unsure at all n locations
ttgtcgtagcactntcggaattcccgggtcgacccactcgtccgtgatgctgaactgaagctggtcggtgtgtatggtctgaggtgcaagcgtgagctttggagggtccagtatgcactgagcaggatccgtaatgctgcaaggcacttgctcacccttgacgagaagaacccccgtcgtatctttgagggtgaggcgcttcttcgccgcatgaaccgctatgggctgcttgctgagggtcagaacaagcttgattatgttcttgccctcaccgctgagaacttcctcgcaaggcggcttcaaacacttgtcttcaaggctggcatggccaagtccattcaccatgctcgtgtcttgatcaagcagcgtcacatcaaggttggcaagcaaattggcaaacgtccatcattcatggtgagggtggaatctgagaaacacattgacttttcactggaaacccaatccgtggaaggccccat

SEQ ID NO: 85240 - DNA, 509 bp, Zea mays
  unsure (1)..(509): unsure at all n locations
nggtaggtagccttgtttttcatnctcacgaacttgacgtcatcactattcgaattcccggctcgagccacgcgtccgcctgcctctgctgctccagagctcgttttcacctgtcaccggcaccctcgatcacgcggtgcggcgaggtaaggtcagcatggtgagggtcagtgtgcttaacgatgcgctcaagtgcatgtacaaacctgagaaaaatcgcaaaaaggcaggcatgaacaaggccgcgtccaaaggcaatatcaaattcctgacgggcattcaacggcaccggtacattggaaaagtcgaataccgtgatgaccaccgatcgggcaaaaaccaggtccaacttaacgggaaggttaacaagtgcggagtaatcagccctcgctttgatatccgcgtgaaagacattgaaggatggactgcaaggatgctcccgttcaggcagttctgatacattgtactcacaacttttggaggcattatgaaccacaagagcccgccgg

SEQ ID NO: 85241 - DNA, 513 bp, Zea mays
  unsure (1)..(513): unsure at all n locations
ggtagtagcttactcacgaacacgcattagcagtcatgcctcgtaccggttcggaattcccggctcgacccacgcgtccgagcgaagcacattagcaacaacctaacaacaatggctaccaagatattatccctccttgcgcttcttgcgctttttgcgagcgcaacaaatgcgttcattattccacaatgctcacttgctccaagttccattattacacagttcctcccaccagttacttcaatgggcttcgaacacccagctgtgcaagcctataggctacaacaagcaattgcggcgagcgtcttacaacaaccaatttcccagttgcaacaacaatccttggcacatctaacaatacaaaccatcgcaacgcaacagcaacaacaattcctaccagcactgagccacctagccatggtgaaccctgccgnctacttgcaacagcagttgcttgcatcaaacccacttgctctggcaaacgtagttgcaaaccagccacaacaacagctt

SEQ ID NO: 85242 - DNA, 502 bp, Zea mays
  unsure (1)..(502): unsure at all n locations
aggagtctctttaagtccagntcaacagcattattctttatttcataccggttcggaatcaccggctcgacgcacgcgtgcgagggaacctcattagcaacattttaacttcaatggctaccaagatattatgcgtccttgcgcttcttgcactttttgcgagcgcaacaaatgcgttcattattccacaatgctcacttgctccaagttccattattacacagttcctcccaccagttacttcaatgggcttcgaacacccagctgtgcaagcctataggctacaacaagcaattgcggcgagcgtcttacaacaaccaatttaccagttgcaacaacaatccttggcacatctaacaatacaaaccatcgcaacgcaacagcaacatcaattactaccaacactgagccacctagccatggtgaaccctgccgtctacttgcaacagcaattgcttgcatcaaacccacttgctctggcaaacttagttgcaaaccacct

SEQ ID NO: 85243 - DNA, 504 bp, Zea mays
  unsure (1)..(504): unsure at all n locations
nggtaagatgtagtcctacccgccaatnatcgtcataccnttcgaattcccgggtcgacgcactcgtccggggttggcttctcctccccctccggttcgggttcgggttcgtgaggttctccggggtgcgggttcgtgggtgagcggatcgagatggcggcgtcggatgttgagtaccgctgcttcgtcggcggcctcgcctgggccacggacgaccactcccttcacaacgccttcagcacctacggcgaggtcctcgagtccaagatcatcctcgatcgggagacgcataggtcccgcggcttcggcttcgtcaccttctccacggatgatgcgatgcggaacgccatcgagggcatgaacggcaaggagctggacggccgcaacatacccgtcaacgaggcccaatcccgcgcggccgtggaggcggcggcggtgggtacggtggtggccgtggaggcggcggttacggcggtggcgggctccttgatggcggtggcggtt

SEQ ID NO: 85244 - DNA, 507 bp, Zea mays
  unsure (1)..(507): unsure at all n locations
gtttagagcttgtcccagcaaagactattgtcanctcgttcgngattcccgggtcgacccactcgtccgcagctagcaacatagaaagcacaatagtgtaccaacaatggcagccaaaatattttgcgtccttatgctccttggtctttctgcaagtgttgctaccgcaaccattttcccacaatgctcacaagctcctatagcttcccttcttcccccatacctctcaccagcggtgtcttcaatgtgtgaaaacccaattgttcaaccctacaagatccaacaggcaatcgcaacaagcatcttaccattatcacccttgttcctccaacaaccgtcagccctattacagcagttacctttggtccatttggtggcacaaaacatcaaggcacaacaactacaacaacttgtgctagcaaaccttgctgcatactctcagcaacatcaagttcttccattcaaccaactggctgcattgaactctgctgcttatttgcaacaacn

SEQ ID NO: 85245 - DNA, 515 bp, Zea mays
  unsure (1)..(515): unsure at all n locations
ggttaggagctgnnagtctgcaccccagacatacactatcgatgtaccggtccggaattcccggctcgacccacgcgtccgcaatagtgtaccaacaatggcagccaaaatattttgcctccttatgctccttggtctgtctgcaagtgctgctaccgcgaccattttcccgcaatgctcacaagctcctatagcttcccttcttcccccgtacctctcaccagcggtgtcttcggtatgtgaaaacccaattcttcaaccctataggatccaacaggcaatcgcagctggcatcttacctttatcacccttgttcctccaacaatcatcagccctattacagcagttacctttggtgcatttattggcacaaaacatcagggcacaacaactacaacaacttgtgctagcaaaccttgctgcctactctcagcaacagcagtttcttccattcaaccaactagctgcattgaactctgctgcttatttgcaacaacaactaccattcagccagn

SEQ ID NO: 85246 - DNA, 697 bp, Zea mays
  unsure (1)..(697): unsure at all n locations
agagaagagatgtgcttcacgcagccccgaactagtcagctagngcctcgtaccggtttcgtgaattacccggggctcgacgccacgtcgtctcgtcccacgtcgtctcgggctcgtccctttttttgttttttttttacaagaatgtcaaaagtcgctgcgtaatgtgtaacgtgaaactatttgtgggcatcggaggaatcgtttactagtactatatngcagttggaacactatctcaaacgtcagggaagattatagtctgtcccacttagcttacccacgaactacaattacagtggcttatatcacctcgtagcctgactccattgtctacacgtagactactccatatggtgngnntcaaggtatggctgaaatgatgangnntcgtgaaggcccataccaaccatggcatgaccatagtattangnntcacctgctttggcaacataccctcttggcagtcccgcatattgggaccactatntcntnnatcacttttgcttcncnttcccttcaagaaatgcctttgnggngcacccnncgngcangaacnacccatagtcngtntngggcaaaagtntngtnggggtcaaccccgttgtcttggtattgccacccccgaaggggcaaggcaaaagggccgcttttcgtaacncctggncttttttttcccacctttttgcngaatcat

SEQ ID NO: 85247 - DNA, 497 bp, Zea mays
  unsure (1)..(497): unsure at all n locations
agaaggatgctgnattacgtatccgcataataagtactctctaccggtttcggaattaccggctcgacccacgcgtccggggacttctaagtaccagctctctgtatctatcaaggatgttagtggccaaaggattggtgaatatgctagtgcctcgggaagtgttgattttgattctgtgctgtgtagaaactgtaagcgccatatagccagccagtctgctcatcttcatgaggcatactgcatgagacacaatgtagcctgctcacatgatgggtgtggagttgtccttcggaaggaagaagcagcagatcatgtgcactgcaacaagtgcggacgagcttaccagcagagagaaatggaaaagcatatgaaagtcttccatgaaccgttgcagtgcccctgtggggtggtcctggagaaggaagatatggttcagcaccagtccttgacttgccccttgcgattaattgtgtgccgcttctgtggtgacacag

SEQ ID NO: 85248 - DNA, 508 bp, Zea mays
ggggtaatgcgtcagttttttaccgtatcttgggggaagacgggtaggcttctaccggttcggaattcccggctcgacccacgcgtccgcacgatatggtcttgaagttggtctgaccaactatgcagctgcctactgcactggccttctgttggctcgccgtgtgctcaagacccgtggtttagataaggaatatgagggcaatgttgaggccactggtgaggatttctctgttgagccagctgatgagaggaggcctttccgtgctctcttggatgttggccttattaggactacgactgggaaccgtgtctttggtgccctcaagggagctttggatggtggcctggatattcctcacagcgagaagaggtttgctggtttcaagaaggatgacaagcagctggatgctgatatccatcgcaagtacatctatggtggccatgttgctgactacatgaggaacctctctgaaaaggagccagagaagtaccagtctcactctagt

SEQ ID NO: 85249 - DNA, 508 bp, Zea mays
  unsure (1)..(508): unsure at all n locations
agtttagacgtgtgtcagcaaacagactattagtancacgttcggaattcccgggtcgacccacgcgtccgcattcaaccaactagctgcattgaactctgcttcttatttgcaacaacatcaactacgattcagccagctacctgctgcctacccccagcaatttcttccattcaaccaactggcagcattgaactctcctgcttatttacagcagcaacaactactaccattcagccagctagctggtgtgagccctgctaccttcttgatacaaccacagttgttgccgttctaccagcacgctgcgcctaacgctggcaccctcttacaactgcaacaattgctgccattcaaccaacttgctttgacaaacccagcagcgttctaccaacaacccatcattggtggtgccctcttttagatttcttatgagttatagttcaataataaagttttttgtctgatgtttgtggcttcccagaaataagaaagtacatttctaaaa

SEQ ID NO: 85250 - DNA, 516 bp, Zea mays
tggaacagatgtactccagtcggggcggggagcagctatgcctctaccggtctcggaattcccgggtcgacccacgcgtccgcaactagcaacatataaagcacaatagtgtaccaacaatggccgccaaaatatgttgcgtccttatgctccttggtctctctgcaagtgttgctaccgcaaccattttcccacaatgctcacaagctcctatagcttcccttcttcccccatacctctcaccagctgtgtcttcagtgtgtgaaaacccaattgttcaaccctacaggatccaactggcaatcgcaacacgcatgttaccattatcacccttgttcctacaacaaccgtcagccctattacaagagttaccttaggtccatttggtggcacaaaacatcatggcacaacaactacaacaacttgtgctagcaaaccttgctgcatactctcagcaacatcagtttattccattcaaccaactggctgcattgaactctgctgcttatttgcaaa

SEQ ID NO: 85251 - DNA, 516 bp, Zea mays
  unsure (1)..(516): unsure at all n locations
agttttagaagcttgttcaccgaaagggaagtaattgtcatcactttacgaattcggaattccaggctcgacccacgcgtccgctctgcgctgagcacaatgttcacctggtcactgttcctgccgcgaagactcttggcgagtgggccgggctttgcaagattgactctgagggcaaggcaaggaaggttgtaggctgctcctgtgtcgtcgtcaaggactacggtgaagaatctgagggccttaacatagtgcaggagtatgtcaagtcgcactagatgtgtgacatgtttcagtgatactcttgatttggacctgggcttaaaattatgcttttgcatctggggcttgcctaagagattagaacattttactagaagagccgaagaggatatgtatgaacaatttggacatctgaattttttttgtttatggtgctgtcgtctggttntaatgcaaatcatgaagagccgagtttaaaaaanaaaaaaaaagggcggtcgctctagaggatcn

SEQ ID NO: 85252 - DNA, 508 bp, Zea mays
gggagagcttgttcagtgaaacgacttatcgtatgctcgtaccggttcggaattcccgggtcgacccacgcgtccgcgttctggtcgtgtgcctggctatgtcatctgtcagcgcgtctgcaatgcagatgccgtgcccctgctcgttgctgcaagtcttgttctgcgctagcgccggcctgacgacgattatgggcgcctgctggctgtacacttacgcggagtacctgaggcagtcgaaatacagcacgatggcggcgactccatactactccgtgtgagggcagactaacgctatgtaccaggcgctgcggtaacagtgctgccatcagcagatgaggatgatggacgtacaatacgtttcgcatcagctagagatgaagattcagcttgagcgtgccgctgacgtcagcatcagcctgtactagccactgttgatgcatcatcagcagcatctgatggcagctcatgctcttaaccccatggccatgatgatggtccagaacat

SEQ ID NO: 85253 - DNA, 535 bp, Zea mays
  unsure (1)..(535): unsure at all n locations
aggtgttaggtagatctgtgtcacgaacgcgagcgactagntgtcaccactcttaccggttctcggaattcccggctcgtacccacgcgtctcgcaccaacgtcaaattgcacccaagaaatccatcngagaggctcgtcgacaggggcaattaatggtcgtcgtcgtctagcagcagctcacccggcgtcttattctcgcagacgccgttctggtcttcgtgctctcgggtgtcagagccagcgcccggacctcctgcgtgccccggtgggccataccgcacaaccccgtttcgagctgtcgctggtacgcgtacagacggacctgcggcatctggccgcgccttccgtggtcggagctgaagaggagatgctgtcgggagctcgcggacataccggcgtactgtcgcggcacagcgctgtgcaatactctgtacagcgcgatacccccggggcccgactcgcacctttagggccgcctactagacccttcccggtttcccccggaggtgcacagaggatttttccccaccacc

SEQ ID NO: 85254 - DNA, 504 bp, Zea mays
  unsure (1)..(504): unsure at all n locations
taggaagcagcctgtgtaccgtactctgttggagaagggtaggcttctaccggttcggaatccccgggtcgacccacgcgtccggcgcttcttgccctttttgtgagtgcatcaaatgcgttcattattccacaatgctcactggctccgagtgccattattccacagttcctccctccagttacttcaatgggcttcgaacacccagctgtgcaagcctataggctacaacaagcgcttgcggcgagcgtcttagaacaaccaattgcccaattacaacaacaatccttagcacatctaaccatacaaaccatcgcaacgcagcagcaacaagcactgagccacctagccgtggtgaaccctatcgcctacttgcaacaacagctgcttgcatccaacccacttgctttggcaaacgtagctgcataccatcaacaacaacagttgcaacagtttctgccagcgctcagtcaactagccatggtgaaccctatcgtctacctn

SEQ ID NO: 85255 - DNA, 505 bp, Zea mays
  unsure (1)..(505): unsure at all n locations
gagagagcttatttcaatcgaaaantagcgtcattacttttcgaattccgggtcgacgcactcgtccgcgcagacccaacaaccgaggaggaaactcgagcttcaaataggaaattttgggaaactgctttggggaccgttgctggctgcgtgattttgtacatcatagccatgggttggggaaagagaagtggattactgcaatgatgcggaagcatgactgcatgagtgttctgtacccagtgaatactgggttcacaaaaatctccaaaatgagagattcagcttgttcgctgcggcttgctgcggctgcaatccggctgcagctgcggcttctacagtatttttctctctatggatngcagctgcagcagtccaaacagctgcaacagtgtcggcttgtagccaaccaaacacggccattgaattgcaatgctggtcgatcatactgctgaccagaaattacggctctatccactatgctcgaaaaagaaacatcttgcgt

SEQ ID NO: 85256 - DNA, 480 bp, Zea mays
tcgttgtcatcctgttcggaattcccgggtcgacccacgcgtccgcggacgcgtgggcggacgcgtgggcggtcgcgtgggcaactagcaacatagaaagcacgatagtgtaccaacaatggcagccaaaatattttgcttccttatgctccttggtctttctgcaagtgttgctaccgcaaccattttcccacaatgctcacaagctcctatagcttcccttcttcccccatacctctcaccagcggtgtcttcaatgtgtgaaaacccaattgttcaaccctacaggatccaacaggcaatcgcaacaggcatcttaccattatcacccttgttcctccaacaaccgtcagccctattacagcagttacctttggtccatttggtggcacaaaacatcagggcacaacatcttcaacaacttgtgctagcaaaccttgctgcatactctcagcaacatcagtttcttcattcaaccaa

SEQ ID NO: 85257 - DNA, 518 bp, Zea mays
  unsure (1)..(518): unsure at all n locations
tgtttagttaggtagcttgatccagcacccgaaaaacagtatcacatccggattcccggctcgacgccacgcgttcgcagcatagaaagcacaatagtgtaccatcaatggcagccaaaatattttgctttcttaggctccttggtcttttttgcaatgctggtaccgcaaccatttatccacaatgctcacaaagctctatagcttactttattcccccatacctctcaccagcagggtcttcagtatgtgaaaaccccattatttcaacctacaagatccaacaaggaatctgaacacgcatcttacctttattaccctttggtattcaacaaccgtcaagcctattacagcagtttcctttggtgcatttgttggcacaaaacattaatgcacaacaactacaacaacttgtgctatgaaacacttgtgactactcttaaaaaccgcagttttttgcatttcaaacaattgctggattgaactctgctgcttatttgcaacaacaactaccattn

SEQ ID NO: 85258 - DNA, 579 bp, Zea mays
  unsure (1)..(579): unsure at all n locations
gtagaagatgttctcacgtacacaagaacagatcagctagngcctcgtaccggtttcggaattacccgggctcgacgccacgtcgtctcgccgcacgtcgtctcgtcccacgtcgtctctgtactaatcagtaaccaagggtcaaaacttcaacatggtcccgcgaagggctccatcatgatnnctctatgagaagttactacaatcagtaacaatgtcaataccttcaagttgtatgttagggagaagttttcatctctttgacgaatttgatgatcnttcttcccaagtaccctgagctttttgaagggtattngttgactcggacaacgcntgcccctgaaccgtgtcacgaagaatatgcttcaacaacatagcagtctcaaagaccattcaagaagaatgctgattccgcaaaagccctttgacattgaatcaggatacttttgctgaagaagacccctgatgaagtaccagcacccaaggataagacaggatgaaagaggaaaagcgaagatggaggaagaagaaaggccagttcgccaaagttctggaatgagtttggcaaatcaatcaagc

SEQ ID NO: 85259 - DNA, 511 bp, Zea mays
  unsure (1)..(511): unsure at all n locations
nggtaggagctantctcacgaaagggggggaacagtaggctctaccggttcggaattcccgggtcgacccacgcgtccgcccacgcgtccgcccacgcgtccgcccacgcgtccgcttcaaccctacaggatccaacgggcaatcgcagctggcatcttacctttatcacccttgttcctccaacaatcatcagccctattacagcagttacctttggtgcatttattggcacaaaacatcagggcacaacaactacaacaacttgtgctagcaaaccttgctgcctactctcagcaacagcagtttcttccattcaaccaactagctgcattgaactctgcttcttatttgcaacaacaacaactaccattcagccagctacctgttgcctacccccagcaatttcttccattcaaccaactggcagcattgaactctcctgcttatttacagcagcaacaactactaccattcagccagctagctggtgtgagccctgctaccttctgn

SEQ ID NO: 85260 - DNA, 524 bp, Zea mays
  unsure (1)..(524): unsure at all n locations
ggagttagagcgaggtgtggataccgccacaaagaatcatntgttattaccgcaccggtccggaattcccggctcgacccacgcgtccgctgcactgaaccctgctgcttatttgcagcaacaactattaccattcagccagctagctactgcctactctcagcaacaacaacttcttccatttaaccaattggccgcactgaaccccgctgcttatttgcagcagcaaatactactaccatttagccagctagctgcagcaaaccgtgcttccttcttgacacagcaacagttgctgcctttctaccagcagtttgcggctaaccccgcaaccctcttacaactacaacaattgttgccctttgtccaacttgctttgacagacccagcggccttctaccaacaacacatcattggtggtgccctcttttagattgcttattagttgtaattcaataataaagttttttggatgatgtatgtggccaaccagaaataagaagttacatttccagattttaaan

SEQ ID NO: 85261 - DNA, 494 bp, Zea mays
gtaggagctgttaccgatttcgccaagaagtaggctctaccggtttcggattcccgggtcgacccacgcgtccgcccacgcgtccgcccacgcgtccgcggtactcgtgggctcctgcctatgtacaggagcaggaactactaccattcagccagctagctgctgtgagccctgctgccttcttgacacagcaacaattgtagtcgctctacctgcacgctgcgcctaacgttggcaccctcttacaactgcaacaattgctgccattcaaccaacttgctttgacaaacccagcagcgttctaccaacaacccatcattggtggagccctattttagattgcttatgagttatagctcaataataaagactttttgatgaaaaaccaacaacacataattggtggtgccctcttatagattgctaataaaaagagggcggccgctctagaggatccaagcttacgtacgcgtgcatgcgacgtcatagctctc

SEQ ID NO: 85262 - DNA, 503 bp, Zea mays
  unsure (1)..(503): unsure at all n locations
ggtagagcttgttccagcaaggtagtaattgtatctctttcggattcccgggtcgacccacgcgtccggggttggcttctcctacccctccggttcgggttcgggttcgtgaggttctacggggtgcggttgcgtgggtgagcggatcgagatggcggcgtctgatgttgagtaccgctgcttcgtctgcggcctcgactgggccacggacgaccactccctccacaacgccttcagcacctacagcgaggtcctcgagtccaagatcatcctggatcgggagacgcagaggtcccgcggcttcagcttcgtcaccttctccacggaggaggcgatgcggaacgccatcgagggcatgaacggcatggagctggacggccgcaacatcaccgtgaacgaggcccagtcccgagtcggccgttgaagctgctgcggtgggtacagtggtggccgtggaggcagcggctacggctgtggcaggcgccgttatggctgtggcagcn

SEQ ID NO: 85263 - DNA, 507 bp, Zea mays
  unsure (1)..(507): unsure at all n locations
ggtaggagcttgttcacgaaagatagtaactgtcaactcgtctcggaattcccgggtcgacccacgcgtccgcccacgcgtccggttcccttctgacccatgggacagggtttctgattccgccaaggagctcgtgaccgggatgctgcggcgcgaccctaggctgcggctcacggccaagcaggttctagagcatccgtggatgcaggaacacgcggacccacaagactcgtgcgggcagtgccacgagaccggccttcaacgggagggcgccggctcgtgctccttctacacgccgttggcgtcgcggagcatggacgtgagctttgacacgcgtggccccatcgcgtggaggggtgggggcgaggacgaggcgacctgctgctcgcccacgttcgccgtcgtctgcaggtcgtcgttctcggcgttcatcaccgacccggtcccgccgtcctgctcgggctnctncgnctggggtggctctgggctctcgttcggtgagccctg

SEQ ID NO: 85264 - DNA, 517 bp, Zea mays
ggttaggagcgttgagtgctgtagcaccgaatatgacgtcaagactgtaccggttcggaattcccggctcgacccacgcgtccggagcattcagaaacacaccaagcgaatcacattagcaacaacctaacaacaatggctagcaagatattatccctccttgcgcttcttgcgctttttgcgagcgcaacaaatgcgttcattattccacaatgctcacttgctccaagttccattattacacagttcctcccaccagttacttcaatgggcttcgaacacccagctgtgcaagcctataggctacaacaagcaattgcggcgagcgtcttacaacaaccaatttcccagttgcaacaacaatccttggcacatctaacaatacaaaccatcgcaacgcaacagcaacaacaattcctaccagcactgagccacctagccatggtgaaccctgccgcctacttgcaacagcagttgcttgcatcaaacccacttgctctggcagacgtagctgcaa

SEQ ID NO: 85265 - DNA, 525 bp, Zea mays
  unsure (1)..(525): unsure at all n locations
agtagggntagggtctgattcctgagcccagcctcctaagtaactacagtaccggtctcggaattcccgggtcgacccacgcgtccggctccaacaagcaatcgcagcaagcatcatacctttatcacccttgcttcaacaatcgccagccctatctttggtgcagtcattggtacaaaccatcagggcacagcagctgcagcaactcgtgctacctgtgatcaaccaagtagctctggcaaacctttctccctactctcagcaacaacaatttcttccattcaaccaactgtctacattgaaccgtgctgcttatttgcagcaacaactattaccattcagccagctagctactgcctactctcagcaacaacaacttcttccatttaaccaattggccgcactgaaccccgctgcttatttgcagcagcaaatactactaccatttagccagctagctgcagcaagccgtgcttccttcttgacacagcaacagttgctgcctttctaccagcagttngcggg

SEQ ID NO: 85266 - DNA, 517 bp, Zea mays
  unsure (1)..(517): unsure at all n locations
tggtagttagctttagtgctgtagcacaganatcatagctatgcctgtaccggtttcggattcccggctcgacccacgcgtccgctgctcctcgcctcctctccctagccttcacgacgcatgggagagtgacggaaagcgacgcggcgcgagcgaggagggccaaggggaagaggggaagcaccgcaccaggacccttgttcgccgccgtcgcctctgatctccgcgaggttgtcaggattcaatatgtcgaccagcacattcgctacttcctgcacgctgttgggcaatgttagaacaacgcaggccttccagacagcggtgaagagcccttcgtctctaagcttcttcagccaagttacgaaggttccaagcctgaagacctccaagaaactggatgtctacgccatggctgtatacaaggtgaagcttgtcgggcctgaaagtgaagagcacgagtttgatgctccagatgacgcctacattcttgacgctgccgaaactgccggtgtggaan

SEQ ID NO: 85267 - DNA, 491 bp, Zea mays
  unsure (1)..(491): unsure at all n locations
agtagcaggtgttacgtatctgcaagaagtactctctccggtttcggaattcccgggtcgacccacgcgtccgggggccgtcaagctcaaccacggtcattacatcgcatcaactggtcggggggcctgcgccacgccaagaagtgcgaggcgtcgggcttctgctacgtcaatgacatcgtgctcgccatactcgagctgctcaagcatcacgagagagttctgtatgtcgatatcgatatccaccatggtgatggagtggaggaggctttctacacaacagatagggttatgactgtctcgttccacaagtttggtgattatttcccaggaacaggggatatccgtgacattgggcactcaaaagggaagtactactccctgaatgtccctctagatgatgggattgatgatgaaagctaccagtccctttttaagccaatcatgggcaaagttatggaggttttccgccctggtgcagttgtgcttan

SEQ ID NO: 85268 - DNA, 503 bp, Zea mays
  unsure (1)..(503): unsure at all n locations
ngagtnaagctaaggtgtgtacgtacttgccggagaaagtatgctctaccggttctcggaattcccgggtcgacccacgcgtccggtctcaacatgcagcgtgttatgcaaaataatgctgctgtattccgtacacaggaaacacttgaagaaggttgtgagctgattagcaaaacatgggaaagtttccatgatgtgaagctcagtgaccggagtctcatttggaactctgacctgatagagacccttgagctggaaaatcttttgataaatgcatgcataaccatgtattcggcagaggctcggaaggaaagcagaggagctcatgctcgtgaggatttcacgacaagagatgacgagaagtggatgaagcactcactggagtactgggaaaacgagaaagttcgattggcatacaagccattgcacatgaacacattagacgatgaagtagagtccttcccgcctaaagcccgtgtctattgatcgatttcagcctcacc

SEQ ID NO: 85269 - DNA, 515 bp, Zea mays
  unsure (1)..(515): unsure at all n locations
gtgggtnnnnncatgagtctattagaatgctctaccggttcggaattcccgggtcgacccacgcgtccgcggacgcgtgggtcgagttggattgtgttcaaagttgggcttttggacagctgtggggggcacggcagctctgtgacttgtgaagaggaagggaggaagaaagcggatccatggcgtcgaagcggatcctcaaggagctcaaggacctgcagaaggatccttccacctcttgcagcgcaagccctgttgccgaaaatatgttctactggcaagcgacgattatggggccatcagatagcccatacgctggtggcgtatttttggtcactattcactttccaacggactacccattcaaaccaccgaaggttgcattcaagacgaaggtttaccacccgaatatcaacagcaacgggagcatctgtcttgatatcttgaaggagcaatggagccctgcactgacagtttctaaggtcctcctctcaatttgntcccttctgacagaa

SEQ ID NO: 85270 - DNA, 514 bp, Zea mays
  unsure (1)..(514): unsure at all n locations
tagtatgtggaagggggggcgaggggaaagatgtcaccggttcggaattcccgggtcgacccacgcgtnccgcgaacgcgtccggggacgtgtacgagatgacgcacgacgagctggatttcgagttcgtgggaagccggtggggcgggcagtggcgcgtgcagaccaacgtctacggcaatggcagcactagccgcggccgggaggagcgctacctcctccccttcgaccccaccgtcgaggcccacagctactccatcctctgggctcccacccacatcatcttctacgtcgacgacacgccgatccgggaggtgatccggcacccggacatgggcggcgacttcccggcgaagccgatggcggtgtacgccaccatctgggacggctccgcgtgggccacggacgggggcaagtacaaggtcaactacaagtacgcgccggtcggggtccaacttttcgaactgggccgtcgtcggcttcccgcgccgacccggtgctccgcgtcccgcgc

SEQ ID NO: 85271 - DNA, 508 bp, Zea mays
  unsure (1)..(508): unsure at all n locations
tggggttntcatagattaagtatgtccccggtcttanaaaaaccggcgggagccacgcgtccgcgcgcctttcccgcaaggttgcttctactctaatgcccttggaggattgaagtgctgcgagaatcccaagaacaaagtgactgccgttcctgcaaacgaggaggaaatctgcggcgcaaccttccaggtggaaggggctacggtgctcacagcgctgcattaggagatgaggtgtcttcctccgtctccaggcctggactgggggcaactgtacatggtgcctggtggtgtaatgtaacataacggcaatggcatatgcagctgatcctggtctgcctgtatcatctcctcccacccgtaaagagaagttctttctgccgccatcgccatggtcagtcagagcttctctgctatagctgctggatgtgttgtgtgttgcgtctgtatcgtctctagtttgttcgacttacgtggaaacctgagatcagaccgggtattgagccgc

SEQ ID NO: 85272 - DNA, 509 bp, Zea mays
aagtatctgtattagaatagaagaatcgctcgtaccggtccggaattcccgggtcgagccacgcgtccgattgagaccaacaagcaacatagaatgtggaatccagtagcaacaatagagcaacagtggcgaccaagatattttccctccttatgctccttgctctttctacatgtgttgctaacgcgacaattttccctcaatgctcacaagctcctatagcttcccttcttcccccataccttccatcaattatagcttcaatatgtgaaaacccagctcttcaaccatataggcttcaacaagcaatcgcagcaagcaacatacctttatcgcccttgttgtttcaacaatcgccagccctatctttggtgcagtcattggtacaaaccatcagggcacaacagctgcaccaactcgtgctacctctgatcaaccaagtagctctggcaaacctttctccctactctcagcaacaacaatttcttccattcaaccaactgtctacc

SEQ ID NO: 85273 - DNA, 524 bp, Zea mays
  unsure (1)..(524): unsure at all n locations
agaagaggttgtctgggactgaaatgaccgtcactacgtactgcgttcggaattcccgggtcgacccacgcgtccgatttgtctacactatcaatgtagttgctgaatctgtattaacatgcctcactggcagggacatgcaattctgaaggacctcgtccgcaaggctatcaatgaaacacatgagctgaagcagtttcccacccttcgtgtggaagtaggcaatgcagcttttgagtcattggatagaatgagggatgaaagcaagaaaaatacattaaagctagttgacatggaatgcagctacttgacagtagatttcttcaggaagcttccccaggatgttgagaggggtggaaatccaagccactctatttttgatagatataatgactcttatcttagacgaattggacaaactgttctgtcatatgttaatatggtgtgttcgaccttgaggaactccatcccanaatctattgtttattgccaaatgcgagaggcccaaacccttctgtttgatc

SEQ ID NO: 85274 - DNA, 519 bp, Zea mays
  unsure (1)..(519): unsure at all n locations
taggaagaggtgnatctggggcttcgcacgtcacatagcattcactntcggaattcccggtcgacggacgcgtccggaattccctgttcgaaccaatcagataccaagagaaatccctacgaagaagtactcagtgctcgtcatacttggtgctggaactctaccttttggaacactcttcatcgagctcttcttcattctttctagtatttggcttggaaggttctattacgtgtttggcttcctccttgtcgtgcttcttttgctgattgtggtgtgtgctgaggtatcacttgttcttacctacatgcatctctgcgcggaggactggaggtggtggtggaaagctttctttgcttctggaacagtggccctttatgtgttcctttactctatcaactacttggtgtttgatctcagaagcttgagtgggccagtttctgctattctctacattggatactctttcgttgactcccttgccattatgctagcgactggtaccgttggctttctgac

SEQ ID NO: 85275 - DNA, 489 bp, Zea mays
  unsure (1)..(489): unsure at all n locations
gggtgtcccggttcgtgaattcccgggtcgagccacgcgtccgccgacgcgtccgggcgcgcaagctgggcctgcagcctcgccaggtggccgtctgggggggaaccgccgcgcccggtggaagaccaagcagctcgagcgcgacttcgaccgcctcaaggcctccttcgacgctctccgagcggaccacgacgcccttcttcaggacaacaaccgtcttcgctcacaagttgtgtcgttgaccgagaaactgcaagagaaggaggatgcgacgganggcggcgccaccgctgacaccgncgcngccgcggtggacgtcgaggcttccctggccgacgacgtccaggagccagcagagcctgcngcaactntcgaggtgctgcaggaggtgaagtccgaggacagggttaacaaccggcagcggcggaagccccgtggtggacgcggacgccctgttgtacggcagggtccgccgcggcaagtgataac

SEQ ID NO: 85276 - DNA, 513 bp, Zea mays
aggtatctggatgggcgggagagagatgaggatctaccggtccggaattcccgggtgcgacccacgcgtccggagatccatcgagaggccgtcgacaggggaattaatggcgtcgtcgtctagcagcaggcgccgtcgcctcatcctcgcagccgccgtcctgctctccgtgctcgcggctgccagcgccagcgccgggacctcctgcgtgccggggtgggccatcccgcacaacccgctcccgagctgccgctggtacgtgaccagccggacctgcggcatcgggccgcgcctcccgtggccggagctgaagaggagatgctgccgggagctggcggacatcccggcgtactgccggtgcacggcgctgagcatcctcatggacggcgcgatcccggccggccccgaccccccgcttgaagggccgctaaaagaactggccggcttgccgccggagggggcaagggggattcgccgccaccctcgtcacggaggccgagtgcaacctgccca

SEQ ID NO: 85277 - DNA, 520 bp, Zea mays
  unsure (1)..(520): unsure at all n locations
agatggattttngtgagagggggggaagaggagagtcttctacttgttcggaattcccgggtcgacccacgcgtccgagaggatcctgtggtcaaagatgctgtacaccatgctgtgaaatcgatccaagaggggtccaactccctgtttccctacgaacttctcgagatccttcgtgcccatgcacaggttgtggaagactttgcaaaatttgacattctgatgaaactgaagagaggcagcaaggaggagaagatcaaagcagaggtccataagagcctggaaggggcctttgtgctaaaccagcatcagccggcggagcatgatgagtcgagcagccagtgaactgacgtaactgtgtgagctgtagtagtaacgtacttcgtgttacgtagaagaataaggagaaaacgaccaatccggttttatctggatgtcatgtatggtcgacggtcgttgctggcttggcttccgaagacggtacctgctgtcgcacttgccgttataataggcattggac

SEQ ID NO: 85278 - DNA, 527 bp, Zea mays
  unsure (1)..(527): unsure at all n locations
tggtnagggaggcttgnggcctcccatgctctcntcatcgtcatacccgttcggaattcccgggtcgacgcacgcgtccggagaccaactagcaacatagaaagcgcaatagtgtaccaacaatggcagccaaaatatgttgcgtccttatgctccttggtctttctgcaagtgctgctaccgcaaccattttcccacaatgctcacaagctcctatagcttcctttcttcccccatacctctcaccagcggtgtcttcagtatgtgaaaacccaattcttcaaccctacaggatccaacaggcaatcgcagcaggcatcttacctttatcacccttgttcctccaacaaccgtcagccctattacagcagttacctttggtgcatttgttggcacaaaacatcaaggcacaacaactacaacaacttgtgctaggaaaccttgctgcctactctcagcaacagcagtttcttccattcaaccaactggctgcattgaactctgctgcttatttgcaacaacaactc

SEQ ID NO: 85279 - DNA, 526 bp, Zea mays
gagagagaaggctctagacctcgcatcgtgcgctacgctcgtactcgttcggaattcccgggtcgacgccacgcgtccgcccacgcgtccgcccacgcgtccgcgattcagcaaccgtggggattactgaccatgccgaggagcatttgggtgatgttgtctacgtggagctgccagaagttggcgtcagtgtatcccaggggaagaactttggtgctgtcgagagcgtgaaggcgaccagcgatatcaattcgccagtgtccggagaggtggttgaggtgaacgggaagctaagcgaggaacctgggtttgttgaacgcaagcccgtccaaaaaggggtgaattaccaaggtcaacctcaccatttaaggcaacctaagtccgttaatggatggtaccaattcctcaaaattttggaaggaaaaaaacgtcctttgagaaattaaaagggcttcttgacaaccagggaccttgtcttaagctcttttaatgctttctggggttgacaacctttttgaacaaaaat

SEQ ID NO: 85280 - DNA, 491 bp, Zea mays
  unsure (1)..(491): unsure at all n locations
ggggaggagtacctattcggacttaccggcggtggcttaacatcggagttttancattcataaacacacggtactaancacaggancaacaacctaacaacgataatttacanaattttatggggcccttaaacttctttccctttttataaactcaacaaattccttcattattccacaattctcactttctcctaataccatttttccacanttcctcccaacaattacttcaatnnncttcnaacacctanctnttcaatccaacattcaacaacaatctctatctactaacttcttacaacaaccaattacccaatttcaacaacaatccttaccacatctaacaatacaatccatcacaactcaacatcaacaacaattcctaccatcactttaccaccttaccatatttaacccttcctactacttacaaaatcatcttctttcattcaaacccacttcttttaccaacctaaatactaaccaat

SEQ ID NO: 85281 - DNA, 510 bp, Zea mays
  unsure (1)..(510): unsure at all n locations
aatgtgttngatgagggagggggaggattgtcccggtccggaattcccgggtcgagccacgcgtccgggagaactcgacaccatgaaggtgctgatcgttgcccttgctctcctggcgctcggtgggagcgccgcctccagtacaagcggcggctgtggctgccagacaccaccgtttcatctaccgcctccgttctatatgccgcctccgttctatctgccgccgcagcagcagccgcagccatggcaataccccactcaaccaccgcagctaagcccgtgccagcagttcggatcctgcggcgtcggcagcgtcggcagcccgttcctgggccagtgcgtcgagttcctgaggcaccagtgcagcccggcggcgacgccctacggctcgccacagtgccaggcgctgcagcagcagtgctgccaccagatcaggcaggtggagccgctgcaccggtaccaggcgacatacggtgtggtcctgcagtcctttcttgaacagcaagcgga

SEQ ID NO: 85282 - DNA, 514 bp, Zea mays
  unsure (1)..(514): unsure at all n locations
aattatctgnaaagtgggggataagatgatacttctaccggtccggaattcccgggtcgagccacgccttccgcgaccttaaaagggggaatccagtggcatcaacagagcaacaatggcgaccaagatagtttccctccttatgctccttgctctttctgcatgtgttgctaacgcgacaattttccctcaatgctcacaagctcctatagcttcccttcttcccccataccttccatcaatgatagcttcagtatgtgaaaacccagctcttcagccctataggctccaacaagcaatcgcagcaagcaacatacctttatcacccttgttgtttcaacaatcgccagccctatctttggtgcagtcattggtacaaaccatcagggcacagcagctgcaacaactcgtgctacctgtgatcaaaccaatagctcttgccaacctttcttcctaattttaacaaccaccattttcttccattcaaccaactgtctacactgaaccttgctgc

SEQ ID NO: 85283 - DNA, 514 bp, Zea mays
aatgatgctgatgatggaagagggagcatatcttctaccggttcggaattcccgggtcgagccacgcgtccgattttgagcattcagaaacacaccaagcgaagcgcactagcaacgacctaacacagtggctaccaagatattagccctccttgcgcttcttgccctttttgtgagcgcaacaaatgcgttcattattccacaatgctcacttgctcctagtgccattattccacagttcctcccaccagttacttcaatgggcttcgaacacctagctgtgcaagccaacatgcaacaacaagcgcttgcggcgagcgtcttacaacaaccaattgcccaattgcaacaacaatccttgccacatctaacaatacaagccatcacaacgcaacagcaacaacagttcctaccagcactgagccacctagccatggtgaaccctgccgcctacttgcaagagcagctgcttgcatccaacccacttgctcttgcgaacgtaattgccaaccaa

SEQ ID NO: 85284 - DNA, 505 bp, Zea mays
taggatctgtagtgggggggggagagtgctgtaccggtccggaattcccgggtcgagccacgcgtccgcccacgcgtccgaccaccaggagtggaaccccaaggtggacgtgcacctgcggtggggcggctacaccaactactcgctcgagacactcgacgctggaaagcggcagtgcaaggcggccctgcagcgggagctgggcctggaagtgcgcgacgacgtgccgctgctcggcttcatcgggcgtctggatggacagaagggcgtggacatcatcggggacgcgatgccgtggatcgcggggcaggacgtgcagctggtgatgctgggcaccgggcgcgccgacctggaacgaatgctgcagcacttggagcgggagcatcccaacaaggtgcgcgggtgggtcgggttctcggtgcctatggcgcatcgcatcacggcgggcgccgacgtgctggtgatgccttcccgcttcgagccctgcgggctgaaccagctctac

SEQ ID NO: 85285 - DNA, 517 bp, Zea mays
  unsure (1)..(517): unsure at all n locations
agcgaggggctgtgtgctcccgccccgcgtatggtcaacncgttcggaattcccggggggaggcacgcgtccgcccacgcgtccgcccacgcgtccgggatgatggacgtgcagtccgtcgcgcagcagcggcagaggatgatgcagcttgagcgtgccgctgccgccagcagcagcctgtacgagccagctctgatgcagcagcagcagcagctgttggcagctcagggtctcaaccccatggccatgatgatggcccagaacatgccggccatgggtggactctaccagtaccagctgcccagctaccgcaccacctcctgtggcgtctccgctgccattccgccctactactgattcatgatatttgggaaatctgctctatccatccctctctatctatatctgtaataatgcactaagacgacacacattatcatgtgtggtatgaccaataatatatgcatgatcataataaagttttggttttaatggaaaaaaaaaaaaaaagggcggg

SEQ ID NO: 85286 - DNA, 528 bp, Zea mays
  unsure (1)..(528): unsure at all n locations
cgaggataatgtgcttctatggaagttgcaagngtcgctacagtcattacgttccggttcggaattcgcgggtcgacccacgcgtgcgctccagcactgaacacttgagttattcagtaggtagctagctagctgaatcaggatgggtcctaccgagttgcggccgtccactagccacgacacgacggtgacgacgaccaacgctggcgctcctgtgtggaacgacaacgaggcgctgactgtggtgcctcgcggtcccatcctgctggaggactaccacctgatcgagaaggtggcgcacttcgcgcgggagcgcatcctggagcgcgtggtgcacgcgcgcggtgccttcgccaatggcttcttctagtgcacccacgacgtgacgtcgctgacgtgcgccgacttcctgcgcgcgcccggagtgcggacgcccgtgatcgtgcgcttctcgacggtgatccacgagcggaggtccacggagacgatccgtgacctccgcaggattgtcttgaagttctacaccct

SEQ ID NO: 85287 - DNA, 519 bp, Zea mays
gagggaaaggctttgttcatgaaaagaacgtaattctatacccgttcggaattcccgggtcgacgcacgcgtccgcctccggaagcctgtcatcaaatccaagtctagcaagcctgtttatgacttcgcctacgactggccgcagtacacacccatcaccgaggcagctgcccatgatatcatgctgttcactgtctccaaatgcaccggccatgccggcaccaggctggggtgggcattggtgaaggatactaaggtggctcagaagatgatcaagtttatagagctcaacacaatcggtgtatccaaggactctcaacttcgtgccgctaagattatcggggcaatatgtaatggctatgagccggtaccatcctctggtaaaacaagccaactcttccatttcgccaaggaaaaaatggcggctcgctgggctagacttcgtgcagctgtggcagcctcagacatctttactcttccttatgagctatctggctattgtagctttttcaatgagaa

SEQ ID NO: 85288 - DNA, 523 bp, Zea mays
  unsure (1)..(523): unsure at all n locations
ngaggagaagagcttctgtcaactgctcagcccgtactgcactgncgtaccggtccggaattgccgggtcgacccacgcgtccggaagaagacgagtgtcaagtgaacctgaaacttgcggtgtcactggctggtggagccggagtgtgagtgagtgatcgagctagctgagctccgatcctcgctagctagctaggataccgccataccacaagtcttcttcacaagtttaggagtgacagcaacaagagatctcgatggcctctgccaccgtgctcaagtcctccttccttcccaagaagtccgaatggggcgccaccaggcaggccgccgcgcccaggccgcccaccgtctccatggtcgtccgcgccttcgnctacgccgatgagctcgtgaagaccgcgaaaacgatcgcgtcgccggggcggngcatcctggcgatggacgagtcgaacgcgacgtgcgggaagcggctggcgtccatcgggctggagaacacggaggccaaccggcaggcgtacct

SEQ ID NO: 85289 - DNA, 509 bp, Zea mays
aattatgctgtaggggggagagggggagttctaccggttcggaattcccgggtcgagccacgcgtccgccaaggcgtgccttcgctctagtcacttgttgctccacgcaaccatgttgaagatggggagccatgagccctaggaggggaacgtcacccttggacccactgtccgtgaaggagagtatgtctttggtgtcgctcacattttttcatgcttcaatgacaccttcattcatatcactgatttgtctgggaaggaaactcttgttccgatcaccggtggcatgaaggtgaaggctgaccgtgactagtcctgaccttacactgctatgcttgctgctcaagacatcgcacaacgctgcacggagcttggcattactgcactgcacattaagcttcgcgccaccggaggcaacacgaccaagaccttgtacctggtgcccagtctgacctgaaggcacttgctcgctccgagatgaaaatcggacgcatcgaggacggtacccc

SEQ ID NO: 85290 - DNA, 511 bp, Zea mays
  unsure (1)..(511): unsure at all n locations
agtgtatctgagaaggtgggaggaaggtggagctctcccggtcctgaattcccgggtcggcgcaacccttccggtgtctataatcctaatattcctaaagtgttggaggaattgagtagcaaaggctggaggaangaaagtgagggtgccggagttatattaattcaaggtcatcaaatccccttgatagtggttaagagtgatggtggcttcaactatgcctcgactgacttggctgccctttggtatcggctcaatgttgagcaggcagagtggatcatatacgtgacagatgttggtcagcagcagcactttgacatgtttttcagtgctgcaaagatggctggttggctgccaggtccaaacgaanagaagtttccgaanacaagccatgttggatttggtctagttcttggttcagatggcaagcggttccgaacgcgcagtactgaggttgttcgatgggtaaagctacttgatgaggctaaatctcggagcanatcagaactac

SEQ ID NO: 85291 - DNA, 508 bp, Zea mays
aagatgtatacgtggaagagggggtactctcccggtccggaattcccgggtcgagcgacgcgtccgcagcatagaaagcacaatagtgtaccatcaatggcagccaaaatattttgcttccgtgtctccttggtctttctgcaagtgctgctaccgcaaccattttcccacaatgctcacaagctcctatagcttcctttcttcccccatacctctcaccagcggtgtcttcagtatgtgaaaacccaattcttcaaccctacaggatccaacaggcaatcgcagcaggcatcttacctttatcacccttgttcctccaacaaccgtcagccctattacagcagttacctttggtgcatttgttggcacaaaacatcaaggcacaacaactacaacaacttgtgctaggaaaccttgctgcctactctcagcaacagcagtttcttccattcaaccaactggctgcattgaactctgctgcttatttgcaacaacaactaccattcag

SEQ ID NO: 85292 - DNA, 509 bp, Zea mays
aatggtttcgtgatgaggggagggagggaactctcccggttctgaattcccgggtcgagcgacgcgtccggagcattcagaaacacacctagcgaagcgcactagcaacgacctaacaacaatggctgccaagacattatccctccttgcgcttcttgccctttttgtgagtgcaacaaatgcgttcattattccacaatgctcacttgctccgagtgccattattccacagttcctccctccagttacttcaatgggcttcgaacacccagctgtgcaagcctataggctacaacaagcgcttgcggcgagcgtcttagaacaaccaattgcccaattacaacaacaatccttggcacatctaaccatacaaaccatcgcaacgcagcagcaacaagcactgagccacctagccgtggtgaaccctatcgcctacttgcaacaacagctgcttgcatccaacccacttgctttggcaaacgtagctgcataccaacaacaacaacagt

SEQ ID NO: 85293 - DNA, 510 bp, Zea mays
aggggtctgatgtggggagggggggagatttgtaccggtccggaattcccgggtcgacccacgcgtccggatcgttgcccttgctctcctggcgctcgctgcgagcgccgcctccagtacaagcgggggctgtggctgccagacaccaccgtttcatctaccgcctccgttctatatgccgcctccgttctatctgccgccgcagcagcagccgcagccatggcaataccccactcaaccaccgcagctaagcccgtgccagcagttcggatcctgcggcgtcggcagcgtcggcagcccgttcctgggccagtgcgtcgagttcctgaggcaccagtgcagcccggcggcgacgccctacggctcgccacagtgccaggcgctgcagcagcagtgctgccaccagatcaggcaggtggagccgctgcaccggtaccaggcgacatacggtgtggtcctgcagtccttcctgcagcagcagccgcagggcgagctcgcggcgctgatggc

SEQ ID NO: 85294 - DNA, 514 bp, Zea mays
agggattctgctatgtgaagagggtgatttgctcgtaccggtccggaattcccgggtcgagccacgcgtccgctgtcttgtcgaggcagcaacccatcgttggaggtgccatcttttagattacataggagatgtactcgataatggtgccctcataccgacgtgtgtttcctagaaataatcaatatattgattgagatttatctcgataaaaaaaaaaaaaaaaaaaaaaaaaaaaaaaaaaaaaaaaaaaaaaaaaaaaaaaaaaaaaaaaaaaaaaaaaaaaaaaaaaaaaaaaaaaaaaaaaaaaaaaaaaaaaaaaggggcggccgtttaaggggtcccaagttaacttacccttccttccaagttattaccttttaaatggggtcacctaattcaaattcagggcccgatgtttaacaacttcgtacctggaaaacccctggcgttcccaaatttaatccctttgaatcacatccccttttcgccagctgccgtaataccaacaagc

SEQ ID NO: 85295 - DNA, 660 bp, Zea mays
  unsure (1)..(660): unsure at all n locations
ngaggagcgtgcttgtcttcatgcgcaccgtcttagtgctcatgcctgtaccggtctcggaattcccgggtgcgacccacgcgtccggctgggnccaccagctttgaccgccgcctcccattcccctccgcttactgcgacctgtcccagctccactcgcgcccgcagggagcaggcatgcgtgctggcatgcaggctgatggtccgtacccctcactattcggctgagtcggctggcaggtcactcgatcgtgaggccagaaggccacagatagttcagtggcgctgcgcacgatagtaagagccgacatgcatccaacgtagctactgagtagtcctcagggtgtgctccagagtcgtgcgtccccatggactgactctacaggagagtgcactactctgcatgtgcttgcatattcacacgtactcatcctccgaccaaggggcgcagtgaccctctcgagatgtntcatagggagcatcgcgactaagcgcttatgcatgttcttggacgtgatctcacnaggaanactgtgaggaattgtatgattcatgtactgggtggatagaactgccccgttcaatgagactgtaactgtgccgggatggcagggatcccccatgtgtggatcgcatttctgtacattctttcttcatttc

SEQ ID NO: 85296 - DNA, 517 bp, Zea mays
gaggggagtgggttgtcctcgaccgttcgctcgctcaactcgttcggaattcccgggtcgacgcacgcgtccggtcccgcggcttcggcttcgtcaccgtctccacggaggaggcgatgcggaacgccatggagggcatgaacggcaaggagctggacggccgcaacatcaccgtcaacgaggcccagtcccgcggcggccgtggaggcggcggcggtgggtacggtggtggccgtggaggcggcggctacggcggtggcgggcgccgtgatggcggcggcggctacggcggtggcggcggctacggtggcggcggcggctacggtggtggtggcggcggctacggcggtggcaaccgtggcggcggctacggcaactccgacgggaactggaggaactgagcggtggggcccgcgcggccaagttatcctgttcgctgccgtgatgtttaccctagtccagagggtttatcttcgatcgtctcgtgtttgttggtgccatctgtggttttgaaagg

SEQ ID NO: 85297 - DNA, 515 bp, Zea mays
  unsure (1)..(515): unsure at all n locations
aaggtctggatagaggggagagagggaactggtaccggtctcggaattcccgggtgcgagccacgcgtccgcttgctcagggcatcctccaacatgaccccttcgaggtcctggaccagaggggagtgggcgagctggtgaagtttgctacagagaggggccgcaaagctaggcctaacttgaaggtgggcatttgtggagaacacggtggagagccttcgtctgtggccttcttcgcgaaggctgggctggattacgtttcttgctcccctttcagggttccgattgctaggctagctgcagctcaagtgcttgtctgaggctgcctnctcggtgggcaaccgaatggcctgctgctgggtggatgtggtgatcaacagtattattacagagccatgctatgtgaacattactagtagcaatgctcataaaagctacaatcccatcttccttttttttccagtcatgtaaaactttcaaacttgctccatggttcaaaactctgttcttcaatc

SEQ ID NO: 85298 - DNA, 511 bp, Zea mays
tagtatctgttatgaggggagaaagagtagtcttctaccggtttcggaattcccgggtcgagccacgcgccgctcaaccgtcacctctcaagagcctactgtagcaacattggagggtacaagaatgaagatttgttgaagtcttagctgcacagcagagcccagataatccaaactggtttcagggtactgcagatgctgtaaggcagtacttgtggttgtttgaagagcataatgtgatgaaatttctaattctgcttgccaacaactggtcccggatggcctttgaaaggtcaatcaaggccacagagaaacaaatgctgatattaccgttgctgtcctaccgatggatgagaaacgtgccactgtgtttgggcttaatgaaaattgatgaaaaaggaagggccatgagatttcttagaaacccgaaggggaaccatttgaagccattattgttagacacccattccttgcccttattaccttagggccaaggggattgccttatttt

SEQ ID NO: 85299 - DNA, 483 bp, Zea mays
ctgttgtcgtaccggtccggaattcccgggtcgagccacgcgtccggaccaactagcaacatataaagcacaatagtgtaccaacaatggcagccaaaataggtggcttccttatgctccttggtctttctgcaagtgctgctaccgcgaccattttcccgcaatgctcacaagctcctatagcttcccttcttcccccatacctctcatcagcggtgtcttcagtatgtgaaaacccaattcttcaaccctacaggatccaacaggcaatcgcagcaggcatcttacctttatcacccttgttcctccaacaaccgtcatccctattacagcagttacctttggtgcatttgttggcacaaaacatcagggcacaacaactacaacaacttgtgctagcaaaccttgctgcctactctcagcaacagcagtttcttccattcaacccactgggctgcattgaactctgctgcttatttgcaa

SEQ ID NO: 85300 - DNA, 505 bp, Zea mays
agggatgtgtagggggggggggagagcgtcgtaccggtccggaattcccggggcgagccacgcgtccgaacgcaaattgcaccaagaaatcgatcgagaggccgtcgacaggggaattaatggcgtcgtcgtctagcagcagccaccgccgcctcatcctcgcagccgccgtcctgctctccgtgctcgcggctgccagcgccagcgccgggacctcctgcgtgccggggtgggccatccggaacaacccgttcccgagctgccgttggtccgtgaccagccggacctgcggcatcggcccgcgcctcccgtggccggagctgaagaggagatgctgccggaagctggcggacatcccggcgtactgccggtgcacggcgctaaccatccttatggacggggcgatcccgccgggcccggacgcgcagctggagggccgcctagaggacctgccgggctgcccgcggaaggtgcagaggggattcgccggcacctttgtcagagg

SEQ ID NO: 85301 - DNA, 482 bp, Zea mays
atattgttgtaccggtccggaattcccgggtcgacccacgcgtccgggcggaggttctatcagagatagaggaggaaaaacttgaatctgaagaagtagagggagaagaagagagttctgaggatgagttagatccatttgtaaagtctgatcctaagttaccaagagttgtccgaatggcaaacctctgtgttgttggtgggcattcagtaaatggtgtagctgaaattcacagtgaaattgtgaaacaggatgtgttcaacagcttctatgagatgtggccaactaaatttcagaataaaacaaatggagtgactcccaggcgttggatccggttttgtaatcctgcattaagtgcattaatttcaaagtggattggttctgatgactgggtgcttaatacagacaaactggcagaactgaagaagtttgctgataatgaagatctgcattcagagtggcgtgctgctaagaaggctaac

SEQ ID NO: 85302 - DNA, 518 bp, Zea mays
tgtggtagtgctttgtctatcagacaaatgtaattctcaacccgttcggaattcccgggtcgacgcacgcgtccggcattttgcacgcgccaaggaattcaatcacctatatctgatctcactgaacgactgggatttgaggatcgtgacccccctgtggttcctctggaatgctcactcgaagcaccatcatttgatgaggttgatgttcaagccctagcgcatgctgttgagttgacaagacaaggtgctgtggatagcttgaagtttgcaaaaggacatttataccaagcttttcagaacgaattgtgccggatgaagctggacctgacacttctggataaacttgtacatgagtattgtgtatacaggggaatagttgaaggcagttcacatgttctttctggaactgctgacttgaaatgtaatcaaaataatgatgttaataatgaaacacagctttattgtgaaatgaccaacaatcagaatggacattgtagcaccagcggtatcaatct

SEQ ID NO: 85303 - DNA, 509 bp, Zea mays
  unsure (1)..(509): unsure at all n locations
aggtatctggtaagttgggaagagaggatgctctcccggtttcggaattcccgggtcgaccgacgcgtccgcggacgcgtgggcggacgcgtgggctgtacactcctgatagtttcaaatttttcacaggttctccatgggtcattttgaacagacgctttgttgagtattgtatttttggctgggagaatctccctagaacactcctcatgtacttcacaaacgtgatgctacctctagaggggtatttccattcggttgcatgcaactcggacttccgcaatttcacagtgaacaacgacttgcggtatatgatttgggacaatccacctcagatggagccccatttcctaaatgttacacattatgatgagctagtaaggaatgggggtccttttggccggaaggttaaggagaatgaaccttgttggacaagattgatgatcaagtgcttcgacgatggcaccaacaaacttgtcctggttgcgtgtgcacagggcagangaagt

SEQ ID NO: 85304 - DNA, 482 bp, Zea mays
gttaatgtcccggtccggaattcccgggtcgagcgacgcgtccgcccacgcgtccggagaccaacaagcagcatagaaagtggaatccagtagcaacaatagagcaacaatggcgaccaagatattttccctccttatgctccttgctctttctgcatgtgttgctaacgcgacaattttccctcaatgctcacaagctcctatagcttcccttcttcccccataccttccatcaatgatagcttcagtatgtgaaaacccagctcttcaaccctataggctccaacaagcaatcgcagcaagcaacatacctttatcacccttgtttcaacaatcgccagccctatctttggtgcagtcattggtacaaaccatcagggcacagcagctgcagcaactcgtgctacctgtgatcaaccaagtagctctggcaaacctttctccctactctcagcaacaacaatttcttccattcaaccaac

SEQ ID NO: 85305 - DNA, 510 bp, Zea mays
tagtcttgaatgagggaagagatatactctcaccggtccggaattcccgggtcgacgccacgcgtccgagaccaactagcaacatagaaagcacaatagtgtaccaacaatggcagccaaaatatgtggcttccttatgctccttggtctttctgcaagtgttgctaccgcaaccattttcccacaatgctcacaagctcctatagcttcccttcttcccccatacctctcaccagcggtgtcttcaatgtgtgaaaacccaattgttcaaccctacaggatccaacaggcaatcgcaacaggcatcttaccattatcacccttgttcctccaacaaccgtcagccctattacagcagttacctttggtccatttggtggcacaaaacatcagggcacaacaactacaacaacttgtgctagcaaaccttgctgcatactctcagcaacatcagtttcttccattcaaccaacttgctgcattgaactctgctgcttatttgcaacacca

SEQ ID NO: 85306 - DNA, 513 bp, Zea mays
aatgtatctgaatgatggggaggggagagtcgctcgtaccggtccggaattcccgggtcgacccacgcgtccgagcgtacaacctccaacatgacctacaaggcctggcggcgtgagcctgaggagggagctataatgtactgcagccgcactatttttgaggatgctacacctgaactggttagagatttcttctgggatggtgattttcgtctaaagtgggatcccatgcttgcatactccaaatctttggatgagttccctcagaatggagcaacaattgtccactggataaaaaagttcccattcttttgcagtgaccgtgaatacatctttggaggacgcatatgggaatctgggaagacttactattgtgttacaaagggtgttccatatccatcattgcccaagaaagaaaaaccaaggcgtgtggagttgtacttctcaagttggcgtattagagctgttcaatcgcctaaacatgtgggtcagcaatctgcgtgcgaagtaacc

SEQ ID NO: 85307 - DNA, 514 bp, Zea mays
tagtactctgtagtgggaaagagggagaatcgctcgtaccggtccggaattcccgggtcgagccacgcgtccgcgtacccctcgctctcctggctatcgctgcgagacgccacctccacgcatacaagctgcaactgcggctgggagccagcgccgccggttcatctaccgccggcgcagcatatgacacctccggttcacctgacacctcctgtgcatctcccacctccagtccacctgccaccaccagaccatgtgccgccgccggttcatctgccgcacccaccatgccaataccctactcaaccggcccgtcctcagcctcatgctcagccacacccatgcccgtgccaacagccgaatccaaccccgtgccagctgcaggaaacctgcggccttggcagaactctgaccctggcacatgcgtccagtacctgaggcatcaatgcagcccgacagcgacaccctactgctcgcctcatagccagtcgttgccgcaacagtgttgccagca

SEQ ID NO: 85308 - DNA, 517 bp, Zea mays
  unsure (1)..(517): unsure at all n locations
gaggggaggatctgtcctagcaagtatagtaattctcaacccgttcggaattcccgggtcgacgcacgcgtccggcaaagttgatccattggtcaatctcatgaaagttgagaaggttcctgattctacttaggatatgattggaggtcttgagcagcaaattaaagagatcaaagaggtcattgagcttccaatcaaacatccggaactatttgagagccttggaattgcacaaccaaagggtgtcctcctttatggacctccaggcacaggaaagacattgctggcacgtgcggttgctcatcacactgactgcaccttcatcagggtgtctggttctgagttggttcagaagtatattggtgaaggctcccggatggttcgggaactctttgttatggccagggaacatgcaccatccattatatttatggatgaaattgactctatcggatctgctagaatggagtctggaactggcaacggtgatagtgaagtgcancgtaccatgcttgaa

SEQ ID NO: 85309 - DNA, 514 bp, Zea mays
  unsure (1)..(514): unsure at all n locations
nagggaaagggtgtattcctgcattcgtnctatatnatcacgttcggaattcccggtcgagcacgcgtccgcccacgcgtccgcggacgcgtgggagcagtttgagctattcccagcgaacccaaagtggccaccgtcagcagcatgttgtgctgtgtggaagagggcagatgttccatgcctatgcaaatatgttaacaaggaagtagagaaggtatggtgcatggagaaggttgtgtacgtcgccaactatggtaaaagcccgtttcaacctgcctacaagtccggaagttatacagttcctctaagtatgaaaaaggattggttggaacatgtggaactctttcctaaaactttaatttgaaatttgtaccatgtaaaagactattgaaattaatatgtatggagtaatatgcttccttcttttaaaaaaaaaaaaaaaaaaaaaaagggcggccgttctaaaggatccaagcttacgtacgcgtgcatgcgacgtcatagctcttctata

SEQ ID NO: 85310 - DNA, 517 bp, Zea mays
  unsure (1)..(517): unsure at all n locations
ngaggagaggttctgtttatcgaaataagtaattctcaacccgttcggaattcccgggtcgacgcacgcgtccgcggacgcgtgggtgccgcctacctagaacagcaacaactgatttcatctagccctctggctgtggttaatgcacctacatacctgcaacaacagttgctgcaacagattgtaccagctctgactcagctagctgtggcaaaccctgctgcctacttgcaacagctgcttccattcaaccaactgactgtgtcgaactctgctgcgtacctacaacagcgacaacagttacttaatccactagcggtggctaacccattggtcgctgccttcctacagcagcaacaattgctgccatacaaccagttctctttgatgaaccctgccttgttgtggcagcaacccatcgttggaggtgccatcttttagattacatatgagatgtactcgataatggtgccctcatagcggcatgtgtttcctagaaataatcaatatattgatt

SEQ ID NO: 85311 - DNA, 518 bp, Zea mays
gagggaagggttcgttatgaggaggggaagtattgtaaacccgttcggaattcccgggtcgacgccacgcgtccgggtattacaattgatattgccctgtggaagttcgagaccaccaagtactactgcactggtattgatgccccgggacaccgtgacttcatcaagaatatgatcactggcacttcccaagctgactgtgctgttcttatcattgactcaaccactggtggttttgaggctggtatctccaaggatggccagacccgtgagcatgctctccttgctttcacacttggtgtgaagcagatgatttgctgctgcaacaagatggatgctactacacccaagtattcaaaggcccgttatgatgagattgtgaaggaagtctcttcctacctgaagaaggttggatacaaccctgataagatccacttcgttccaatctctggttttgaaagtgacaacatgattgaaaggtccaccaaccttgactggtacaagggcccaaccctact

SEQ ID NO: 85312 - DNA, 509 bp, Zea mays
tagggtgggtgatgcggggaggagggggaaatgtcccggtccggaattcccgggtcgacccacgcgtccgtgaaaatgctacagttcgagctagtgcagtcagcacattggcaaaatttggtgcctggggtgactcactcaagcctcgcatatttgtgctcctgagacgctgcctgtttgatggagatgacgaggtgcgcgatagagcgaccctttacctcaaattgttaggtggggaagctacagtgggtgagacagagaaggatgtgaatgaatttctcttcggctcacttgatgttccattagtaaacttggagacgagtctgcggaattatgaaccttcggatgtaccttttgatatttcatctgtttcgaaggaaacaaaatcccaaccccttgcggagaaaaagtctacaggcaagaaatcagcaggtccagcatctgctgtcagtggctctgtttctacagttgatgcttcgtatgagaagcttctttcgtccattccggaa

SEQ ID NO: 85313 - DNA, 509 bp, Zea mays
  unsure (1)..(509): unsure at all n locations
atgcttggataggggggagagagatactctcaccggtccggaattcccgggtcgacccacgcgtccgcccacgcgtccgcccacgcgtccgtgatcataggtattagtgaagttgatcccatagggtggcctggatcaaaatggaaatctctcctgataaagtgggatggtgctactaagtacagccaccagaatagagtatctccatgggacatcgagggagttggcagctcagttttagttactcaccgtctttcctcttctgtttcgaagcgaacaaaactgtgcttccctccaagcgatttgaacacaccaattctagatggaaatggtcgtccagactccgtggaaactgaacgtttccacagggtcttgcagggtcaaaaatggtgccaccctaatatcaatgtgcctcatggctttaatcatcaaatagccccaaaagtcaagggctctaatgcaaggagattctctgctgatgtgtggaactgcaagatgaatgatgtatn

SEQ ID NO: 85314 - DNA, 512 bp, Zea mays
aatgtgtgttttgtacttgaaggaagatgaactctcccggtccggaattcccgggtcgagccacgcgtccgcccacgcgtccgtgaatacccaactatacaatcctacaggctacaagaggccatcgcgtgaagcatcttacggtcgttagcattgactgtccaacaaccatatgccctattgcaacaaccatccttagtgaatctatatctccaaagaatcgtagcacaacaactacaacaacaattgcttccaacaatcaaacaagtagttgcagcgaaccttgatgcttacctccagcaacaacaatttcttccattcaatcaactagctggggtgaaccctgctgcttacttgcaggcacaacagctactaccattcaaccaacttgtcaggagccctgctgccttcttactgcagcaacagttgttgccattccatctacaagttgtggcaaacattgctgctttcttgcaacaacaacaattgctgccattttacccacaggttgt

SEQ ID NO: 85315 - DNA, 508 bp, Zea mays
  unsure (1)..(508): unsure at all n locations
aggtatctgatgaggggaggggggaagagttgtaccggtccggaattcccgggtcgagccacgcgtccgaccaacgcaaattgcaccaagaaatccatcgagaggccgtcgacaggggaattaatggcgtcgtcgtctagcagcagccaccgccgcctcatcctcgcagccgccgtcctgctctccgtgctcgcggctgccagcgccagcgccgggacctcctgcgtgccggggtgggccatcccgcacaacccgctcccgagctgccgctggtacgtgaccagccggacctgcggcatcgggccgcgcctcccgtggccggagctgaagaggagatgctgccgggagctggccgacatcccggcgtactgccggtgcacggcgctgagcattctcatggaccgcgcgatcccgccgggcccggacgcgcagctggagggccgcctaaaggacctgccgggctgcccgcgggaggtgcagaggggattcgnncgcaccctcgtcacgg

SEQ ID NO: 85316 - DNA, 514 bp, Zea mays
  unsure (1)..(514): unsure at all n locations
tatgattctgtatgagggggagaggagagtgttgtaccggtccggaattcccgggtcgagccacgcgtccgcagcaacaacaacttcttccatttaaccaattggccgcactgaaccccgctgcttagttgcagcagcaaatactactaccatttagccagctagctgcagcaaaccgtgcttccttcttgacacagcaacagttgctgcctttctaccagcagtttgcggctaaccccgcaaccctcttacaactacaacaattgttgccctttgtccaacttgctttgacagacccagtcggcctnctaccaacaacacatcattggtggtgccctctnttagattgcttattagttgtaattcaataataaagttttttggatgatggatgtggccaaccagaaataagaagttacatttccagattctaaaaaaaaaaaaaaaaaaaaaaaaaaaaaaaaaaaaaaaaaanaaaaaaaanaaaaaaaaaaaaaaaaaaaaaaaaaaaaaa

SEQ ID NO: 85317 - DNA, 514 bp, Zea mays
  unsure (1)..(514): unsure at all n locations
aggtggtcntgtcatgcaagtacgtagtaccgctcgtaccggtctcggaattcccgggtcgacgccacgcgtccggctgatgctgcagctgcaatttctgtcagcaagggcaagggcgtgggtgctgagagtagcgggggtgatggcagaatgaagagcagaaaagagagggctaggagtggcaaggggaaggaggttttgggggatggaggaagtaagggaaaggggaaggggaaggggaagaaggctgtaggcaagaaggaagaaaggggtgaccataaggttgcagggtttatatttatgtgcaatgcaaagactaagaaggagtgctaccagaatcgcttgtttgggatgcctggtgggaagattggaatggtcaagaagataaggccaggggtgaagctgttcctgtatgattttgacctgaagcttttgtatggtgtgtacaaggcagcatcacatggngggctaaaccttgtccaaggagcatttagtgggaagttccctgcacaag

SEQ ID NO: 85318 - DNA, 515 bp, Zea mays
  unsure (1)..(515): unsure at all n locations
ngagaaatggtttgtctatgaaagatagtattctctaccgcgtctcggaattcccggtcgcgcacgcgtccgagcaccccgatcctgggccagtgcgtctagttcctgaggcatcagtgcagcccgacggcgacgccctactgctcgcctgagtgccagtcgttgcggcagcagtgttgccagcagctcaggcaggtggagccgcagcaccggtaccaggcgatcttcggcttggtcctccagtccatcctgcagcagcagccgcaaagcggccaggtcgcggggctgttggcggcgcagatagcgcagcaactgacggcgatgtgcggcctgcagcagccgactccatgcccctacgctgctgccggcggtgtcccccactgaagaaactatgtgctgtagtatagccgctggctagctagctagttgagtcatttagcggcgatgattgagtaataatgtgtcacgcatcaccatgggtggcaatgtcagtgtgagcaatgacctgaatgaac

SEQ ID NO: 85319 - DNA, 518 bp, Zea mays
  unsure (1)..(518): unsure at all n locations
agaggaagcgtgtcgcctaccctgaacactattctgctacccgttcggattcccgggtcgagccacgcgtccgtgtgaagttgacaatgaaaagatggaactcctgctgtcccaactgagcggtaaggacgtcaccgagctcattgccgcgggcagggagaagtttgcttcagtcccatgtggtggcggcggtgtcgctgttgcggcagctgcacctgctgctggcggagctgctcctgcagctgaggcaaagaaagaagagaaggtggaagagaaggaagaaagcgatgatgatatgggcttcagcctcttcgactaggctgcacagtcatcacagtattgttttgggcagtgaaaccagaggaaaaccagagtcatgtttagattttaagcttgttttatgttggaaagtactggaaagactgctacttgtctttatatttggtaattcagccgtagattgctatgctggttgggatttaaaaaanaaaaaaaaaaaggcggccgctctataggtn

SEQ ID NO: 85320 - DNA, 517 bp, Zea mays
  unsure (1)..(517): unsure at all n locations
ngggaaagtgctgtgttatgaggagagggtattgtcaacccgttcggaattcccgggtcgacgcacgcgtccgcggacgcgtgggcaagcgcaccggcgcgatgctgcggcttgccgtgatggagtcggtgctgcagcagcccttcttcaagacggagacggtgtcgcatctggtgcgggagtgcgagtccttgatggaggccgtgttcccggaggcgcgcgatcggggccaggccgccgccgcggcgctcgccgtcgcggaggcggagcagggcatcttccgcaacaccgtggccgcgctcctcaccatgcaggacgtccgcgcggggagctccaccagaggaagccactcgctgccgccgctcaacctgccggactccgactggctacggtccttcgacccgccgtttccgatcccgacccgatgacacttgttgctcgccgctcctagtaggcttgcgccagcctnctcgatctcccttccttttcggctagcttcttggcccgcccgggtccc

SEQ ID NO: 85321 - DNA, 513 bp, Zea mays
  unsure (1)..(513): unsure at all n locations
tattattnggaaggggaagcgaagataatattgtaccggttcggaattcccgggtcgacccacgcgtccgcattgaacatgtgactatttaataaaactctgtcagaatggaggagctgaaaaacatgggggcaacatgttattaggaaaaaatttaatgaaaacaaggaccatgagcattctggtagcctagatgacaccgatcgtaacagaccaaccaataatgataatgaatacgcttcctccgcgaatgatggaggtgatggcagctggaaatctcagagaaagaaaagagagaaagaagatgatgaaactgacctcgaaaatggtgatccttcttctacatcaaagaacccaagagttgtttggtcaggtgagctttaatcaacaattgggaatgcaatcaatcaacttgggatagacaaaacttgcccaaagaaaattttggaattgatgaatgtcccaagcttaaccagggaaaaatgtgccagccattttgcagaaatcagactt

SEQ ID NO: 85322 - DNA, 510 bp, Zea mays
  unsure (1)..(510): unsure at all n locations
aaggtatctgaataggggaaagggaagtagtccttctaccggtccggaattcccgggtcgagccacgcgtccgcccacgcgtccgagacgcccgtgggctcttgtgagaaagtggaatccagtagcgcgatagagcaacaatggcgaccaagatattttccctccttatgctccttgctctttctacatgtgttgctaacgcgacaattttccctcaatgctcacaagctcctatagcttcccttcttcccccataccttccatcaattatagcttcaatatgtgaaaacccagctcttcaaccatataggcttcaacaagcaatcgcagcaagcaacatacctttatcgcccttgttgtttcaacaatcgccagccctatctttggtgcagtcattggtacaaaccatcagggcacaacagctgcagcaactcgtgctacctctgatcaaccaagtagctctggcaaacctttctccctactctcagcaacaacaatttcttccattcn

SEQ ID NO: 85323 - DNA, 514 bp, Zea mays
  unsure (1)..(514): unsure at all n locations
agtgtactcgtgcctacgtttcangtcangctgcaccggtccggaattcccggctcgagccacgcgtccgactggaaccccgctgcttatttgcagcttcaaatactactaccatttagccagctagctgcagcaaaccgtgcttgcgggttgacacagcaacagttgctgcctttctaccagcagtttgcggctaaccccgcaaccctcttacaactacaacaattgttgccctttgtccaacttgctttgacagacccagcggccttctaccaacaacacatcattggtggtgccctcttttagattgcttattagttgtaattcaataataaagttttttggatgatgtatgtggccaaccagaaataagaagttacatctccagatcttaatgttgaaacaaaccattagggcacaacagcttctgcaacttgtgctacctttgatcatccaagttgcttttgctaacttttttttcctactgttagcaacaacaatttctttcattttc

SEQ ID NO: 85324 - DNA, 514 bp, Zea mays
  unsure (1)..(514): unsure at all n locations
caggggnnnnnnnaatcgtagctnatgtcaaaatcctgtactggtctcggaattgccgcgtacccgcgactcctcggacgcgtgggcggacgcgtgggagcaatttcaacgctgtcattctcaagaggcttgtcatgagtaaaaccaaccgaccaccaatctctatgcgccgccttgtcaagtttatggaaggaaaggagaagaacattgctgtcattgttggcacagtcacagatgacaaaaggatccaggaggttccagcaatgaaggttactgccctgaggttcacggagacagcaagggccaggattgtcaatgctggtggcgagtgcctcacatttgaccagcttgctcttcgtgctccacttggcgagaacacggtcctcttgaggggccccaagaatgcccgtgaggcagtgaagcactttggcaaggctcctggagtgccgnacagccacaccaagccgtatgtgcgctccaagggaaggaagttcgagaaggctcgtggcangag

SEQ ID NO: 85325 - DNA, 517 bp, Zea mays
  unsure (1)..(517): unsure at all n locations
aggggnnnnnnnnnttttnnanntcttcgttagtaaccccccnnnttgttcggaattcccgggtcgagccacgcgtccgcgccctactactgattcatgatatttgggaaatctcctctatccatctctctctgtgtatatatgtaataatgcagtaagacgacacacattatcatgtgtggtatgaccaataatatatgcatggtcataataaagttttggttttaatgaatcaaaaaaaaaaaaaaaaaaaaaaaaaaaaaaaaaaagggcggccgctctagaggatccaagcttacgtacgcgtgcatgcgacgtcatagctcttctatagtgtcacctaaattcaattcactggccgtcgttttacaacgtcgtgactgggaaaaccctggcgttacccaacttaatcgccttgcagcacatccccctttcgccagctggcgtaatagcgaagaggcccgcaccgatcgcccttcccaacagttgcgcagcctgaatggcgaatgggacgccc

SEQ ID NO: 85326 - DNA, 518 bp, Zea mays
  unsure (1)..(518): unsure at all n locations
tagggagggtactgtattgcctgacgctgcgtacagcatancgttccgattcccgtctcgaggcacgcgtacgccaacatagaaagcacaatagtgtaccaacaatggcagccaaaatattttgcttccttgtgctggcttatctttctgcaagtgctgctaccgcaaccattttcccacaatgctcacaagctcctatagcttactttcttaccccatacctctcaccagcggtgtcttcagtatgtgaaaacccaattcttcaaccctacaggatccaacatgcaatcgcagcatgcatcttacctttatcacccttgttccttcaacaaccgtcagccctattacagcagttacctttggtgcatttgttgacacaaaacatcaatgcacaacaactacaacaacttgtgctaagaaaccttgctgcctactctcagcaacagcagtttttttcattcaaccaacttgcttgcattgaactctgctgcttatttgcaacaacaactaccatttat

SEQ ID NO: 85327 - DNA, 518 bp, Zea mays
  unsure (1)..(518): unsure at all n locations
taganagggtactttgtgctcgatcgtgcgttcggctaactcgttcggaattcccgggtcgacgcacgcgtccgcggacgcgtggggttgcctgatgctgctgggactacgtgcggtcagcggctggagaaggtcattggtactgagcacacagacatcattcgcgttcccttcagaaatgagaatggcatcctccgcaagtggatctctcgttttgatgtctggccatacctggagacatacactgaggatgtttccagtgaaataatgaaagaaatgcacgccaagcctgaccttatcattggcaactacagcgatggcaacctagtcgccactctgctcgcgcacaagttgggagtcactcagtgtaccatcgctcatgccttggagaaaaccaaataccccaactcggacatatacttggacaaattcgacagccagtaccacttctcttgccagttcacagctgaccttattgccatgaaccacacccatttcatcattccctgcgcatttcc

SEQ ID NO: 85328 - DNA, 506 bp, Zea mays
  unsure (1)..(506): unsure at all n locations
tgtttggcgtcatctgagnaagggcgcttcgnaggnctatacggttcggaattaccggctcgacccacgcgtccgcaagcaccaagccatgtacttcccatgctcttgggtcacacttggccatcatgcttgagggcgcatagacggcattggtgatttcaggaacagagagctgctcatggtaagccttctcagcagagattacaggggcatatgaggaaagcatgaaatgtatacgtgggtatggaacaaggttggtctggaactcggtgacatccacattgatagcaccatcaaacctcagggaggtggttagagatgatatgatctgtgagatcagcctgttcaagttggtgtaggttggcctttcgatgtcaagggacctcctgcatatgtcatagatagcctcgttgtccaggaggactgcaacatcagtgtgctcaagcaaggagtgggtggagaggacactgttggatggtttacaacacttgtgacactgtggggaa

SEQ ID NO: 85329 - DNA, 513 bp, Zea mays
  unsure (1)..(513): unsure at all n locations
tggtgaggtatcntgagccagtttcgnactgntatgctananctgtactcgttcggaattcccggctcagacctacctggacggcgaggagctggactgacggatcatttcatggatctaagcccaatcccgtggggggggttgatgcagcggcggtgggtacagtggtggccgtggaggcggcggctacagcggtggcgggcgccgtgatggcggcggcggctacagcggtggcggcggctactgtggcggcggcggctactgtggtggtggcggcggctacggccgtggcaaccgtggcggcggctactgcaactccgacgggaactggaggaactgagcggtggggcccgcgcggccaagttatcctgttcgctgccgtgatgtttaccctagtccagagggtttatcttcgttcgtctcgtgtttgttgttgcccatctgtgtttttgattgcaaggtcgctctgtgtcagatgataatgctgtgtttattctcagcttcagcaaaacg

SEQ ID NO: 85330 - DNA, 509 bp, Zea mays
gggagggtttttttacgaaacgaaatattgcatactctaccggttcggaattcccgggtcgacccacgcgtccggtgctctccgcctgcggcctctgtatcccgcaaccaaaaactacccccaaaagaagaagaaaaccccaaatcctcgagatctatcagtatcgagcgacttaccaatccgattgctagggtttagtttcgaaaaaatctgaaaaaaaattctggtcgaggggaggaggcgatgtcggcgcaagtggcggtggtgcctaatgggggcccgggcgctgtccccgcggtggtgtcgccgggagctgtcggcgtggctcagcctctcccgaccacgtcgctctacgtgggcgacctggagggggccgtctcggactcgcagctgtacgaactcttcagccaggcggggcaagtggtgtcggtgcgcgtctgcagggatgtcacctcgcgccgctcgcttcgatacgcctacgtcaactacagcaatccccttggatgctt

SEQ ID NO: 85331 - DNA, 529 bp, Zea mays
agtagcgtgtctgccctagctagagccatcgcagaccgtaccgttcggaattcccgggtcgacccacgcgtccggcgacaacgggaccacggtgttcgactacgtgctccgtgcggagcagctggtcatcgtaccccagggctacctcgtcgccaccaaggcgcagggagaaggcttccagtacatcgccttcgagacgaaccctgacaccatggtcagccacgtcgacgggaagaactccgtcctgagcgacttgcacggccgcgtcatcgccagctcgtatgccatctccatggaagaagctgcagagctcaagaacggtaggaagcatgagctggctgtgcttactcctgcttgcagtggcaggtaccaacaaggtcaaagctgcaagcgcccacaagtaggacaaacctagagtgatctgcctgaataagtaactcgagactgtactagataaccaaagcttgctcatgttttaactgcgtgtggataaacctttcaactcttagctttaaggtttttggccacg

SEQ ID NO: 85332 - DNA, 536 bp, Zea mays
  unsure (1)..(536): unsure at all n locations
ggtaagaggctgtctcactgntccacgccgtantgcatctgctcgtaccggttcggaattcccgggtcgacccacgcgtccgcccacgcgtccgcccacgcgtccgcccacgcgttcgcccacgcgtacggagccctgggaccttcttgatacaaccacagttgttgccgttctaccagcacgctgcgcctaacgctggcaccctcttacaactgcaacaattgctgccattcaaccaacttgctttgacaaacccagcagcgttctaccaacaacccatcattggtggtgccctcttttagatttcttatgagttatagttcaataataaagttgtttgtctgatgtttgtggcttcccagaaataagaacgtacatctctagattctaacaaaaaaagcccaacagtaggcacagtctcaaaaaaatattcccgaaaaaattaccaggagacctacaaaccgaaactatagcttgcttaacgttaaatttgcgaaccgtttagcacgtttcctccataaggttttaaattcgag

SEQ ID NO: 85333 - DNA, 529 bp, Zea mays
agttaggggctgtgtgctggtcagcccacttcgcactgccgtaccggtctcggaattcccgggtcgacccacgcgtccgcccatacctctcaccagcggtgtcttcagtatgtgaaaacccaattcttcagggcctgcaggatccaacaggcaatcgcagcaggcatcttacctttatcacccttgttcctccaacaaccgtcagccctattacagcagttacctttggtgcatttgttggcacaaaacatcaaggcacaacaactacaacaacttgtgctaggaaaccttgctgcctactctcagcaacagcagtttcttccattcaaccaactggctgcattgaactctgctgcttatttgcaacaacaactaccattcagtcagctagctgctgcctacccccagcaatttcttccattcaaccaactggcagcattgaactctgctgcttatttacaacagcaacagctaccaccattcagccagctagctgatgtgaaccctgttgccttcttgcaacaacacc

SEQ ID NO: 85334 - DNA, 502 bp, Zea mays
ggggtttttatgagaggggaggtaagaagagcttctacggaattcccgggtcgacccacgcgtccgctcggaatgacacgccaatcagccagaatgagatcagaatcactactcaggggaggatgaggaactatatcagctatgggatgtcgctgcttgaggaaaatggacatgatgagattagtatcaaggccatgggacgggccataaataagacagttatgggtgttgaattgatcaagagaagggttggaggtcttcatcagaacactgctactgaatctgttgatatcacagacacatgggaacctttggaagaaggccttctcccactagagacaactcgccatgtgtcgatgatcactgtgacactgtcaaagaaccctctggatacatcatctccaggataccagccacctatcccagctgaagaggtgaaacctgcttttgactatgatcatgaagaatcgtatcccactggtcgtggaagaagacgttgtgg

SEQ ID NO: 85335 - DNA, 507 bp, Zea mays
tggagaagctgtataagaaaagaagggagaatgctctactcgtccggaattcccgggtcgacccacgcgtccgcccacgcgtccgcggacgcgtggggaagcggcggcggcggagcaaacgcaggcgaaggcgagggtgtgagggaaggagcaccagccatggtgcacgtcaacttctaccgcaactatggtaagacgttcaagaaaccaaggcgtccttatgagaaggagcgtcttgatgctgaactgaagctggtcggtgagtatgggctgaggtgcaagcgtgagctttggagggtccagtatgcactgagcaggatccgtaatgctgcaaggcacttgctcacccttgacgagaagaacccccgtcgtatctttgagggtgaggcgcttcttcgccgcatgaaccgctatgggctgcttgctgagggtcagaacaagcttgattatgttcttgccctcaccgctgagaacttcctcgcaaggcggcttcaaacacttgtcttc

SEQ ID NO: 85336 - DNA, 513 bp, Zea mays
  unsure (1)..(513): unsure at all n locations
nagtaaaggtctgtaaggaggaaaggatatgctatactcggtccggaattcccgggtcgacccacgcgtccgcccacgcgntccggngcnttacctgacttggaggggccgtacccaaaattttcaagatccatgcacgtgccatgaactgtgagcgagatattcgtttcgagcttctggcacggctctgccccaactctactggagctgatataaggagcgtttgcacagaagccgggatgtacgccattcgtgcccgcaggaaaacggtgacagaaaaggattttctcgatgctgtcaacaaggtcatcaagggctaccagaagttcagtgcaacacccaagtatatggtgtacaactagtcggcgtgtcttcatgggatctgttgtttctagaaactctggatctttttcatggttgtatcatcatgagattctctatgcaaaagttgttgtttgtttagcaaattggatgcccaatggaattggttcctgtaccgcatgtttttaagat

SEQ ID NO: 85337 - DNA, 506 bp, Zea mays
  unsure (1)..(506): unsure at all n locations
gggctgcgtctactgacgagaggagttaatggagtgctctaccggtccggaattcccgggtcgacccacgcgtccgcccacgcgtccgctcgagtggctaagatgttaggtgatgaatatggtactgcttcgagcatcaagagtagagttaatcgtcaatctgtgttggctgccatcacctcagctcagcagaggttgaagctctacaacaaagtgcctcctaacggattggttctgtacactggaactattgttactgaagacggaaaggaaaagaaagttactattgattttgagccattcaagcctatcaatgtatcactctacctttgtgacaacaagttccacactgaggctttaaatgagctcttggaatctgatgacaagtttgggttcattgttatgggtggtaatggtactctntttggcacactaagtggcaatacccgtgaagtgcttcacanattcactgttgacctcccaaagaagcatgngtagaggagggc

SEQ ID NO: 85338 - DNA, 547 bp, Zea mays
  unsure (1)..(547): unsure at all n locations
gagggaagaagaattctgcgctatcgtataaagaacttaanatgcattgctcgtaccggtccggaattcccgggtcgacccacgcgtccgagaccaactagcaacatagaaagcacaatagtgtaccaacaatggcagccaaaatagtttgcttccttatgctccttggtctttctgcaagtgttgctaccgcaaccattttcccacaatgctcacaagctcctatagcttcccttcttcccccatacctctcaccagcggtgtcttcaatgtgtgaaaacccaattgttcaaccctacaggatccaacaggcaatcgcaacaggcatcttaccattatcacccttgttcctccaacaaccgtcagccctattacagcagttacctttggtccatttggtggcacaaaacatcagggcacaacaactacaacaacttgtgctagcaaaccttgctgcatactctcagcaacatcagtttcttccattcaaccaactggctgcattgaactctgctgcttatttgcaaccaccattaacaatcaagcc

SEQ ID NO: 85339 - DNA, 539 bp, Zea mays
  unsure (1)..(539): unsure at all n locations
gagtttagtgtactctggcccccacctcaacgacatagctgcactactgtaccggtccggaattcccgggtcgacccacgcgtccgcacccaaatacagatttgttgtgcgatttaccaacaaggacatcactgcccaaatcgtatctgctagtatagcgggtgatatggttcttgcttctgcctactcgcatgagttgccacgatatggtcttgaagttggtctgaccaactatgcagctgcctactgcactggccttctgttggctcgccgtgtgctcaagatccgtggtttggatcatgagtacgagggcaatgttgaggccactggtgaggacttctctgttgagccagctgatgagaggaggcctttccgtgctctcttggatgttggccttatcaggactacaacaaggaaccgtgtctttggtgccctcaagggagcattggatggaagcctggatattcctcacagcgagaaaaggtttgctggattcaagaacgacgaccagcagtttgatgcttatcccaaccgtagtn

SEQ ID NO: 85340 - DNA, 535 bp, Zea mays
  unsure (1)..(535): unsure at all n locations
agtcaggggcgtgtcttgctggcccacgctcatantgcattagnctgtaccggtctcggaattcccgggtcgacccacgcgtccggcaagtgacccggacagaattagattcatttgaggattatgctgctgattatgtcagagtatttgatagactctgtatcatctggaagcccaacttgcctcactaaagtccttggtctttatcagatcactgccaagaatttgagagatgggaaagagctgaagatggatgtaatggtcatggaaaacctatttttcaagagaaaggtatcaagaatatatgacctaaagggttctttgcgttcccgctacaaccctgatacttcagggaacaacaaggttctcttggatcttaatctgttagagacacttcacacaaagcccatttttcttggaagcaaagcaaaaagaaggctagaacgagctgtctggaatgatacttcttttctggcatcggtggatgtgatggactactctctcctagtccgcattgattaagaaagggaagaac

SEQ ID NO: 85341 - DNA, 510 bp, Zea mays
gtgaaaagtatgtgtaagaggggagaagagtatgctatactggtccggaattcccgggtcgacccacgcgtccgggctgaggagcccgggcaacaccaacaacccggcgggctccgcggtgacggcggccaacgtggacaagttcccgggggtgaacacgctgggcgtctccatggcgcgcatcgactacgccccgggcggccagaacccgccgcacacgcacccgcgcgccaccgagatcatcttcgtcctcgagggcacgctcgaggtcggcttcctcaccaccgccaacaggctcctcagcaagaccgtcgccacgggggacgtcttcgtcttcccccgcggcctcgtccacttccagcagaacagggggcacggccccgccgccgtcgtcgccgccttcaacagccagctccagggcacgcaggccatcgccatgacgctcttcggggccaacgccgccgtgcccaccgacatcctcgccaaggcattccgggtcggccgcgggga

SEQ ID NO: 85342 - DNA, 507 bp, Zea mays
gggaggtttgtatgggggggagggaaacagtattactcgtccggaattcccgggtcgacccacgcgtccgtgcctccttcaagctactctaatgtcctttctattcaagtctagcaatggcggcaccagtgagaaaaatcccatccccagaaaacagcgagaaaaaataaatgaattacgcaaggagcttggtgaacactcatcagaagccattaaagacttcctttcagatgcctcgttagtgcgatttcttcgagcaaggaactggaatgtgcagaaagctagtaaaatgatgaaagcagctgtgaagtggcggcttgcattcaaacctgaaaacatctgttgggatgatattgcagaggaagcagagactggaaagatatatagggcggattataaggacaaacatggcagaactgttcttgtattgaggcctggcttagagaacactacctcagcaataggacaaatcaaatatctagtctactctctggagaaagcaattat

SEQ ID NO: 85343 - DNA, 512 bp, Zea mays
  unsure (1)..(512): unsure at all n locations
ngggaaaagcatgtgttacggggggaagagggagaaaggtattactcgtccggaattcccgggtcgacccacgcgtccgagctcatcgactccagattggagaactcgacaccatgaaggtgctgatcgttgccctggctgtcctggcgctcgctgcgagcgccgcctccagtacaagcggcggctgtggctgccagacaccaccgtttcatctaccgcctccgttctatatgccgcctccgttctatctgccgccgcagcagcagccgcagccatggcaataccccactcaaccaccgcagctaagcccgtgccagcagttcggatcctgcggcgtcggcagcgtcggcagcccgttcctgggccagtgcgtcgagttcctgaggcaccagtgcagcccggcggcgacgccctacggctcgccacagtgccaggcgctgcagcagcagtgctgccaccagatcaggcaggtggagccgctgcaccggaccaggccaactaccggggggtcc

SEQ ID NO: 85344 - DNA, 506 bp, Zea mays
ggtaagcatctgttacgagggaagaaagtatgctataccggttcggaattcccgggtcgacccacgcgtccgcccacgcgtccggtcattgagtcgttgctgtcgaaggtcgatatcctcatccttggtggtgggatgatctacacattttacaaggcacagggatattctgttggaaaatctctcgtggaagaggataaactcgagctcgcaacttctcttattgagaaggcgaaggcaaagggggtttctcttttgcttcccactgatattgtagtagcggacaagtttgcagccgatgctgagagcaagattgtccctgccactgctatccctgatgactggatgggtcttgatgttggccctgatgccaccaaaacattcgacgaagcattggacaccaccaagactgttatttggaacggccccatgggagtgtttgagttccagaagtttgcagctggcaccgaggcgattgccaagaagctagctgagcttacaaccac

SEQ ID NO: 85345 - DNA, 509 bp, Zea mays
  unsure (1)..(509): unsure at all n locations
ngggagttttgcttgaggggagagatagagaatgctctaccggtccggaattcccgggtcgacccacgcgtccgcaccaagcgaagctacctagcaacgacttaacaacaatggctaccaagatattagcccgtccttgcgcttcttgccctttttgtgagcgcaacaaatgcgttcattattccacaatgctcacttgctcctagtgccattataccacagttcctccgaccagttacttcaatgggcttcgaacacctagctgtgcaagcctacaggctacaacaagcgcttgcggcgagcgtcttacaacaaccaattaaccaattgcaacaacaatccttggcacatctaaccatacaaaccatcgcaacacaacagcaacaacagttcctaccagcactgagccaactagatgtggtgaaccctgtcgcctacttgcaacagcaggtgcttgcatccaacccacttgctctggcaaacgtaactgcataccaacaacaacaaca

SEQ ID NO: 85346 - DNA, 515 bp, Zea mays
  unsure (1)..(515): unsure at all n locations
gggaaaagcctgnttttatgtcggccagagagtaagagagagctctaccggtccggaattcccgggtcgacccacgcgtccggcaacatagaaagcacaatagtgtaccaacaatggcagccaaaatattttgcttcctgatgctccttggtctttctgcaagtgctgctaccgcgaccattttcccgcaatgctcacaagctcctatagcttcccttcttcccccatacctctcatcagcggtgtcttcagtatgtgaaaacccaattcttcaaccctacaggatccaacaggcaatcgcagcaggcatcttacctttatcacccttgttcctccaacaaccgtcatccctattacagcagttacctttggtgcatttgttggcacaaaacatcagggcacaacaactacaacaacttgtgctagcaaaccttgctgcctactctcagcaacagcagtttcttccattcaaccaactggctgcattgaactctggttgttaattgccacaacta

SEQ ID NO: 85347 - DNA, 513 bp, Zea mays
  unsure (1)..(513): unsure at all n locations
ngagaaaaggcctgncttcatcgatcgcgggtgaacagcaggctctaccggtccggaattcccgggtcgacccacgcgtccgggcttctcctccccctccggttcgggttcgggttcgtgaggttctccggggttcggtgtcgtgggtgagcggatcgagatggcggcgtcggatgttgagtaccgctgcttcgtcggcggcctcgcctgggccacggacgaccactccctccacaacgccttcagcacctacggcgaggtcctcgagtccaagatcatcctcgatcgggagacgcagaggtcccgcggcttcggcttcgtcaccttctccacggaggaggcgatgcggaacgccatcgagggcatgaacggcaaggagctggacggccgcaacatcaccgtcaacgaggcccagtcccgcggcggccgtggaggcggcggcggtgggtacggtggtggccgtggaagcggcggctacggcggtggcnggcgccgtgatggcngccgcnggta

SEQ ID NO: 85348 - DNA, 542 bp, Zea mays
  unsure (1)..(542): unsure at all n locations
ngggttagaggctcngctctacgtcagcagacagtaattgtcactgctcgtaccggtccggaattcccgggtcgacccacgcgtccgcctggctctcgctgcgagcgccacctccacgcatacaagcggcagctgcggctgccagccaccgccgccggttcatctaccgccgccggtgcatctgccacctccggttcacctgccacctcctgtgcatctcccaccgccggtccacctgccgccgccggtccacctgccaccgccggtccatgtgccgccgccggttcatctgccgccgccaccatgccactaccctactcaaccgccccggcctcagcctcatccccagccacacccatgcccgtgccaacagccgcatccaagcccgtgccagctgcagggaacctgcggcgttggcagcaccccgatcctgggccagtgcgtcgagttcctgaggcatcagtgcagcccgacggcgacgccctactgctcgnctcagtgccagtcgttgcggcagcagtggttgcaagcacttcaggagn

SEQ ID NO: 85349 - DNA, 527 bp, Zea mays
atgaagtctgtgtctagatccactataatgctactgctcgtaccgtccggaattcccgggtcgacccacgcgtccgtaagaccaactagcaacatagaaagcacaatagtgtaccaacaatggcagccgaaaggttttgcttccttatgctccttggtctttctgcaagtgctgctaccgcgaccattttcccgcaatgctcacaagctcctatagcttcccttcttcccccatacctctcatcagcggtgtcttcagtatgtgaaaacccaattcttcaaccctacaggatccaacaggcaatcgcagcaggcatcttacctttatcacccttgttcctgcaacaaccgtcatccctattacagcaattacctttggtgcatatgctggcacaaaacaataaggcacaacaactacaacaacttgtgctagcaaaccttgctgcctactctcagcatcagcaagtttcttcattcaaccaactggctgcattgaactctgctgcttatttgcaacaacaactacca

SEQ ID NO: 85350 - DNA, 520 bp, Zea mays
  unsure (1)..(520): unsure at all n locations
gggtagaggttngtgtgttaacgccagtcgcactaactgtaccggtccggaattccggtcgacccacgcgtcggcacatacaagcacaattcagactcacaatggccgccaaaatattcgcgtcgggtgctccttgctctttctgcaatagctgctaccgtaacctttttcccacagtgctacacaagctcctatagctcgctttctttcatcattcctcttaccagctgagtattcaagatttcaaaacccaatatctcaaccctacaagatgcaatcggcgatcatcacaggcatattaccattatcaccacttgaactacgacaagcgatcagcctaatacaagtagttactttggagcatttgatcagccaatacatcaaagcacaactactacaacaacatgtgctcagaaaccttgctgcctactcttataaacagggctatcttacattcaccatactgctgcattgaacatgctgctgatttgcaacagcaactaccattcaatcctctagt

SEQ ID NO: 85351 - DNA, 512 bp, Zea mays
  unsure (1)..(512): unsure at all n locations
gaagtatgtgtgatagtggttaagagagaagatgtatctactcgtttcggaattcccgggtcgacccacgcgtccgaccatccttagtgaatctatatcttcaaagaatcgtagcacaacaactaccacaaccagtgggttcaacaattaaaccagtagttgcagcgaaccttgatgcttaccttcagcaacaacaatttcttccattcaatcaactagctggngtgaaccctgctgcttacttgcaggcacaacagctactaccattcaaccaacttgtcaggagccctgctgccttcttactgcagcaacagttgttgccattccatctacaagttgtggcaaacattgctgctttcttgcaacaacaacaattgctgccattttacccacaggttgtgggaaacattaacgccttcttgcaacagcaacagttgctgccattctacccacaagatgtggcaaacaatgtcgccttcttacaacaacaacaattgctgccatttaaccaa

SEQ ID NO: 85352 - DNA, 507 bp, Zea mays
  unsure (1)..(507): unsure at all n locations
ngggaagatctgtatggagggggagaaaagctatactcgtccggaattcccgggtcgacccacgcgtccgtgaaccgaaagttcgaggtgtatgagaagcagatgaaagcggccaggaagtctgggagcaaggccgcacaggataaggttaagggccaggcgctatcaaaggctgctaaagaggccgccaagaacaaggggaaagggaagagtgctgcagatgacgatgatgaccagaaacaggtagctgtgccgcggaagtggcgtgactacagtgttgagttccatttcccagagcctacagagctcacaccacctctccttcagctcattgaggtagggtttagctaccctggtaggccagacttcaaactctcaggtgttgatgttggcattgatatgggaacacgtgtagctattgttgggcccaatggagctgggaagtctacgctgcttaatttacttgcgggtgatcttatcccaacagaagggngaggcagggaggaa

SEQ ID NO: 85353 - DNA, 505 bp, Zea mays
  unsure (1)..(505): unsure at all n locations
aggagcttttttacgggggcggggggagagaagctctaccggtccggaattcccgggtcgacccacgcgtccgcgcaaattgcaccaagaaatccatcgagaggccgtcgacaggggaattaatggcgtcggcgtctagcagcagccaccgccgcctcatcctcgcagccgccgtcctgctctccgtgctcgcggctgccagcgccagcgccgggacctcctgcgtgccggggtgggccatcccgcacaacccgctcccgagctgccgctggtacgtgaccagccggacctgcggcatcgggccgcgcctcccgtggccggagctgaagaggagatgctgccgggagctggcggacatcccggcgtactgccggtgcacggcgctgagcatcctcatggacggcgcgatcccgccgggcccggacgcgcagctggagggccgcctagaggacctgccgggctggccgcgggaggtgcaaaggggattcgncgncaccctcgtnac

SEQ ID NO: 85354 - DNA, 521 bp, Zea mays
  unsure (1)..(521): unsure at all n locations
gggnntntggggggaagaggtcgctatgtggggcaggggtaaggtaagctctaccggtccggaattcccgggtcgacccacgcgtccgaaccgagttccccagtactccgcagtccgcacggccgcatccgtcaagatccgcgaagagcaacgaggcgaggcgaggggagggaaaacaagtgagtgagagagagagagagaggagggaaaatgctgcgccacgccgcccgccgcctcgtttcccgcgccgtcgctccgcccaccgcgcgccgggcgctcgccacggcggaggtgcccgcggaggccgtcgaggactccacgttcgtcgaggcctggaaaaaggtcgcccccaacatcgagcccccagcgacgcccctctccctcatgcagccgcgcccgcccacgccagctaccatccctaccaagctcaccgtcaacttcgtcctcccctacaagtccgagatcgccaacaaggaggttgacatggtaattgtaccagctacaactggtcaaatgggtgt

SEQ ID NO: 85355 - DNA, 533 bp, Zea mays
  unsure (1)..(533): unsure at all n locations
ggaagagcgtgtcgagtcgcacccagcattatatcatagctcgtaccggtctcggaattcccgggtcgacccacgcgtccgcggacgcgtgggcgctcctcaactggctgcggagcttgttttttaagccaggcatggagctctccctggatgggttgcagaatgctgggaagacattgctggtcaatgctgttgctacaggtggctacagtgaggacatgattccaaccgtaggcttcaatatgcggaaaatcaccaaggggaatgtcacaattaaactttgggatcttggtgggcaacgaagattccgcactatgtgggagcgctactgccgtggagtttctgctattctatatgctgtggacgctgcttaccgagatagcatcccaatagcgaaaagtgaattgcttggtctgctgacaaaacaatctttaactgggaatcccttggttggcctttgcaaccaaattgacaagtcaaaaagcgctttcaaacaaggcttgggtggatcaactggnacctggatgataaag

SEQ ID NO: 85356 - DNA, 534 bp, Zea mays
  unsure (1)..(534): unsure at all n locations
ggaagaggcgtgtgttcatgcagaagaangtcattgtcactgctcgtaccggtccggaattcccgggtcgacccacgcgtccgcggacgcgtggggttctagatcgcgagcggccgccctttttttttttttttggaagtgataacttcttatttctaggaggccacatacatcagccaaaaaacttcattattgaatgacaactaataagcaatctaaaagagggcaccgccaatgatgtgttgttggtagaaggctgctgggtttgtcaaagcaagttggacaaagggcagcaactgttgcagttgtaaaagggttgcggcgttagccacaaactgctggtagaacggaagcaattgttgttgtgtcaagaaagaagcggggcttgttgtagctagctggccaaatggtagtagtatttgctgctggaaataagcagaggggttcagtgcggcgaattggttaaatggaagaaattgttgctgctgagagtaggcagtagctagctggctgaatggtagtagtttgtggtcn

SEQ ID NO: 85357 - DNA, 514 bp, Zea mays
  unsure (1)..(514): unsure at all n locations
ngggaggaggtgtgtgagaaggcggggcgatgggaatgctctaccggtccggaattcccgggtcgacccacgcgtccgcgatcgacaccatgagggtgttgctcgttgccctcgctctcctggctctcgctgcgagcgccacctncacgcatacaagcggcggctgcggctgccagccaccgccgccggttcatctaccgccgccggtgcatctgccacctccggttcacctgccacctccggtgcatctcccaccgccggtccacctgccgccgccggtccacctgccaccgccggtccatgtgccgccgccggttcatctgccgccgccaccatgccactaccctactcaaccgccccggcctcagcctcatccccagccacacccatgcccgtgccaacagccgcatccaagcccgtgccagctgcaaggaacctgcggcgttggcagcaacccgatcctgggccagtgcgtcgagtttctgaggcatcagtgcaggccgacggcgacgcc

SEQ ID NO: 85358 - DNA, 509 bp, Zea mays
  unsure (1)..(509): unsure at all n locations
ggtaaaattgttattcctacgtacgcgaagatgctacactcgtccggaattcccgggtcgacccacgcgtccgcccacgcgtccgcggacgcgtgggcggacgcgttggataggcttcaacaagcaatcgggacaggcaacatacctttatcgcccttgttgtttcaacaatcgccagccctatctttggtgcagtcattggtacaaaccatcagggcacaacagctgcagcaactcgtgctacctctgatcaaccaagtagctctggcaaacctttctccctactctcagcaacaacaatttcttccattcaaccaactgtctacactgaaccctgctgcttatttgcagcaacaactattaccatttagccagctagctactgcctactctcaacaacaacaacttcttccatttaaccaattggccgcactgaaccccgctgcttatttgcagcagcaaatactactaccatttagccagctagcttcagcaaaccgtgctttctn

SEQ ID NO: 85359 - DNA, 508 bp, Zea mays
aaagcttttgtaagagaggaggaatgtattgtataactctaccggttcggaattcccgggtcgacccacgcgtccgccagatctatcaccttgcttgccctgcttcaccaatcttctacaagcacaatgctgttgagaccatcaagacaaatgttattggtaccctgaacatgctgggacttgcaaagagagttggagctaggattttgttgacatcaacatctgaagtttatggtgatccacttgagcatcctcaaaccgaggcctactggggcaatgttaacccaattggagtcaggagttgttatgatgagggtaagcgtgtagcagagacgctgatgttcgactatcacaggcagcatggcattgaaatccgaattgccaggattttcaacacctatgggccaaggatgaacattgacgatggccgtgttgttagcaacttcattgctcaagctgtgcgtggcgaaccccttactgtccagaagccaggaacacagactatgag

SEQ ID NO: 85360 - DNA, 530 bp, Zea mays
  unsure (1)..(530): unsure at all n locations
gggaaagcgtgcagtacgagaaagaaatatagtactgctcgtaccggtccggaatcccgggtcgacccacgcgtccgattacaacaacaatccttggcacatctaaccatacaaaccatcgcaacgcagcagcagcaagcactgagccacctagccgtggtgaaccctatcgcctacttgcaacaacagctgcttgcatccaacccacttgctttggcaaacgtagctgcataccaacaacaacaacagttgcaacagtttctaccagcgctcagtcaactagccatggtgaaccctatcgcctacctacaacagcaacaacttctttcatctagcccgctcgctatgggcaatgcacctacatacctgcaacaacagttgttgcaacaacagttgcttgaacaaattggaccaactcttactcaactagcttgggcaaaccctgctgnctacttgcacaactactttcattcacncaactgactgtgtcgaactctgctgcgtacctacaacagcgacaacagttactt

SEQ ID NO: 85361 - DNA, 537 bp, Zea mays
  unsure (1)..(537): unsure at all n locations
aggtaagaggcgtgncgncctcggacataagaagtgatagcattgctcgtaccggtccggaattcccgggtcgacccacgcgtccgcggacgcgtgggcgccgtcggatcctcctgccctccccacgtccacctctcgtccgggaagaatcggcggcggcggcggcggcggcgagcgccttcccttgtcaaaatccacccggcggcagagcagagcctcgttgctgaggaggggagatggcaggcatgaccgatatgccgatgaggccggcgcggccgggcccgccgatgcagcaccggggccctccgccgatggcgcgcctccgccccgaaccaatcgaccgcgagaagacctgccctctgctgctcagggttttcacaagggttgctggtcaccaccaaaatgaagagttttctgtgagagggaaagaaccaaaggatgaagttcagatttacacatggaaggatgccactctccgtgagcttactgatcttgtgaaagaggttgctcttccagcaaggaaaagggaccccatgg

SEQ ID NO: 85362 - DNA, 537 bp, Zea mays
  unsure (1)..(537): unsure at all n locations
gaggcagaggatctgatccatgcatctcgcaatcatatgcattactcgtaccggttcggaattcccgggtcgacccacgcgtccgcccacgcgtccgcccacgcgtccgcccacgcgtccgcccacgcgtccgcgggcgcggggggaccaacaagcaacatagaaagtggaatccagtagcaacaatagagcaacaatggcgaccaagatattttccctccttatgctccttgctctttctgcatgtgttgctaacgcgacaattttccctcaatgctcacaagctcctatagcttccattcttcccccataccttgcatcaatgatagcttcagtatgtgaaaacccagctcttcaaccctataagctccaacaagcaatcgcagcacgcaacatacctttatcaccctcgattcaacaatcgtcagccctatctttggtgcagtcattggtacanaccatcagggcacagcagctgcagcaactcgtgctacctgtgatcaaccaagtagctctggcaaacctttcttcctactc

SEQ ID NO: 85363 - DNA, 514 bp, Zea mays
  unsure (1)..(514): unsure at all n locations
ggtaaaagggtgnatttaagaaggcagggaggtattgtagtactcgtccggaattcccgggtcgacccacgcgtccggatcaacgtcgtgttccgcaggacggcgtgcaggtacgggggcaagaacatcgccttgcacgggaacgagggctccactagcttctggctctccctgctggtggagttcgaggacggcgacggcgacatcggatccatgcagctcaaacaggccaactcggcgcagtggcgagacatgcagcacgtctggggggccacgtggagcctcaccccgggcccgctcgtcgggcccttctccgtgcggctgacgaccctgtcgggcaagcagacgctcacggcccaggacgtcatccccaagaactgggcccccaaagccacctacacctcccgcctcaacttcgcgtagaggccttctgccttggcccgccgcgtatttatcgttctgtgcagtttgatgtcgcgtgaaggggataagctggtatagtaatggataaacn

SEQ ID NO: 85364 - DNA, 516 bp, Zea mays
gggggaaaaggctttttaattgatatgggaggtaaagagtatgcttcgtaccgatcgccgggtcgacccacgcgtccgcggacgcgtgggttcagaaacacaccaagcgaagcacattagcaacaacctaacaacagtgggtaccaagatattatccctccttgcgcttcttgcgctttttgcgagcgcaacaaatgcgttcattattccacaatgctcacttgctccaagttccattattacacagttcctcccaccagttacttcaatgggcttcgaacacccagctgtgcaagcctataggctacaacaagcaattgcggcgagcgtcttacaacaaccaatttcccagttgcaacaacaatccttggcacatctaacaatacaaaccatcgcaacgcaacagcaacaacaattcctaccagcactgagccacctagccatggtgaaccctgccgcctacttgcaacagcagttgcttgcatcaaacccacttgctctggcaaacgtagttgc

SEQ ID NO: 85365 - DNA, 509 bp, Zea mays
gagcctgtttttaagacgggaggtagtatagcattgctctaccggtccggaattcccgggtcgacccacgcgtccgcgcgggtgcaggcctccaggggcacggcgatgggacagcacgactctcttctcggagggaacccaacaaaaaccctcgctcgcctcacttgttcgctcacctcggtgcggcgcgtcgttcggacacggagatacagcggcgattccggcgatggagtacgtgaaccccctcaccggcttccgcgtcgacggccgccgccccaacgagatgcggcaactcaagggcgaggtcggcgtcgttgcgcgcgcagacgggtcggcgctgttcgagatgggcaacaccagagtcatcgccgccgtctacggcccgcgagaggttcagaacaaaggtcagcaagtaaacagcaaggaggctttggttcgttgtgagtacaggatggcagagtttagtacaggagatcggaggagaaaaccgaagggtgacaggcgatcaa

SEQ ID NO: 85366 - DNA, 531 bp, Zea mays
  unsure (1)..(531): unsure at all n locations
agtaaagctttgtcagacttttcagtcncatagcnacgncgtcactcgcttcggaattcccggctcgacccacgcgtccgcccacgcgtccgaaagatgctctggcttaatctgacaagattacgctggaggcagcagagcttttgagagaagattatttggcacaaaatgcattcaccccatatgataagttctgcccattctacaaatccgtttggatgatgcgcaacattattcacttcaacacattggcaaatcaagctgtggagcgggcagctggtactgacggccataagataacatacagtgtcataaagcatcggttgggggatctaatttatcccctaatatcccaaaaattccaagattccttcaaaagccaaaaagcttttgtcggcaagtttaagaaactttattacgaccttaccactgggttccgcaacctaaaagatgaagcacggtgaactgctgtagaacttgtgtaagacaataatggctgccaaatgttttattatggaccgaaattgtaat

SEQ ID NO: 85367 - DNA, 534 bp, Zea mays
  unsure (1)..(534): unsure at all n locations
aagtagagtcagtgtggccaagcntaaaggaatanatgcactactgtaccggtccggaattcccgggctcactgtggaggagcgaaacctcttgtctgttgcatacaagaacgtcattggagcccgccgcgcctgatggggcatcatctcctccatcgagcagaacgaggagggccgaggcaatgaggaccgagtaacactcatcaaggattatcctggcaagattgagactgagctgaccaagatctgtgatggcatcctcaagctgcttgagacccatcttgtgccgtcttccactgcccccgagtccaaagtcttctatctcaagatgaaaggtgattactacagataccttgctgaattcaagactggagctgagagaaaagaacgccgctgagaacacgatggtggcatacaaagctgcccaggaccatgctctggctgagcttgctccaactcaccctattaggcttggactggcacttaacttctcagtgttctactatgagaatctgaactcaactgaacgcgctt

SEQ ID NO: 85368 - DNA, 532 bp, Zea mays
agaaagagtctgtcgaaactgcccagctccgatagcactagacgtaccggttcggaattcccgggtcgacccacgcgtccggcgacatagaaagtggaatccaatagcttcaacagagcaacaatggctaccgagatggtttccctacttatgctccttgctctttctgcatgtgttgctaacacgacaattatcccttaatgctcacaagcttctatacctacccttattccaccataccttccatcaatgatagcttcagtatgtgaaaacccagctcttcagccctatatgctccaacatgcaatcatagcaggcaacatacctttatcacccttgatgtcacaacaatcgccagccctatctatggtgcactcatagctacaaaccatcagggcacagcatctgcagcaactcatgctacctgtgatcaaccaagtagctgtggcaaacctattatgctactctgagcaacaacaaattcttccatttaaacaacttgctacactgaaccctggctgttaattgcaaa

SEQ ID NO: 85369 - DNA, 515 bp, Zea mays
agtataggaggcctgtttgatcgcacgaatataatgcatgctcgtaccggtctcggaattcccgggtcgacccacgcgtccgctatactatactctaggaagcaaggacaccaccgccatggcagccaagatgctggcagtgttcgctctcctagctctttgtgcaagcgccactagtgcgacccatattccagggcacttgccaccagtcatgccattgggtaccatgaacccatgcatgcagtactgcatgatgcaacaggggcttgccagcttgatggcgtgtccgtccctgatgctgcagcaactgttggccttaccgcttcagacgatgccagtgatgatgccacagatgatgacgcctaacatgatgtcaccattgatgatgccgagcatgatgtcaccaatggtcttgccgagcatgatgtcgcaaatgatgatgccacaatgtcactgcgacgccgtctcgcagattatgctgcaacagcagttaccattcatgttcaacccaatgg

SEQ ID NO: 85370 - DNA, 513 bp, Zea mays
  unsure (1)..(513): unsure at all n locations
agtagagggatnncgctcagtctagctactacgcattactgtaccggtccggaattcccggctcgacccacgcgtccggatctgctcaacccgccggcagaactcgagaagctcaagcacaagaaaaagagactgggccagtcgcccaactccttcttcatggatgttaagtgccaggggtgcttcagcataaccactgttttcagccactcccagactgttgttgtgtgccctggctgccaaactgtcctctgccaacccacaggaggaaaggcaaggctcactgagggctgctctttccgcaggaagggagactagagcggatgtggtcttcaagttttgctctatgccagatactagcgtcatgaactgcctttagctaagattttccataagttgttctcgagcagctatgtgttgcatgttggctacttccaaacttatatctggtttggtttggattgtgatgaactaatggctctttgaatttatattatgatgttgacgatattn

SEQ ID NO: 85371 - DNA, 511 bp, Zea mays
  unsure (1)..(511): unsure at all n locations
gtgtntagtggattttncctcgatncctcgcattccnnacccnntnnnntnnnnnntnnnggctcgacccaggcgtgcggttggcttctcctccccctccggttcgggttcgggttcgtgaggttctccggggttcgggttcgtgggtgagcggatcgagatggcggcgtcggatgttgagtaccgctgcttcgtcggcggcctcgcctgggccacggacgaccactccctccacaacgccttcagcacctacggcgaggtcctcgagtccaagatcatcctcgatcgggagacgcagaggtcccgcggcttcggcttcgtcaccttctccacggaggaggcgatgcggaacgccatcgagggcatgaacggcaaggagctggacggccgcaacatcaccgtcaacgaggcccagtcccgcggcggccgtggaagcggcggcggtgggtacggtggtggccgtggaagcggcggctacngcngttgcnggccccgtgattgccgttgccgc

SEQ ID NO: 85372 - DNA, 527 bp, Zea mays
agtagaaggctgtcggactgcccagccggatcgcatgccgtaccggttcggaattcccgggtcgacccacgcgtgcgcccacgcgtccggccttatcaccggccgctcaaattgggactctgacttctggcctggcaaatgctaatcctgagcagcaaagaacgatacttggtgaaaacctatacccactggttgagcaactggaaccaaaccaagctgcaaaggtcactggaatgcttttggagatggatcagaccgaggtcctccacctgctcgagtcccctgatgctctcaagtccaaggttgctgaggcgatggatgatctccgcaatgtggcccaccaacaaaacccaaaccttacgaacaatcaacttggcccattatcacttacccaaagcattatgtactaacttgaaagccataacaaactatcttcagtttccaactcagtgcgggtgttttcagatgttgtctggcacatgacagtattgttccttcgatactatggttggacttgtgaatggtgt

SEQ ID NO: 85373 - DNA, 540 bp, Zea mays
  unsure (1)..(540): unsure at all n locations
tgagtaggaggnttttgtgtcctcgccactctgccacaatcgcaactaccgctaccggttcggaattcccgggtcgacccacgcgtccgcggacgcgtgggcggacgcgtgggtgctactgctgcagctaacagcctcagtcnagagtttggatcaaaacttaaagaacacatgcagtattgtgtggatcaccctgaagaggttagcaagctggccaaagtgaaggcgcaggtttcagaagtcaagggtgttatgatggaaaacattgaaaaggttctggatcgtggagagaagattgagctgcttgtcgacaagaccgagaatcttcgctcacaggcacaagatttcagacagcagggaacaaatgtcaggagaaagatgtggttacagaacatgaaaatcaagctcatcgtcctgggaataatcatcgcactcattctgatcattatcctctctgtctgtcatggtttcaaatgccattaagcacagaccagaatactgatacattcaactgcacctattatactggtgtttggagca

SEQ ID NO: 85374 - DNA, 526 bp, Zea mays
  unsure (1)..(526): unsure at all n locations
gttagaggctgngtgatgtccacgccactacgctatgccgtaccggtccggaattcccgggtcgacccacgcgtccggggtgctgatttgaattctatgagagttgagaccaacttcctgagctatgctataggggatgcacagaaatatccataccttgcatcaatgggcatttatgtcttcaagaaagatgcacttttagaccttctcaagtcaaaatatactcaattacatgactttggatctgaaatcctcccaagagctgtactagatcatagtgtgcaggcatgcatttttacgggctattgggaggatgttggaacaatcaaatcattctttgatgcaaacttggccctcactgagcagccttccaagtttgatttttacgatccaaaaacacctttcttcactgcaccccgatgcttgccttcgacgcaattggacaagtgcaagatgaaatatgcatttatctcagatggttgcttactgagagaatgcaacatcgagcattctgtgattggagtct

SEQ ID NO: 85375 - DNA, 530 bp, Zea mays
  unsure (1)..(530): unsure at all n locations
agcagtgtcntcnnccatgacacttaggtcatgctatnacnntccggntcggaattcccgggtcgacccacgcgtccggcaagttcttgttgaaattggtgacaaggatccatcatttattggatcttgggaggggatcggagccattgagttaagctttgtcctcgacaaactgctgggcgtgagttgtaaggttatcaatgtgaggtctggcgatgagcttcctgaaaagtgcagagaacttgccaggcattttgaaacccagggaactcctgtgatgattggtggtggagtcttggcttacacccttttgggagttgattataacgaagccagtggagattgtgcatttcttatccttgatccgcactacactggtactgacgatctcaaaaagattgtaaatggcggatggtgcggatggaagaagtctgtcgacagcaaaggccgaagcttctttttgaaagacaagttctacaaccttctactaccccaaaggccaaacatggtgtgaaaccctatgtggtcaa

SEQ ID NO: 85376 - DNA, 521 bp, Zea mays
  unsure (1)..(521): unsure at all n locations
tggtttctgagacacgcgatggcacggaacagtacgactcgtaccggactcggcaggctcgacccacgcgtccggcgacatagaaagcacaattgtggtccctcaatggcaggccaaataatttggtttcctgatgctcctgggtctttctgcaagtgctgctaccgcgaccattttcccgcaatgctcacaagctcctatagcttcccttcttcccccatacctctcatcagcggtgtcttcagtatgtgaaaacccaattcttcaaccctacaggatccaacaggcaatcgcagcaggcatcttacctttatcacccttgttcctccaacaaccgtcatccctattacagcagttacctttggtgcatttgttggcacanaacatcagggcacaacaactacaacaacttgtgctagcaaaccttgctgcctactctcagcaacagcagtttcttccattcaaccaacttgctggcattgactctgctgcttaattgcaacaacaactaccaatcaacc

SEQ ID NO: 85377 - DNA, 514 bp, Zea mays
  unsure (1)..(514): unsure at all n locations
aggttctggcaccgcattacgtcatgctcanaccanttccggttcggaattcccgggtcgacccacgcgtccggtcttctcatgaacgcatcgcccctctccacctgctgatccttcgccgtctctctctgtctctctctctctctctcttagatagtcttttgaatccatctctagggctcttgtttctccccatcctccccccaccccaccccccaccaaacagattcaatccgacaagacaagcatccatgtcgtcgtcacgccggagctcgagccccgacagcaacgacacgacggacgagcgcaagcggaagcggatgctgtccaacagggagtcggcgcggcggtcgcgcgcgcggaagcagcagcggctggaggagctggtggcggaggtggcccgcctgcaggcggagaacgcggcgacgcaggcccgcaccgcggcgcttgagcgcgacctgggcagggtggacggcgaccaccccgtgcttcgcccccgcacgccgaactggcc

SEQ ID NO: 85378 - DNA, 503 bp, Zea mays
  unsure (1)..(503): unsure at all n locations
nggttaagtattantataacagacagatagtatggctcgtcncggtccggaattcccgggtcgacccacgcgtccggccaagcttgccgagcaggcggagcggtacgacgatatggtggaattcatgaagaatcttgctaggatggacgcggatatgactgctgaagaaaggcatttgttctcagttggtttcaagaacactattggagcaaagagagcatcatggagaatcatttgctcacatgagcaaaaggtcgcagctgatcgtcagactggtgtgatgatagatgcctatatgaagaaagttgaagaggaactaaggaaggttcgcaatgaagtattgtcagtcattgctattcactgccttaccttgtccagtacggntgaaaatatcggattcttttataagatgaaaggtgactactaccgttacttggctgaatttatcactggaactganaagaaagctgcctctgatcagtcacttatggcctatcagcatg

SEQ ID NO: 85379 - DNA, 488 bp, Zea mays
aggtgtattcgtatacgacagacgaagaaagcacgctctaccggtccggattcccggctcgacccttgcgacccaccttacaaggtggaatccagtatcatccatagagcaacaatggctaccaaaatattgtccctccttatgctccttgctctctctgcatgtgctgctaacgcgacaattttccctcaatgctcacaagctcctataactatccttcttaccccataccttacatcaacgatagcttcagtatgtgaaaacccatctcttcaaccctataggctacaacaagcaatcgcagcaagcaacataccttgatcacccttgtttcaacaatcgccagccctatctttggcgcaatcattggtacacaccatcaaggctcagcatctgcaacaacttgtgctacctgttatccagccactaggtttggccaacctctgtaactactctcagcaacaacctattatttcattcctaccacc

SEQ ID NO: 85380 - DNA, 515 bp, Zea mays
  unsure (1)..(515): unsure at all n locations
gggtgagtatgntgttaagcgaggcaaagtatgcatctaccggtccggaattcccgggtcgacccacgcgtccgcccacgcgtccgggcaactttggcatcgtgaccaagctcggccaggaaactctgctgaaggtgctcctccgaatttaccttcactacaacttgtatgatcaggcagaaaagcttagatcaaaggcacctcgttttgaagcacattccaaccaacaattctgccgatacttgttctacttgggcaaaattaggacaattcagttggagtacactgatgctaaagaaagccttctgcaagctgctcgtaaggcaccaacaactgcccgtggttttcggatccagtgcaacaaatgggctatcatagtgaggctgctgcttggtgagattccagagaggacttgtttcatgcagaaaggaatgaagaaagctctgacaccttatttgaagctacaaatgctgtcagggttggggaccttgaactgttcaggactgtcgctgacc

SEQ ID NO: 85381 - DNA, 519 bp, Zea mays
  unsure (1)..(519): unsure at all n locations
tagttattngttatgttgtcttccggaggggatagatcttcgtccggaattcccgggtcgacccacgcgtccgcagaaacacacctagcgaagcgcactatcaacgacctaacaacaatggctttcaagacggtaggccttcttgcgcttcttgccctttttgtgagtgccacaaatgcgttcattattccacaatgcttacttgcttcgagtgccattatttcacaggttcttccttcagttacttcaatgggctttgaacacccagctgtccaagcctattggcttccacaagcgcttgccgcaagcgtttaaaaacacccattggcccatttccacaaccattctttggaccatttaaccttccaaaccattgaaacgcaacaacaacaagcactgagcaactaacccgtggtgaaccttatggcttacttgaaacaacaggtgtttgcatccaacccattttgtttggcaaaactagcttctttccaacaacaacaacagttggaacaaagtttt

SEQ ID NO: 85382 - DNA, 515 bp, Zea mays
  unsure (1)..(515): unsure at all n locations
agtatcngtaacacagacaaattgtactgtagnactgttccggtccggaattcccgggtcgacccacgcgtccgcccacgcgtccgctgataccgtactaccgtctacaggatcagtatagctgaaggcatgagcaaattggagggtgtagacggtagtacggtatcaaaacaaggacttcgatttgttttcactgatggatctaggattatcttccggctttcgggaaccggatctgctggagctactatccgcctctacatagaacaatttgaatctgatatctcgaagcatagtctcgatgctcaaacagctttgaagcctttaatagacctggctttgtctgtttcgaagctcaaggacttcacaggaagagagaaacctactgtcataacataggccctgtttgtttcggcttttggcagcttctggccaccaaaagctactgcgtactgtcaaacgctcagcttttcagccagcttctataaaattcggttggggcaaaaaccatctaa

SEQ ID NO: 85383 - DNA, 520 bp, Zea mays
gagttagcctgtgttacagacgggaggtggtaaagctactgctcgtaccggtccggaattcccgggtcgacccacgcgtccggcaagatccagaagaagcgccacggcgcggcgggaggcgcccggctgcagggcggtagcccgttcgagaagtccaaggggcagcacattctgcggaacccggcgctggtggactccatcgtctccaaggccggtctcaagcccaccgacaccgtcctggagatcgggccggtcacaggaaacctcaccaagcgcctcctcgaggctggtgtcaaggccgtcgtcgccgtcgagctcgacccgcgtatggtgctcgagctcaaccggcagttccaggggcacctgctctcctcgcgcctcaaggttatccaaggagatgtcctcaaatgtgatctcgcatactttgatatttgtgtggcagacatcccgtaccagatctcttctccccttactctcaagcttctgtcacaccgtacaatttttacgtgtgctgtgacta

SEQ ID NO: 85384 - DNA, 524 bp, Zea mays
  unsure (1)..(524): unsure at all n locations
tgtgagctgtgnatctaccgacgagacgatgtatcagcatngctcgtaccggtccggaattcccgggtcgacccacgcgtccgattccctgaagcacagccttccccacacaagaacttcgctgacgaggttgcctgcctgaatcgcttcttcggtggcctcaagtccggtggcaatgcttatgtgattggtgactctgcgaagcccgggcagaagtggcacgtctactacgccgctgagcaccctgaggagcctgttgttactctagagatgtgcatgactgggctggacaagaagaaagcttctgtcttcttcaagaccactgctgatggttactcgctgtgcgccaaggagatgaccaagctctctggtatctcggacatcatcccagagatggagatctgtgacttcgacttcgagcccttgggctactccatgaatgctgntcatggccctgctttgtcgaccattcatgtgaccccagaggaccgcttcagctatggcagctaccaagtcatgggctt

SEQ ID NO: 85385 - DNA, 509 bp, Zea mays
gagctttatgtaagcggagggagaaagtagagctcgtaccggtccggaattcccgggtcgacccacgcgtccgcccacgcgtccgcggacgcgtgggattgagaccaacaagcaacatagaaagtggaatgcagtagcaacaacagagcaacaatggcgaccaagatattttccctccttatgctccttgctctttctgcatgtgttgctaacgcgacaattttccctcaatgctcacaagctcctatagcttcccttcttcccccataccttccatcaatgatagcttcagtatgtgaaaacccagctcttcagccctataggctccaacaagcaatcgcagcaagcaacatacctttatcacccttgttgtttcaacaatcgccagccctatctttggtgcagtcattggtacaaaccatcagggcacagcagctgcagcaactcgtgctacctgtgatcaacccaatagctctggcaaaccttttctcctactcttagcacaacca

SEQ ID NO: 85386 - DNA, 501 bp, Zea mays
  unsure (1)..(501): unsure at all n locations
ngggagaggtctttatcaccgaacatagtagtgcatctctcgtccggaattcccgggtcgacccacgcgtccgcgccagccctatctttggtgcattcattggtacaaaccatcatggcacatcatctgcggcgactcgtgctacctctgatcaaccaagtagctctggcaaacctttctccctactctcagcatcatcaatttcttccattcaaccaactgtctacactgaaccctgctgcttatttgcagcatcaactattaccatttagccagctagctactgcctactctcagcaacaacaacttcttccatttaaccaattggccgcactgaaccccgctgcttatttgcagcagcaaatactactaccatttagccagctagctgcaacaaaccgtgcttacttcttgacacagcaacagttgctgcctgtctaccaacagtttgcggctaaccccgcaaccctcttacaactacaacaatcgttgccctttgtc

SEQ ID NO: 85387 - DNA, 511 bp, Zea mays
  unsure (1)..(511): unsure at all n locations
tggtaagatgtgtttaattatttatcgaaacgatagtacggccgntctcggttcggaattcccgggtcgacccacgcgttcgcccacgcgtacgcccacgcgtccacggttcgtgggtgagctgatcgagatcggccgcgtgggatgttgagtaccgctgcttcgtcagctgcctcgcctgtgccacggacgaccactccctccacaacgccttcagcacctacagcgaggtcctctagtccaagatcatcctcgatcgggatacgcagaggtcccgcagattcgggttcgtcaccttgtccacggaggacgcgatgctgaacgccatcgatggcatgaacgagctggaactggacttccgcaacatcaccgtaaactaggcccagttccgcatcggacgtcgaggcttcatctatcggtacggtggtatccgtggatgcggcatgcaccgaggaggctgacgccgtgattgcggtggcggctacggagatgccgtcagctacggttgccg

SEQ ID NO: 85388 - DNA, 521 bp, Zea mays
  unsure (1)..(521): unsure at all n locations
ggttggagtcctttttgtacgaagcggggtagaaaagtagngctcgtaccggtccggaattcccgggtcgacccacgcgtccgccccagcaatttcttacattcaaccaactggcagcattgaactctcctgcttatttagagcagcaacaactactaccattcagccagctagctggtgtgagccctgctaccttcttgacacaaccacagttgttgccgttctaccagcacgctgcgcctaacgctggcaccctcttacaactgcaacaattgctgccattcaaccaacttgctttgacaaacctagcagtgttctaccaacaacccatcattggtggtgccctcttttagatttcttatgagttatagttcaataataaagttttttgtctgatgtttgtggcttcccagaaataagaaagtacatttctaaaaaaaaaananaaanaaaaaaaaaaaaaaaaaaaaaaaaagggcggccgctctagaggatcaaagttacgtacccgtgcatgcaac

SEQ ID NO: 85389 - DNA, 498 bp, Zea mays
  unsure (1)..(498): unsure at all n locations
nggaaagtgttattataaagccaggaagtaggctctcccgtccggattcccgggtcgaccacgcgtccgcagcacaacagttacctttggtgcatttgttggcacanaacatcagggcacaacagcgacaacaactcgtgctagcaaaccttgctgcctactctcagcaacaacagtttctgccattcaaccaactagctgcattgaactctgctgcttatttgcaacaacaactagtactaccattcagccagccagctgctgcctacccccagcaatttcttccattcaaccaactagcagcattgaactctcctgcctatgtacagcagcaacaactactaccattcagccagctagctgctgtgagccctgctgccttcttgacacagcaacaattgttgtcgttctacctgcacgctgcgcctaacgttggcaccctcttacaactgcaacaattgctgccattcaaccaacttgctttgacatacccagcag

SEQ ID NO: 85390 - DNA, 488 bp, Zea mays
  unsure (1)..(488): unsure at all n locations
agtgtatgttataaaagaaacatagtatgctctaccggtccggaattcccgggtcgacccacgcgtccgcgcctacctacaacagcaacaacttctttcatctagcccgctcgctatgggcaatgcgcctacatacctgcaacaacagttgttgcaacaacagttgctgcaacaaattgtaccagctcttactcagctagctgtggcaaaccctgctgcctacttgcaacaactacttccattcaaccaactgactgtgtcgaactctgctgcgtacctacaacagcgacaacagttacttaatccactagcggtggctaacccattggtcgctgccttcctacagcagcaacaattgctgccatacaaccagttctctttgatgaaccctgccttgtcgtggcagcaacccatcgttggtggtgccatcttttagattacatatgagatgtactcgataatggtgccctcatagcggcatgtgtttn

SEQ ID NO: 85391 - DNA, 498 bp, Zea mays
  unsure (1)..(498): unsure at all n locations
gggagtttcttaaaggggggaatagacagctctcccggtccggaattcccgggtcgacccacgcgtccgccaaaggccatcactgcctagcaatgcagcttaccgcagaatacttttcgttagatggcactaaacgtgaattccctaaaagagacaacattcagttgggtggttattatcattatgcgatgttctctgacaatgtgcttgcaagtgctgtggttgtcaactctacaattgctgcatcaaaggatcctggaaggatattattacatattgtaactgacgcgttgaattatcctgcaatgatgatgtggtttctgacaaacccaccaactccatcagtaatccaaatccagagcctagatgatttgaaatggttgcctggtgatttcagttccagattcaagctgaagggggttcgggatccgagatacacttctgcactcaaccacttgcgtttntatttgccagaagtgtttccatctttgagcaagg

SEQ ID NO: 85392 - DNA, 511 bp, Zea mays
  unsure (1)..(511): unsure at all n locations
ggaaggatcgttaacgaggggaagtactgcagtactcggtccggaattcccgggtcgacccacgcgtncgnctggtttcaccaatcgccagccctatctttggtgcagtcattggtacaaaccatcagggcgcagcagctgcagcaactcgtgctacctgtgatcaaccaagtagctctggcaaacctttctccctactctcagcaacaacaatttcttccattcaaccaactgtctacattgaaccgtgctgcttatttgcagcaacaactattaccattcagccagctagctactgcctactctcagcaacaacaacttcttccatttaaccaattggccgcactgaaccccgctgcttatttgcagcagcaaatactactaccatttagccagctagctgcagcaagccgtgcttccttcttgacacagcaacagttgctgcctttctaccaacagtttgcggctaaccccgcaaccctcttacaacttccacaattggtggcctttc

SEQ ID NO: 85393 - DNA, 519 bp, Zea mays
gggaggttttatgtacgaaaccgcatagtacagtattgctcgtaccggtccggaattcccggctcgacccacgcgtccggactagtactagttcgtctgcgctgccattacgacctactactgattcatgatattggggaaatctcctctatccatcactctctatctatatatgtcataatgcagtcagacgacacacattatcatgtgtggtatgaccaatactatatgcatggtcataataaagttttgggtataatgaatctatcggccgcttgatgtctatgatggacaaatcaaaacttctcctgtcaggcatgtaaatatttcaaaatctctattcaggctcaaattcatagcacaaaaatagaacccaacaagaccagatatacttgaagccaaacaagactctgaaacatgggtgcaacctgaaggtcaaactggtgatgggcgcactgaattgaatgaccgattggtttattgaaaagctctttcagcaacaataaaacgttgggcggc

SEQ ID NO: 85394 - DNA, 515 bp, Zea mays
gggaggtttgtcgctgtcaccgaaatgaatgcattgatgtaccggtccggaattcccgggtcgacccacgcgtccgattacgagcagttgatgatcttttagagcacagcaattctgatcttgctgaggaattgggcaacttgacacaagcctacacgtacttgccgaaagtgtttgatcggtttggaggtgcccaaggatatatgttccttcaagatcgcatggtcttcaattactggaacctcttgaatgctgataaggctaagctctggataaccaaccaggtgaaggaatcttgctcggatgtgcctctacatggtaacaacattgagtggtttgtgaaccaaggagatatgattaaaaaggcggtcatcaattgtccatctcaatatcaagataattacaggagaagtgtacgtgaaaataatctgattcgttgcaacagtgaaatattttacgtacctcaacggtacacccgtgatttctcagatcttgtaaaaagtattgggagctta

SEQ ID NO: 85395 - DNA, 517 bp, Zea mays
  unsure (1)..(517): unsure at all n locations
cggtttagctttttttaagagggacggcgaaaggtaggcttctaccggtccggaattcccgggtcgacccacgcgtccgcgggaggttttttgacctagtttatcatgaaaatgcccgtgttctactccatgatgagagcatataccgatttgaatgttgctcaagtccgacaaggttgtctattcagctgatggaatatggtcacgaaaagccagaagttacagcagtatcaattgatccaaatttttcttcttatctttttggcgagtatttatgtagtacgtcagacaagaaattatctgaaggcgtctaccttgcaaggaataagcggaaatattcagataatgatgaaccttcagattttttgaaggcaatggatggtatcaaagttgtgaatggtctcgaatgcaagatatcctgcaagacctctaaggtctcgtatgtccttgacactgaagatttcttgtaccggcttcggaagagaaggaagattttgcggngtgggagtgtgtctga

SEQ ID NO: 85396 - DNA, 504 bp, Zea mays
ggaaagttttttataacgacacgatagtaaggcatctcccggtccggaattcccgggtcgacccacgcgttcgtccacgcgttcgcagagagcttgttccgtccaggcaaccaaaaagcaagttgccccggcgggcagaggaagaagagagcagaggaggatggctcgtacgaagcagaccgcccgcaagtccacgggaggcaaggccccccgcaagcagctcgccaccaaggcggcgaggaagtcggcgccgacgaccggcggcgtgaagaagccccacaggtacaggcccggaaccgtggcgctgcgcgagatccgcatgtaccagaagagcacggagctgctgatccgcaagctgcccttccagcgcctggtgcgcgagatcgcgcaggacttcaagacagaccttcggttccagagccacgccgtgctggcgctccaggaggccgccgaggcctacctcgtcggtctcttcgaggacaccaacctctgcgccatccacgc

SEQ ID NO: 85397 - DNA, 505 bp, Zea mays
  unsure (1)..(505): unsure at all n locations
gagattgtatgtggcgggagggcgagtttactcgttcggaattcccgggtcgacccacgcgtccgccgacgcgtccgcggcagtgcgtagagaggatcgtcgaacagaacagcatgaagatggtcatcgttctcgtcgtgtgcctggctctgtcagctgccagcgcctctgcaatgcagatgccctgcccctgcgcggggctgcagggcttgtacggcgctggcgccggcctgacgacgatgatgggcgccggcgggctgtacccctacgcggagtacctgaggcagccgcagtgcagcccgctggcggcggcgccctactacgccgggtgtgggcagccgagcgccatgttccagccgctccggcaacagtgctgccagcagcagatgaggatgatggacgtgcagtccgtcgcgcagcagctgcagatgatgatgcagcttgagcgtgccgctgccgncagcagcagcctgtacgagccagctctgatgcagcagcagcagca

SEQ ID NO: 85398 - DNA, 518 bp, Zea mays
  unsure (1)..(518): unsure at all n locations
gagagctgatatcactgnaacgnnagtcacgtagagctagtaccggtccggaattcccgcctcgacccacgcgtgcaccgacacttccgcccacactttctcatgtcgcattagaacaaacaataacaaccaggatgttttccctccttatgctccttgctctatctgcaatgtgttgctaacgcgacaatatttccctcaatgctcacaagctcctatagcttcccttcttcccccataccttccatcaatgatagcttcagtatgtgaaaacccatctcttcaaccctataggcttcaacaagcaatcgcaacaagcaacatacctttatcacccttgtttcaacaatcaccagccctatctttggtgcagtcattggtacaaaccatcagggcacagcagctgcaccaactcgtgctacctgttatcaaccaagtatctctggcaaacctttctacctactttcagcaacaacaatttcttccattcaaccaactgtctacattgaacccggctg

SEQ ID NO: 85399 - DNA, 516 bp, Zea mays
  unsure (1)..(516): unsure at all n locations
ggtagaatgtttatttgcctgagggagaacgctagcactcggttcggatttcccgggtcgacccacgcgtncgttgtgatttaagtttggccaggggccttgattactacactggtggcatatattaagccggtgtgaaaggtgccacttaaggtggcttccttaccggttgttggtcgtgccaacaaccttgtgggtttgttaagtgggaagcaaatccctgctgttggtgtgagccttggaattgaaagagtctttgcaatcatggagcagcaggagaaagaaagaaatgagaagatccggcctacaaagacagaggtgctggtgtcaattcttggaaaggaccttaccctaactgccgagctcgtgagcgagctgtggaatgcttggataaaggcagagttcaagctcactacccaggtggcgaaccacattaagtatgcccttgcatcaagcatttcgtggatggggctagtcggcgagtcttagctgcagaaagggaactgtaaagttgaa

SEQ ID NO: 85400 - DNA, 520 bp, Zea mays
  unsure (1)..(520): unsure at all n locations
tgcgtcattggtaactgcttcccggggggtacgctagtactcgttctcggaatcgcgtgttccgactcaagcctacgcgtgcagccacgcttgacggcgacgcgtccgtagtcgcattggagcaacaatggcgaccgagatgttttccctccttatgctccttgctctttctgcatgtgttgctaacgcgacaattttccctcaatgctcacaagctcctatagctgcccttctttccccataccttgcatcaatgatagcttcagtatgtgaaaacccagctcttcaaccctataggctacaacaagcaatcgcagctagcaacatacctttatcacccttgtttcaacaatcgccagccctatctttggtgcagtcattggtacaaaccatcagggcacatcagctgcaacgactcgtgctacctgtgatcaaccaagtagctcttgcaaacctttctccctactctaagcaacaacagnttcttgcatttaaccaatgtctacattgaaccgtgctg

SEQ ID NO: 85401 - DNA, 521 bp, Zea mays
  unsure (1)..(521): unsure at all n locations
gggtagaggcttttttacggaggtggggggaaaagtagtgctcgtaccggtccggaattcccgggtcgacccacgcgtccgcccacgcgtccgcaccaacgcaaattgcaccaagaaatccatcgagaggccgtcgacaggggaattaatggcgtcgtcgtctagcagcagccaccgccgcctcatcctcgcagccgccgtcctgctctccgtgctcgcggctgccagcgccagcgccgggacctcctgcgtgccggggtgggccatcccgcacaacccgctcccgagctgccgctggtacgtgaccagccggacctgcggcatcgggccgcgcctcccgtggccggagctgaagaggagatgctgccgggagctggcggacatcccggcgtactgccggtgcacggcgctgagcatcctcatggacggcgcgatcccgccgggcccggacgcgcagctggagggccgnctagaggacctgccgggcttgccgcgggaggtgcagaggggattcgccgcca

SEQ ID NO: 85402 - DNA, 514 bp, Zea mays
  unsure (1)..(514): unsure at all n locations
agtctcctcaatgacnacgcatagtaaaagcagngctcgtaccggtccggaattcccgggtcgacccacgcgtccgcccacgcgtccgggaacaagctgagatctccagcatggggaggggaaggattgagatcaagaggatcgagaacaacacgagccggcaggtcaccttctgcaagcgccgcaatgggctcctcaagaaggcgtacgagctctccgtcctctgcgacgccgaggtggcgctcgtcgtcttctccagccgcggacgcctctacgagtacgccaacaacagtgtgaaggctacgatcgagaggtacaagaaggcacacgccgttggctcttcctctggccccccactcttagagcacaatgcccagcaattctaccagcaagaatccgcaaaactgcgcaaccagatccaaatgctgcaaaacactaacaggcacttggttggtgactctgtgngaaacttgtcactcanagagctgaagcagctggagagccgncttgagan

SEQ ID NO: 85403 - DNA, 521 bp, Zea mays
tggttgaggcttttttacggagggggggggaaaagtagtgctcgtaccggtccggaattcccgggtcgacccacgcgtccggcccgcaccatccacatctcgcttgtccccgacgaggagatcggcggcgcggatggggtcgacaagttcgcccgatcggaggagttccgcgccctcaacatcgggtttatgctcgacgaggggcaggcgtcgccgacggacgtgttcagagtcttttacgcggacaggctggtgtggaggctcgtcgtgaaggcggcgggggcgccagggcatgggtcgaggatgttggacggcgccgccgttgacaatttgatggattgcgtggagaccatcgctgcgttcagggatgcgcagttcaggatggtgaagtccggggagaagggtcctggggaggtggtctcagtcaaccctgtgtacatgaaggccggcataccaagccccacgggtttcgtgatgaacatgcaaccttcagaagcggaggtcggctttgaccttcgcct

SEQ ID NO: 85404 - DNA, 491 bp, Zea mays
  unsure (1)..(491): unsure at all n locations
aggtatagttaaacgaagggaaggatatcatctcccgngtccggaattcccggttcgaccaacgcgttccccggccccttggttagacccacctgcctccttaaaagccccattatggtcccaccatgggtggccaaataatttggcctcctaatcctcctgggcctttctgcaagtcctgctacaacaaccattttcccgcaatgctcacaagctcctatagcttctcttcttcccccatacctctcaccagcgttgtcttcagtatgtgaaaacccaattcttcaaccctacaggatccaacaggcaatcacagcaggcatcttacctttatcacccttgttcctccaacaatcatcagccctattacatcaattacctttggtgcatttattggcacaaaacatcagggcacaacaactacaacaactcgtgctagcaaaccttgctgcctacgctcagcaacagcagttacctttggtgcaattgtn

SEQ ID NO: 85405 - DNA, 508 bp, Zea mays
  unsure (1)..(508): unsure at all n locations
gggggagtgtgtattagtacaagccacgatcgtatgtcatctccncggttccggaattcccgggtcgatccacgcgttcgtccacgcgttcgcgcaaattgcaccaagtaatccatcgagagggcctcgaccgggggagtggatgcctcgtcgtctaacagcagccaccgccgcctcatcctcgcagccgccgtcctgctctccgtgctcgcggctgccagcgccagcgccgggacctcctgcgtgccggggtgggccatcccgcacaacccgctcccgagctgccgctggtacgtgaccagccggacctgcggcatcgggccgcgcctcccgtggccggagctgaagaggagatgctgccgggagctggcggacatcccggcgtactgccggtgcacggcgctgagcatcctcatggacggcgcgatcccgccgggcccggacgcgcagctggagggccgcctagaggacctgccgggctgcccgcgtgaggtgcagaggggattcc

SEQ ID NO: 85406 - DNA, 489 bp, Zea mays
  unsure (1)..(489): unsure at all n locations
aggttgttaaaaagacaggatagtagtgctctaccggtccggaattcccgggtcgacccacgcgtccgagttaaaacatcattttggtggtggggaaatttgtaaccttttcaagttattggcctggttggattttaccccgttgtgtgagaaatctaatactccgcttggatgtcgatattggagaggatggaattgaattgggttgaataccaaatcaggcatgatattgaaatgagatataatttcaattctattgtttggatgtcactgaattggagtttggaattatgcggtctaattctaggcaataccgagggggtgaggctttgtattggaagagggggtttctagttatagtctaatttcagggaattgggcctctgattccaaatctcaattccacatgcaacgaatcatcataatttaggaaagctgattccaattctcaattctgtgattcaatctctacatccaaacggngtataa

SEQ ID NO: 85407 - DNA, 491 bp, Zea mays
  unsure (1)..(491): unsure at all n locations
aggtctcgtaaaccgacagaagtagtctctcncgtccggattccggctcgacccacgcgtccgcggacgcttggccggcggcgtaggtagcggcggtgtgctggggatctcaatctcaagccgaggcgagctcggctccggtcacccgtcgatccacgcaaccatgtcgaggaggaagaccagggagcccaaggaggagaacgttacccttggacccactgtccgtgaaggagagtttgtctttggtgttgctcacatctttgcatccttcaatgacaccttcattcatgtcactgatttgtctgggagggaaactttggttcggatcactggtggcatgaaggttaaggctgatcgtgatgagtcgtctccttatgctgctatgcttgctgcccaagatgttgcacagcgttgcaaggagctcggtatcacagcgctgcacattaagcttcgtgccactggaggcaacaagaccaagacccctggacctg

SEQ ID NO: 85408 - DNA, 524 bp, Zea mays
  unsure (1)..(524): unsure at all n locations
gagattagcatctgtttacacgacagaggaagtaacgctactactcgtccggaattcccgggtcgacccacgcgtccgcccacgcgtcccgccaagccttccgccaagccttccgccaagccttcccaacccttaaggtttggcccccaaaacccaaattttcttccattaattacttgagcccttgacccccaccgaacccggtacaaagccaagaacggggctgctgggcgcaaggctggcggccccaggaagaagtcggtgtcgcggtccctcaaagcccggctgcagttccccgttggccggatcgggcgctacctcaagaagggccggtacgcccaacgcgtgggcaccggcgcccccgtctatctcgccgncgtgcttgaatacctcgacgcccaagtgcttgaacttgccggcaaccctgcgaaagacaacaagaaaacgcgcatcgtaccgtgccacgtgctccttgccaaccgcaacgaccttgagcttctgcaagctgctggctggcgtcaccc

SEQ ID NO: 85409 - DNA, 518 bp, Zea mays
agcatctgtaacagacggaaggatgtatcagtattgctcgtaccggtccggaattcccgggtcgacccacgcgtccggattactcgtcgaattctgttcatgtatttcacattggaaagctgagaatagggcttcgaaaaggatggtccacaaaagcaagagagtcgtattccactacgatgaagttatgcgggagccgtggtggtggtaatgctgcagctagggcagttttctggcaccctaggaaaggctcgtcctacactctagccttcgaaacagacagggacaggaatgctgcgattatgattgctcgcaagttcgcttcgaattgcaatatcgctctcgctggcccaggcgaccaaggcacctgatgaagtgatcacgctatgttttgacggcgacaacagtacataattagggcgtggattggctgattgggtggcgtgcttgtcttagttttgtcgatttgtgcttgtgagggtagaggttgtacacggcgtgaggcattgtttttggtt

SEQ ID NO: 85410 - DNA, 493 bp, Zea mays
  unsure (1)..(493): unsure at all n locations
ngggaggtatcttaaaagagggggaaggacagctctcccggtccggaattcccgggtcgacccacgcgtccgctaaggtatttctcgcttactacaacgactccctaatgagaaatgaaacttcaggccgggtggtagctttggcggagttgctaaaatattaggggggctaaatccagattatggaaattctgcaccaaaagtaatgttctattctgctaggggtcctgaccctgaggacaatacactgtcaaatgctgatatcttgaaacccaatctagtagcacccggaaattcgatttggggtgcttggagttcacttggattggattctgctgaattttctggtgaaagtttcgcgatgctctctggcacaagtatggctgcaccccatgttgctggcctggctgctctaatcaagcagaagtttccttcttttagcccagcagctatagcttctgcattgtctacaaccacaactcttagtgacagg

SEQ ID NO: 85411 - DNA, 514 bp, Zea mays
  unsure (1)..(514): unsure at all n locations
agagtgtgtgttaagaaggggagggcagtagtctcgtaccggaattcccgggtcgacccacgcgtncggtaatgctggcttctaccggtgaaggaaaccaaccaggggccttggaacaattcttcggggatggctatgataagcagaccgaggattttcaaccattatgcaccataggtcctggattttctgagcaacagcttgaagaacgttctgcgagccttcgaagtaaagtgatagaaaaaccaaaggcatactatagatttggcgacacaatgaaccccgatgtgtggtttgagccatcagaggtctgggaggtcaaagctgccgatctgagcataagccctgtacatcgtgctgccaatggtatagtcgatccaaataaggtctgtagttcttttttgcattgccattcctccccatctcgattgtatacttctggtatagtatgttggaaggctaatgctgaaatcgaaccaaggtatctctctaagattccctcgcctattgagac

SEQ ID NO: 85412 - DNA, 509 bp, Zea mays
  unsure (1)..(509): unsure at all n locations
agctttgtgacgacaagaatatatagcattgctcgtaccggtccggaattcccgggtcgacccacgcgtccgaacacacctagcgaagcgcactagcaacgacctaacaacaatggctaccaagagattgtccctctttgcgcttcttgccctttttgtgagcgcaacaaatgcgttcattattccacaatgctcacttgctcctagtgccattattccacagttcctccctccagttacttcaatgggcttcgaacacccagctgtgcaagcctacaggctacaacaagcgcttgcggcgagcgtcttacaacaaccaattgcccaattacaacaacaatccttggcacatctaaccatacaaaccatcgcaacgcaacagcaacaacaatttctaccagcactgagccaactagctgtggtgaaccctgtcgnctacttggcacagcagttgcttgcatccaacccacttgcttttgcanacatagttgcataccaacaccaacacc

SEQ ID NO: 85413 - DNA, 522 bp, Zea mays
  unsure (1)..(522): unsure at all n locations
gagtaatagttcactcaccagaaaacgtattgccatnacagtatnggttcggaattcccagctggacccacgcgtgcgaacacacctagcgaagcgcactagcaacgacctaacaacaatggctaccaagaggttgtccctctttgcgcttattgccctttttgtgagcgcaacaaatgcgttcattattccacaatgctcacttgctcctagtgccattattccacagttcctccctccagttacttcaatgggctttgaacacccagctgtgcaagcctacaggctacaacaagcgcttgcggcgagcgtcttacaacaaccaattgcccaattacaacaacaatccttggcacatctaaccatacaaaccatcgcaacgcaacagcaacaacaatttctaccaacactgagccaactagctgaggtgaaccctgtcgactacttgcaacagcaattgcttgcatccaacccacttgctctggcaaacatagttgcataccaacaacaacaacaattgcg

SEQ ID NO: 85414 - DNA, 500 bp, Zea mays
  unsure (1)..(500): unsure at all n locations
ggggagtgtctcttataaaagacaagatagtagtgctctcncggtccggaattcccgggtcgacccacgcgtccgccgacgcgtccgcaagatcaagatcggtttcaatgggtttggcaggatcggaaggctggtggccagggtggccctgcagagcgacgacgtcgagctcgtcgccgtgaacgaccccttcatcagcaccgattacatgacctacatgttcaagtatgacactgtgcacggacagtggaagcaccatgaggtcaaggtgaaggactccaagacccttctctttggtgagaaggaggttgctgtgtttggctgcaggaaccctgaggagatcccatggggttcggttggcgctgaatatgttgttgagtctactggtgttttcactgaccaggagaaggctgcagctcacttgaagggtggtgccaagaaggttgtcatttctgctcctagcaaggatgcccccatgttcgttgttggtgtcaacgaga

SEQ ID NO: 85415 - DNA, 510 bp, Zea mays
  unsure (1)..(510): unsure at all n locations
aggttagaaggtctagtagtcacccgccacacagatagtcatcgctgtaccgggtattcccggttcgacccacgcgttcgcggacgcgtgggcggacgcgtggggcatctttgatgctaaggctggcattgccttgagcggcaacttcgtgaagctcgtgtcctggtacgacaactagtggggatacagcacccgcgtggtcgacctgatccgtcacatgaacagcaccaactaagatgaagaactcaagtcaaggtctggtgatacgagcgagttgtcttcttcccccccgggagaaaagtgcttacgagaataaattttttccatcggaatgtctgaaactatgttgggtgtatcctagtggttggttgagcattaatggctcatattttgtcaggtctatgtgtcgccgtgaaacttttaatcaaatcagttcactcaaaaaaaaatagaaaatatactactagacggatgccaataagaaaaaaaaagggcggccgctctagagan

SEQ ID NO: 85416 - DNA, 511 bp, Zea mays
  unsure (1)..(511): unsure at all n locations
ggggaggcttttcaaacgaaacgatagtatgctctacctgtccggaattcccgggtcgacccacgcgttcggccaaaccttccaattgcctgtgggggccgtctcttcccgttcggaacgccaagcccgggtggggcgaaatggcccccaagcgaggtggcagggcgccggtgccggccaagaagaagacggataaagtgacgaaccctctattcgagaagaggccgaagcagttcggcatcggcggggcgttgccgcccaagaaggacctgcaccggttcgtcaagtggcccaaggtcgtgcgtatccagcgacagcgccgcatcctcaagcagcgcctcaaggtaccaccggcgctcaaccagttcacccgcaccctcgacaagaacctcgctacgaacctgtttaagatgcttctcaagtaccggcctgaagacaaggctgccaagaaggagaggcttctgaagagggcccaagctgagaatgaaagaaaaactngtgagtcgaagaa

SEQ ID NO: 85417 - DNA, 529 bp, Zea mays
  unsure (1)..(529): unsure at all n locations
ggggaaggtcctctgatttatgccgggggagggagaaagtagtgctcgttccgaattngcngccggngggggacccacgcgtccgcggacgcgtgggtggaacctgtggagaagtgcttgcgcgacgccaagatggaggagagcagcgtgcacgacgtcgtgctcgtcggtggctccacccgcatccccaaggtgcagcagctgctgcaggacttcttcaacggaaaggaattgtgcaagagcatcaaccccgacgaggctgtggcgtacggcgccgctgtccaggctgccatcctcagcggcgagggcaacgaaaaggtacaagatctgctcctgctcgacgtcacgccactgtctctcggcctggagactgcaagtggcgtcatgactgtgctgatcccgacgaacaccaccatcccgaccaagaaggagcatgtcttctccacgtactccgacaaccagccgggcgtcctgatccaggtgtacgagggtgagcgcgcgaggaccaaagacaacaaccttctcggcg

SEQ ID NO: 85418 - DNA, 498 bp, Zea mays
  unsure (1)..(498): unsure at all n locations
gaggagtgtcttngaacacgacaagaaggtagtctctcncggtccggaattcccgggtcgacccacgcgtncgcttggtcaaaggaccaggatttgccaagtccaaccagtcgcagttgctccggacagggtcgagagccgaaaggctctgccagagaagtggaggggcatgagagacgacgaactttcagcagaaaccggcatccctggctgtgtgtttgtccacatgagtggcttcattgggggcaacatgacctacgagggagcattggaaatggcgagagctgctctgaaattctgattcaaccaaagcatattacccgtgttaccattatatcagtaaacacatcagtaacacatgatgcagttgcgctttctccaatgttatcgctgactcgagccgtggctaactgcgactgattcttgcactgatcttctgttatcctcgtcttacagaagaggtcgattgacccttgtcattcacaaagaacgacataa

SEQ ID NO: 85419 - DNA, 506 bp, Zea mays
  unsure (1)..(506): unsure at all n locations
aagtgataagtatacgacagacantgttacgcactgctcgtaccggtccggaatgtctcggacccacgcgttcgagcggatccatgtccgcgtggagcatgtgcagccctcccgttgcacggaggagttgggctggaagaaagccaagaatgaccagctcaaggcggatgccaaggcccgaggtgaggtgatcagcaccaagaggcagtctgtgggacccaaacctggcttcatggttgaaggtgctacactcgagacagtcactcctattccttatgatgtggtcaacgatctcaagggcggttactagagagaatttttgtaccttaagcagttcaaacgagctggcaaacttatatgaatctttttgataattggctagttcttctgttctggtgttatgaactcatgtggctattgctgttggcgtcaaaagatttttattattgccatggttgattgcaacctggtatcttaccttcaaaaaaaaaaaaaaaaagggcggc

SEQ ID NO: 85420 - DNA, 513 bp, Zea mays
  unsure (1)..(513): unsure at all n locations
gtagagagaggtagagtgagtntaagctgacgtagtgtacgcactgcggtaccggtccggacttctcgacccacgcgttcgcccacgcgttcggaccaacactggcatcattgtccttgctgagggtcgtctgatgagcctggggtgtgctactggccatcctagctttgtcatgtcctgctcattcactaaccaggtcattgcccaacttgaactgtggaaggagaagagctctggcaagtatgagaagaaggtgtatgtgctccccaagcaccttgatgagaaggttgctgctctccacttgggcaagcttggtgccaagctgaccaagctcaccaagtctcaggccgactacatcagcgtgccgatcgatggtccctacaagcctgcccactaccggtactaggcagccagcacacggcttgcagctcactcgggccgttgtgtgctatgaagttcgctacactggcctgtcagttatctgtcgcacgctatgcattcacatacacgcga

SEQ ID NO: 85421 - DNA, 542 bp, Zea mays
  unsure (1)..(542): unsure at all n locations
ggttgngtatgtggaaaggttttnggtacgaacttacagtattgctctaccggtccggaattcccgggtcgacccacgcgtccgtccacgcgttcggcagcccgttggactgatggtcctgaacaagaacgtcgacaacttgtttgcagagaatgaacagattgctttctgcccagcgattattgttcctggaattcactattctgatgataagctgctccagacgagaatcttctcctatgctgatacccagaggcaccgtcttggtccaaactatctgatgcttcctgtgaatgcaccaaaatgtgcccaccacaataaccaccatgatgggttcatgaacttcatgcacagggacgaagaagtgaactactttccttcgaggtttgatcccgcccgtcacgcggagaaagtccccattccttcccgtgttctaacaagctgtcgtgagaagtgcattattcaggagggagacaacttcaagcaagctggccagaagaatatcgtcccttcgacccttcaaaggaagaccggttcattca

SEQ ID NO: 85422 - DNA, 526 bp, Zea mays
  unsure (1)..(526): unsure at all n locations
gaggaagctgtgttaccgaaagaagtagtctctcccgtccggattcccggtcgacccacgcgtccgcggacgcgtgggtcaaaccataagctttatctactcaaaaccgcaaaagaacccgagggagaccttgagggtgttgctcgttgccctcgctctcctggctctcgctgcgagcgccacctccacgcatacaagcggcagctgcggctgccagccaccgtcgtcggttcatctaccgtcgtcggtgcatctgccacctgcggttcacctgccacctactgtgcatctgccaccgtcggtccacctgccgccgccggtccacctgccaccgacggtccatgtgccgacgccggttcatctgccgtcgacaccatgccactaccctactcaaccgtcccggcctcagcctcatccccagccacacccatgcccgtgccaacagccgcattcaagcccgtgccagctgcagggaacctgcngcgttggcagcaccccgatcctgggccaatgcgttgaagtcctg

SEQ ID NO: 85423 - DNA, 516 bp, Zea mays
  unsure (1)..(516): unsure at all n locations
agtttctgatccagcctttatgnttgccttccttttnnntngnttncggctcgacccacgcgttcgtgcatggctgtattcaatcagcatcatgttgatggccttgatttgacggtgaatccgcttttgtacatgatgaagtgctatccgggtgtgccggagcagaagttgagggcacatctgggttcgtttggtgtttcgggaagccttgccctccaatctatgtacactttatcaggtggtcagaagagtagggttgcattcgcgaaaataaccttcaagaagccgcacatcattctccttgacgagccttctaaccatcttgatctggacgctgttgaggcgctcatccaaggtttactcatttttcagggaagggtgctgatggtgagtcacgatgagcatcttatcactggaagcgtggacgagctttgggtggtgtcggaaggcatggtgaccccgttctcgggcactttcaaggacttcaagaagatgctcaaatgacacaaacatgtt

SEQ ID NO: 85424 - DNA, 533 bp, Zea mays
  unsure (1)..(533): unsure at all n locations
atggttctctgtaccacagaacangatagtatcgctcgtaccggtccggaattcccgggtcgacccacgcgtccgctcttgtttgttttttttttttttttttttttttgtttttttttttctttttctggagatgtaacttctaatttctggttggccacatacatgatccaaaaaactttattattgaattacaactaataagcaatctaaaagagggccccaccaatgatgtgtcgttggtaggaggccgctgggatctgtcaaagcaagttggacaaagggcaacaattgttgtaacttgtaagagggttgcggggttagccgcaaactgctgttagaaaggcatcaactgtctctgtgtcaagaaagaaacacggtttgctgcagctagcttgctaaatggcaataagatttgctgctgcaaataagcagccgggttcagtgcggccaattggttaaatggaaaaagttgttgttggcaaaagtaagcactancttactgtgctaaaggtaaaaaatggtgggttaaa

SEQ ID NO: 85425 - DNA, 532 bp, Zea mays
  unsure (1)..(532): unsure at all n locations
gattaggtttgtgtatcaaccgaaaaaagcacgcatagcagtatccgtaattcccgggtcgagccacgcgtnccgtgcttgcacgcgtgcgtcagcattcaaaaacacaccaagcgaagcgcactatcatcgggctgacaccaatggctaccaagatattagccctacttgcgcttcttgcccttttagtgagcgcatcaaatgcgttcattattccacagtgctcacttgctcctagtgccagtattccacagttcctcccaccagttacttcaatgggcttcgaacatccagccgtgcaagcctacaggctacaactagcgcttgctgcgagcgccttacaacaaccaattgcccaattgcaacaacaatccttggcacatctaaccctacaaaccattgcaacgcaacaacaacaacgacagtttctgacatcactgagccacctatccgtggtgaaccctgtcacctacttgcaacagcagctgcttgcattcaacccacttgctcttgctaacgtatcttcataccc

SEQ ID NO: 85426 - DNA, 503 bp, Zea mays
agactcgtataggacgaaagaaggaagagaaagcatcgctgtaccggtccggaattcccgggtcgacccacgcgtccgattttgagcattcagaaacacaccaagcgaagctacctagcaacgacttaacaacaggggctaccaagatattagccctccttgcgcttcttgccctttttgtgagcgcaacaaatgcgttcattattccacaatgctcacttgctcctagtgccattataccacagttcctccgaccagttacttcaatgggcttcgaacacctagctgtgcaagcctacaagctacaacaagcgcttgcggcgagcgtcttacaacaaccaattaaccaattgcaacaacaatccttggcacatctaaccatacaaaccatcgcatcacaacagcaacaacagttcctaccagcactgagccaactagatgtggtgaaccctgtcgcctacttgcaacagcaggtgcttgcatccaacccacttgctctggca

SEQ ID NO: 85427 - DNA, 500 bp, Zea mays
  unsure (1)..(500): unsure at all n locations
agaacttattagacgagggggaagagaagcaatgctcgtaccggttcggaattcccgggtcgacccacgcgtccgggaaactctatgaatatcaagagaaccataaaaggatatatcaatgctggttttgctggaattatgcttgaggatcaggtggcacctaaagcatgtggacatactgaaggaaggaaagtcatatcaagggaggaagctgtcatgcacataaaagctgctgtagatgctaggaaagagagtggctctgacattgttattgtagcaaggacagattctcgccaagctatttctcatgatgaagcattatggagggtgaaagcatttgctgatgctggagcagatgttctatttattgatgcccttgcttcagtagaagagatgaaagcattttgtgcggttgcaccataagttccaaagatggcaaacatgttagaaggtggtggtaaaactcccatattgagccctgctgaacttgangaaattgt

SEQ ID NO: 85428 - DNA, 544 bp, Zea mays
  unsure (1)..(544): unsure at all n locations
gtgagtagttggggaggttatgttattatacgacgcagccgtacagtanttcagtaccggtccggaattcccgggtcgacccacgcgtccgcccactcgtccgcaactagcaacatacatagtgaagtacactagctacatcttagcggcaatgggagccaagatttttgccctccttgccctccttgctctttcagcaagcgctgctacctcgacttttattccacaatgctcacaacaatacctctctccggtgacagccgcgggatttcaatacccaactatacaatcctacatggtacaagaggccatccaagcaagcatcttacggtcattagcattaaccctgcaacaaccatatgctctattgcaacagccatccttaatgcatctgtatctccaaagaatcgcggcacaacaactacaacaacagttgctaccaacaatcaatcaagtagttgcagcgaaccttgctgcttaccttcagcaacaacaagttcttacattcaatccactatctggggtgaaccctgctatctacttg

SEQ ID NO: 85429 - DNA, 530 bp, Zea mays
taggtattgtgtctgcaccgaaactatagccacgctcgtaccggtccggaattcccgggtcgacccactcgtccgccttggtaccattgcgcggtcaggcacgaaggaattcatggaggcacttgctgctggggctgatgtgtccatgattggccagtttggtgtcggtttctactctgcctaccttgttgcagagagggttgtcgtgaccactatgcacaatgatgatgagcagtacgtgtgggagtctcaggctggtggctccttcactgtcgcacgtgatacctctggggagcaacttggcaggggtacaaagatgaccctctacctcaaggatgatcagttggagtaccttgaggagcgcctactgaaggatctgatcaagaagcactccgagttcatcagctacccaatctctctctggattgagaagaccactgataaggagatctctgatgatgaagatgaagaggataagaatgatgaagtcggttaaggtgaaggtgttgatgattgaaaaaaaaaaaaaa

SEQ ID NO: 85430 - DNA, 530 bp, Zea mays
  unsure (1)..(530): unsure at all n locations
tggaattagtgtagtagtacgacgcagnatattgtactgccgtaccggtccggaattcccgggtcgacccacgcgtccgcgcaaacacacggcacgagcagctgagcgcccatggcaggtccccggcgtctgctggggctgctcctcctaccgctgctcgtgctcctcggcgcgcacccgccgcagtgcgggtccgcggaggaggggacgaaggtctccctggagctctactacgagtcgttgtgcccgtactgctcgcggttcatcgtcaaccgtctcgcggggatcttcgaggacgggctcatcgactccgtccacctccggctcgtccactacggcaacgcgcacgtcgcatccaacagcaagatctcttgccagcatggtccgtacgagtgtctgctcaacaccgtggaagcttgcgccatcgacgcctggccggatccggatgtgcatttcagcttcatctactgcgtggaagacctggtggtgaaacggcagtacaaagactgggagtccccgctcgaagaaac

SEQ ID NO: 85431 - DNA, 521 bp, Zea mays
  unsure (1)..(521): unsure at all n locations
aggtgtctacgaaagaaatatagtacgctcgtaccgtccggattcccgggtcgactacgcgtccgctcgggcgttgctgctctgcgacacgtagctccgaaggccgcagcatcaggcgcgggggccctcgcgtgtgaccgagatggcgctgccgaatcaggggaccgttgattaccccagcttcaagctcgtcatcgtcggcgatggtggaactggtaaaactacatttgtgaagaggcatctcactggagagtttgagaagaaatatgaaccaaccattggtgtggaagttcatccgttggatttcaccactaactgtggtaagatcaggttctactgctgggataccgcanggcaagagaagtttggtggcctcagggatggatactatatccatggccagtgtgcgatcatcatgtttgatgtaacttcaaggcttacttacaagaatggtcctacgtggcatatggacctgtgcagggtctgtgaaaacattcccaatggcccttgtgggtattaag

SEQ ID NO: 85432 - DNA, 497 bp, Zea mays
agttctctaactattacgtaaagacatagtatagctatcgctcgtaccggtccggaattcccgggtcgacccacgcgtccggaccaacaagcaacatagaaagtggaatccagtagcaacaacagagcaacaatggcgaccaagatattttccctccttatgctccttgctctttctgcatgtgttgctaacgcgacaattttccctcaatgctcacaagctcctatagcttcccttcttcccccataccttccatcaatgatagcttcagtatgtgaaaacccagctcttcagccctataggctccaacaagcaatcgcagcaagcaacatacctttatcacccttgttgtttcaacaatcgccagccctatctttggtgcagtcattggtacaaaccatcagggcacagcagctgcagcaactcgtgctacctgtgatcaaccaagtagctctggcaaacctttctccctactctcagcaacaacaatttcttcc

SEQ ID NO: 85433 - DNA, 510 bp, Zea mays
ggggaagaggctcgagtagtacgacgcgggaagtaaagtcacagctcgtaccggtccggaattcccgggtcgacccacgcgtccggccgtcttcctagacttggatttctcatttcttgagatgaatccgttcaccatggtggatggggagccatatcctctggacatgagaggagaactagatgacacagcagctttcaagaacttcaagaagtggggaggtatagaatttcctctaccttttggaagagtactcagccctacagaaagtttcatccatgaactagatgagaagacaagtgcctctctgaagttcacggttttgaacccgaaaggtcgcatctggaccatggtcgctggtggtggtgctagtgtcatttatgctgatacagttggagacttgggatatgcatcagagcttggaaactatgcagagtatagtggtgctcctaatgaagaagaagttctgaattattctagagttgttcttgattgtgcaactgctgatcc

SEQ ID NO: 85434 - DNA, 533 bp, Zea mays
  unsure (1)..(533): unsure at all n locations
tggattagctgtgatcacgcatagttgtcaggctcgtcccggtccggaattcccgggtcgacccacgcgtccggtttcagatggtgtcgatccaaagccgtcacagcgtgccagtgagacgcttccagcagtggtgtatctaccaaagaatgggaagcatgtcaagattaatgggaatcttgttattaagtcgattgttgctagtgagaaagcttcattgcagatgtctggcaatgatgggaagcgtcctcaaaaccaagaggaggagactagactggcaattcctggctatgtgactccattgaaagctggagaggttatggaatcaaccgaaggaatgatgaacaatgaactgttggcgttagctcctgcagatggaagcatgtatagggaggaagatggattgctgccacagtggtttagtgaagcaatgtctggccccctgctgagctcangaatgtgcactgaagttttccagttcgatgtgttcccatcatctgctcattcaaatggcatcattcctgtctattccn

SEQ ID NO: 85435 - DNA, 530 bp, Zea mays
gaggtaggctgggtacagcaagatagtaggctcgtcccggtccggaattcccgggtcgacccacgcgtccgcccacgcgtccggcatattgcaccaagaaatccatcgagaggccgtcgacaggggaaggaatggcgtcgtcgtctagcagcagccaccgccgcctcatcctcgcagccgccgtcctgctctccgtgctcgcggctgccagcgccagcgccgggacctcctgcgtgccggggtgggccatcccgcacaacccgctcccgagctgccgctggtacgtgaccagccggacctgcggcatcgggccgcgcctcccgtggccggagctgaagaggagatgctgccgggagctggcggacatcccggcgtactgccggtgcacggcgctgagcatcctcatggacggcgcgatcccgccgggcccggacgcgcagctggaaggccgtctagaggaccttgccggctgcccgcgggaggtgcagaggggattcggcggcaccctcgtcacggaggccgagttgcac

SEQ ID NO: 85436 - DNA, 522 bp, Zea mays
aaggtattttcagaaagatattgacgtatcgctcgtaccggtccggaattcccgggtcggaccaaggcgtccgtccaagcgttcggtgggcccagggacattaaagccgtgaaagctgtctataggggggcagaatacattactacagctactggtgatggggactttggtcttgtgctggaaagtacaagtttctatgctgaacaaggaggccagatatttgacactgggagcattgaggggtcatttggaactttcaatgtgaacaacgtccaagtgtttgctggctatgttctacatattggctcatttacaaaaggttcgaaggttatgtctcttggagatagtgtgatatgcaaggttgattacaaccggctcacactgattgctccaaatcatacgtgtacccacatgttgaactttgctctaagggaagtacttggtgatcatgttgaccagaatggttcaattggtctaccagaaaagctaagaaactgatatcctcatgggaaacccgtccca

SEQ ID NO: 85437 - DNA, 527 bp, Zea mays
aggtgtcttatcagaaaatgatagtactgctgtaccggtccggaattcccgggtcgacccacgcgtccgcccacgcgtccgcggacgcgtggggttcgggtgcggcccatgtgagaaggctcgcggtgtttgcttccgccgtcggcaaggaaggaagaagagagcagaaccctagctagagtttggcgagtggtgcggaggcgcggctgctcctgctcgtcgcgacatcgaatttcagcgccgcccgcgcgatccttggtctcttcgcccgtgaggagaggcgcggcaatggctgggaaaggcgggccgaccaacctggagaaggagcagatgtttgggatggcggagaaggagatggagtacagggttgatcttttcaacaggcttacaaagacctgttttgagaagtgcgttgaaaaaaggtataaagaagctgagctcaatatgggtgagaacagttgcattgatcgatgtgtttcaaagtattggcaggtgacttatttagtcggtcagatgcttgggaaccc

SEQ ID NO: 85438 - DNA, 504 bp, Zea mays
aagctctatttattacgcacgacatagatagtatcgctcgtaccggtccggaattcccgggtcgacccacgcgtccgaagcagaccacaacaagaagaagcgtagtcgtcgccggaaggaaaggcgcggagcaagatgtcgtggcaggcgtacgtcgacgagcacctgatgtgcgagatcgaaggacagcatctcagcgccgccgccatcgtcggtcacgacggcagcgtttgggcgcagtccgagagcttccccgagttaaagcctgaggaggttgctggtatcataaaggactttgatgaacctggtactcttgcaccaactggtcttttcgttggaggtacaaagtacatggtgatccaaggtgaacctggagttgtcatccgaggaaagaagggcactgggggcattactatcaagaaaaccggcatgtccttgattattggtgtctacgacgagccaatgactccagggcaatgcatcatggtggtggagaggctcggc

SEQ ID NO: 85439 - DNA, 506 bp, Zea mays
  unsure (1)..(506): unsure at all n locations
nggttatgctctttagacagaggggggtgagaagcaatgctcgtaccggtccggaattcccgggtcgacccacgcgtccgcgccgtcgccccgccgtgttgctcgccgacaccgtcccgccggcagccaaaatgccggtcaagaggttcgtggagatcgggcgagtggcccttgtaaactacggcaaggagtatggccgcctcgtcgtcatcgtcgacgtcgtcgaccagaacagggctcttgttgatgcccccgacatggttcgttgccaaatgaacttcaagcggctttccctgactgacatcaagattgacattaaacgtgtcccaaagaagactacactgatcaaggcaatggaggaagctgatgtgaaaagcaagtgggagaatagctcatggggcaagaagctgattgttcagaagaggagagcatcactcaatgactntgacaggttcaaggtcatgttggcgaagatcaagaagggcggtgccattaggcaagagctt

SEQ ID NO: 85440 - DNA, 530 bp, Zea mays
  unsure (1)..(530): unsure at all n locations
tggtataaggtgtgttcaccgaaagatcgtagncatcgtcntcgtccggaattcccgggtcgacccacgcgtccgtgacgatagcgctggacccgtctctgtacccagagaatccactcatcatctgggagaatgcacgggcagctgcccagcaggaagggtttgaggtaaagaggaaaggggataaggagtttgttgcaaacattcggctggagatgaactacagccctgagaagttcaagttatcacagccgcttatggaggtgcttggggtggaggtggacactcgtgcacgggtgattgctgccctctggcagtatattaaagcaaagaagcttcagaacccaaatgatccttccttcttcatgtgtgaccctcaattgaagaaggtgtttggggaggacaagctcaagtttgcaatgttgtcacagaagatatcttaacatctgtatgccccaacaaccattaatttggagcacaagattaagctgtcacggaattgagcacatagcaatgcttgctatgatgtc

SEQ ID NO: 85441 - DNA, 530 bp, Zea mays
gtattaggtattataatgctagcccatgatgtactgctgtaccggtccggaattcccgggtcgacccactcgtccggatatgtgcaacttctcagtaataaaagattagagatctatattttaagttcaaaaagaaaaaaaaaaaaaaaaaaaaaaaaaaaaaagggcggccgctctagaggatccaagcttacgtactcgtgcatgcgacgtcatagctcttctatagtgtcacctaaattcaattcactggccgtcgttttacaacgtcgtgactgggaaaaccctggcgttacccaacttaatcgccttgcagcacatccccctttcgccagctggcgtaatagcgaaaaggcccgcaccgatcgcccttcccaacagttgctcagcctgaatggcgaatgggacgcgccctgtaacggcgcattaaacgcggctggtgtggtggttacgcgcatcgtgaccgctcacttgccagagccctatcgcccgttccttttcgctttcttcctttcttttttgccaacgtg

SEQ ID NO: 85442 - DNA, 530 bp, Zea mays
taggtgtatgtatcagaacattgatagcacgctcgtaccggtccggaattcccgggtcgacccacgcgtccgcggacgcgtgggtgtcgttctacctgcacgctgcgcctaacgttggcaccctcttacgactgcaacaattgctgccattcaaccaacttgctttgacaaacccagcagcgttctaccaacaacccatcattggtggtgccctcttttagattgcttatgagttatagttcaataataaagtttttttgatgatgtttgtggcttcccagaaataagaaagtacatttctaaaaaaaaaaaaaaaaaagggcggccgctctagaggatccaagcttacgtacgcgtgcatgcgacgtcatagctcttctatagtgtcacctaaattcaattcactggccgtcgttttacaacgtcgtgactgggaaaacccttgcgttacccaacttaatcgccttgcagcacattcccctttcgccagctggcgtaatatcgaaaaaagcccgtaccgattcggcttc

SEQ ID NO: 85443 - DNA, 494 bp, Zea mays
gggaggctctattctacgaggggggtggaaggtatcgctcgtaccggtccggaattcccgggtcgacccacgcgtccgcgcaaattgcaccaagaaatccatcgagaggccgtcgacaggggaattaatggcgtcgtcgtctagcagcagccaccgccgcctcatcctcgcagccgccgtcctgctctccgtgctcgcggctgccagcgccagcgccgggacctcctgcgtgccggggtgggccatcccgcacaacccgctcccgagctgccgctggtacgtgaccagccggacctgcggcatcgggccgcgcctcccgtggccggagctgaagaggagatgctgccgggagctggcggacatcccggcgtactgccggtgcacggcgctgagcatcctcatggacggcgcgatcccgccgggcccggacgcgcagctggagggccgcctagaggacctgccgggctgcccgcgggaggtgcagaggggattcc

SEQ ID NO: 85444 - DNA, 523 bp, Zea mays
atgtctggtacagaagatagtaggcatctccggtccggaattcccgggtcgacccacgcgttcggactactcccaagtattccaaggcccgttatgatgagattgtgaaggaagtttcatggtacctcaagaaggttggatacaaccctgacaagattgcctttgtccctatctctggttttgagggtgacaacatgattgagaggtccaccaaccttgactggtacaagggtccaaccctgcttgaggctcttgaccagatcacggagcccaagaggccttcagacaagcccctgcgtctgcccctccaggatgtgtacaagattggtggtattggaactgttccggttggtcgtgtggagactggtgtcatcaagcctggaatggttgtcaccttcggtccaactggcctgaccactgaggtgaagtctgttgagatgcaccacgaggctcttcaggaggcccttcctggtgacaatgttggcttcaatgtgaagaacgttgctgtgaaggatctcaaacc

SEQ ID NO: 85445 - DNA, 533 bp, Zea mays
  unsure (1)..(533): unsure at all n locations
tggtgatgatactattcatccgaacatgatagtcacgctcgtaccggtccggaattcccgggtcgacccacgcgtccgcggacgcgtgggttcagaaacacacctagcgaagcgcactagcaacgacctaacgacgatggcttccaagacattatccctccttgcgcttcttgccctttttgtgagtgcaacaaatgcgttcattattccacaatgctcacttgctccgagtgccattattccacagttcctccctccagttacttcaatgggcttcgaacacccagctgtgcaagcctataggctacaacaagcgcttgcggcgagcgtcttagaacaaccaattgcccaattacaacaacaatccttagcacatctaaccatacaaaccatcgcaacgcagcagcaacaagcactgagccacctagccgtggtgaaccctatcgnctacttgcaacaacagctgcttgcattcaacccacttgctttggcaaacgtatctgcataccaacaacaacaacagtttggacagt

SEQ ID NO: 85446 - DNA, 531 bp, Zea mays
tagtacttttaaagacgggaaggaaagtagcgctcgtaccggtccggaattcccgggtcgacccacgcgtccgcccacgcgtccgctcttgcaactccagtgcttctcactgccactgccagcaggtcgagctgctccgcaagtctgctttgctgctgcacctgcaagtctgcaaccgcgcacagagatgtcgacgactgtgagccgtgcgtccctcgaccagaaactcgccctcgccaagcgctgctcccgagaggcgaccctcgccggagccaaggcggcagccgtggcgactatcgcctccgcgatccccaccctggccagcgtgcggatgctgccatgggccaaggccaacatcaaccccaccggccaggcgctcatcgtctacacggtggctgggatggcctacttcatcgccgccgataagaagatcctgtcgctggcgatgcgccaatcgttcgaccaagcccctgagcacctcaggaacaccttcttccagggcacccgccgttcccaaccgggttttttaag

SEQ ID NO: 85447 - DNA, 538 bp, Zea mays
  unsure (1)..(538): unsure at all n locations
tgagaatatgtgtattcacaagaaagatagatcagcatngctcgtaccggtccggaattcccgggtcgacccacgcgtccgcccacgcgtccgctcgcatccgcagcctctcgagctctactccatcccctcgatctcgaagcgcagcagcagcagtcaggcggccatggacgccagcgcagcaggagccggcgggaaggcgaagaagggcgcggccgggcgcaaggccggcgggccgaggaagaagtcggtgacgaggtccgtcaaggccgggctgcagttccccgtcggccgcatcgggcggtatctgaagaagggccggtacgcgcagcgcgtcggcacgggcgcccccgtctacctggccgccgtcctcgagtacctggccgccgaggtgctggagctggccggcaacgctgccaaggacaacaagaagacccgcatcatcccgcgccacgtgctcctggccattcgtaacgacgaggagctcggcaagctgctgtccggcgtcaccatcgtccacggcggcgtccttcccaaa

SEQ ID NO: 85448 - DNA, 502 bp, Zea mays
atctctactattcaccaagacatgatagtatcgccgtaccggttccgaattcccgggtcgacccaaacgttcgcagaaacacccctatcgaagcgctctatcaacgacctaacaacaatggcttccaagggattatccctccttgcgcttcttgccctttttgtgagtgcaacaaatgcgttcattattccacaatgctcacttgctccgagtgccattattccacagttcctccctccagttacttcaatgggcttcgaacacccatctgtgcaagcctataggctacaacaagcgcttgcggcgagcgtcttaaaacaaccaattgcccaattacaacaacaatccttggcacatctaaccatacaaaccatcgcaacgcagcagcaacaagcactgatccacctagccgtggtgaaccctattggcttatttgcacaaccagctggtttcattcaacccacttgctttggcaaacgttacttcttaccaacaacaacac

SEQ ID NO: 85449 - DNA, 497 bp, Zea mays
agtctctactattacgtggggggaaggagagtatcgctcgtaccggtccggaattcccgggtcgacccacgcgtccgctactatactatactctaggaagcaaggacaccaccgccatggcagccaagatgcttgcattgttcgctctcctagctctttgtgcaagcgccactagtgcgacccatattccagggcacttgccaccagtcatgccattgggtaccatgaacccatgcatgcagtactgcatgatgcaacaggggcttgccagcttgatggcgtgtccgtccctgatgctgcagcaactgttggccttaccgcttcagacgatgccagtgatgatgccacagatgatgacgcctaacatgatgtcaccattgatgatgccgagcatgatgtcaccaatggtcttgccgagcatgatgtcgcaaatgatgatgccacaatgtcactgcgacgccgtctcgcagattatgctgcaacagcagttaccattc

SEQ ID NO: 85450 - DNA, 506 bp, Zea mays
gtgggaggtttactaaacaaagaaacgatagatgccatgctcgtaccggtccggaattcccgggtcgacccacgcgtccgcggacgcgtgggcggacgcgtggggaagaggaagaacccgctcaagaacatgggtgctgtgctcaagctgaacccctacctcggcactgcccggaagatggccacccttgctgaggctgcccgagtcaaggcccggaaggagaagcttgattccaagaggaccaagcttacctcggaggagactgccaaggtcaaggctgccggcaaggcgtggtacaagaccatgatctcggacagtgactacaccgagtttgagaacttcaccaagtggctcggagtgacgcagtgaagcggcctttgagacctagttaagttttgattagttgtgtcgctgaactttgtattgagacgaaatagtattttatcaatctgtcttatcctgcatcttcacaacaagttacctatctgtggactctaaagcctgct

SEQ ID NO: 85451 - DNA, 529 bp, Zea mays
  unsure (1)..(529): unsure at all n locations
acgtttacttaccganacgattgtatgactctactcgtcccggaattcccgggtcgacccacgcgtccgatagaaagcacaatagtgtaccaacattggcagccaaaatattttgcctccttatgcggcttggtctttctgcaagtgctgctacggcgaccattttcccgcaatgctcgcaagctcctatagcttcccttcttcccccgtacctctcatcagcggtgtcttcagtatgtgaaaacccaattcttcaaccctacaggatccaacaagcaatagcaactggcatattacctttatcacccttgttcctccaacaatcatcagccctattacaacaggtacctttggtgcattcattggcacataacatcagggcacaacaactacaacaacttgcgctagcaaaccttgctgcctactctcagcaacagcagtttcttccattcaaccaactaggttcattgaactctgcttcctaattgcaacaacaacaactaccattcaatcagctaccttgtgacta

SEQ ID NO: 85452 - DNA, 529 bp, Zea mays
aagttctctgccaccagaacatcgatagtcacgctcgtaccggtccggaattcccgggtcgacccacgcgtccggatcagcaaagcggcagtgcgtagagaggatcgtcgaacagaacagcatgaagatgggcatcgttctcgtcgtgtgcctggctctgtcagctgccagcgcctctgcaatgcagatgccctgcccctgcgcggggctgcagggcttgtacggcgctggcgccggcctgacgacgatgatgggcgccggcgggctgtacccctacgcggagtacctgaggcagccgcagtgcagcccgctggcggcggcgccctactacgccgggtgtgggcagacgagcgccatgtaccagccgctccggcaacagtgctgccagcagcagatgaagatgatggacgtgcagtccgtcgcgcagcagctgcagatgatgatgcagcttgagcgtgccggttgcgtcagcagcaacctgtacgagccatctctgatgcaccaacatcagcagatgttggcagctcaa

SEQ ID NO: 85453 - DNA, 537 bp, Zea mays
gtgggtatgtctgttttaccagaacatcgatagtatcgctcgtaccggtccggaattcccgggtcgacccacgcgtccgcatagaaagtggaatccagtatcaacaatagagcaacaatggcgaccaagatattgggcctccttatgctccttgctctttctacatgtgttgctaacgcgacaattttccctcaatgctcacaagctcctatagcttcccttcttcccccataccttccatcaattatagcttcaatatgtgaaaacccagctcttcaaccatataggcttcaacaagcaatcgcagcaagcaacatacctttatcgcccttgttgtttcaacaatcgccagccctatctttggtgcaatcattggtacaaaccatcatggcacaacagctgcagcaactcgtgctacctctgatcaaccaagtagctctggcaaacctttctccctactctcagcaacaacaatttcttccattcaaccaactgtctacactgaacccttgtgcttatttgcagcaacaactatta

SEQ ID NO: 85454 - DNA, 526 bp, Zea mays
  unsure (1)..(526): unsure at all n locations
tagtagtcttacacagaacaagatagtatcgctcgtaccggtccggaattcccgggtcgacccacgcgtccggcacatgtgctttgcttcagactagaggattaaggctgtcaggcagatgattatggctcccactcttgagctgaggcagcaggcgctcgaccgtctcttgccgtatcagaggtctgacttcgaaggcattttccgtgctatggatggactcccggtgaccatccgactcctggacccttgcctccacgagttccttccagaagggaacatcgaggacattgtaagtgaatgatgtgctgagacaggagccaaccaggaggatgccctggcgcgaatagaaaagcttccagaagtgaacccgacgcttggcttacgtgggtgcaagcttggtatatcgtaccctgaattgacagatattcaagcccgggccatttctgaagctgctatagcaatgaccaatcagggtgttcaaagtgtcccagagataatggttcctnttggtggaacaccacaa

SEQ ID NO: 85455 - DNA, 529 bp, Zea mays
  unsure (1)..(529): unsure at all n locations
ggtnttaggtatgttacagaaagatagtaggatcgtctcggtccggaattcccgggtcgacccacgcgttcgcccacgcgtccgctatgaaatcatttgacaacctgaacaactggcgagaagagtttcgagtgcangctagcccatcagatcctgataatttcccttttgttctgttgggtaacaaagttgatgtagatggtggcaacagccgcgtggtatctgagaaaaaggcaaaggcatggtgtgcttccaaagggaacattccgtactttgagacgtctgctaaggacggaacgaacgtggaagacgccttccagtgtatcgtgaagaacgctctgaagaatgagccagaggaagaactgtatgtgccagataccgtggacgtggtgggtggcaaccgggcccaaagatcatctggttgctgttaaggcacgaggcatcacgaggcgttgtgatcatcatcgtcggttatgcaatgaccaaacaataccttatcattggttggtcttcgggggtatctacctat

SEQ ID NO: 85456 - DNA, 531 bp, Zea mays
tagatattattccaccgacacattgacgccatcgcagtaccggtccggaattcccgggtcgacccacgcgtccgattgatcgctgcgcttacgtcactgagaccgtccttgctgcctgctacaaggcgctcgacgagcaccatgtcctcctggagggtaccctcctgaagcccaacatggtgactccaggctccgactccaagaaggtgacccctgaggtgattgctgagtacaccgtccgtaccctccagaggaccgtccctgctgctgtgcctgctgttgtcttcctctctggtggacagagcgaggaggaggccacccgcaacctcaatgccatgaacaagctcagcaccaagaagccgtggtccctgtctttctccttcggccgtgcccttcaagcgagcaccctcaaggcctgggctggcaaggtggaaaacctggagaaggctaaagctgtctttctcgccaggtgcaaggccaactctgaggcttaccttgggacctacaaaggttattctttgcgccgacacc

SEQ ID NO: 85457 - DNA, 538 bp, Zea mays
tacgtttgtgagtacggaaggggcgagaagatagccatcgctcgtaccggtccggaattcccgggtcgacccacgcgtccgtgcagttcaaggatgtttgtgttaaagttgcaaatgttgagctatactacaaggcaggtcacttctatttgcaggagcatcctgatctcatcaatgatatgctgaatgtgcttgcacttcgtttagatcataccagagttgtagacataatgcgcaaggctggtcaattgcatcttgtgaaaccatatatggttgcagttcagagtaacaatgtctctgctgtgaatgaggccttgaacgaactttatgttgaagaggaagactacgagagactccgtgaatcagttgatatgcatgacaactttgaccaaataggtcttgcccagaagcttgagaagcatgaattgctggagatgaggaggattgctgcctacatttacaagaaggctggcaggtggaagcaatccattgctctatcaaagaaagattacatgttcaaggattgtatggagacact

SEQ ID NO: 85458 - DNA, 537 bp, Zea mays
gaggaaggtgtattccaccgaaaaatgaatgtcattgctcgtaccggtccggaattcccgggtcgacccacgcgtccgtgcagccctacggcgactccctactgctcgcctcagcgccagtcgttgaggtagcagggttgccagcagctgatgcaggtggagcctcagcaccggttccagacgatcttcggatcggaccttcagctcattctgcagcatcagccacatagaggacagctagtggcgctgctggctgcgcaaatagcgcagcaactgacggcgatgtgcggactgcagcatacgactacatgcccatacgctgctggcggacgtgaaccgactgaagaaactatgtgctgtactatagccgttggctagctagctagcagagtcatttagcggcgatgatcgaatcatgatgattgacgcatgatcatgggtggaacgaacagtgtgaacaatagcctgcatgaacaatatgaatgaaaagaaaaaagtattgatccccgatattaaaacaaagggctgacattttac

SEQ ID NO: 85459 - DNA, 500 bp, Zea mays
agcgtctgttctacgcggggggattgaaggtatcgctcgtaccggtccggaattcccgggtcgacccacgcgtccgcggacgcgtgggtgcgcttcttgccctttttgtgagcgcaacaaatgcgttcattagtccacaatgctcacttgctcctagtgccattattccacagttcctcccaccagttacttcaatgggcttcgaacacctagctgtgcaagccaacatgcaacaacaagcgcttgcggcgagcgtcttacaacaaccaattgcccaattgcaacaacaatccttgccacatctaacaatacaagccatcacaacgcatcagcaacaacagttcctaccagcactgagccacctagccatggtgaaccctgccgcctacttgcaagagcagctgcttgcatccaacccacttgctctggcgaacgtagttgcaaaccatgctcatcatcagctacaacagtttctgccaacgctcagtcaactagccatg

SEQ ID NO: 85460 - DNA, 513 bp, Zea mays
  unsure (1)..(513): unsure at all n locations
aggttagaagcgctangttttccgacagacgatagacagtattgctcgtaccggtccggaattcccgggtcgacccacgcgtccgcgcaaattgcaccaagaaatccatcgagaggccgtcgacaggggaattaatggcggggtcgtctagcagcagccaccgccgcctcatcctcgcagccgccgtcctgctctccgtgctcgcggctgccagcgccagcgccgggacctcctgcgtgccggggtgggccatcccgcacaacccgctcccgagctgccgctggtacgtgaccagccggacctgcggcatcgggccgcgcctcccgtggccggagctgaagaggagatgctgccgggagctggcggacatcccggcgtactgccggtgcacggcgctgagcatcctcatggactgcgcgatcccgccggtcccggacgcgcagctggagggccgcctagaggacctgaccggctgcccgcgggaggtgcataggggattcgccgccaccctcc

SEQ ID NO: 85461 - DNA, 501 bp, Zea mays
aaggttaagtctaccgaacagaagatagtacactctctggtccggattcccgggtcgacccacgcgtccgcgcacgcgtccgcgtacgcgtgggctgacgcgtgggcgctactgccgtacccagggcgggagtccggcagcatggacgaggctgcctaagcgtgcgcaatcgtctcttggacagcctactgtccacgaccgctgacgcaatctccaagttcgacagcatagccgataggatcagcatcttctgctcgtccgacgaggctgcggaggcctctatctctaccttgaagaaccttacttgtgactggtaactcgcagctatgctgtaccacagcttatcgtaacactactccgcgcagtctctcagagcgatcaatgaggacgtaagcacgcttgtcttcgacagttccgagatcatcaacgggtacatcctaacgatacgtaccgacggggacacattgaagatctcgactgcatctgtcagactcctcccgt

SEQ ID NO: 85462 - DNA, 531 bp, Zea mays
taggtatgattcatcgcaacaagtacgcatcacagtaccggtctcggaattcccgggtcgacccacgcgtgctgggtatcagacaagtcatggaagggcaaatggcaatggcctgaccattggatgggatggttgttgctatatgtgcttctatatagagagaaaataaggggtagatccgcgagtacctatgtacgcaatcattctgcaccatcagccacatagcggccatctagtggcgctgctggctgcgcatatagcacaacagctgacggcgatatgcgggctgcagcatactactccatgcccatactctgctggcggacatgaaccccactgaagaaactatgtgctgtactatagccgttggctagctagctagctgagtcatttatcggcgatgatcgaatcacgatgattgacgcatcatcatgggtggcagagtcagtgtgaacatagcctgcatgaacaattgtgatgaaaagcaaaacgtattgatcccaaatattaaaaaaagggtggacgctctac

SEQ ID NO: 85463 - DNA, 531 bp, Zea mays
  unsure (1)..(531): unsure at all n locations
taggggnnntttgatgcattcagtagtacttctttnctggttcggaattcccggctcgacccattcgtaccatcataaccgacctgatgttccttgccttcgggtttgcaattttcttggtccggaaggcactcatctggggcaagaaatcctaaggcgccgtgccattaaccaccatgtttgctctggtactcctctggttcggcatctccgtgccattggtctttatcggcagctacctcggcttcaagaaacctgccatggangacccagtgaggacaaacatgatagcacgggcaataccggagcagccatggtacatgaaccccgtcgtctcggtgctgatncgaggcatactgcccttncgcgcagtgttcatcgagctcttcttcatcctgacatcgatctggctgcaccaattctactacatcttttgggtttctggtccttgtcctttggcaatcctaatctgaacttttcaaaaataccccattcgctctgtgtaacttcaaattttgggcaaagaactcc

SEQ ID NO: 85464 - DNA, 531 bp, Zea mays
caggtgtctgacgaccagaatatatcagtatcgctcgtaccggtccggaattcccgggtcgacccacgcgtccgcggacgcgtggggtttcgcgtataggagggagaacaaaggtcgcgtctcgaaagttcttgccttgttgggaagggatggcgtcggaggtggaggacgacgcggcggtgccgggcgcgccgctggtcgccaatggtgcagccgacgtccgccggaggagggatcaggctaaggcgattttgtccaagcaggccgtcaagatcgccaccaaggccgagcagcacgagcgcttcatctttaaggtcatttccccgaccctgcctccgtttaatctctttattaccgcctttcttgtgcagttgacgtccacaaatcttgccgctcccgtgctccctttcttttgtggaggtcattgtgtgatgtaataagtacctgcacatttattggtcgcactgtgctgcaaagattggggcaataattggattcgctggaattgggtttaggaaaggtctcatatgg

SEQ ID NO: 85465 - DNA, 529 bp, Zea mays
acggtgtatgtacacagaaatatacagtatcgctcgtaccggtccggaattcccgggtcgacccacgcgtccgcaacaagcaacatagaaagtggaatccagtagcaacaacagagcatcaatggcgaccgggatattttccctccttatgctccttgctctttctgcatgtgttgctaacgcgacaattttccctcaatgctcacaagctcctatagcttcccttcttcccccataccttccatcaatgatagcttcagtatgtgaaaacccagctcttcagccctataggctccaacaagcaatcgcagcaagcaacatacctttatcacccttgttgtttcaacaatcgccagccctatctttggtgcagtcattggtacaaaccatcaaggcacagcagctgcagcaactcgtgctacctgtgatcaaccaaatagctctggcaaacctttcttcctactcttaggaaccacaatttctttcattcaacccactgtgtttactgaaccctgtgtggtatttgcaa

SEQ ID NO: 85466 - DNA, 526 bp, Zea mays
  unsure (1)..(526): unsure at all n locations
aaggnnnnnttgcttgattccatacntantcccncccnnntngnnnnacnnncgcgacccactcgtccgagcaaagcggcagtgcgtatagaggatcgtcgaacagaacagcatgcatatgggcagggttctcgtcgtgtgcctagctctgtcagctgccatcgcctctgcaatgcacatgccctgcccctgcacggtgctgcactgctagtactgcgctggcgccggcctgactaccatgatggacgcctgcagtctgtacccatacacgtagtacctgatgcagcctcagtgcagccctctgaccgcggcgcactactacaccagccgtggtcagtcaaccgccatgttccatacgctccgggcacagttctgtccacaccatatgaggacgatggacgtgcagtccgtcgcgcaccagcttcaaacgatgatgcaacttgaacgttccgttgtcgtcagcagcagcccgtacgaacccaatctgacgcatgactaactgaaccgttgggatccaaggttcaaa

SEQ ID NO: 85467 - DNA, 511 bp, Zea mays
  unsure (1)..(511): unsure at all n locations
ggttaaagtntgtaatatcaaacgcaacatgtacgtcacttctttncnggttnngnnttncngcgtcgacccacgcgtccgcggacgcgtgggtcgaaggcgaccctccctccttcgctccttccgcgccgtctgcgggccgtcgccgccatggtgaagtactcgcaggagccgggcaaccctaccaagtcggctaaggccatgggcagggatctgagggtccacttcaagaacacaagggagacagcctttgcgcttcgcaagttgtctttgaccaaggctaagcgataccttgaggatgttattgctcacaagcaggcaattcccttacggagatactgtgggggtgttggtcgcaccgcgcaagctaagtcgcgccactccaatgggcagggccgctggcccgttaaatcagccaggttcatcctggatttgctgaagaatgctgagagtaacgctgatgtgaaaggctcggatgtggacaacctctatgtttcacacatncaggtgg

SEQ ID NO: 85468 - DNA, 543 bp, Zea mays
  unsure (1)..(543): unsure at all n locations
ngagtntaagagggtcnatctcgatggggggggaaacagtaatacttctaccggttcggaattcccgggtcgacccacgcgtccgcagatttagaggagctcgaggtcttggacttgcagacactagtttcctacataagctgtgcaaggaagtatattcagccacagttatctgatgaagctgcagaagagttaactcgtggctatgtcgagatgagaaaaagagggaatagccctgggagcagaaagaaggtcataacagcaaccgctagacaaatagagagtttgatccgtctcagcgaagcattagcccgaatgcggttctctgaagtggtcgaagtgcgggatgttgtggaggcattcaggcttcttgaagtcgccatgcagcagtctgcgacggatcatgcaactggtacgattgatatggatctgatcatgacggggatatccgcaagcgaaaagcataggcgggagaacctcgttgccgcaacccgtaacctgattgccgagaaaatgcaacttggaggcccctngatgcgcatg

SEQ ID NO: 85469 - DNA, 522 bp, Zea mays
ggaaaaggtcttctaagagtagaggaagagagtctctaccggtccggaattcccgggtcgacccacgcgtccgcccacgcgtccgcccacgcgtccgcccacgcgtccgattgagaccaactagcaacatagaaagcacaatagtgtaccaacaatggcagccaaaatattttgcttccttatgctccttggtctttctgcaagtgttgctaccgcaaccattttcccacaatgctcacaagctcctatagcttcccttcttcccccatacctctcaccagcggtgtcttcagtgtgtgaaaacccaattgttcaaccctacaggatccaacaggcaatcgcaacaggcatcttaccattatcacccttgttcctccaacaaccgtcagccctattacaagagttacctttggtccatttggtggcacaaaacatcagggcacaacaactacaacaacttgtgctagcaaaccttgctgcatactctcagcaacatcagtttcttccattcaaccaactggc

SEQ ID NO: 85470 - DNA, 507 bp, Zea mays
  unsure (1)..(507): unsure at all n locations
gagtaaggtgaggttttgtgccagctcgacgccangacgtactggtccggaattcccggttcgacccacgcgtccggtgcgacaaggacttcgagaggtgggtgtgtgtgcatgcatgcatgcaaacgcaacgtacagctctttcatccagacgatcacatgatccaaactgacctgtgattaggatggtcttgggtttcttacgcgtcgtgaccacggcacacgtgtgactgacggctgcagggcggagatgtacttcaagcaggcggtggccgccgagccggcggacggcgaagcgatgcggaggtacggcatgttcctgtggcacgcccgcggcgacacgggcggcgcggaggacatgttcaccggcgccattgacgcggagcccgagagcagccaccaccggagcagctacgcgtggttcctatggatgaccggcggcgtcgagacctgcctcatggacaccggcaggcagagcgacggcaacgacgcggattgaaccgcccn

SEQ ID NO: 85471 - DNA, 510 bp, Zea mays
  unsure (1)..(510): unsure at all n locations
agttaagaggtnnnnnattgaacatcgataatatagtatnactcgtaccggtccggaattcccgggtcgacccacgcgtccgcccacgcgtccgcggacgcgtgggttttgttttcaatttccatcccaagaaaacttgcgagggctacaaagtgggatgcgatttgcctgggaaatacagagtagccctggactctgatgctctggtcttcggtggacatggaagagttggccacgacgtggatcacttcacgtcgcctgaaggggtgccaggggtgcccgaaacgaacttcaacaaccggccgaactcgttcaaagtcctttctccgccccgcacctgtgtggcttattaccgtgtagacgaagcaagggctggacgacgtcttcacgcgaaagcagagacaggaaagacgtctccagcagagagcatcgacgtcaaagcttccagagctagtagcaaagaagacaaggaagcaacggctggtggcaagaaaggatggaaagttgccc

SEQ ID NO: 85472 - DNA, 524 bp, Zea mays
  unsure (1)..(524): unsure at all n locations
gagtataaggatgtgttaaggggggaaagaggataaagcatatactcgnccggaattcccgggtcgacccacgcgtccgcccaaatggccccaggaattccatcgaaaggccgtcaccgggggaataaagggcgtcgccgcttaccaccagccaccgccgcctaatcctcgaagccgccgcctgctctcctgctcgcgctgcagcgcagcgccggacctnctgcgtgccggggtgggccattccgcacaacccgctcccgagctgccgctggtacgtgaccagccggacctgcggcatcgggccgcgccttccgtggccggagctgaagaagagatgctgccgggagctggcggacatcccggcgtactgccggtgcacggcgctgagcattctcatggaccgggccatcccgccgggcccggacccgcaacttgaaggccggctaaaagacctggcgggcttgccgcgggaagtgccaaagggattcggcggcaaccttgttaccgaagcccaatgccacctg

SEQ ID NO: 85473 - DNA, 524 bp, Zea mays
  unsure (1)..(524): unsure at all n locations
nggtnaagaggtttntttaagaggaaggggagaggataatactggnctcggattcccgggtcgacccacgcgtccgcccagcctccggccaagcgttcggccaagccttcgccgaccccttgggaactttggtggttaattaccaccggcaccggttccaacatttaagccggttacttaaggtaaccccggtggccttctggacacacacagttgttgccgttctacctgcacgctgcgcctaacgctggcaccctcttacaactgcaacaattgctgccattcaaccaacttgctttgacaaacccaacaacgttctaccaacaacccatcattggcggtgccctcttttagattgcttatgagttatagttcaataatgaagttttttggatgatgtttgtggcttcccagaaataagaaatgtactttcttacttcttcctggagagaaaaagcagaagacaatacaaagatgtccaagatggcggaggagaaggcggcngcagtgggcggactcggagg

SEQ ID NO: 85474 - DNA, 530 bp, Zea mays
ggtaaaaatgtgtatttatgatgttgaggagaaagagtatgcttctaccggttcggaattcccgggtcgacccacgcgtccgattttcagcattcaaaaacacaccaagcgaagcgcactagcaacgacctaacaccaatggctaccaagatattagccctccttgcgcttcttgcccttttagtgagcgcaacaaatgcgttcattattccacagtgctcacttgctcctagtgccagtattccacagttcctcccaccagttacttcaatgggcttcgaacatccagccgtgcaagcctacaggctacaactagcgcttgcggcgagcgccttacaacaaccaattgcccaattgcaacaacaatccttggcacatctaaccctacaaaccattgcaacgcaacaacaacaacaacagtttctgccatcactgagccacctaaccgtggtgaaccctgtcacctacttgcaacagcagctgcttgcatccaacccacttgctctggcgaacgtaactgcataccagca

SEQ ID NO: 85475 - DNA, 509 bp, Zea mays
  unsure (1)..(509): unsure at all n locations
aggntaaagagacttgtttatagtaggttgggggagagagtatacttctccggaattcccgggtcgacccaagcgttcggccaagcgttcggtcatgcccgcgctttgtgattaccttggtggtaaaggccatgcgtgtgttggaggaacattcgtccgtgaggaccaaaggattcttggcagtggtgtgcatgttgttgttggtacacctggtcgtgtgtttgatatgctgcgcagacagtccctccgccctgataacatcaagatgtttgttctagatgaagctgatgaaatgctttctcgtggtttcaaggatcagatttacgacatcttccagcttctcccagccaagattcaggttggagtcttctctgctaccatgccccctgaggcccttgagattacccgcaagttcatgaacaagccagtgagaatcctcgtgaagagagatgagctgactcttgagggtatcaagcagttctatgtgaatgtggataaagaagactggn

SEQ ID NO: 85476 - DNA, 472 bp, Zea mays
gagtgttatactcgtccggaattcccggtcgacccaagcgttcggaggtttacactggatctgccggaaacattcaccggccggtttaaccggttggcaggggcaggcttggttggttgaaaggatcctctgaatccatgggggcctatctccggagttgaacaagcttgagcaaatactcaacctgaatcgccccacagacgtgcctgatactggattgctctgtgatcttctttggtctgatccttccaatgaagcaacaggctgggccatcaatgatcgtggtgtttcattcacatttggtcctgataaagtttctgaatttcttgagaagcatgatttggaccttatctgccgagcacatcaggttgtcgaagatggatacgagtttttcgctagccgtcaactcgtaacaatattttcagcccctaactactgtggagaattcgacaacgctggtgccatgatgagt

SEQ ID NO: 85477 - DNA, 500 bp, Zea mays
  unsure (1)..(500): unsure at all n locations
agagagagattcttctccggaattcccgggtcgacccacgcgtccgcgactcccaaatactccaaggcgcgttatgatgagattgtgaaggaagtctcatcctgcctcaagaaagttgggtacaaccctgataagattgcctttgtccccatctctggttttgagggcgacaacatgattgagaggtccaccaaccttgactggtacaaaggcccgaccctgcttgaggctcttgaccagatcaccgagcccaagagaccttcggacaagcccctgcgtctacccctgcaggatgtgtacaagattggtggtattggaactgtaccggttggtcgtgtggagactggtgtcatcaagcctggtatggttgtcaccttcggtccaactggcctgactactgangtgaagtctgttgagatgcaccacgaggctcttcaggaggcccttcctggtgacaatgttggcttcaacgtgaaaaacgttgctgtgaaggatctcat

SEQ ID NO: 85478 - DNA, 527 bp, Zea mays
  unsure (1)..(527): unsure at all n locations
nggtntagaggatcntgtaagaggggaggaggagtaagctatactcgttcggaattcccgggtcgacccacgcgtccgtgattgtcttctgcccatgggaattacttctaaaaatgttgcccatcgatatggtgtaactaggcaagagcaagatcaggccgctgctgagtctcataggagagctggtgcagccacggcctctagaaaattcaaggatgagatcgtccccatgccaacaaagatcgttgatcctaaaactggagaggagaaggaagttgtgatattagttgatgatgggattaggccatctacttacctgctatattttttctgagcaaagtcggttaaacttgtgattctttgtatgttcaggtgcccggtgcgtggctactcttctaaatgaaatgaactgccggggcagagactgcagaattggtgttgtcaccatgtggattggatctggaatgggggcaacaggtgtgttcgaagtgtgttcggcctgggtggaggtattgaccatcactcgt

SEQ ID NO: 85479 - DNA, 519 bp, Zea mays
aggtaggagcttgttaagaacaggggtatgctacactcgttcggaattcccgggtcgacccacgcctccggatcatggtccctgagatgattggaagctttgttggtgtctacaacggcaagaccttggaccaggttgagatcaagcctgagatgatcggccactaccttgctgagttctccatctcctataagccggtcaagcatggcaggcccggtatcggtgccacccactcctcgcggtttattcctctgaaatgagctgttacccggctctgtagtctcccaagagtcagttggcaatgttcgttcagcttttctacttgttttgaacaagttaaatgcccaagatattttgttttgttccattccagctcaagaattcaaagctaagcattgcacaattatgctgttttgttggaagtttttgagttaatcatatctaagctgagttgctaaaaaaaaaaaaaaagggcggccgctctagaggatccaagcttacgtacgcgtgcatgcgacg

SEQ ID NO: 85480 - DNA, 531 bp, Zea mays
  unsure (1)..(531): unsure at all n locations
ggaggtntnaggtgtgtatctagtgaggggagaaatagtatacttctaccggtccggaattcccgggtcgacccacgcgtccgcggacgcgtgggcggacgcgtgggtagcaacatagaaagcacaatagtgtaccaacggtggcagccaaaatattttgcctccttatgctccttggtctttctgcaagtgctgctaccgcgaccattttcccgcaatgctcacaagctcctatagcttcccttcttccaccgtacctctcaccagcggtgtcttcggtatgtgaaaacccaattcttcaaccctataggatccaacaggcaatcgcagctggcatcttaccttaatcacccttgttcctccaacaatcatcagccctattacagcagttacctttggggcattaattggcccaaaacataagggcccaacacctacaacaacttgggctaacaacctttgttgcctactttcagcaacagcagtttcttccatttaaccaactagctgcattgaactctgctgctaatt

SEQ ID NO: 85481 - DNA, 524 bp, Zea mays
ggggagtatgtgtcttagtagggggagaagagatgctgtaccggtccggaattcccgggtcgacccacgcgtccgcacatttgaaggtgctactaccctaacctcgctcaggttcatcaccagcaccagagcctggggcccatggggcaccgagaacgggacacgcttctgcatcaccgcgcccatcggcagcagcgtcgtgggattctacggacgcgcgggaaccaggctcgtcgacgctatcggtgtctacctgcgtcaactttgatttcaacggcatgatgcttgatttcaaatagatatattaattagttcctcgtcacagtcgatcctgtgtcaaataataaagaagctcttgtatgcatgtgtatatgttagtccttcgttctgtatgtgtcaaataaaggttgatcaaaaagacctaaaaaacaaaaaatacagctgagcatattaagacacgtataataaagacgagatatatagaacaatgaataaaaaaaagggcggccgctctagaggatccc

SEQ ID NO: 85482 - DNA, 525 bp, Zea mays
  unsure (1)..(525): unsure at all n locations
gttgaaaatgttagtcatgcaggggagatagtatgctctaccggtccggaattcccgggtcgacccacgcgtccggttagaacgagcaagagaacttttccatgaagctgtccaacaggctcctccagaggaaaagaagcccctatatttacaatgggcaaaactggaagaggactatggtcttgcaaaacgtgctatgaatgtatatgatgaatctgtaagagctgttcctggcagtgaaaaaaatggccatgtatgaaatctatatagcacgtgctgccgaactctatggtgttccaaggacaagacaaatatacgagcaagcaattgaatctggcctnccagacaaagatgttctgataatgtgcatgaagttcgctgaactagagagaagccttggtgaaattgatcgttcgcgtgccatctatgtgcatgcatccaactatgctgatccaaataatcctgacttttggaagaagtggaatgactttgagattcagcacggtaacgaaaacacattcaggg

SEQ ID NO: 85483 - DNA, 522 bp, Zea mays
gggggagaagcttattagaggggggggaagagagtctgtaccggtccggaattcccgggtcgacccacgcgtccgcggacgcgtgggcgcggcgaggccaccatgagcactctcaagttctgccgggaatgcaacaacatgctgtacccgcgggaggacaaggagacgcgcaccctcctgtacgcgtgccaaacgtgcgagcatgaggagattgccactgatacttgtgtgtacaaaagggttatccgcaagcctggtggtgagcccaaggatgtcctgaaggatgcagcaactgatcctagcctgcctcgcaccagaagcgtcagatgttacaactgcaaccatccagaagctgccttttttcaggccccgactaagggagaacaagccatgacgctgtacttcatctgctgcaacccaagctgcgggcacaggtggagggactgagaaggatctggcttggtcttcgctgcaaacctgccgtattgttagcctatcacataaatattggaggtaccagta

SEQ ID NO: 85484 - DNA, 506 bp, Zea mays
atggaagaagcattgagtattgaaaagatagtaatgctatacccgttcggaattcccgggtcgacccacgcgtccgctgattgccccataccttacatcaatgatagcttcagtatgtgaaaacccagctctgcagcgctataggctccaacaagcaatcgcagcaagcaacatacctttatcacccttgatgtttcaacaatcgccagccctatctttggtgcagtcattggtacaaaccatcagggcacagcagctgcagcaactcgtgctacctgtgatcaaccaagtagctctggcaaacctttctccctactctcagcaacaacaatttcttccattcaaccaactgtctacactgaaccctgctgcttatttgcagcaacaactattaccattcagccagctagctactgcctactctcagcaacaacaacttcttccatttaaccaattggccgcactgaaccccgctgcttatttgcagcagcaaatactactaccat

SEQ ID NO: 85485 - DNA, 547 bp, Zea mays
  unsure (1)..(547): unsure at all n locations
ggttntaggagtgtgttatgaagggggggagaaatagtaatactcttcggaattcccgggtcgacccacgcgtccgtgattaccaaggctgcgaagaagggccagatgccgtcgcagattggtgttctgctccgtgaccagcacggcatcccgcttgtcaagagcgtgactggtagcaagatcctccgcatcctcaaggcccatgggttggcgccggagatcccggaggatctctacttcctcattaagaaggccgtggcgattaggaagcattctgaagagggaaccaggaaaggaccaaggacttccaaaattcaagacctcaattctttggttgaaaagccaagaatccaaccggctctggcccggttcttccaggcgtaccaagaagctcccacccacctggaagtacgagtcaaccacggcgagcactctggtggcctaagtgatatcctctgatggcttggtctttagcacctatgagcttgttctagatatgaatttatgtaattcttgttatgtctggagctggttagatggacaagga

SEQ ID NO: 85486 - DNA, 527 bp, Zea mays
  unsure (1)..(527): unsure at all n locations
nggtgaggaggatcntgtaaggggggagagagtatgctatactcgttcggaattcccgggtcgacccacgcgtccgctcgggatgaccttcagaaatagtggtatgttcttctaaaggacaagaacatgctaatgacacagcgtcaaatgctgcattcagagagcatgaggttcccaaatccagaacgaatttccaaggtaaagaaatcaatgtgccggataaagcatgtcttgactgagagggctatagcggagcccgatccaaggagatcttcggaaatgaagcggatgataaatgccctgtgattcactcacaggcattctcccttgggacttttgatggtacttattagaaagatctgctgccttctgttgtatctctatcccataagaactgtgagaccaaatcttttcgatgcccatggtatggtagcaaaaattagactntaactgatccgatccataactagaaaatgcgcaatctgaaggaaactaaaaaagggcggcccctctaagagatccagctt

SEQ ID NO: 85487 - DNA, 524 bp, Zea mays
  unsure (1)..(524): unsure at all n locations
gttaagtatgattgttaaggggaagagagagtatgctctactcgttcggaattcccgggtcgacccacgccgtccggccaagccttcggaaaccggttggaccacaagccaattctaagggggtttacattggcccgaccgggatttaccggttccttgacctacttaaggggaaagtttggaatccaaacatctacataacggaaaacggaatggaccaacctggaaacttgacccgagaccagtacctgcgcgacgccacgagggtgcggttctacaggagctacatcggccagctgaagaaggccatagaccagggagcgaacgtggctggctacttcgcctggtctctcctcgacaacttcgagtggctggcagggtactcgtccaagttcggcatcgtctacgtggacttcaacacgctcgaacgccacccgaaggcgtcggcctactggttcagggacatgcttcagaagcattgagatctccagagccgagcctgagcacgngaagtaccattttgt

SEQ ID NO: 85488 - DNA, 505 bp, Zea mays
  unsure (1)..(505): unsure at all n locations
gaaagggtatcttgtaccggtctcggaattcccgggtcgacccacgcgtccgcagaaacacaccaagcgaagcgcactagcaacgacctaacaacaatggctaccaagatattagccctccttgcgcttcttgccctttttgtgagcgcaacaaatgcgttcattattccacaatgctcacttgctcctagtgccattattccacagttcctcccaccagttacttcaatgggcttcgaacacctagctgtgcaagccaacatgcaacaacaagcgcttgcggcgagcgtcttacaacaaccaattgcccaattgcaacaacaatccttgccacatctaacaatacaagccatcacaacgcaacagcaacaacagttcctaccagcactgagccacctagccatggtgaaccctgccgnctactttgcagagcagctgcttgcatccaacccatttgctttggcgaacgtagttgcaaacccgcaccaccaacagtttcaacagt

SEQ ID NO: 85489 - DNA, 528 bp, Zea mays
ggggaagaatctgtattatagaaggggagaggaagagtatgcttctaccggtccggaattcccgggtcgacccacgcgtccggcaaatttcacttgtgctgtcaaagactatcttgtcttatgttatgtctctaggcttttgttacaactacccaagttttgagtttttgagatgtggctatggcatgaactcaaaccatcttatgagggtgaaacctgtttctaatttctatattgttgctgttcattaaaaaaaaaaaaaaagggcggccgctctagaggatccaagcttacgtacgcgtgcatgcgacgtcatagctcttctatagtgtcacctaaattcaattcactggccgtcgttttacaacgtcgtgactgggaaaaccctggcgttacccaacttaatcgccttgcagcacatccccctttcgccagctggcgtaatagcgaagaggcccgcaccgatcgcccttcccaacagttgcgcagcctgaatggcgaatgggacgcgccctgtagcggcgcatt

SEQ ID NO: 85490 - DNA, 538 bp, Zea mays
  unsure (1)..(538): unsure at all n locations
ggtgagtttnagaggttgttatgatggggggaaagtagtctctaccggtccggaattcccgggtcgacccacgcgtccgagaaggccttcacagcagcctgagtttatagactatgttccatgagtagtctatagaatgtctttttaattcaaaagaaatctctcttctaggctggtgcttttcgactataatttggagattgttccatgtccgtgcaatcatctgaacatgttactacttattgtaccttgtcgtgcaaagttttgctaagatctctattgtttcatgtcttctgataaaaaaaaaaaaaaaaaaaaaaaaaaaaaaaaaaaaaaaaaaaaaaaaaaaaaaaaaaaaaaaaaaaaaaaaaaaaaaaaaaaaaaaaaaaaaaaaaaaaaaaaaaaaaaaaaaaaaaaaaaaaaaaaggggcgccctttttaagggtcccaagtttacttccccgtccttgcaacttcaaaccttttttatggggcccccaaaattaaattcccgggccgtctttttacaacgtggggc

SEQ ID NO: 85491 - DNA, 525 bp, Zea mays
  unsure (1)..(525): unsure at all n locations
aggttagtagctgtctgatggagagggagatagagatgctctaccggtctcggaattcccgggtcgacccacgcgtccgagcaagaagaaggctttcacaaagtatgctctcaaatatgaaaatgatgctggcaagaaggaaattcagctgcagcttgagaagatgaagaaatatgcttctgttatccgtgtcattgctcatacccagattaggaagatgaagggtttgaagcagaagaaggctcacctgatggagattcaggtcaatggtggtaccattgctgacaaggtggactatggctacaaattctttgagaaagaggtccctgttgatgctgtcttccagaaggatgagatgattgacatcattggtgtgaccaaggggaaaggttacgaaggtgtggtcactcgttggggtgtcacccggcttccccgcaagacccacaggggtctccgcaaagttgcttgtatcggtgcatggcatccggctagggtctcctatacggntgcccgagctggtcagaa

SEQ ID NO: 85492 - DNA, 471 bp, Zea mays
tgtgaggtactactcgttcggaattcccgggtcgacccacgcgtccgctaggaagcaagggacaccaccggcattgcagccaagatgcttgcattggtcgctctgctactctttggcagcgcactatgcgaccatattccaggcacttgccaccagtcatgccattgggtaccatgaacccatgcatgcagtactgcatgatgcaacaggggcttgccagcttgatggcgtgtccgtccctgatgctgcagcaactgttggccttaccgcttcagacgatgccagtgatgatgccacagatgatgacgcctaacatgatgtcaccattgatgatgccgagcatgatgtcaccaatggtcttgccgagcatgatgtcgcaaatgatgatgccacaatgtcactgcgacgccgtctcgcagattatgctgcaacagcagttaccattcatgttcaacccaatggccatgacga

SEQ ID NO: 85493 - DNA, 511 bp, Zea mays
  unsure (1)..(511): unsure at all n locations
gagggggagagaatctgaaatatgtgaaagagggagtagtgttatactcgtctcggaattcccgggtcgacccacgcgtccgctcgtagagagaaggaaaaatatccttaaaccctagctcccgatctcgatggcgaaccctcgcgtcttcttcgacatgaccgtcggcggcgccccggcgggccggatcgtgatggagctgtacgccaacgaggtgcccaagaccgcggagaacttccgcgcgctgtgcacgggcgagaagggcgtgggcaagtccgggaagccgctccactacaagggctccaccttccaccgcgtcatccccgagttcatgtgccagggcggcgacttcacccgcggcaacggcaccggcggcgagtccatctacggcgagaagttccccgacgagaagttcgtgcgcaagcacaccgnccccggtgtgctctccatggccaacgccgggcccaacaccaacggctcccagttcttcatctgcaccgtcgcgacccct

SEQ ID NO: 85494 - DNA, 508 bp, Zea mays
ggtttgagaagctgtataagtggggaagggggagtggtatactcgtccggaattcccgggtcgacccacgcgtccgcggacgcgtgggcggacgcgtgggtcgtagagagaaggaaaaatatccccaaaccgtagctgccgatctcgatggcgaaccctcgcgtcttcttcgacatgaccgtcggcggcgccccggcgggccggatcgtgatggagctgtacgccaacgaggtgcccaagaccgcggagaacttccgcgcgctgtgcacgggcgagaagggcgtgggcaagtccgggaagccgctccactacaagggctccaccttccaccgcgtcatccccgagttcatgtgccagggcggcgacttcacccgcggcaacggcaccggcggcgagtccatctacggcgagaagttccccgacgagaagttcgtgcgcaagcacaccgtccccggtgtgctctccatggccaacgccgggcccaacaccaacggctcccagttcttcc

SEQ ID NO: 85495 - DNA, 506 bp, Zea mays
  unsure (1)..(506): unsure at all n locations
ngggttagagcatgtggtctgattgggcttggagacgactaatactggtccggaattcccgggtcgacccacgcgtccgcccacgcgtccgcttgtccacgaagaatgggctgggtttgcacctttggaagtgggagctcctcgtgttcgtgctcatctgcgggcgtcttgtcttcggatgggtcattaagattgccgtcttcggtgtcgaacgcaacttcttgcttaagaagcccgtgctctactttgggtatggagtgcccaacgccgtgcaaaacgcgctcttgctcggcctggtgctcgcctcttggcacttcttgtttgacgagaatgtccagcaagagacgaactctccagtactgccctatgtgacgaaggtactattctgctttcttgttgccacgctcatccgccttgtcaagacattgctgctgaaggtactggcctnctccttccatgtctcgacgtactttgatcggattcaagaggcattgttcaatcaatac

SEQ ID NO: 85496 - DNA, 544 bp, Zea mays
  unsure (1)..(544): unsure at all n locations
nggaggagggggggggttnngagaggattgttagggggaagggataaagatatactggttcggaattcccgggtcgacccacgcgtccgctcaccaagagcttaccacagaccagagctcgcatggaaggaattctgatcaggagtctgaacccaaccgaatcctcttagttactatccaccacatgatctatcctataacggtggaggttctacatcaagtattcaaagcttatggatttgtggagaagattgtcacatttcaaaagtcagctggttttcaagctcttattcagtttcactcgcgccaaagagctgtggaagcatttggttcttgcatggaaggaacatatatgatggttgctgccagctagatattcaatattcaaatctcagtgaactgcaagtncattacaacaacgaccgatctagagatttcacaaatncatcattacctacagaacaacgccctatggcctctcagcaagcttattctgatccagctaatctctatgcctttcaacagctggaggctcatatgcaca

SEQ ID NO: 85497 - DNA, 524 bp, Zea mays
ggggaggaaggtctgtaaatgaagaatatagtattgctatactcgttcggaattcccgggtcgacccacgcgtccgggcgttcaagtctttccagagataatggttcctcttgttggaacaccgcacgaattgggacatcaggtggcccttatccgtcaagtcgctaacaaagttttcaccagtatgggtaaaactattgggtacaagatcgggacgatgattgagattcccagggcagctctagtggctgacgagatcgcggagcaggctgaattcttctcctttggaacgaacgacctcacgcagatgacctttggctacagcagggatgatgtggggaagttcatcctcatttatctggctcagggcatcctccagcatgaccccttcgaggttctcgaccagagaggagtgggcgagctggttaagctcgctacagagaggggccgcacagctaggcctaacttgaaagtgggcaatttgggacaacattgtggagagccttcatacggtggtttcttcg

SEQ ID NO: 85498 - DNA, 530 bp, Zea mays
  unsure (1)..(530): unsure at all n locations
ngagtnaagtattgttttagaggggagggaagatagtgtgtaccggtccggaattcccgggtcgacccacgcgtccgcccacgcgtccgcggacgcgtgggcaacagttcgacatagtcagttggttgaatggaagcagctgttgcaagtaggcagcagggtttgccacaactagctgagtcagagctggtacaatctgttgcaacaattgttgttgcaggtatgtaggtgcattggccacagcgagcgggctagatgaaagcagttgttgctgttgtaggtaggcggcagggttcaccatggctagttgactgagcgctggcagaaactgttgcagctgttgttgtggctggtttgcaactacgtttgccagagcaagtgggtttgatgcaagcaactgctgttgcaagtaggcggcagggttcaccatggctaggtggctcagtgctggtaggaattgttgttgctgttgcgttgcgatcgcgagcggccgctctagaggatccaagcttacgtacgcgtgcatgcga

SEQ ID NO: 85499 - DNA, 502 bp, Zea mays
  unsure (1)..(502): unsure at all n locations
agtatagaagattgttaaggaaagggaatattgttatactcgtccggaattcccgggtcgacccacgcgtncggccctggttcttcaacaaccggcaggcctaatacagcaggtacccttggggcatttggtgggaccaaacataaaggacaacaactacaacaacttgtgctaagaaaccttgctgcctactctcagcaacagcagtttcttccattcaaccaactggctgcattgaactctgctgcttatttgcaacaacaactaccattcagtcagctagctgctgcctacccccagcaatttcttccattcaaccaactggcagcattgaactctgctgcttatttacaacagcaacagctaccaccattcagccagctagctgatgtgagccctgttgccttcttgacacaacaacagttgttgccgttctacctgcacgctgcgcctaacgctggcaccctcttacaactgcaacaattgctgccattcaaccaac

SEQ ID NO: 85500 - DNA, 500 bp, Zea mays
gggagagattggtaggtgagggggagatatgttatacccgtccggaattcccgggtcgacccacgcgtccggaccaagatattttccctccttatgctccttgctctttctacatgtgttgctaacgcgacaattttccctcaatgctcacaagctcctatagcttccctttttcccccataccttccatcaattatagcttcagtatgtgaaaacccagctcttcaaccatataggcttcaacaagcaatcgcagcaagcaacatacctttatcgcccttgttgtgtcaacaatcgccagccctatctttggtgcagtcattggtacaaaccatcagggcacaacagctgcagcaactcgtgctacctgtgatcaaccaagtagctctggcaaacctttctccctactctccgcaacaacaatttcttccattcaaccaactgtctacactgaaccctgctgcttatttgcagcaacaactattaccatttagccagct

SEQ ID NO: 85501 - DNA, 528 bp, Zea mays
  unsure (1)..(528): unsure at all n locations
nggtnaagggctttnataagaggggagagggataaaggttatactcgtccggaattcccgggtcgacccacgcgtccgggcctagcgccgcacccgccgncgcatcagccatcagccatggcgatggccgctcgcctcgtctcgcgctcccgtcagctacattcggttcaagcagcttttgcgaatggaggtgccactcaagttcgctcctttgccaaggatgcagctccagctgaccgtcctcctgttggtggggatgatctcctgaagggcatattctttgaggtaaagaagaagtttgagacagctctcggcgtccttaaaaaggaaaagatcactattgatccagatgacccagcggcagtttctcaatatgctcaagtcatgaagactgtaagggaaaaggcggatcttctttctgattctcaaaggattaaatataccattgagaccttcaccaagggccttcctgatgcacggacttacattgatactcttcaacagcttaaaattaagagtggtcctatt

SEQ ID NO: 85502 - DNA, 529 bp, Zea mays
  unsure (1)..(529): unsure at all n locations
gggggaagaggtctgtctatgaggagaaagtatgctctactcgntcggaattcccgggtcgacccacgcgtncggcacaccaatcgcccacaagagctcgcaggaaaggtcgaacnctaacttttgccgggggggggagaagatgatctacgacgtgaactcccccctcttccgttccttcctcagccagaagggcggcgccgacaagaggaaaatggaggagcataaaccaaaggagcagaggcccaaggctaacgagaacaagcctgtgatgaacgaatgaatatctccagaagctttgttcaatgtgcaaccaagtccgatgtccgtctgctctggtcagcttaaaaccaacgcttccaataatcctattggtgtcttagtttccccttatagtgttatttgctcggcttgaacatggcaacggaaatgaaacttgaactatggtactgtcatcaatttgagacccccatgattgacaacttttgtgcagctctcctgttacagccgtcgtggttggtacagaatt

SEQ ID NO: 85503 - DNA, 532 bp, Zea mays
  unsure (1)..(532): unsure at all n locations
nggggttaagagccttngctcatgacggaaggaggaagtatgctactactcgtccggaattcccgggtcgacccacgcgtccgcgcagcgtgatgggtttcaaggatactccaaggttcaatttttctttccaggagttcggaccgaagattataatacccctggagaatctgcggagtatcgagctcctacacctgctgttggaacaccaaaacaaagaaatgatgctggagatgatgataatgatgatgatgatgatgaacctcctcttaatgaagacgacgacgaggagttagatgaccttgagcaaggggaggatgaacctaacacacaacatcttgtacttgcacaatttgataaagtgtcaaggaccaagaatcgttggaagtgcaccttgaaggatggaatcatgcatttgaatggcacggatgtcctttttaacaaggcgacaggtgagtttgatttttgattttttggatgaagatgagctaatttaaaaagcactgtatggacatatctttggcttgagaaa

SEQ ID NO: 85504 - DNA, 532 bp, Zea mays
  unsure (1)..(532): unsure at all n locations
aggggaagaggtccgttaggggggggggggtagagtatgctctaccggtccggaattcccgggtcgacccacgcgtccggctgcttcgtcggcggcctcgcctgggccacggacgaccactccctccacaacgcctgtgagcacctacggcgaggtcctcgagtccaagatcatcctcgatcgggagacgcagaggtcccgcggcttcggcttcgtcaccttctccacggaggaggcgatgcggaacgccatcgagggcatgaacggcaaggagctggacggccgcaacatcaccgtcaacgaggcccagtcccgcggcggccgtggaggcggcggcggtgggtacggtggtggccgtggaggcggcggctacggcggtggcgggcgccgtgatggcggcggcggctacggcggtggcggcggctacggtggcggcggcggctacggtggtggtggcggcggctacggcggtggcaaccgtggcggcggctacggcaactncgacgggaactggaggaactgagcgggtggn

SEQ ID NO: 85505 - DNA, 522 bp, Zea mays
agaatggtttgtatgagaagggggtgtaagagaatgctgtaccggtccggaattcccgggtcgacccacgcgtccggttcgctctcctagctctttgtgcaagcgccactagtgcgacccatattccagggcacttgccaccagtcatgccattgggtaccatgaacccatgcatgcagtactgcatgatgcaacaggggcttgccagcttgatggcgtgtccgtccctgatgctgcagcaactgttggccttaccgcttcagacgatgccagtgatgatgccacagatgatgacgcctaacatgatgtcaccattgatgatgcagcatgtcaccaatggtcttgccgagcatgatgtcgcaaatgatgatgccacaatgtcactgcgacgccgtctcgcagattatgctgcaacagcagttaccattcatgttcaacccaatggccatgacgattccacccatgttcttacagcaaccctttgttggtgctgcattctagatagaaatatttgtgttgtac

SEQ ID NO: 85506 - DNA, 506 bp, Zea mays
  unsure (1)..(506): unsure at all n locations
gaggtaggaggcttgatatctgcagcgagagtagtgctctaccggtccggaattcccgggtcgacccacgcgtccgtggcgtcgtcgtctagcagcagccaccggcgnctcatcctcgcagccgccgtcctgctctccgtgctcgcggctgccagcgccagcgccgggacctcctgcgtgccggggtgggccatcccgcacaacccgctcccgagctgccgctggtacgtgaccagccggacctgcggcatcgggccgcgcctcccgtggccggagctgaagaggagatgctgccgggagctggcggacatcccggcgtactgccggtgcacggcgctgagcatcctcatggacggcgcgatcccgccgggcccggacgcgcagctggagggccgcctagaggacctgccgggctgcccgcgggaggtgcagaggggattcgccgncaccctcgtcacggaggccgagtgcaacctggccaccatcagcggcgtcgccgaatgccc

SEQ ID NO: 85507 - DNA, 499 bp, Zea mays
aggtttaggtgtttatgaggaggggagtattgtcatcccgtccggaattcccgggtcgacccacgcgtccgagaccaacaagcaacatagaaagtggaatccagtagcaacaacagagcaacaatggcgaccaagatattttccctccttatgctccttgctctttctgcatgtgttgctaacgcgacaattttccctcaatgctcacaagctcctatagcttcccttcttcccccataccttccatcaatgatagcttcagtatgtgaaaacccagctcttcagccctataggctccaacaagcaatcgcagcaagcaacatacctttatcacccttgttgtttcaacaatcgccagccctatctttggtgcagtcattggtacaaaccatcagggcacagcagctgcagcaactcgtgctacctgtgatcaaccaagtagctctggcaaacctttctccctactctcagcaacaacaatttcttccattcaaccaac

SEQ ID NO: 85508 - DNA, 505 bp, Zea mays
  unsure (1)..(505): unsure at all n locations
nggggagatggtgtgttagtggggaagggagaaagatatcctcgtccggaattcccgggtcgacccacgcgtncggcctggggtgtataagggggtcttggactccgacgctggactatttggtggatttagcaggatccatcacgcagccgagcacttcaccggcgactggtcgcatgataataggccatattcattctcggtttatacaccaagcagaacatgtgtcgtctatgctccagtggagtgatagcggggtactcgttgctgcgcggcatgtgtggggctgtcgatgtgaggaaaaaccttcttccaaaaccggcagatgcatgcatgcatgctacaataaggttctgatactttaatcgatgctggaaagcccatgcatctcgctgcgttgtcctctctatatatttaagaccttcaaggtgtcaattaaacatagagttttcgtttttcgctttcctaaaaaaaaaaaaaaaagggcggccgctctagaggatcc

SEQ ID NO: 85509 - DNA, 529 bp, Zea mays
  unsure (1)..(529): unsure at all n locations
aggggagagtattgtatggaaggaggggaaaaggtatactcgttcggaattcccgggtcgacccacgcgtccgcccacgcgtncgcggacgcgtggggcatggcggaagcagaattattatattttgggccaatcattgccattaacattgtcttcaatgtacactggtattggcggcgagatgacggatcccaatcggcgtcaatctatctgagcttaaacccttcacgacaagaggcacacgatcgccagcgctgcgccgatagtccaagatgcagtgtctcttgctgcgttgntcttctgatctgcangcggttggccgtccgcgttcggcgaaggagctggggtagtgtcctctggcgatggcgctgggcgacgcctgggcgcaggtgcagtcaccggagcacgggcaagttggggtgtgggtgcattttcaagccaacgcgaccgccaaaccggtacaagggcangccgacggcgagaccggcgcaagggcaagtgtaaggtcatgttcaagccaagaagccgg

SEQ ID NO: 85510 - DNA, 495 bp, Zea mays
gttagtgtatactcgttcggaattcccgggtcgacccacgcctccggaggaattttcctttattttaaaagggttgttaccggaagaatgccaccttcaaccttgcggggatggaagcctgttaacgtgtcaactctggatgtgacctcaaggcctccgtgatgatgggagcggacacctatgaaactgaagaagaagcttcaaagctactgttagctgggaaggtcccagttggaataggaaggaacacaaagataaggaactgtatcattgacatgaatgctaagattgggaagaacgtggtgatcacaaacagtaagggcattcaagaggctgatcacccggaaaaaaggtactaccttagggcttgaaatctggtgaacctgaaaaatgccaccattaaccaatggtccggcatatataatcggttgcttttccttttccaaaccaggaccttccattgtaatggattcattgaacgggtaccctgggttt

SEQ ID NO: 85511 - DNA, 528 bp, Zea mays
  unsure (1)..(528): unsure at all n locations
agtnaagagctgtcttatgaggggggggaaaagtatgctctaccggtctcggaattcccgggtcgacccacgcgtccgaggacatcactgcccaaatcatatctgctagtatagcgggtgatatggttcttgcttgggcctactcgcatgagttgccacgatatggtcttgaagttggtctgaccaactatgcagctgcctactgcactggccttctgttggctcgccgtgtgctcaagatccgtggttcggatcaggagtacgagggcaatgttgatgccactggtgaggacttctctgatgagccagctgatgagaggaggcctttccgtgctctcttggatgttggccttatcaggactacaacaggtaaccgtgtctttggtgccctcaagggagcattggatggacgcctggatattcctcacagcgagaagaggtttgctggattcaagaaagacgacaagcaattggatgctgatacccaccgcaggtacatctatggtggccatgttgctgactacatga

SEQ ID NO: 85512 - DNA, 530 bp, Zea mays
  unsure (1)..(530): unsure at all n locations
gggaaaagcatctgctaaggaggggggggaggaaaggtatngctcgtaccggtctcggaattcccgggtcgacccacgcgtccgcccgcgtccgctagccctagccgccgtccgccgacttcatcgtcgccgtcgtctagacgtcttcacgcactggaaaggttaaagtccgacatcaatggcgaagcatcatcctgatctcatcatgtgccggaagcagcctggcatcgcgattggccgcctttgcgagaaatgtgatggcaagtgtgttgtctgcgactcgtacgtgcgcccatgtacgcttgtccgggtctgcgacgagtgcaattatggttcgttccagggaaggtgtgtgatctgtggaggagtcggcatctcagacgcttactactgcaaggagtgcacccagcaagagaaggaccgggacggttgccccaagatcgtgaatctcggaagcgccaagacggatctcttctatgagcgcaagaagtatggttttaagaagagatgaccgagaagatggagctgtg

SEQ ID NO: 85513 - DNA, 531 bp, Zea mays
  unsure (1)..(531): unsure at all n locations
nggataaagacttgtcgtcacgcataagcacgtttatgtatngctctaccggttcggaattcccgggtcgacccacgcgtccggaaagtggaatccagtagcaacaatagatcaacaatggagaccaagatatttggcctcgttatgctccttgctctttctacatgtgttgctaacgcgacaattttccctcaatgctcacaagctcctatagcttccctttttcccccataccttccatcaattatagcttcagtatgtgaaaacccagctcttcaaccatataggcttcaacaagcaatcgcagcaagcaacatacctttatcgcccttgttgtgtcaacaatcgccagccctatctttggtgcagtcattggtacaaaccatcagggcacaacagctgcagcaactcgtgctacctgtgatcaaccaagtagctctggcaaacctttcgtcctactctccgcaacaacaatttcttccattcaaccaactgtctacactgaacccttgtgcttatttgcagcaacan

SEQ ID NO: 85514 - DNA, 503 bp, Zea mays
  unsure (1)..(503): unsure at all n locations
ggagtagagccttggtatgaggaggagagtatgctataccggttcggaattcccgggtcgacccacgcgtccgggcttctcctccccctccggttcgggttcgggttcgtgaggttctccggagttcgggttcgtgggtgagcggatcgagatggcggcgtcggatgttgagtaccgctgcttcgtcggcggcctcgcctgggccacggacgaccactccctccacaacgccttcagcacctacggcgaggtcctcgagtccaagatcatcctcgatcgggagacgcagaggtcccgcggcttcggcttcgtcaccttctccacggaggaggcgatgcggaacgccatcgagggcatgaacggcaaggagctggacggccgcaacatcaccgtcaacgaggcccagtcccgcggcggccgtggaggcggcggcggtgggtacggtggtggccgtggaggcggcggctacggcggtggcgggcgccgtgatggcngtggcggcn

SEQ ID NO: 85515 - DNA, 502 bp, Zea mays
  unsure (1)..(502): unsure at all n locations
nggttaaggattgttagaggatttgggaataaagtatcctcgtccggaattcccgggtcgacccacgcgtccgggcgactatcgcctccgcgattcccaccctcgcgagcgtgccgatgctggcgtgggccaaggccaacatcaaccccaccggccaagcgctcatcgtctccacggtggccgggatggcctacttcatcgccgccgacaagaagatcctgtcgctggcgaggcgccactcgttcgaggaagctccggagcacctcaagaacaccttcttccagggcaccggacgcccccacccggctttcttcaagccatgatgagatcagatatatatatgacacatccggcgacctcatcagtcatagaacccaagcagccagtcagtcagtcagcacaagcacaagcaccaaagatgatgccattcaagtctgcatggttgcatttataaaaaataaactgctangctgatgacgcgctctaatataagctagccgtc

SEQ ID NO: 85516 - DNA, 508 bp, Zea mays
  unsure (1)..(508): unsure at all n locations
atttaaatatgcttcgtttatgtaggtggggagagagagatgatgcttctccggatttcccgggtcgacccacggttccgggaccccttggcaccaaccccaattttacctataaattcattcagagagccctccagcgggggattaaatggcttcttcgctaaccaaaagccacggcggcttaatctttgaagccgcggccttgttttccgtcctagcggttgcaaacaccagtgccggaacctcttgcttgccgagctgggccatccggcacaacccgctcccgagctgccgctggtacatgaccagccggacctgcggcatcgggccgtgcctcccgtggccggagctgaagaggagatgctgccgggagcttgcggacatcccggcgtactgccggtgcacggcgcttagcatcctcatggacggcgcgatcccgccgggcccggacgcgcagctggagggccgnctagaggacctgccgggctgcccgcgtaagtgcagaggg

SEQ ID NO: 85517 - DNA, 532 bp, Zea mays
  unsure (1)..(532): unsure at all n locations
agagttntaggagtatctgttattgaggagatagtattgctatactcgttcggaattcccgggtcgacccacgcgtccgcggacgcgtggggtggaatccagtagcatcaacagagcaacaatggcgaccaagatatgttcgctccttatgctccttgctctttctgcatgtgttgctaacgcgacaattttccctcaatgctcacaagctcctatagcttcccttcttcccccataccttccatcaatgatagcttcagtatgtgaaaacccagctcttcagccctataggctccaacaagcaatcgcagcaagcaacatacctttatcacccttgttgtttcaacaatcgccagccctatctttggtgcagtcattggtccaaaccatcagggcccagcagctgcagcaactcgggctacctgggatcaaccaagtacttttggcaaaccttcttcctaattttaagaaccaccatttctttcaatcaacccaatggctacacttgaccctgtgtggtatttgcaacaac

SEQ ID NO: 85518 - DNA, 526 bp, Zea mays
  unsure (1)..(526): unsure at all n locations
gatgaggttttgagactcacctagaacatatgatgctaggctcgttccgaatcggagggtcgacccacgcgtccgcggacgcgtgggcggacgcgtggggagccgtgctcgcatgtgtgttaagcccagccaagacaagtcaagtcggagcccgcaggtgtcgacaccgcgcgccgggagccggaagaagggtggaccatgagcgcgaccgggcgagccccgtgcggcctgccgcgcatcggcctgggcacggcggtgcagggcccgcggccggaccccgtccgcgccgcggtgctgcgcgccatccagctcggctaccgccacttcgacacggccgcgcactacgccaccgaggcgcccatcggggaggccgccgccgaggccgtgcgcacggngctcgtcgcctcccgcgaggacctcttcgtcacgtccaaggtctggtgcgccgacgcgcaccgggacagggtgctcccggccctccgccggacgctcagcaatctccagatggaatacgtggacctgtact

SEQ ID NO: 85519 - DNA, 529 bp, Zea mays
  unsure (1)..(529): unsure at all n locations
gagtttaagagtttctgagcctagcnatatatgcaagctctaccggttcggaattcccggctcgacccacgcgtncgcggacgcgtggggaaccacaccaagctaagcgcactagcaacaacctaacaacaatgggtacggagatattatccctccttgcgcttcttgcgctttttgcaagcgcaacaaatgcgtccattattccacaatgctaacttgctcctagttccattattccacagttcctcccaccagttacttcaatggccttcgaacacccagctgtgcaagcctataggctacaacaagcgattgcggcgagcgtcttacaacaaccaattgcccaattgcaacaacaatccttggcacatctaacaatacaaaccatcgcaacgcaacagcaacaacagttcctaccagcactgagccacctagccatggtgaaccctgtcgcctacttgcaacagcagctgcttgcatccaacccacttgctctagcaaacgtagttgcaaaccagcaacaacaaca

SEQ ID NO: 85520 - DNA, 517 bp, Zea mays
  unsure (1)..(517): unsure at all n locations
ggaatggtttgctttatcgttagagtagtgtatactctaccggttcggaattcccgggtcgacccacgcatccttccacgcttccgaaaacgcacaatcgcatagcaacttccaccacctaacaaccgtgggttcccagaatataatccttcctgggcctcctggcccttttggcaagccccacaaaatgcgntcaatatttcacaatgctcacttgctcctagttccattattccacagttcctcccaccagttacttcaatggccttcgaacacccagctgtgcaagcctataggctacaacaagcgattgctgcgagcgtcttacaacaaccaattgcccaattgcaacaacaatccttggcacatctaacaatacaaaccatcgcaacgcaacagcaacaaccgtntctaccacactgagccacctacccattgtgaaccctgttgcctatttgcacaacaacttgttgcattcaacccattgctctaacaaacgtaattgaaacccagcaca

SEQ ID NO: 85521 - DNA, 526 bp, Zea mays
ggaaatggtatctgattatagaaaagaaggtatagtaaactctatcggttcggaattcccgggtcgacccacgcgtccgattgagaccaacaagcaacatataaagtggaatccagtagcaacaatagagcagcaatggcgaccaagatattttccctccttatgctccttgctctttctacatgtgttgctaacgcgacaattttccctcaatgctcacaagctcctatagcttcccttcttcccccataccttccatcaattatagcttcaatatgtgaaaacccagctcttcaaccatataggcttcaacaagcaatcgcagcaagcaacatacctttatcgcccttgttgtttcaacaatcgccagccctatctttggtgcagtcattggtacaaaccatcagggcacaacagctgcagcaactcgtgctacctctgatcaaccaagtagctctggcaaacctttcttcctactctcagcacccaccatttctttcatttcaacaactgtctacactgaacc

SEQ ID NO: 85522 - DNA, 523 bp, Zea mays
  unsure (1)..(523): unsure at all n locations
aggcagtggttttnccatggagccctaagtattctannctcnntggnttcggattccgggtcgactcacgcgtccgcccacgcgtccgcccacgcgtccgcacacagaagcggcggcggcggagcaaacgcaggcgaaggcgagggtgtgagggaaggagcaccagccatggtgcacgtcaacttctaccgcaactatggtaagacgttcaagaaaccaaggcgtccttatgagaaggagcgtcttgatgctgaactgaagctggtcggtgagtatgggctgaggtgcaagcgtgagctttggagggtccagtatgcactgagcaggatccgtaatgctgcaaggcacttgctcacccttgacgagaagaacccncgtcgtatctttgagggtgaggcgcttcttcgccgcatgaaccgctatgggctgcttgctgagggtcagaacaagctggataatggtcttgccttaaccgttgagaacttcttcgcagggcggttttaacaactggccttaaaggctc

SEQ ID NO: 85523 - DNA, 507 bp, Zea mays
  unsure (1)..(507): unsure at all n locations
ggggnagagaggtcngtaatggagagggagagtattgctatacccgtccggaattcccgggtcgacccacgcgtccgcagcccaccacacccgcgcctccgtaccatccgtcgccgccggcgcaccgcgatggctgcctccgccacggccgcgaggcctttcgccgggactgccgtcctgctcccgctctcggcgcggacgcggcctgccagggtcgccttgctctccctgattcctcctgctccggccctgcgccttgctctcaggcgcggcgcgtggctcccactcccggagcgcagccggtcggtgcggtgcctggcggctatgagcccggagatgcgggcgacgctggacaaggtcgtaggctccagcaaggtggtgctgttcatgaagggcaccaaggacttcccgcagtgcggcttctcccacaccgtcgtgcagatcctgcgctccctcgacgtgcccttcgagacgctcgacgtgctcgccaacgaggcgctccggcag

SEQ ID NO: 85524 - DNA, 506 bp, Zea mays
  unsure (1)..(506): unsure at all n locations
agtaaggggtttangctcgactcttgtacaatacagtatngctcgtaccgattcccgggtcgacccacgcgtccgcaaccatataggcttcaacaagcaatcgcagctagcaacatacctttatcgcccttgttgttgcaacaatcgccagccctatctttggtgcagtcattggtacaaaccatcagggcacaacagctgcagcaactcgtgctacctctgatcaaccaagtagctctggcaaacctttctccctactctcagcaacaacaatttcttccattcaaccaactgtctacactgaaccctgctgcttatttgcagcaacaactattaccatttagccagctagctactgcctactctcagcaacaacaacttcttccatttaaccaattggccgcactgaaccccgctgcttatttgcagcagcaaatactactaccatttagccagctagctgcagcaaaccgtgcttncttcttgacacagcaacagttgctgcn

SEQ ID NO: 85525 - DNA, 635 bp, Zea mays
  unsure (1)..(635): unsure at all n locations
aggatggagtgnntnnnnccgcttggcatgcctacagcnatgacctgcgtaccggttccggaaattacccggggtcgaaccacacgcgttccgcgggacgccgttgggcttacgcacacatcacatatgttgaagtcacacttacgcacactatcttaagcacgcagatggcgatgtccaagaatttttgggccatcctnntgccctccttgctnnctttcagncaagccgttgctaccnnngcgactannntattccacaatgcntnncacaacaatnnacctctctttccggtgaccagcnncgcgaagatnnttgaataccccannactatacaatnncctacaggctnnnacaaagaggccanntcgcagcaagggcattcttaaacggtcgtnntagcatnntgaccgnntccaacaaccccatatgnnncctattgcaacccaaccanntccttaatgggaatctanntatctcnncaaagaatcnnngcagcacaacanacctacccaacaaccagtnntgctntccannataatcananntcaagtagttnnngcagcgaacncttnnngctgcttacnctnncnnagcaacaaccannatttcttcccattttcaatcannactag

SEQ ID NO: 85526 - DNA, 497 bp, Zea mays
  unsure (1)..(497): unsure at all n locations
ngagaatgtatctgttttacccgaaaaatagtattgctacgtacgggtccggaattcccgggtcgacccacgcgtccgaagcaacatagaaagtggaatccagtagcaccaatagagcatcaatggagaccaagggattttccctccttatgctccttgctctttctacatgtgttgctaacgcgacaattttccctcaatgctcacaagctcctatagcttccctttttcccccataccttccatcaattatagcttcagtatgtgaaaacccagctcttcaaccatataggcttcaacaagcaatcgcagcaagcaacatacctttatcgcccttgttgtgtcaacaatcgccagccctatctttggtgcagtcattggtacaaaccatcagggcacaacagctgcagcaactcgtgctacctgtgatcaaccaagtagctctggcaaacctttctacctactcttcgcaacaacaatatcttccattcaaccag

SEQ ID NO: 85527 - DNA, 488 bp, Zea mays
aggagtattgaaaaggggacatagtatgcttctcccggtccggaattcccgggtcgacccacgcgtccgcccacgcgtccgagcacaatagtgtaccaacaatggcagccaaaatattttgcttcgttatgctccttggtctttctgcaagtgttgctaccgcaaccattttcccacaatgctcacaagctcctatagcttcccttcttcccccatacctctcaccagcggtgtcttcagtgtgtgaaaacccaattgttcaaccctacaggatccaacaggcaatcgcaacaggcatcttaccattatcacccttgttcctccaacaaccgtcagccctattacaagagttacctttggtccatttggtggcacaaaacatcagggcacaacaactacaacaacttgtgctagcaaaccttgctgcatactctcagcaacatcagtttcttccattcaaccaactggctgcattgaactctgctgct

SEQ ID NO: 85528 - DNA, 495 bp, Zea mays
  unsure (1)..(495): unsure at all n locations
gggaagtttctggctcagtcatattgcatngctanancatntnnggtccggaattcccggctcgacccacgcgtccgcggacgcgtgggaaatcacgttatacataactgcattgagtgtgtccccacggggcatattgcttttgtagtgtctgcttttcagggacaagttactagcctttcaatgcatacatatggctgccgtgtaattcagagaatctcgtatcactgcggtggtaactcacaacgtcagtgcataatatacgagatattacagtgcatgtgcatccttgcgcaggatcagtatggcaactatgttacactgcatgttctagaaagaggtatagctcatgacaggagccttattattactaaattcgcacgtcacgttgatactatgagccaagataaatatgcatcagatgtgatagagaagtgtnttcaacatggagatatagctgagcgggatcttatgatcagacggattgcggatcan

SEQ ID NO: 85529 - DNA, 491 bp, Zea mays
gggagctttgttctcgaaacgaaaatgactgcacgctcgtaccggtccggaattcccgggtcgacccacgcgtccgcggacgcgtggggtgttgctaacgcgacacatgtagaaagagcaaggagcataaggagggaaaatatcttggtcgccattgttgctctattgttgctactggattccactttctatgttgctaacgcgacaattttccctcaatgctcacaagctcctatagcttcccttgttcccccataccttccatcaattatagcttcaatatgtgaaaacccagctcttcaaccatatacgcttcaacacgcaatcgcagcaagcaacatacctttatcgcccttgttgtttcaacaatcgccagccctatctatggtgcagccattggtacaaaccatcatggcacaacagctgcagcaactcgtgctacctctgatcaaccaagtaactctggcaaacctttctccctactctcagca

SEQ ID NO: 85530 - DNA, 496 bp, Zea mays
  unsure (1)..(496): unsure at all n locations
gtgtaaggatctgctagagatgggggagttacagcatnactcgtaccggtccggaattcccgggtcgacccacgcgtccgcagatcagcaaagcggcagtgcgtagagaggatcgtcgaacagaacagcatgaagatggtcatcgttctcgtcgtgtgcctggctctgtcagctgccagcgcctctgcaatgcagatgccctgcccctgcgcggggctgcagggcttgtacggcgctggcgccggcctgacgacgatgatgggcgccggcgggctgtacccctacgcggagtacctgaggcagccgcagtgcagcccgctggcggcggcgccctactacgccgggtgtgggcagacgagcgccatgtaccagccgctccggcaacagtgctgccagcagcagatgaggatgatggacgtgcagtccgtcgcgcagcagctgcagatgatgatgcagcttgagcgtgccgctgccgccagcagcagcctgtacgagc

SEQ ID NO: 85531 - DNA, 510 bp, Zea mays
  unsure (1)..(510): unsure at all n locations
gggtttatgtnntnnnnnattgaancaatgaaccatagccatgctctaccggttcggaataccnggcggggaccaagcgtccgcgcacgcgtccgcggacgcgtgggttttgttttcaatttccatcccaagaaaacttgcgagggctacaaagtgggatgcgatttgcctgggaaatacagagtagccctggactctgatgctctggtcttcggtggacatggaagagttggccacgacgtggatcacttcacgtcgcctgaaggggtgccaggggtgcccgaaacgaacttcaacaaccggccgaactcgttcaaagtcctttctccggcccgcacctgtgtggcttattaccgcgtgaacacatcaggtgatgatgcacttaccaatgcattggagatattcaatacatctagtggagctcttcacttcattgcatctaacaatgactgtagtggtagagagtatgatatggaaagattatcagtgtttaagcatttccgattcgag

SEQ ID NO: 85532 - DNA, 501 bp, Zea mays
  unsure (1)..(501): unsure at all n locations
gaggaaagtgttttnngtaccgaccaggcgggaagagatagttattgcttcgtaccggattccccgggtcgacccacaccttcgcccacgcgttcgcgcacaccttcggccacgccttcgaaacatcttcgcttggttgaggatggaattgccccacttcctaattccggtggtttttaatatggccattctgaacctgttgggttataccctaccgctgtatctagtactaaagccccgtttgtttccttccaagattatataatccagctcgtggattatataagcacctattgacctgcttatagattatcataatctagatatccggattatataattcacctaataatctatattgcttgtttaactctcaatttatttaagctagattatataatatagatggtaaacaaacaacgactaaaacatattttctgcaacataaaatttctgagttcacaagttcaacacagagtacagaatattatatagattggc

SEQ ID NO: 85533 - DNA, 496 bp, Zea mays
tgaggaggtatctgattattgacagaggaagtaatgctcgtaccggtccggaattcccgggtcgacccacgcgtccgggaatacagtagcaacaatagagcaacaatggcggccaagatattgtccatccttgtgctccttgctctttctgcatgtgttgctaacgcgaccatttttcctcaatactcacaagctcctatagctgcccttcttcccccataccttccatcaatgaccgcttcagtatgtgaaaacccagcccttcaaccctacaggctccaacaagcaatcgcaacaagcaacttacctttatcacccctgttctttcaacaatcgccagccctatctttggtgcagtcattggtacaaaccatcagggcacaacagctgcagcaactcgtgctaccagtgatcagccaagtagctctggcaaacctttctccctactctcagcaacaacaatttcttccattcaaccaactgtctacactgaacc

SEQ ID NO: 85534 - DNA, 490 bp, Zea mays
  unsure (1)..(490): unsure at all n locations
tggaggattttctacagcaacacagtatgcatctactngttccgaattcccgggtcgacccacgcgttcgtcgcaatctccctagcaatctctagcagcagatcctcgtgcgaagcaaagcgctagggccgttcgtactgtcccgatggcccgcacgaagcagacggcgaggaagtccactggcggcaaggcgccaaggaagcagctggccaccaaggcggcgcgcaagtctgccccggcgaccggcggagtgaagaagccccaccgtttccgccccggcaccgtcgcgctccgggagatccgcaagtaccagaagagcacggagctgctgatccgcaagctgccgttccagcgcctggtgcgtgagatcgcccaggacttcaagaccgacctccgcttccagagctccgccgtcgccgcgctgcaggaggcgtccgaggcctacctcgtcgggctcttcgaggacaccaacctctgcgccattcacgcn

SEQ ID NO: 85535 - DNA, 490 bp, Zea mays
agagctttgtgacgagggaagggagaagagtatactcgtaccggtccggaattcccgggtcgacccacgcgtccgtgtagatgctgctaacatgcacatggagattggtagacgcatatacagagagaggttggaaacgagtgatcgtgatgctgacatggaacaaagacgggcatttcagaagttaatttatgtgtccaatcttgtctttggagatgcatctgtattcctacttccttggaaacgtctgtttggggtgactgattctcagattgacattgctatgagggaaaatgccaagaatttatactcggtgcagctcaagtctattggaagaggtcttgacatatgcacactcattgaagtaaggagagcacaacttgcatataaactgtctgatgagattgctgctgagatgttccgtgagcacgcgaagcagctagttcaagataacatttcatcagcattagacatcttgaagtcacgtatt

SEQ ID NO: 85536 - DNA, 494 bp, Zea mays
  unsure (1)..(494): unsure at all n locations
ggtnaaaaggcttngtacgaggggggggggagaagagtaagctcgtaccggtccggaattcccgggtcgacccacgcgtccgattctcatccccgacccccgcaccgcagcgtaaaccctagtccccggcggcgaccgggcggcctccgctgcgctctgactggtgcgcgtttagacgaggagctgcggcggccaagaccaatcgaccatggctacccgtatccagtttgagaacaactgtgaaattggtgttttctccaagctgacaaatgcttactgtctggtagcgattggagggtcagagaacttctacagtgcctttgaggctgagcttgcagatgccatccctgtggtcaagacctctattggtggcactagaataataggccgactttgtgttggaaacaagaatggacttctattgccacatactacaaccgaccaagagcttcagcatctgaggaattgcttgcctgatcaagtggtggttcagc

SEQ ID NO: 85537 - DNA, 519 bp, Zea mays
  unsure (1)..(519): unsure at all n locations
ggagtntttagagtgctctgttatggtcgatatggggggaaattgtcatnactcgtaccggtccggaattcccgggtcgacccacgcgtccgcccacgcgtccgcatcccgcctccaaacccgaactccaagtcgccccgcatcgatggcgcccaaggccgagaagaagcccgcggcgaagaagccggcggaggaggagcccgctgccgagaaggcgccggccgggaagaagcccaaggcggagaagcgtgtcccagcaggccaggcccgccgccaggaaggccgccagggaaagaagggcccggagaaaggccaggagaaccttgagaccttccaggaccaccttcttcaagggcctgaaccaggtccacccggccatgggcatttcctttaaggccaggtcctaaaggacctccttattaacgaccttttctagaagcttggcgcccaaggcgccaagcctgcgcgcggcaaccaggaggcccacttaacttcgcgagagacacaacttcggcgccc

SEQ ID NO: 85538 - DNA, 514 bp, Zea mays
  unsure (1)..(514): unsure at all n locations
agtnntaaaagatgtgatcataggaaagggggggatatagtaatactcgtaccggtccggaattcccgggtcgacccacgcgtccgcccacgcgtccgcccacgcgtccgaactagcaacatagaaagcacaatagtgtaccgacaatggcagccaaaatattttgcctccttatgctccttggtctttctgcaagtgctgctaccgcgaccattttcccgcaatgctcacaagctcctatagcttcccttcttcccccgtacctctcaccagcggtgtcttcggtatgtgaaaacccaattcttcaaccctataggatccaacaggcaatcgcagctggcatcttacctttatcacccttgttcctccaacaatcatcagccctattacagcagttacctttggtgcatttattggcacaaaacatcagggcacaacaactacaacaacttgtgctagcaaaccttgctgcctactctcagcaacagcagtttcttccattcaaccaactagc

SEQ ID NO: 85539 - DNA, 496 bp, Zea mays
  unsure (1)..(496): unsure at all n locations
ggaaaaaggtgttatcacagagaggaagggagtactgctacgtaccggtccggaattcccgggtcgacccacgcgtccgccaaaccctagccgccgagtgccgcctaccgcccgcccgccctccgccgcgcgtcggacggtgccgagggaagaggcaccatgaggttggagaagtgctggttctgctcctctaccatctaccccggccatggaatccagttcgtccgcaacgacgccaaggtcttccgcttttgccggtcaaagtgccataaaaacttcaagatgaagaggaaccctcgtaaggttaagtggacaaaagcatacaggcatttgcatggcaaggacatgacccaggatacaacctttgagtttgagaggaagaggaacaggccggagcgctacgaccgcaatttaacggagcagactctgaaggctatcccgcttattacaaagattaggcatgaccgtatgggaaaacacatctcanacagacata

SEQ ID NO: 85540 - DNA, 482 bp, Zea mays
tagtattcgtgccccagctctagtacgccgtactgtccggattcccggtcgacccacgcgtccgagagcacaatggcgaccaagatattttccctccgtatgctccttgctctttatgggtgtgttgctaacgcgacagctttacctcaatgctcacaagctcctatagctccccttcttcccccataccttccatcattgatagcttcagtatgtgcaaacccagctcttcaaccctataggctccaacaagcaatcgcagcaagcaacatacctctatcacccttgtttcaacaatcgccagccctatctttggtgcagtcattggtacaaaccatcatggcacagcagctgcagcaactcgtgctacctgtgatcaacctagtagctctggcaaacctttctccctactctcagcaacaacaatttcttccattcaaccaactgtctacattgaaccgtgctgcttattcgcagcaaca

SEQ ID NO: 85541 - DNA, 493 bp, Zea mays
gggtagatgctctactccaccatgaataattatgcaatcactgggtccgaatattccggggtggaccaagccttccgtaaccaaacttggggaataatgtattttatgatgggccacaaattgccattgtgcgggcggttctgaaaacaagattgatgtctctccgcgcacttcaatgaacagctgattcttaactaaaataccgtccatcaatgatagctccagtatgtgaaaacccaactcttcaaccctataggctccaacaagcaatcgcagcaagcatcatacctttatcaccctcgtttcaacaatctccagccctatctctggtgcagtcattggtacaaactactgcggcacatcatctgcagcaactcgtgctacctgtgatcaaccaagtagctctggcaaaccgttctacctactctcagcaacagcaatttcttccattcaaacaactggctacatggaaccgtgctgcttatttgcagcg

SEQ ID NO: 85542 - DNA, 494 bp, Zea mays
ggaagaggtttgtttagtcgcgaggagtatatgcacgctcgtaccggtccggaattcccgggtcgacccacgcgtccgatctttgacaaggctaggcagtctgctccatgtgtcctgtattttgatgagctcgagtccattgctactcagagaggacgcagtgttggtgacgccggtggtgctgctgatagggtgttgaaccagctgcttactgagatggatggcatgaatgccaagaagacggtttttattatcggtgcaactaacagaccggacatcattgacccagccttgctgaggcctgtgcgtcttgatcagcttatctatattcctctgcccgatgagcagtccaggcttcagatcttcaaagcctgtctcaggaagtctcctgtggccaaggatgttgacttgaatgctctcgccaaatacacccagggtttcagcggtgcagatatcacagagatctgccagcgcgcgtgcaagtatgccatcag

SEQ ID NO: 85543 - DNA, 504 bp, Zea mays
gagtagaagcctgtatatgtattttggagagagatagtgctgtaccggtccggaattcccgggtcgacccacgcgtccgagcaacttacctttatcacccctgttctttcaacaatcgccagccctatctttggggcagtcattggtacaaaccatcagggctcaacagctgcagcaactcgtgctaccagtgatcagccaagtagctctggcaaacctttatccctactctcagcaacaacaatttcttgcattcaaccaactgtctacactgaaccctgctgcttatttgcagcaacaacaactactaccattcagccagctagctactgcctactctcagcagcaacaattgcttccatttaaccaattcgccgcactgaacccctgtgcttatttccagcagcaaatactactaccatttgaccagctagctacaacaagccccgctatcttcttgacacaacaacaattgcttacgttctaccagcagtttgtggctaa

SEQ ID NO: 85544 - DNA, 480 bp, Zea mays
agttaaagctgtactacttagcctaatatgctgactcgtaccgatcgccggtcgacccaaccttccgtgaccccttgcggatcaaccagcaacctttttagccccattatgtacccaccatgggtaggcaaatattttggccccctatacccattgagccaattggaaatgcttcttccggctgcaattttcccgcaaagttaccagcctccttatcatacatttttatcgcgtaccttttaccagcgttgactctcaaatgtgaaaacccaattcttcaaccctacacgatccaacattctatggcatcacgcatcttacctttatcacccatgatccttcaacaatcatcaggcctattacagcctatccatttggtgcatttattggcgcaaaacattatggcacaacaactcgtgctagcaaaccttgttgcctactctcagcaacaacagttaccttaggtgcattcgtaggccc

SEQ ID NO: 85545 - DNA, 497 bp, Zea mays
  unsure (1)..(497): unsure at all n locations
ngggtaaatggatctgtctattgacaagatataagtaaggcttctactcggtccgaaattcccggttcgaccaagccgtccggcctctcaggaaattgaccaggaccatgaacctggttaaaaggcttgccaagaagtgccatgctttcttggcatcagaggccatcatcaagcagattccccgtctccttggtcctggtctcaacaaggcaggcaagttcccgaccctggttactcaccaggaatccctcgagtccaaggtgaacgagactaaggcaaccgtcaagttccagctcaagaaggtcctttgcatgggtgtcgccgtcggcaacttggcgatggaggagaagcagatccagcagaacatccagatgagcgtcaacttccttgtttcccttctgaagaagaactggcagaatgtgagatgcctgtacgtcaagagcaccatggggaagccatacagggtgttctaagtatgctcttttgtgaagtctgct

SEQ ID NO: 85546 - DNA, 490 bp, Zea mays
  unsure (1)..(490): unsure at all n locations
gggaagtttctttttacgacgaaggagtatgctctacctgtccggaattcccgggtcgacccacgcgtccgtcaacccgtccggatttgacctgggtgatgcaaactatcttaggtatcatggtatggaagagtttgatcaggcaatgcaacatcttgagcaaaaatatgaattcatgacatctgatcaccagtatatttcccggaaacatgangaggataaggtgattgtgttcgaaaagggagatttggtatttgtgttcaacttccactgcaacaacagctattttgactaccgtattggttgtcgaaagcctgnggtgtataaggtggtcttggactccgacgctggactatttggtggatttagcaggatccatcacgcagccgagcacttcaccgccgactgttcgcatgataataggccatattcattctcggtttatacaccaagcagaacatgtgtcgtctatgctccagtggagtgatan

SEQ ID NO: 85547 - DNA, 492 bp, Zea mays
ggtagaatgcttctattaagaggtatgtggagagatgatagctgtaccggtccggaattcccgggtcgacccacgcgtccgccctgctgcttatttgcagcaacaactattaccattcagccagctagctactgccgactctcagcaacaacaacttcttccatttaaccaattggccgcactgaaccccgctgcttatttgcagcagcaaatactactaccatttagccagctagctgcagcaaaccgtgcttccttcttgacacagcaacagttgctgcctttctaccagcagtttgcggctaaccccgcaaccctcttacaactacaacaattgttgccctttgtccaacttgctttgacagacccagcggcctcctaccaacaacacatcattggtggtgccctcttttagattgcttattagttgtaattcattattaaagttttttggatgatgtatgtggccaaccagaaataagaagttacatt

SEQ ID NO: 85548 - DNA, 496 bp, Zea mays
  unsure (1)..(496): unsure at all n locations
gaggtggagctttgtttagaggagggagtatagcagactcgtaccggtccggaattcccgggtcgacccacgcgtccgcagaaacacaccaagcgaagcacattagcaacaacctaacaacaatggctaccaagatattatccctccttgcgcttcttgcgctttttgcgagcgcaacaaatgcgttcattattccacaatgctcacttgctccaagttccattattacacagttcctcccaccagttacttcaatgggcttcgaacacccagctgtgcaagcctataggctacaacaagcaattgcggcgagcgtcttacaacaaccaatttcccagttgcaacaacaatccttggcacatctaacaatacaaaccatcgcaacgcaacagcaacaacaattcctaccagcactgagccacctagccatggtgaaccctgccgcctacttgcaacagcagttgcttgcatcaaacccacttgctctggcaaacgn

SEQ ID NO: 85549 - DNA, 501 bp, Zea mays
gaagagatgtactaggagtgttagagaatagcaggctcgtaccggtccggaattcccgggtcgacccacgcgtccggccacgcatcagaaaacctactccattgctcttttcttatagccgccgccggaacgggttgctagcgctctgagctctcatactagcgtccgtggaaggtcgtctagacatggtctccgagacggagacgttcgtctaccagacggagatcaaccagctgctatcgctcatcatcaacaccttgtactccaacacggagatctaacttagggagctcatttcaaactactacgatgcatagaataagatcaggttcgatagttagacggacaatagcaagctggatgcccatcctgagcatttaatccacatcgtcactgacaaggccaacaatactctgacaatgattgacagtgtcataggtatgaccaagtcagacctagggaacaaccttggtgccattgcacgatctggcacaaaagaac

SEQ ID NO: 85550 - DNA, 510 bp, Zea mays
  unsure (1)..(510): unsure at all n locations
nagggggnagaagctgtgtatgaagatgttgggagagagaagatgtgtaccggtccggaattcccgggtcgacccacgcgtccgcgctgaagtccacatgctagacatcgagtgcttctccttcctgaaccgcgcgttgggaaacgacatggcgccgatcttagtaatcgcaacgaaccgagggatcacgtatatccgcgggacaaactaccgctcgccgaatgggatcccgccagacttccttgaccggctactgattatcacgacgcatccctacacggaggatgagatccggaagatcctggatatccggtgcgacgaggaagacgtggagatgtccgctgacgccaaggttctgctcaccaagattggtgtggagacctctctgcggtatgccatcaaccttatcacatctgccgcgctagcctgccagaggcgcaaggggaaggtggtcgagatggaggacattagccgggtgtaccaactgctcctggacgtgaagcggtcgac

SEQ ID NO: 85551 - DNA, 486 bp, Zea mays
  unsure (1)..(486): unsure at all n locations
ngggataaagtgattgtctatcgaacgatgtatgctctactgtccggattcccggtcgacccacgcgtccgtccacgcgtccgattgagaccaacatgtcacatagaaagtggaatccagtagcagcgatagagcaacaatggagaccaagatattttccctccttatgctccttgctctttctacatgtgttgctaacgcgacaattttccctcaatgctcacaagctcctatagcttccctttttcccccataccttccatcaattatagcttcagtatgtgaaaacccagctcttcaaccatataggcttcaacaagcaatcgcagcaagcaacatacctttatcgcccttgttgtgtcaacaatcgccagccctatctttggtgcagtcattggtacaaaccatcagggcacaacagctgcagcaactcgtgctacctgtgatcaaccaagtagctctggcaaacctttctccctactctcc

SEQ ID NO: 85552 - DNA, 508 bp, Zea mays
gaggaaaaagatttggcctacctagtatacatgatgctacgctcgtaccggtccgtaattcccgggtcgacccacgcgtccgcccacgcgtacgcttacctttatcacccttgttcctccaacaatcatcagcgctatgacagcagttacctttggtgcatttaatggcaccaaacattcgggcaccaccacctacaacaacttgtgctagcaaaccttgctgcctactctcagcaacagcagtttcttccattaaaccaactagctgcattgaactctgctgctaatttgcaacaccaactaccattcagccagctagctgctgcctacccccaacaatttcttccattcaaccaactggcatcattgaactctcctgcttatacacagcaggcacatcttatacaatacacccatatctctggtgagagctgttgtgtttttttcacaccaaaacatatattgggcgtaaacgtgcactgtgcgtaacgctggcacgctcttacaa

SEQ ID NO: 85553 - DNA, 505 bp, Zea mays
agaatagagcctgtacctcgataacgcttatgacgtaggctcgtaccggtccggaattcccgggtcgacccacgcgtccgcactgccttacgtgggccaggtctgagtttgagggtctacttgagaagactggcagggaagtaaatgctttcctgtcgaaccctggcggatatgcaaccgcagcaagaactgctggtgatgcacaggctagggatcaacttgagcgagttattgaatgccttgagacagacaagtgtgagacattccaagactgtattacctgagcccggcttaagctagaggattatttctgcaaccgtgtcaagcagctgacattcactttacccgaagatgcaatgactagctcctgtgctccttactgatctgctcctaagcggttcccgcgacctctgcagttctcgtctagcgactcaagtcaccttaacttcttgatggctgcatctgtattaatggcagagacatgtggaatacacttacctgtttg

SEQ ID NO: 85554 - DNA, 505 bp, Zea mays
  unsure (1)..(505): unsure at all n locations
tagtaaaataattangcctagctaccgatttattgtacgctcgtaccggtccggaattcccgggtcgacccacgcgtccgaatatcttggtctccattgttgctctattgttgctacatgtgttgctaacgcgacgattttccttaattgctaacaggctccaatagcttccttttttccccaatactttccatcaataatagcttcagtttgtgaaaaccaagctcttaaaccatataggcttaaacaagcaatcgcagcaagcaacatacctttatcgcccttgttgtgtcaacaatcgccagccctatctttggtgcagtcattggtacaaaccatcagcacacaacatgtagaaactctcgctctacgtgatatcaaccaagcatctggggcaaacctttcttactactctcagcaacaactttttctattatacaaacaacttactatgctgaacgctgcttattatatgcaacaactattaccaattagccagctagcc

SEQ ID NO: 85555 - DNA, 485 bp, Zea mays
tggagagcacttatccaccagattattatgctatactgttcggattcccggtcgacccacgcgtccgggacgacagctcggcaacgactgtttcgaccgtcgctgccgtcctacttgccgggtggtgagatcttcttcggcccgttagccgacgacgagcaccaccagggcaaccagatacttcagtggcttcgcaaggatgtcctggtgcactattgagtctgatcctggtgtgttcactgagctgattcagcaaatgcaagtgaaaggtgtacaggttgaagagctttactctctcgatgtgggctctcttagtcaactgcggccagtatatgggctaattattctcttcaagtggatacccggcgagaacgatgaacggtctgttgtcagagatcctaacccaaaccttttctttgcgcaccaagtcatcactaatgcatgtgctactcaagctattctctcagttctcatgaatcgccctg

SEQ ID NO: 85556 - DNA, 494 bp, Zea mays
ggggggtgtctgtctagagggggggggtatagtatactcgtaccggtccggaattcccgggtcgacccacgcgtccgcccacgcgtccgcggacgcgtggggtagggagaaaggtttgccagagctactctcagcaacaacaatttcttccattcaaccaactgtctacactgaaccctgctgcttatttgcagcaacaactattaccatttagccagctagctactgcctactctcagcaacaacaacttcttccatttaaccaattggccgtactgaaccccgctgcttatttgcagcagcaaatactactaccatttagccagctagctgcagcaaaccgtgcttccttcttgacacagcaacagttgctgcctttctaccagcagtttgcggctaaccccgcaaccctcttacaactacaacaattgttgccctttgtccaacttgctttgacagacccagcggcctgctaccaacaacacatcattggt

SEQ ID NO: 85557 - DNA, 501 bp, Zea mays
  unsure (1)..(501): unsure at all n locations
agttagagctctagtatgtaggcgggagaaaagtatactcgtaccggtccggaattcccgggtcgacccacgcgtccgcgcatccaagcccgtgccagctgcatggaacctgcggcgttggcagcaccccgatggtgggccagtgcgtcgagtttctgaggcatcagtgcagcccgacggcgacgccctactgctcgcctcagtgccagtcgttgcggcagcagtgttgccagcagctcaggcaggtggagccgcagcaccggtaccaggcgatcttcggcttggtcctacagtccatcctgcagcagccgactccatgcccctacgctgctgccggcggtgtccgacactgaagaaactatgtgctgtagtatagccgctggctagctagctagttgagtcattcagcggctacgattgagtgataatgtgtcacgcatcaccatgggtggcacagtcagtgtgagcaatgacctgaatgaacaatnganatgaagagaa

SEQ ID NO: 85558 - DNA, 488 bp, Zea mays
  unsure (1)..(488): unsure at all n locations
ggaaagttattgttactgtaggaaagtatgcttctacnggtccggaattcccgggtcgacccacgcgtccgcagtccaggaaatccgactgggcaggttcttgctgaagacaaccaatatgatatagtgaaattctgcaaaaatgagggccttgttcttctagctgatgaggtatatcaagagaacatctatgtggacaacaagaaatttaactctttcaagaagattgtaagatccatggggtatggcgaggatgatctccctctagtatcgttacagtctgtttccaaaggatactatggagagtgtggtaaaagaggagggtacatggagattactggcttcagtgctccagtaagagagcagatctacaagatagcttcagtgaacctatgctccaatatcactggtcaaatccttgcgagcctcgtcatgaatccaccaaaggttggagacgaatcatatgcttcctacaaggcagagaaagg

SEQ ID NO: 85559 - DNA, 494 bp, Zea mays
  unsure (1)..(494): unsure at all n locations
nggaaaagggtgtgtctagtagaggggagataggaagactcgttccggattcccggtcgacccacgcgtccggctcgcgaagtatcggcggcggcaatcgctgcaggctagagcctcgttgctgagggggggagatggcgggtatgggcgatatgccgatgaggccggcgcggccgggcccgccgatgcagcaccgtggtccgcccccgatggcgcgccttcgccccgaaccaatcgaccgcgagaagacctgtcctctgctgctcagggttttcacaagggttgctggtcaccaccaaaatgaagagtttgcagtgagagggaaggaaccaaaggatgaagttcagatttacacatggaaggatgcgaccctncgcgagctcactgatcttgtgaaagaggttgctcttccagcaagaaaaaggaatgcaaggctttcttttgcatttgtatacccagacaagaatggtcgttatgttgtcagacaggtgggg

SEQ ID NO: 85560 - DNA, 496 bp, Zea mays
ggaaagtgtggagtcactgaaagggagataagctagtactcgttccggatttcccgggtcgacccacgcgtccgcagaggggcctacttaacagggagtcagaggaatctgacgaagaagagaactactgttccattgaattgacgccaagtttgtttacatctgctgtcgataatgcataccagtccatacatgaattttcaaagcctttgatcaacatgatgaaggctgcaggttgggatcttgatggggctgccaatgcgatcgaacctggtgtggtttacacaagaagggctcacaagaagtttgcttttgaatcctatatttgccaaagaatgttcagtgggttccaagaggagagcttttctatcaaggattctaacatcagtgtttccaatgaggctttcttccaccaattccttgcagtgcgagccatggatcctctggatgtcctgagccagaaccctgattcagtattcggaaagttctgtagaaa

SEQ ID NO: 85561 - DNA, 507 bp, Zea mays
  unsure (1)..(507): unsure at all n locations
ngggaaaaggtttctnatataggaggaggaggaggtaattgctattactcgtaccggtccggaattcccgggtcgacccacgcgtccgcaacaagcaacatagaaagtggaatccagtagcaacaatagagcaacaatggagaccaagatattttccctccttatgctccttgctctttctacatgtgttgctaacgcgacaattttccctcaatgctcacaagctcctatagcttccctttttcccccataccttccatcaattatagcttcagtatgtgaaaacccagctcttcaaccatataggcttcaacaagcaatcgcagcaagcaacatacctttatcgcccttgttgtgtcaacaatcgccagccctatctttggtgcagtcattggtacaaaccatcagggcacaacagctgcagcaactcgtgctacctgtgatcaaccaagtagctctggcaaacctttctccctactctccgcaacaacaatttcttccattcan

SEQ ID NO: 85562 - DNA, 505 bp, Zea mays
gggaaagaacttgtatttggagggggggataaagtatagtcgtaccggtccggaattcccgggtcgacccacgcgtccgctctgtcgatattctgaccaatgacttaggagctgctgttgcttcaaatgatgcaggagaacctattggctctaacatctatgttgctggtggaatgattaaggacacaccgagtggaaactacattctatcagctgcctgatccattgagttatgtcccataagacgatatagtatatgctataaaagccatcgccgtcacacatagggaaaatggaccaactgattaccgcatgtatagcatgattaagtatacagattgaccgtcgtggaatagataggtatcggactgaagttgaaaaatattacggtaagaagactgaaagtgtacgaccatggacaaagtgctatgacagcagctacgttgtctgacaagcacaggatgatgggaaattattatatggagatcatgatgataatggacgt

SEQ ID NO: 85563 - DNA, 513 bp, Zea mays
  unsure (1)..(513): unsure at all n locations
nggaaataggtgtcnntgcatagtgttgtggtgggaagctggcaatactctncgnnntccggaattcccgggtcgacccacgcgtccgcccacgcgtccgcggacgcgtgggatctggtggtacgacgacatggcggccaccaggagcaagtcgtcgtcgtcctcgagctcggcgcagcgggcagctgccgcactgctcgtggccgccgccgtggcggtgtccgtcctggtggtgggcgcggcggcggtgtgcgacatgagcaacgagcagttcatgtcgtgccagcccgcggcggccaagacgacggacccgccggccgagccgtcgcaggcgtgctgcgacgcgctggcgggggcggacctcaagtgcctgtgcggctacaagaactcgccgtggatgggcgtctacaacatcgaccccaagcgcgccatggagcttccggccaagtgcggccttgccacgccgnccgactgctagcagtgtgctagccaagccaagccaagcaggaaggc

SEQ ID NO: 85564 - DNA, 445 bp, Zea mays
gggagtattgttcctgccttgtagctctacggtcgaattcccggtcgaccagctccgcgacgctccgacagctgtctcttcatatcacacctgtactccacaagagacttcctaggagctatatcaactctccgagccttgacaagacaggttgagagttgacggacaaaccaagctggatgcacagccagagctgttatccacattgtcccgcaaggtcaacacacactgcaatcatcgacagtgcattggtatgaccaatcagaccttgtgacaaccttggtaccattgcgcggtcaggcacgaaggaattcatggaggcacttgctgctggtgctgatgtgtccatgattggccagtttgctgtcggtttctactctgcctaccttgttgcagatagggttgtcgtgaccactaagcacaatgatgatgagcaatacgtgtg

SEQ ID NO: 85565 - DNA, 502 bp, Zea mays
  unsure (1)..(502): unsure at all n locations
ngatggggaaagttttnnnccatgaactctatctatagtatnctcgtaccggtccggaattcccgcgtcgacctacgcgtcacccgtccgaccagctgctctcgctcatcatcaacaccttctactccaacaaggagatcttcctcagggagctcatctccaactcctccgatgccttggacaagatcaggtttgagagtttgacggacaagaccaagctggatgcacagccagagctgttcatccacattgtccccgacaaggccaacaacacgctgacaatcatcgacagcggcattggtatgaccaagtcagaccttgtgaacaaccttggtaccatttgcgcgtcaggcacgaaagaattcatggaggcacttgctgcttgtgctgatgtgttcatgaatggccaagttggtgtcggtttctactctgcctaccttgttgcaaaaagggttgtcgtgaccactaagcacaatgatgatgagcatacgtgtgggagtct

SEQ ID NO: 85566 - DNA, 493 bp, Zea mays
agggagtgtgtattacgaaaagaatatatagcattgctcgtaccggttcggaattcccgggtcgacccacgcgtccgcccacgcgtccgcccacgcgtccgtatcaacatagaaagcacaatagtgtaccaacgatggcagccaaaatattttgcctccttatgctccttggtatttctgcaagtgctgctacggcgaccattttcccgcaatgctcacaagctcctatagcttcccttcttcccccgtacctctcaccagcggtgtcttcggtatgtgaaaacccaattcttcaaccctacaggatccaacaggcaatcgcagctggcatcttacctttatcacccttgttcctccaacaatcatcagccctattacagcagttacctttggtgcatttattggcacaaaacatcagggcacaacaactacaacaacttgtgctagcaaaccttgctgcctactctcagcaacagcagtttcttccattcaa

SEQ ID NO: 85567 - DNA, 490 bp, Zea mays
  unsure (1)..(490): unsure at all n locations
agatgctgtatctcagtccacgaaagtacgcagactcgtaccggtccggaattcccgggtcgacccacgcgtccgctccatcgtatctgttcgacgagatcgatgctgctctggatccacaataccgggcagcagttggaaatatgatccgccgtctagctgacatggctgacactcagttcattgcgaccacattccggccagagattgctaaagtggctgataagatatatgccgtgagacacaagaatagggtgagcaacatcgacgtggtgtccaaggaggaggccctggacttcatcgagcgtgatcagacgtacaatgctagctgaggctgctgctgctgtgtattgattgatctgcaggcagatgctaacgcagacaggatagttcttgttgcgttatggatattctggcctattgttgtagctgtgtatatgtgtgatgcagttaggtagctattggaccagcttgtttggcgcatcaacgn

SEQ ID NO: 85568 - DNA, 516 bp, Zea mays
ggagggtaaggagtgcatttggtcatgtaagggggggatatagtattgctcgtaccggtccggaattcccgggtcgacccacgcgtccgcatgagggtgttgctcgttgccctcgctctcctggctctcgctgcgagcgccacctgcacgcatacaagcggcggctgcggctgccagccaccgccgccggttcatctaccgccgccggtgcatctgccacctccggttcacctgccacctccggtgcatctcccaccgccggtccacctgccgccgccggtccacctgccaccgccggtccatgtgccggcgtcggttcatctgccgccgccaccatgccactaccctactcaaccgtcccggcctcagcctcatccccagccacacccatgcccgtgccaacagccgcatccaagcccgtgccagctgcagggaacctgccgcgttggcagcaccccgatcctgggccagtgcgtcgagtttctgaggcatcagtgcagcccgacggcgacgccc

SEQ ID NO: 85569 - DNA, 516 bp, Zea mays
  unsure (1)..(516): unsure at all n locations
gggggtaagaggtgtctgattattgaaagtgggggagagaagtatnagctcctaccggtccggaatacccgcgtcgacccacgcgtccgcggacgcgtgggtttctccctactctcagcaacaacaatttcttccattcaaccaactgtctacactgaaccctgctgcttatttgcagcaacaactattaccatttagccagctagctactgcctactctcagcaacaacaacttcttccatttaaccaattggccgcactgaaccccgctgcttatttgcagcagcaaatactactaccatttagccagctagctgcagcataccgtgcttccttcttgacacagcaacagttgctgcctttctaccagcagtttgcggctaaccccgcaaccctgttacaactacaacaattgttgccctttgtccaacttgctttgacagacccagcggactcctaccaacaacacatcattggtggtgccctcttttagattgcttattagttgtaattcaa

SEQ ID NO: 85570 - DNA, 502 bp, Zea mays
  unsure (1)..(502): unsure at all n locations
gtgagatggtnnnncctgattcgtggcatnctcatactcccnnnntnngggaatcccggctcgacccacgcgtccgcggacgcgtgggtctagatcgcgagcttctgccctttttttttttcttttagaaatgtactttcttatttctgggaagccacaaacatcatccaaaaaacttcattattgaactataactcataagcactctaaaagagggcaccgccaatgatgggtcgttggtagaacgttgttgggttcgcaaaaaaaaaaaaaaaagggcggccgctctagaggatccaagcttacgtacgcgtgcatgcaacgtcatagctcttctatagtgtcacctaaattcaattcactggccgtcgttttacaacgtcgtgactgggaaaaccctggcgttacccaacttaatcgccttgcagcacattcccctttcgccagctggcgtaatatcgaagaggcccgcaccgatcgctcttccaacagttgcgcaccc

SEQ ID NO: 85571 - DNA, 507 bp, Zea mays
  unsure (1)..(507): unsure at all n locations
agaagggncttagcttgcacagagatgggggtaaatgtaacactctccggaattcccgggtcgacccacgcgtccggattgggacagtggtggcacagaaggaatctgaaccagagaaacaggagactcgccaacgggttgaggaggacaggaaacctcagatcgaagcagccattgtcaggatcatgaaatcacggagggtgttggatcataacagcattgtagctgaggtcaccaagcaattgcaagcccgtttcttgccaaatcctgttgtcataaagaaacgcattgaatctctgattgaacgagagttcttggaaagagacaaagtagatagaaaattatatcgttatcttgcatagaaaactgtcatgagataattcattagcagttggcatccttctgctcttgtaaaacggttttctttatgctcgagttctctnttatcagttgcatttggccgctgggttcatagatgttcaaacattggttattggttgaccgcca

SEQ ID NO: 85572 - DNA, 495 bp, Zea mays
  unsure (1)..(495): unsure at all n locations
gggagagtggttcnaataagaagtagatagcaatgctctaccggtccggaattcccgggtcgacccacgcgtccgtcttcaccaatctcaccgagagcggcggccggctgcagctgatcgacctgtactacgactggcccaggggccgcaacctcaacctcatccgggaccagctctccagcgacccgctctacgacgtcgagtggaccaacggcacctnctacttcttcgactccgggtcctgccgcaccatgcgtttccccgtggggatcctgccgcctgactggctcgccgccggcgccgtctatctcggccgcgagcacgtcgacggcttcgactgccacctgtggaccaaggtcgacttcgtctggtactacgaggaagtcgccaccggccgtcccgtccgctggaatttcttcaatgggatgcagcagcatgtgatgagctttgaagtgggaagagtgctggaagactccagtggcatgcgccccctgc

SEQ ID NO: 85573 - DNA, 498 bp, Zea mays
  unsure (1)..(498): unsure at all n locations
agggagagttatanactcacgagcacgcagtatagcatgctctaccggtccggaattcccgggtcgacccacgcgtccgcggacgcgtgggcagccaacaacttcgctcgtggtcactacaccattggcaaggagattgttgacctgtgccttgaccgcatcaggaagcttgcagataattgcactggtctccagggcttcctcgtcttcaacgctgttggtggaggaacgggctctgggcttggttctctcctcctggagcgcctgtctgttgactatggcaagaagtccaagctcggtttcaccgtgtacccatccccccaggtgtccacatccgtggttgagccatacaacagtgtcctgtccacccactctctcctcgagcacactgatgttgctgtcctgctcgacaatgaggccatctatgacatctgccgccgctcccttgacattgagcgcccaacctacaccaacctcaacaggcttgtctcccaggtn

SEQ ID NO: 85574 - DNA, 501 bp, Zea mays
  unsure (1)..(501): unsure at all n locations
agaggagctcgatttgttcacgcacacgcaagtatcgtacgcgcggaattcccgggtcgacccacgcgtccggggaggacgatctaaatgaaattgtgcagcttgttggtaaagatgcgctggcagaggctgacgggattacactggagacagcaaagctactgagagaagattatttggcacaaaatgcatttaccccatatgataagttctgcccattctacaaatccgtttggatgatgcgcaatattattcacttcaacacattggcaaatcaggctgtggagcgggcagctggtactgatggccaaaagataacatacggtgtcataaaacaccgtttgggcgatctattttatcgcctagtatctcaaaagttcgaggatcctgccgaaggtgaagaagctttggtcggcaaatttaagaaactggatgatgacctnaccactggttttcgcaatcttgaagccaggcacggtgaactagtgtaaaatctgtgga

SEQ ID NO: 85575 - DNA, 518 bp, Zea mays
  unsure (1)..(518): unsure at all n locations
tgtttgaggaagtagtntcataagttgttacgagacacgccaaaaaagtatactcgtaccggtccggaattcccgggtcgacccacgcgtccgagcgactcctctgcgtgaggcctgccgtcatcccccgtgggccgtggccgtggccgtggccgtgcgcaaaaaaacaaaccatcctcgattcgaccggaggggaaggagacgcgccgggagaagggggaagagacgcggcgaccatgtctccgatctgggtgttcgggtacggctcgctgatctggaacccaggcttcgcctacgacgaccgcgtcgtcggctttgtcagggactaccgccgcgtcttctaccaagggagcacggaccacaggggcacgccgcagttccccgggaggaccgtcacgctcgagcaccaacccggaacgacttgctgggaagtggcttacagaataaaggaggaagataaggagatagctttggagtatcttgaggtcagggagaagcaatatgatgagaaggtttac

SEQ ID NO: 85576 - DNA, 503 bp, Zea mays
  unsure (1)..(503): unsure at all n locations
agagggnctagtttgataccgcacacgcatgaaagtagactcccggaattcccgggtcgacccacgcgtccgcccacgcgtacgtccacgcgtccgcccacgcgttcgagcatctaacatggattacgaccaggagatcaatgctgtgctcaagaaggtggagcctaatgctcacaagatagtggaacatcgcaggaagtatgagaggttgagaaaagagagggaggaaaagagagcgcagcgtgatcggcttcgtcaacgtgcagaggcgcaggctgcttacgacaaggccaagaggaaggagcaatcgtcaagtcgctcatcaggaggtgcatctaccagaggctttccttggaggatgccctgtgggtggttccctagagggatgcccggtggaggtttcccccggggtggcatgcctgggggtttccctgggggtggcatgcctggaggtttccctggtggtgttcccggtaatgttgatatgagtaaaatccctgaag

SEQ ID NO: 85577 - DNA, 519 bp, Zea mays
  unsure (1)..(519): unsure at all n locations
gggtgagtaaggagtnnctaagttgtataagcatggcggataaaaagtaatgctcgtaccggtccggaattcccgggtcgacccacgcgtccgggtttaactcgcaaagaagctcaagatgttcacattaagtttgcagagaaagcttgggtgcaacaggcggaagtaattcttgctgatgggaaattaacagaggctaaggctgaccagcttgctaagattcaaaagcaggtcggtttgcctactgaacatgcacagaaaatcattaagggtattacaacgacaaagttatcttctgcaattgaagcctctgttgctcggggtcagatcggtatacagcaggtccgaagattgaaggaagcaaacttccaactagatagcttgattgcggaaccgcagcgagaaagcatttataggaaaactgttgaagagctcttttttcaggtacaggggatttcgatgaagaggaaatgtatgttaagattccagctgatcctaataataagtcctgagaaggcc

SEQ ID NO: 85578 - DNA, 508 bp, Zea mays
  unsure (1)..(508): unsure at all n locations
nagtaggtncgcagcttgaacacgccccgacagtagtctgcaacccgtccggaattcccgggtcgacccacgcgtccgcccacgcgtccgagaacccaccccccaccatgacgagctcctcctctccttccagagaggcgctgagcaagatcgcttgcaatcggctgcacaaagagctcgccgagtggcagccaaacccccccgtcgggttcaagcacaaggtctacgataacctccaaaggtgggtaattgaggtcaccggagcggccggcaccctttacgccggcgaggcttaccagttgcaggttgacttccctgagcattatcctatggaggcacctcaggtcattcttctcaatccagcgccaatgcatccacacatttacagcaacgggcacatctgcttagatattctgtatgactcgtggtcgccagcgatgaccgtgagctctgtctgtatcagtatcctgtctatgctggctagttcgccagcaaagcatcccccggc

SEQ ID NO: 85579 - DNA, 515 bp, Zea mays
  unsure (1)..(515): unsure at all n locations
agaggagctgagtttgtngctagcttctccgcatctatcgttantatcgtttctggtccggaatacccgcgtcgacccacgcgtccgagcgactcctctgcgtgaggcctgctttcatcccccgtgggccgtggcgggggccgtggccgtgcgcaaaaaaacaaaccatcctcgattcgaccggaggggaaggagacgcgccgggagaagggggaagagacgcggcgaccatgtctccgatctgggtgttcgggtacggctcgctgatctggaacccaggcttcgcctacgacgaccgcgtcgtcggctttgtcagggactaccgccgcgtcttctaccaagggagcacggaccacaggggcacgccgcagttccccgggaggaccgtcacgctcgagcaccagcccggaacgacttggtggggagttgcttacagaataaaagagggaagataaagggatagctttggagtatcttggagtcagtgagaaaccattttgataggaaggtttacg

SEQ ID NO: 85580 - DNA, 514 bp, Zea mays
  unsure (1)..(514): unsure at all n locations
nagtaggggncgtcagcttgtaacagacgatccggccatgatcagtataactcccggaattcccgggtcgacccacgcgtccggcaacatagaaagtggaatccagtagcaacaacagagcaacaatggcgaccaagatgttttcggctccttatgctccttgctctttctgcatgtgttgctaacgcgacaattttccctcaatgctcacaagctactatagcttaccttcttccgccataccttccatcaatgatagcttcagtatgtgaaaacccagctcttcagccctatgggctgcaacaagcaatcgtagcaagcaacatacctttatcacccttgctgtttcaacagtcgccagccctatctttggtgcagtcattggtacacaccatcagggcacagtagctgcagaactggtgcatactgtgatcaacccaagtcactttgccaaacctttcttccatactgtagagaacgatcaatttttccctttaaaccaattgtgataaac

SEQ ID NO: 85581 - DNA, 498 bp, Zea mays
  unsure (1)..(498): unsure at all n locations
nggtagggggctgntctagggggtgtgggagagagtatgctgtaccggtccggaattcccgggtcgacccacgcgtccgcccacgcgtccgcccactcgtccgcccacgcgtccgcggacgcgtggggttccagatattcgcagttgaccgggtcctcggagcacgatgaagtttgttgctgcctacttgcttgctgtcctcgctgggaacgccagcccctccgctgaggatttgactgccattctggagtcagttggctgtgaagttgacaatgaaaggatggaactcctgctgtcccaactgagcggtaaggacatcaccgagctcattgccgcgggcagggagaagtttgcttcagtcccatgtggtggcggtggtgtcgctgttgcggcagcttcacctgctgctggcggagctgctcctacagctgatgcaaagaaagaagagaaggtggaagagaaggaagaaagcgatgatgatatgggcttcagcctctt

SEQ ID NO: 85582 - DNA, 494 bp, Zea mays
ggtaggggctgtctacgatgtggggaaaagaaatgctctaccggtccggaattcccgggtcgacccacgcgtccgatcaatgccatgaacaagcttagcaccaagaagccatgggccctgtccttctcgttcggccgtgccctagatgcgagcaccctgaaggcctgggctggcaaggcggagaacgtggataacgctagagcggccttcctcgcctggtgcaaggccaactccgaggctaccctaggcacctacaatggtgatgctggcgtcgacaccgagagccttcacgtaaaggactacaagtactgacttgcttctctttgagatcccgtagtattggaactcctgcctgcgagtaggttgctgagtgtaggttgcttgttagagctattatattctgacatgaaaaaaacatgcttcctatgtggatgatggttatctatatattcgtatattaactactagtctctgttgttaatttccgtgtaatt

SEQ ID NO: 85583 - DNA, 512 bp, Zea mays
  unsure (1)..(512): unsure at all n locations
naggagggancataagcttgtaacacgcaacccggcaaagatcagtagnactcccggaattcccgggtcgacccacgcgtccggcaaaatctgcacgagagacagacgacgagatggccgatgcggaggacgccgccggggcgcgccgacgggccgccataaccgactaccgcaagaagctgctcaactgcagggagctcgagtcgcgcgtcggcaccgtgagagaaagccttaaaaatgcaaagagggattttaccaagactgaagacgacttgaaatctctgcagagcgtggggcaaataattggagaggttctccgacctcttgataatgaacgctttattgtgaaggccagcagtggtccccgatatgtggtcggttgccgaagtaaagtagacaaggagaagttgacatctggaactcgtggtgtacttgacatgacgaccttgacaataatgcgcactcttncacgggaggtatgttngttatcaggcatttatggggtcaattat

SEQ ID NO: 85584 - DNA, 512 bp, Zea mays
  unsure (1)..(512): unsure at all n locations
ggggtgggtagggagtnnctttaggttnttaaggagaggggggcagagggaaatgtcgtaccggtccggaattcccgggtcgacccacgcgtccgcccacgcgtccgcccacgcgtccggtcaacctcgatcatggcgacccgactatgtgcgaggagttctggcgcggcacaggagatagcgcctcgatcttcatccctggttggcaaacaatgagctacttctccgacctcggcggcatctgttggttcctggagcctggattcgagcgcgaggtgcggcgtctccacaggctcgtggggaatgccgttgtagacgggtaccatgtgctcgtcgggacaagctccactcagctctttcaagccgtgctgtacgcgctcttaacttgcagtgacggcacaaccattgacctcgtctcaccggcaccggactactcgtcttacccatctgtgaccaactatctaaactctgcgctctaccgttgggctggtgatgccaatacatttggaggg

SEQ ID NO: 85585 - DNA, 516 bp, Zea mays
  unsure (1)..(516): unsure at all n locations
taggagggncgtaagtttgtatacagcatggggggtagacagtaatactcgtaccggtccggaattcccgggtcgacccacgcgtccgcctacaacagcaacaactgctttcatctagcccgctcgctgtggccaatgcacctgcatacctgcaacaacaattgttgcaacagattgtaccagctctgactcagctagttgtggcaaaccctgctgcctacttgcaacagctgcttccattcaaccaactgactatgtcgaactctgctgcgtacctacaacagcgacaacagttacttaatccactagcagtggctaacccattggtcgctgccttcctacagcagcaacaattgctgccatacaaccagttctctttgataaaccctgtcttgtcgaggcagcaacccatcgttggaggtgccatcttttagattacatatgagatgtactcgataatggtgccctcatttccgcatgtgttttctaagaataatccaatatttggattggaaa

SEQ ID NO: 85586 - DNA, 516 bp, Zea mays
  unsure (1)..(516): unsure at all n locations
tgtgtttggagaggaactagttgttacgattacgacgcatactgtatnacagtaccggttcggaattcccgggtcgacccacgcgtccgcggacgcgtgggcggacgcgtgggcggacgcgtgggacagcagcaacaggtactagcattcagccagctagctggtgtgagccctgctaccttcttgacacaaccacagttgttgccgttctaccagcacgctgcgcctaacgctggcaccctcttacaactgcaacaattgctgccattcaaccaacttgctttgacaaacccagcagcattctaccaacaacccatcattggtggtgccctcttttagatttcttatgagttatagttcaataataaagttttttgtctgatgtttgtggcttcccagaaataagaaagtacatttctaaaaaaaaaaaanaaaaaaaaaaaaaggaaaaaaaaaaaaaaaaagggcggccgctctagaggatccaagcttaacgtcccgtgcattgcaaagtta

SEQ ID NO: 85587 - DNA, 510 bp, Zea mays
  unsure (1)..(510): unsure at all n locations
agtagggctcagattgttacagcataccgaatcagtagtatnactcttcggaattcccgggtcgacccacgcgtccgggaatgccggtcacaactactcttatgggcctcggcaacttccacagcgacgaccgactgtgtctgcgcatgctaggtatgcatggcacggtgtatgcaaattatgcagtggataatgccgatctgttgcttgcacttggtgtgcgggttgatgatcgtgtgacagggaagattgatgcttttgcaagcagggctaagattgtgcacgttgatattgatccggctgagattggcaagaacaagcagccacatgtgtacatctgagcagatgttaagcttgctttgcatggcatgaatgctcatgttgaaggaagcacatcatagaagagcttggactttggctcatggaacgatgagttggatcagcagaagagggaattccgccttgagtataaaacatgtaatgaagaaaatccagccacaatatgctttt

SEQ ID NO: 85588 - DNA, 502 bp, Zea mays
  unsure (1)..(502): unsure at all n locations
ngggagagtgctgntttacgagatgggggggaagaggaagagttgtaccggtccggaattcccgggtcgacccacgcgtccgctcgcgtcgacgactgggctaccggcgcctccaccctccgcctggtgtccttcgccgtcgacgagcgcacaccagggtacagtacgtattgctcgtgatttgtgtaactacggagcaagctgcatacagcacaagatagaagatgggtatccttgagaggatcaaggagattgaggccgagatggctcggactcagaaaaataaagcaacagaatatcatcttggacaactgaaggcaaaactagcaaagttgaggacacaactattagagcctccaaagggttccagcggaggtggagatggttttgaagtcacaaagtttgggcatggtcgtgttgcacttattggatttcccagtgttggaaagtcaactcttttaacgatgttgactgggacacattctgaagctgcatcatatga

SEQ ID NO: 85589 - DNA, 513 bp, Zea mays
  unsure (1)..(513): unsure at all n locations
nagttaggncgtaggttgntttcgaaacgcggggaagaagtagtctcgtaccggtccggaattcccgggtcgacccacgcgtccgcggacgcgtgggcggacgcgtgggctcgtgagtttgtgacagtggttttctctgtgccgccttttgcaggggaagggggtctgggttgcgtacaggcgaaaggcacgcgccgccgctgccgcgcgagcctctccgtccccatcgccgcgcagatggatccgtcgtcggagcccctgtacgcgcaggtcgagccgtacgactccgggttcctcaaggtctccgatgtccacaccatctactacgagcagtccgggaacccgcagggccatgcggccgtgtttctccacggcggtcccggagccggcacgtcgcccggcaacaggaggttctttgacccgcagttctacaggatcgttctgtttgaccagaggggtgcatgcagaagcactcnccatgcttgtttagagcagaaccactttttggaagtt

SEQ ID NO: 85590 - DNA, 508 bp, Zea mays
gtagacctagtccctacgagacggcgattactgcaccactcgtaccggtccggaattcccgggtcgacccacgcgtccgagcacatcaaacaagtggcgacagactaaagatttgtgagggtgatccgcgctgaggagagatggctaagatcgccgcggcggcggcggcggcgctgtgcttcgcggccctggtggccgtggccgtcatgccaaggcgaggtctagcggcacaggctcatggacctgcagtgctggcaggaggtccaggagagcccgctcgacgcgtgccgccaggtcctcgaccggcagctaaccggcggtggcagcagcggcggcgttggcccgttccggcggggcaccgggctccggatgcggtgctgccagcagctccaggacgtgagccgcgagtgccgctgcgccggcattcggagcatggtcaggggctaccaggaggccatgccggcagtggagaaaggctgggggccagggggccggcattgcagccctc

SEQ ID NO: 85591 - DNA, 516 bp, Zea mays
  unsure (1)..(516): unsure at all n locations
gtttgagagagtagancttgattgaaagagggggggggaaaaagtaatcctctccggaattcccgggtcgacccacgcgtccgtagcaacatagaaagcacaatagtgtaccaacaatggcagccaaaatattttgcctgcttatgctccttggtctttctgcaagtgctgctacggcgaccattttcccacaatgctcacaagctcctatagcttcccttcttcccccgtacctctcaccagcggtgtcttcggtatgtgaaaacccaattcttcaaccctataggatccaacaggcaatcgcagctggcatcttacctttatcacccttgttcctccaacaatcatcagccctattacagcagttacctttggtgcatttattggcacaaaacatcagggcacaacaactacaacaacttgtgctagcaaaccttgctgcctactctcagcaacaacagtttcttccattcaaccaactagctgcattgaactctgcttcttatttgcaacaac

SEQ ID NO: 85592 - DNA, 509 bp, Zea mays
  unsure (1)..(509): unsure at all n locations
nagtagggcntaagttgataacgacacagaaagtagactgcgaacccctccggaattcccgggtcgacccacgcgtccggaaacacacctagcgaagcgcactagcaacgacctaacaacaatggctaccaagatgttatgcctctttgcgcttcttgccctttttgtgagcgcaacaaatgcgttcattattccacaatgctcacttgctcctagtgccattattccacagttcctccctccagttacttcaatgggcttcgaacacccagctgtgcaagcctacaggctacaacaagcgcttgcggcgagcgtcttacaacaaccaattgcccaattacaacaacaatccttggcacatctaaccatacaaaccatcgcaacgcaacagcaacaacaatttctaccagcactgagccaactagctgtggtgaaccctgtcgcctacttgcaacagcagttgcttgcattcaaccaacttgctttgcaaacatagtggcttccaccaa

SEQ ID NO: 85593 - DNA, 497 bp, Zea mays
aggaagtgaggtttgttaggggggtttgggggtaatggtatcctctccggaattcccgggtcgacccacgcgtccgcccacgcgtccgctcttcatctctggcacaaagatgcgcactcttgccaagaaccgagagagtgccccagatggttttatgtgcccgggtggctggaaggtactcgttgaatactatgacagcttggtgccatctgagggcagcagcaagctgcgtgaaccaattgcagcctaaatctggaaaatccttcatataaggaatgctactatatcttagcaagcggttctttgcgacatagaaccgatgctatgtgattgtatactggctgtaagactttaaaacactaggcttgattcggatgttaatgtgtgctttgtacccggtgtaccttctctgctggcagtgttgcacatgcactggagcacatcaaacgtttggtgttaataaggacaggctatgtatcctctgccagattgtacat

SEQ ID NO: 85594 - DNA, 494 bp, Zea mays
agtaagaggtattttcagtgggtgcggggagaaggtaaaccttctccggaattcccgggtcgacccacgcgtccgcggacgcgtggggtacagcacggcctgaaagagctgagtggagcctgtcccgacgagcacatggtatccgtctacaacggcattccccatctgtgaccaactatctaaactctgcgctctaccgttgggctggtgatgccaatacatttgatggcgacacatgtattgagctcgtctgctccccaaacaaccctgatggtggcctccggaagcctgtcatcaaatccaagtctagcaagcctgtttatgacttcgcctactactggccgcagtacacacccatcaccgaggcagctgcccatgatatcatgctgctcactgtctacaaatgcaccggccatgccggcaccaggctgtggtgggcattggtgaacgatactaaggtggctcagaagatgatcaagcttatagagctcaac

SEQ ID NO: 85595 - DNA, 516 bp, Zea mays
agttagggcgtatgtcgtgaccgcatccccgcatatagcgcaattgctcgtaccggtccggaattcccgggtcgacccacgcgtccgcccacgcgtccgcggacgcgtgggtcaagctttgcaaggttaggtctgtgcagttgggtcagaagggcatcccctatctgaacacgtatgatggccgcaccatccgctaccctgacccgctcatcaaggccaacgacaccatcaagatcgatctggagaccaacaagattgtggacttcatcaagtttgatgttggcaacgtcgtcatggtgactggcggaaggaacactggccgcgtgggtgttatcaagaacagggagaagcacaagggcagctttgagaccattcacgtggaggactccctgggccaccagttcgccacccgtatgggcaacgtgttcaccatcggcaagggtaataagccgtgggtgaaccctgcccaagggcaaaggattcaagctgagcatcttagaagaagcaaaggaggcg

SEQ ID NO: 85596 - DNA, 514 bp, Zea mays
  unsure (1)..(514): unsure at all n locations
gagtagannctagtcnnttacgaaacgcggggaaaaaagaaaactcgtaccggtccggaattcccgggtcgacccacgcgtccggcggcagtgcgtagagaggatcgtcgaacagaacagcatgaagatggtcatcgttgtcgtcgtgtgcctggctctgtcagctgccagcgcctctgcaatgcagatgccctgcccctgcgcggggctgcagggcttgtacggcgctggcgccggcctgacgacgatgatgggcgccggcgggctgtacccctacgcggagtacctgaggcagccgcagtgcagcccgctggcggcggcgccctactacgccgggtgtgggcagacgagcgccatgtaccagccgctccggcaacagtgctgccagcagcagatgaggatgatggacgtgcagtccgtcgcgcagcagctgcagatgatgatgcagcttgagcgtgccgctgncgncagcagcagcctgtacgagccagctctgatgcaacagcaacaacca

SEQ ID NO: 85597 - DNA, 513 bp, Zea mays
  unsure (1)..(513): unsure at all n locations
nagttaggnnctcagtcgttacgacaccgggggaaaacagtagtgctcgtaccggtccggaattcccgggtcgacccacgcgtccgcccacgcgtccgcgcgctcagtgtcatttgcagttcccggtagcagccatggcgtgggtgcagctgtctgggccgcgggtggtggcggctgcgaaaccggctgcgttgggcgggctcctcctgacgccgtcccttgcggtgccaaaggggcggagggccaggggcctcgtggtgagggccgccacggtcgtgtcacctaagtatacgtccataaaaccattgggagacagagtacttgtgaagatcaaaacctctgaggctaaatctgatggaggtattttacttccagtatcagttcagacaagaccacaaggaggggagattgttgcggttggagaagggagaagttttggaagtaaccgcattgagatcagtgttcccggtggtgcacaagttgtctactcgaaatatgccgggcccagattga

SEQ ID NO: 85598 - DNA, 511 bp, Zea mays
  unsure (1)..(511): unsure at all n locations
ggaggnggtagtagtnncntagttgaaatagaatagaggtaagttgcaccttccggattcccggtcgacccacgcgtccggattgagtcggtggactcgctgaacccgttcatgcacgcccgtggggtcgccttcagggtggacaactgctccacaacggctcgcctgggatccaggaagtgggcgcctcgcttcgactacatcctgacgcagcaggccttcgtggcggtggacaaggacgccccgatcaaccaggacctcatcagcaacttcttgtcggaccctgtccatggtgccattgaggtctgcgccgagctgaagcccaccgtcgacatctctgtgcctgccaacgccgactttgtgcgcccggagctccggcagtcttcctagattgaggcagtgagcggagagggagagggagagagaaagagaggatttcgtgtcccgaggttagaccagagtgctgtatgttttgtccgactgtttgtaagtcaaggctgaactgggaccc

SEQ ID NO: 85599 - DNA, 503 bp, Zea mays
gaggtaagaagactttattatcgacacggggagtaatagtaatgctctaccggttcggaattcccgggtcgacccacgcgtccgcgcgtgcgaaccaagcagaccacaacatgaagaagcgtagtcgtcgccggaaggaaaggcgcggagcaagatgtcgtggcaggcgtacgtcgacgagcacctgatgtgcgagatcgaaggacagcatctcagcgccgccgccatcgtcggtcacgacggcagcgtttgggcgcagtccgagagcttccccgagttaaagcctgaggaggttgctggtatcataaaggactttgatgaacctggtactcttgcaccaactggtcttttcgttggaggtacaaagtacatggtgatccaaggtgaacctggagttgtcatccgaggaaagaagggcactgggggcattactatcaagaaaaccggcatgtccttgattattggtgtctacgacgagccaatgactccagggcaatgcaaca

SEQ ID NO: 85600 - DNA, 520 bp, Zea mays
  unsure (1)..(520): unsure at all n locations
gagtatgancgtagttnnnaatcgacgaacgacgctatntgttacactcgtaccggtccggaattcccgggtcgacccacgcgtccgcccacgcgtccgcgtagttgcaaaccagcaacaacaacaactgcaacaggttctggcagcgcttagtcaactagccatggtgaaccctgccgcctacctacaacagcaacaactgctttcatctagcccgctcgctgtggccaatgcacctacatacctgcaacaagaattgttgcaacagattgtaccagctctaactcagctagctgtggcaaaccctgttgcctacttgcaacagctgcttccattcaaccaactaactatgtcgaactctgttgcgtacctacaacagcgacaacagttacttaatccattggcagtggctaacccattggtcgctgccttcctacagcagcaacaattgctgccatacaaccgggttctcttgatgaaatcctgtcttgtccaggccagaacccaatcgttggaggtg

SEQ ID NO: 85601 - DNA, 521 bp, Zea mays
  unsure (1)..(521): unsure at all n locations
tagtacgancgtatgttgnttacgatgtacgacgtactattgtatnactcgtaccggtccggaattcccgggtcgacccacgcgtccgctgtaaataagcaggagagttcaatgctgcgcctaacgctggcaccctcttacagctgcaacaattgctgccattcaaccaacttgctttgacaaacccagcagcgttctaccaacaacccatcattggtggtgccctcttttagatttcttatgagttatagttcaataataaagttttttgtctgatgtttgtggcttcccagaaataagaaagtacatttctagattctaaaaaaaacaaaataacatgcaatatgcatatatatagacaacaacaacaatggcacaacggacgacaacaccaccgaccgacgacgagccggtccacgctatgcatgcatgcaactacgtaacatatattaccaggttctaagatattcttatatatatgaatgcgaatgtgcatattatctggaactcccaagtcatgt

SEQ ID NO: 85602 - DNA, 511 bp, Zea mays
  unsure (1)..(511): unsure at all n locations
aggaggnctgattgttcacgcatccgcattatctgtatcacttccggaattcccgggtcgacccacgcgtccggaacaagtgatgaaggtcctggacccaaggctctcgaccgtcccgctgcacgaggtgacgcgcgtcttctacgtcgcgttgctgtgcaccgaggagcaaagcgtgcagcgcccgacgatgagggaggtggtgcagatcctgagcgagcttccaaaaccgccatctaccaagcagggagaggagaattctaccaagcaaggagaggaggttccgaattccggcgacggctctgcgcccagccctctacactcagcaccagttgggaccaacgaagcaccagccgtcgaagcgagagaccaccagcagcagacaagctctccgtcgtcgccaccgcctccagatctcatcagcatctgagtaaccggaatcgaaaacgttaccgttcctcgcaaaaatccccgcttcagtgtagcaagcttaggttcgaattttaagttn

SEQ ID NO: 85603 - DNA, 511 bp, Zea mays
  unsure (1)..(511): unsure at all n locations
gaagtaatggactactctgattacagacgatgcgcagttaacagtaatgcttctaccggtccggaattcccggggtgggtacttggggtccctagccttcttcagggtcgtggggcgttgaagaagattgaagataacaacactctggtcttcattgttgacctcaaggcagacaagaagaagatcaaggctgccgtcaagaagatgtatgacatccaggcaaagaaggtcaacaccttgatcaggcctgatgggaagaagaaggcttacgtgaagctgactcccgactatgatgctcttgatgtggccaacaaaatcggcatcatctaagtgctgcattaggcatcctagttcatctgttgtgtcctagttctatgtgaaaccagagttttgtagctatggctctcaatcgttccattaccatgtgttatgcacacttctgaatttgatatcatccaagtgaccttttgaactagtttgcgttctgcacttcattacacttggacaccgn

SEQ ID NO: 85604 - DNA, 508 bp, Zea mays
agggagacagctcttttcatgagacggagggtatcagtcatgctcgtaccggtccggaattcccgggtcgacccacgcgtccgcccacgcgtccggctctttctgcatgtgttgctaacgcgacaattttccctgaatggggacaagctcctatagcttcccttcttgccccataccttccatcaatgatagcttcaatatgtgaaaacccagctcttcagccctataggctccaacaagcaatcgcaacaagcatcatacctttatcacccttgttgttgcaacaatcgtacagccctatctatggtgcagacattgagtacataccatcaaggcacaggacctgcaatacctcgtgctacctgtgatcaaccaagtagctctggcacacgcttgtgcctactctgagctacatcaatgcattgcattcaacctactgtctacactgaaccctactgctaacgcgcagcaacaactattaccattcaggcctgatagctactgccta

SEQ ID NO: 85605 - DNA, 569 bp, Zea mays
  unsure (1)..(569): unsure at all n locations
attntnttattatggatattaatatgnatattataatgtttttattagtatnatatgatatatagannnctcagttgtagcgggagggggaagagagtatcttgtaccggtccggaattcccgggtcgacccacgcgtccgctcggaactggacaccctgagcgaggagtcctacaaggacagcactttgatcatgcagctccttcgtgataacttgaccctatggacctctgacatctcggaggaccctgctgaagagattagggaggcgcccaagcgggactcgagtgaggggcagtaaagccggctttatgtgcctagaaactagtagctagtgtttgctgctgtcgaatgacactatgcaatgtgatctggaacctggtttcttgggtgcgacgcttgtagccgtgttatgactgtcgtccgtaaaatttgggggctccccgtaagggatgctgcctggcaaggcctcggtgtcccaccctgtctgtggcgttgggcgcttgaaccccggtctggtgggtttggaaggccttttaaacggtgggcacttgcaaaaaaaaaaaaat

SEQ ID NO: 85606 - DNA, 531 bp, Zea mays
  unsure (1)..(531): unsure at all n locations
tgtggtagcaggagtagctagatctgtgtaagtctcccgcctacgtcantacaccgccctcggtccggaattcccgcgtcgacccacgcgtccgcgattattactcaatcatcgccgctaatatgactcaactagctagctagccggcggcgatactacagcacatagcttcttcagtgggggacaccgccagctagctagctagttgagtcatttagcggcgacgatcgagttctcatgcgcgacgcgtgagtcgccccgggaattcaggaccggcacatgctggcgtacaagctgtccctattgtgagacgtattagctcactgtttaattcagttcaagtcttatgtgtatcttgccttgctatccgagtaataatactgaggatgtggtagtcatgatatatgtttattctctgttggttcctatcttatgcaattattcataagagatgctgccaaaattttattattgtaccattgtaagtattactacaatattcaaacatatcatattatgattttctttatg

SEQ ID NO: 85607 - DNA, 496 bp, Zea mays
ggagggaggagtatgtgataagggggggaggggtactgtcaacctctccggaattcccgggtcgacccacgcgtccggtgggttggcttctcctccccctccggttcgggttcgggttcgtgaggttctccgggggtcgggttcgtgggtgagcggatcgagatggcggcgtcggatgttgagtaccgctgcttcgtcggcggcctcgcctgggccacggacgaccactccctccacaacgccttcagcacctacggcgaggtcctcgagtccaagatcatcctcgatcgggagacgcagaggtcccgcggcttcggcttcgtcaccttctccacggaggaggcgatgcggaacgccatcgagggcatgaacggcaaggagctggacggccgcaacatcaccgtcaacgaggcccagtcccgcggcggccgtggaggcggcggcggtgggtacggtggtggccgtggaggcggcggctacggcggtggcgggcgcc

SEQ ID NO: 85608 - DNA, 503 bp, Zea mays
ggagtaaaggagtttttgataagtgggggggggggggaaaggttatacctcgtccggaattcccgggtcgacccacgcgtccggtgaagggtctcatccagatctcaagatctattggagatgtatatctaaagaaaccagagtacagcagagaaccacttcacagcaagtttcggcttcgagaaaccttccagaggccgatccttagttctgaacctcaaattactgaacatcgaatacagccgaacgatcaatttgttatatttgcttctgatggtctatgggagcacctcagcaataaggaagcagttgaccttgtccaaagtagtccccgaaatggaatcgctcggaggctagtgaaagccgcgatgcaagaagctgccaagaagagggagatgagatactcagacctcaagaagatcgaccgtagtgtgagaaggcatttccacgacgatataactgtcgtcgtggtattactcgattcggatgccatgagcatagct

SEQ ID NO: 85609 - DNA, 517 bp, Zea mays
  unsure (1)..(517): unsure at all n locations
nggagggaagggaaagagctcgntatcacagaaacagacgattgacttcctatnactcctncnggntcggaattcccgggtcgacccacgcgtccgaactagcaacatagaaagcacaatagtgtaccaacaatggcagccaaaatattttgcttccttatgctccttggtctttctgcaagtgttgctaccgcaaccattttcccacaatgctcacaagctcctatagcttcccttcttcccccatacctctcaccagcggtgtcttcaatgtgtgaaaacccaattgttcaaccctacaggatccaacaggcaatcgcaacaggcatcttaccattatcacccttgttcctccaacaaccgtcagccctattacagcagttacctttggtccatttggtggcacaaaacaatcaggcacaacaactacaacaacttgtgctagcaaacctgctgcatactctcagcaacatcagtttcttccattcaaccaactggctgcatngtactctgctgg

SEQ ID NO: 85610 - DNA, 512 bp, Zea mays
  unsure (1)..(512): unsure at all n locations
nagagtnnnaggatctgaactgacgacccgcatatatgtacactcnnnnnnntncggaattcccgggtcgacccacgcgtccgcttttgtccaaaaggcttaagaaaggagaagaccagggagaatcaggatttattcgtgatggttttccccgtacagtaaaacaagcggaatattaacttaatttgcgggaaattcttgatggcgttacagacattgatatggtggttaatctgaaactaagagaagatgttatagtagagaagtgccttggcagaaggatttgcggccaatgtggaaagaacttcaatttggcctgcattgatgttaagggtgaaaatggactcccaccaatctacatggcaccactgttgcccccaaacaactgcatgtcgaagcttattacccgagctgatgataccgaagaggtggtcagaaatcggcttcagatatataatgacatgagtaaacctgtggaaggtttctaccgagagcaggggaagctcttggaa

SEQ ID NO: 85611 - DNA, 510 bp, Zea mays
  unsure (1)..(510): unsure at all n locations
agagttncctaagttgttacgagtccgcaatacagtagactcgtaccggtccggaattcccgggtcgacccacgcgtccgaagaaactatgtgctgtagtatagccgctggctagctagctagttgagtcatttagcggcgatgattgagtaataatgtgtcacgcatcaccatgggtggcagtgtcagtgtgagcaatgacctgaaggaacaaagatataaaaaaaaaaaagggcggtcgctcgcgatctagaactagtccaacgccttcagcacctactgcgaggtcctcgagtccaagatcatcctcgatcggaagacgcagaggtcccgcggcttcggcttcgacaccttctacacggaggaggcgatgcggaacgccatcgacggcatgaacggcatggacctggacggccgtaacatcaccgtcaacgaggcccagtcccgctgtggccgtacaggcagcagccttgggaacgttgtgaccgtagaaggcggaggttctgaaat

SEQ ID NO: 85612 - DNA, 524 bp, Zea mays
  unsure (1)..(524): unsure at all n locations
nagagtnttacgtgtctnccaatctgaaatgtaagctaatctgtannacttccggaattccggaattcgacgcctcgactccaggcgtccggtcaggcgacgcatgggctcaatgcctggcttcaaaaaaattccgtcagcagttgaagttatacccatggcaaaactactcttgggtttgctccttgcccttgctattctagggacaacatcggctgctggttgtgtacaagacgcggaagacatgaaacgagagtgcaagcagtttgagctattcccagcgaacccaaagttgccaccgtcggcagcatgttgtgctgtgtggaagacggcagatgttccatgcctatgcaaatatgttaacaaggaagtagagaaagtatggtgcatggaaaaagttgtgtacgtcgccaactattgtaagaggccgtttcaacctgactacaaatgcgggagttatacagttcctcttagtatgtaaaaagactggttgggacatgtggtactctgtcctagaactttan

SEQ ID NO: 85613 - DNA, 510 bp, Zea mays
agtagggtcgtaggtttatcatgcatcgaagctactgtcaactcgtccggaattcccgggtcgacccacgcgtccgttttgagcattcagaaacacacctagcgaagcgcactagcaacgacctaacaacagtggctaccaagatattatccctctttgcgcttcttgccctttttgtgagcgcaacaaatgcgttcattattccccaatgctcacttgctcctagtgccattattccacagttcctccctccagttacttcaatgggcttcgaacacccagctgtgcaagcctacaggctacaacaagcgcttgcggcgagcgtcttacaacaaccaattgcccaattacaacaacaatccttggcacatctaaccatacaaaccatcgcaacgcaacagcaacaacaatttctaccagcactaagccaactagctgtggtgaaccctgtcgcctacttgcaacagcaattgcttgcatccaacccacttgctctggcaaacataggtt

SEQ ID NO: 85614 - DNA, 505 bp, Zea mays
  unsure (1)..(505): unsure at all n locations
agagtatctcagattatcacgcacgtagtactctcaacncgtccggaattccgggtcgacctacgcgtccgcccacgcgtccgcccacgcgtccgcctacgcgtncggtaacctttcaataggcgtcgcccaagaactagtaaacatggcaaaactgttgagcctgttcttagccctctcctttgtagcagctatgtttgccataggctctcatgctgatggagactgtgagaatgacctccaaagcctgataagtgactgcaagacatacgtgatgttcccagctaatccaaaggtccctccttcggatgcttgctgtggtgtcatcaagaaggcaaacgtttcttgcttgtgctccaaggtcaccaaagaaactgagaaggttgtgtgcatggagaaagttgtgtatgttgctgagcagtgtaagaggccatttgagcatggcttccagtgcggaagctacaaggttccagcaaactgatgatatcacaagagggaagcgctn

SEQ ID NO: 85615 - DNA, 510 bp, Zea mays
  unsure (1)..(510): unsure at all n locations
ggggaggtaggggttttaatactgaactctatgcaactctcaaaaccnctcganttccggnnnngnggctcgacccacgcgtccgggccaccctgaatctcaatgccatgaacaagctcagcaccaagaagccatgggccctgtccttctccttcggccgtgccctccaggcgagtaccctcaaagcctgggctggcaaggtggagaacgtggagaaggctagagcggccttcctcgccaggtgcaaggccaactccgaggctaccctcggcacctacaagggtgatgctgccgtcgacaccgagagccttcacgtcaaggactacaagtattgagttgcttctctttgcgatcccgttgttttgaaactcctgcctgcgagtaggttgctgagtgttgtttgcttgttagagcttttatattcgaacataaaaaaaacatgcttcctatgtggatgatggttatctttatattcgtatattaactactagtctctggtgttaaaaaaaa

SEQ ID NO: 85616 - DNA, 507 bp, Zea mays
  unsure (1)..(507): unsure at all n locations
ggaaagtgagtcnaatatgtagagcttgctatgctgtaccggtccggaattcccgggtcgacccacgcgtccgcccacgcgtccgcccacgcgtccggggagttgttcagtttggtactgtggacatagaatctgatggcttaagtgatcaccttagtgttcttgctgattcattaaataaagcaaggattcatatctgtccaccagtgaaaaagccatctaaactcggtgaaagtctcattagtttggctgcaatagtggagaatgaacataagaggctgcttgcaaggaagtccatcattgaaaaacgtaaagaagagcttgagcgtcaaatattggagaaggaaaaagaagaagaaaaaaagagaatgagcagtcaaaagaaaactgcggatgaagaaagggtgaagcttctcaatgaacagaggcagagggagcaggaccggattcgtagagagatagaggaaaaaaataaagcagaagcaaaaaagttgctagaagatttga

SEQ ID NO: 85617 - DNA, 499 bp, Zea mays
aggtaggggcttgaaaagagagggaagtactgctcatccggtccggaattcccgggtcgacccacgcgtccgaagcgccacacgccgacgcgaaccaaccaggcaaccagatggtagtcggttagctaagctcgggatcggaggagaggtgccccgcgaccctgacgatgacgatgcctcgccgcgcccttctcttcgccgtggcgctcctcgcggcctacgccgccgcggtctacgggttccacctcgccggggacgagagcggcctcgtgaggggcgtgctcacagcggtccgagagcgggccgaggccgaggccgaggacgccgcgcgcttcgccgtcgcctaccacatcaggaaccagcgtgctgctccggagttcactagggtgctcaaatcgaagcggcaggttgtgaccgggaccctgcatgacctgatactggacgcagctgatgctggacaaaagagtctgtacagagcacaagtctgggtgaagccgtg

SEQ ID NO: 85618 - DNA, 500 bp, Zea mays
  unsure (1)..(500): unsure at all n locations
ggtaggagtcttatcacgaaagacagtactgctcatcccgtccggaattcccgggtcgacccacgcgtccgcgtttcgcgttcgcctcagcccgccgcaaggagaggtaagttcaggagacatcttcgagaagctgaaatggctcctaaagctgctcctgccaagaagggtgatgccaagacccatgccttgaaggttgccaaggctgtgaagtctggggcagccaagaagaagaccaagaagatccgcacgtctgtgacatttcaccgccccacgaccctgaagaaggctagggaccccaagtacccacgaatcagcactaccggaaggaacaagcttgatcagtaccaaattctcaagtacccccttaccacagaatcagcgatgaagaagattgaagatcacaacactctggtcttcattgttgacctcaaggcagacaagaagaagatcaaggctgccgtcaagaagatgtatgacatccaggcaaagaaggtcan

SEQ ID NO: 85619 - DNA, 509 bp, Zea mays
  unsure (1)..(509): unsure at all n locations
nggtttagaagcgtganctcactgacggcggggtaaaaagcattgctcgtaccggtccggaattcccgggtcgacccacgcgtccgcggacgcgtggggtttttcaggttgtgctaactcccacacatttggccatagttatggaatatgctgctggtggtgagctatttgaaaggatctgtaatgctggaagatttagtgaggatgaggcgagatttttcttccaacaactgatttcaggagttagttattgccactcaatgcaaatatgccatagagatttgaaactagaaaacactctcctggatgatagtatagcacctcggctaaagatatgtgattttggttactccaagtcctctgtgctgcactctcaaccaaaatcaactgtcgggacaccagcttacattgctcctgaggtccttgctagaaaggaatatgatggaaaggtcgccgatgtttggtcatgtggagttactctgtatgtgatgcttgntggtgcctatccc

SEQ ID NO: 85620 - DNA, 504 bp, Zea mays
  unsure (1)..(504): unsure at all n locations
nggtaaggacttgatcacgcacacgaattatcgcactacgttaccggtccggaattcgggtcgacccacgcgtccgcggacgcgtgggcagggccctgttctctcatctctcactccctcgctccgtgtacggggtaccaccacgtgcctcctcgtcgacgatctcgtagcggcggcgcacatggcgagcgacggcgcggcggctacgccagcgaaggttaccccaaagaaggccaatctcctcgacccgcactccatcaagcaccttctcgacgagaccatctccgaagtcgtgaagagtaagggctacaccgaggacacgcggctgggcaactggaagctggggatcggagcctgcgtgattgctgtcgccctcctcgctcagttttaccccaagaagttgccgcagaaccgcgatttcctccttggctgcatcgccctgtatgtggtgctgaatgtggtgctgctgatccttagctacaccaaggagaaggatgccatcct

SEQ ID NO: 85621 - DNA, 509 bp, Zea mays
  unsure (1)..(509): unsure at all n locations
nggtggaaggcctgatttacggacgggggggttaaaagcattgctcgtaccggttcggaattcccgggtcgacccacgcgtccgcatcccgtcgcatcccatcccactaccacccatctcgtcgtccgccgattcgatccggttcttccaacccaagggcagtgatggcgacgaagaggagcgtgggcaccctcggcgaggcggatctgaaggggaagaaggtgttcgtgcgcgccgacctcaacgtcccgctcgacgatgcccagaagatcaccgacgacacccgcatccgcgcctccgtccccaccatcaagttcctcctcgagaagggcgccaaggtcatcctcgccagccacctgggtcgtccaaagggtgtcaccccaaagtacagcttgaagcctcttgttccacgcttgtctgagctccttggagttgaagtcgtgatggccaatgattgcattggtgaggaagttgagaaattggctgccgctttgccggaaggtggagtt

SEQ ID NO: 85622 - DNA, 504 bp, Zea mays
ggaggggagagtgtctgtgaaaaaagacgaggaaagtactcttctaccggtccggaattcccgggtcgacccacgcgtccgattatttagaccaactagcaacatagatagcacaatagtgtaccaacaatggcagccggaatattttgcctccttatgctccttggtatttctgcaagtgctgctacggcgaccattttcccgcaatgctcacaagctcctatagcttcccttcttcccccgtacctctcaccagcggtgtcttcggtatgtgaaaacccaattcttcaaccctacaggatccaacaggcaatcgcagctggcatcttacctttatcacccttgttcctccaacaatcatcagccctattacagcagttacctttggtgcatttattggcacaaaacatcagggcacaacaactacaacaacttgtgctagcaaaccttgctgcctactctcagcaacagcagtttcttccattcaaccaactagctgcattg

SEQ ID NO: 85623 - DNA, 499 bp, Zea mays
  unsure (1)..(499): unsure at all n locations
ngaggagaggtttcaatatggagaggggggaaaagtaatactctaccggttcggaattcccgggtcgacccacgcgtccgctcttacaactacaacaattgttgccctttgtccaacttgctttgacagacccagcgggctcctaccaacaacacatcattggtggtgccctcttttagattgcttattagttgtaattcaataataaagttttttggatgatgtatgtggccaaccagaaataagaagttacatttccagaaaaaaaaaaaaaaaaaaaaaaaaaaaaaaaaaaaaaaaaaaaaaaaaaaagggcggccgctctagaggatccaagcttacgtacgcgtgcatgcgacgtcatagctcttctatagtgtcacctaaattcaattcactggccgtcgttttacaacgtcgtgactgggaaaaccctggcgttacccaacttaatcgccttgcagcacatccccctttcgccagctggcgtaataacgaa

SEQ ID NO: 85624 - DNA, 501 bp, Zea mays
ggagggagggttttgattaggggggggacgggagatcttctaccgctccggaattcccgggtcgacccacgcgtccgcaacaagcaacatagaaagtggaatccagtagcaacaatagagcaacaatggcgaccaagatattttccctccttatgctccttgctctttctacatgtgttgctaacgcgacaattttccctcaatgctcacaagctcctatagcttcccttcttcccccataccttccatcaattatagcttcaatatgtgaaaacccagctcttcaaccatataggcttcaacaagcaatcgcagcaagcaacatacctttatcgcccttgttgtttcaacaatcgccagccctatctttggtgcagtcattggtacaaaccatcagggcacaacagctgcagcaactcgtgctacctctgatcaaccaagtagctctggcaaacctttctccctactctcagcaacaacaatttcttccattcaaccaac

SEQ ID NO: 85625 - DNA, 501 bp, Zea mays
  unsure (1)..(501): unsure at all n locations
ggaaacgttcgataaggagaggggagaatagtaatgctctccggaattcccgggtcgacccacgcgtccggcaattagctcatcgaactccagaatgggagaacctcgccacccttgaaggtccgaatggtggccttggttttctggcccctggttgcaacccccgcttcagtacaagcggcgctgtggctgccagacaccancgtttcatctaccgtctncgttctatatgccgcctacgttctatctgccgccgcagcagcagccgcagccatggcaataccccactcaaccaccgcagctaagcccgtgccagcagttcggatcctgcggcgtcggcagcgtcggcagcccgttcctgggccagtgcgtcgagttcctgaggcaccagtgcagcccggcggcgacgccctacggctcgccacagtgccaggcgctgcaacagcagtgctgccaccagatcaagcaagtggagccgctgcaccggtaccaggcgacata

SEQ ID NO: 85626 - DNA, 502 bp, Zea mays
gtaaaagtatgtggtcaagggggggggggataaagtatacctcgtccggaattcccgggtcgacccacgcgtccgatgattttgcaaggacaggaagtactgctatcgatacggttggacttaaggaaggcctttgggacagttcacacatgaaatgggacccatttctacgcaagcaaggacttccagttcgcttgaacaaaggtgttgtagagttggttgcagaccatgtagtttgtgaggaaggaaagcccctttcgccagaagcagcgcagactctgcggctgcttgggatacaaatggcgacattccgtctataccttgtgtgtcgctggtcgggcgatgactttgaagtttacaaagaaagcttgatgcacctaagaactgatgaatcctcttaagcttttgtttcctgtatacacaaaaggctcacttgctgtctttgctgggacagcttttggtaactgtgcgtgtggccatgtacccaggagtattggaagtt

SEQ ID NO: 85627 - DNA, 504 bp, Zea mays
  unsure (1)..(504): unsure at all n locations
ggtagaggcttgatctagccaaaagactatctgcactacagtaccggtccggaattcccgggtcgacccacgcgtccggcaacatagaaagcacaatattgtaccaacaatggcagccaaaatattttgcctccttatgctccttggtatttctgcaagtgctgctactgcgaccattttcccgcaatgctcacaagctcctatagcttcccttcttcccccgtacctgtcaccagcggagtcttaggtatgtgaaaacccaattcttcaaccctacaggatccaacaggcaatcgcagctggcatcttacctttatcacccttgttcctccaacaatcatcagccctattacagcagttacctttggtgcatttattggcacaaaacatcagggcacaacaactacaacaacttgtgctagcaaaccttgctgcctactctcagcaacagcagtttcttccattcaaccaactagctgcattgaactctgcttcttattagcn

SEQ ID NO: 85628 - DNA, 510 bp, Zea mays
ggttaggaagcctgtgttactgacagcgggggataaaagcattgctcgtaccggtccggaattcccgggtcgacccacgcgtccgcccactcgtccgcccaaacaagtatacatctaagatgctcctggctgcaattgatgagcttcacagaggaacttatgactttttctacctgccaattgatttcaagaacaaatgcaatgttggatacgcgttcattaacatgatatcgccggtgcatattatatccttctaccaggcttttaatggtaagaaatgggaaaagttcaacagcgagaaggtagcctcgttggcttatgctagaattcaaggacggtctgcactgatatcacattttcaaaattcaagtttgatgaatgaggataagaggtgccgccccattctttttaatcccaatggtcaggagtctgtgcaccaggaagcatttccaatcaatggcatatgcatccacatgcttccggaagatgattaccttgacaatgaagatg

SEQ ID NO: 85629 - DNA, 504 bp, Zea mays
  unsure (1)..(504): unsure at all n locations
nggaaaagtgtgtttaacgtagcaagacatactgaattgctgtaccggtccggaattcccgggtcgacccacgcgtccgctctcaccaacagcagttccttccattcaaccaactggctgcattgaactctgctgcgcatttgcaacaacatctaccattcagtcagctagctgctgcctacccgcagcaatttcttgcattcaaccaactggcagcattgaactctgctgcttatttacaacagcaacagctaccaccattcagccagctagctgatgtgagccctgttgccttcttgacacaacaacagttgttgccgttctacctgcacgctgcgcctaacgctggcaccctcttacaactgcaacaattgctgccattcaaccaacttgctttgacaaacccaacaacgttctaccaacaacccatcattggcggtgccctcttttagattgcttatgagttatagctcaataatgaagatttccggatgatgtatgagg

SEQ ID NO: 85630 - DNA, 494 bp, Zea mays
agtagaagggttgttacggaagtggagttattgtcatactctaccggtccggaattcccgggtcgacccacgcgtccgagatgagcttgtttttgttctagcagcaacaaatctaccatgggaattggatgcagcagtgctgcgtcggctggagaagcgtattcttgttccattgccagagccggatgctagacatgctatgtttgaagagctcctgccatatacacctggcacaatggagatgccctatgatgttcttgtggagaaaactgaagggtattctggctctgatattcgcctggtatgcaaggaagcatcaatgcagcccctaagacgggtaatggcagttcttgaaggcaggaaagaagaggtccctgagggtgagttgcctgaagttggcccagtaactacagaagatattgaacttgctttgaggaatacaagaccgtttgcacatcttcatgcacatagatacgaaaagttcaaccaagatt

SEQ ID NO: 85631 - DNA, 502 bp, Zea mays
aggaggaaagactcgtttaaggaggacggagggtagtagtatactctaccggttcggaattcccgggtcgacccacgcgtccgatttaaccaattcgccgcactgaacccctctgcttatttgcagcagcaaatactactaggatttggccagctagctacaacaagccccgcttccttcttgacacatcatcaattgcttccgttctaccagcagtttgtggctaaccccgcaacccttttacaactgcaacagttgctgccctttgtccaacttgctttgacaaacccagcagccttctaccaacaacacatcattggcggtgccctcttttagattgcttattagttgtcattcaataatgaagttttttggctgatgtatgtggcctcctagaaataagaagttatatttccaaaaaaaaaaaaaaaaaaaaaaaaaaaaaaaaaaaaaaaaataaaaaaataaagatcatagctaagatgaagttgaacaaaaaaaa

SEQ ID NO: 85632 - DNA, 504 bp, Zea mays
gggggtaaggggttcttgataagggggagggaagggagatcttcaaccgctccggaattcccgggtcgacccacgcgtccgcggacgcgtgggcgaggccaactcactaccacatcctgcatgatgagataggcttcaggcctgatgatctgcaggagctggtgcattcgctctcttatgtgtaccaaaggagcacaacagccatatcagtcgttgctcccatctgctacgcacatctggcagctgctcaggttggccagttcataaagttcgatgagatgtcggagacgtcctccagtcatggcgggcatacttcggcgggcagcgttccggtccaggagctgccgcgcctgcatgagaaagtgaggagctcgatgttcttttgctgagccgtggttttacttttttggtggatggtgaacccctctagttatgtcggtagacgcttttggatgacgctctagttgtggtccaggaaggctcgagctggtacgatgttaaatg

SEQ ID NO: 85633 - DNA, 503 bp, Zea mays
  unsure (1)..(503): unsure at all n locations
nggttggctgacttataagcgcagggaggtactcttataccgctccggaattcccgggtcgacccacgcgtccgcttgcgtgttgtcggtagtgaacttattcaaaagtaccttgnggatggtcccaagctagtcagagaattgtttanggtggctgatgaactttctccctcaatagtcttcattgatgagattgacgcagttggaacgaagaggtatgatgctcattcaggaggggagcgtgagattcaaagaactatgttggagctgctgaatcagctagatggttttgactcacgtggagatgttaaagtcattctagcaacaaaccgcattgaaagtcttgatccagccttgcttcggccaggccgtatagaccggaagattgaatttcctctaccagatattaaaactagacgacgcatcttccagatacacacatcgaaaatgacattagctgatgatgtgaacttggaaaaagttgttatgaccaaagacgagtt

SEQ ID NO: 85634 - DNA, 501 bp, Zea mays
ggtagaggtatagtctgtagcccagaatcacgcattgctgtaccggtccggaattcccgggtcgacccacgcgtccgggataaaagacccgctcctgtcccgcaggcaactgagcgccggcccgcccgcccgggcaccagccgccgccgcaccgtcaccgcgcgacctcccttcttcgccgcaaaccgctctgggcgcttgaagatggcggtgccgctgttgactcagaagatcgtgaagaagcgggtcaagcagttcaagaggccccacctcgaccgctacaagtgcctcaagccaagctggcgcaggcccaagggtatcgactcccgtgtcaggcggaagttcaagggatgcaccttgatgcctaacattggatatggctctgacaagaagaccaagcactacctccccaacaaggttaagaagtttgtcgtgcacaatgtttctgagctggagttgcttatgatgcacaacaggacatactgcgctgaaatcgcacac

SEQ ID NO: 85635 - DNA, 501 bp, Zea mays
  unsure (1)..(501): unsure at all n locations
gaggagaagggttnagtaaggagacgacgattattggaatngctcgtaccggtccggaattcccgggtcgacccacgcgtccggcttggtcttcagagagagcaccagctctctctgaagaccgatagggaaaagaagcgtgagatgtacttccccatgatgcagtatgctatgaaggcctaggtcagaactgcgagacgctgtgcttagcatatgatagggtgtatgttaattattgggatgaatggacatttgctgtgggtcggaagtacgacgtattcctccatttccataaatggctaaattggactgactggcgcaaaactagcaaagaagaggactcgcgttctagaggatccaagcttacgtacgcgtgcatgcgacggcatagctgtcactatagtgtgacctaaattcaattcaatggacgtcattttacaacgttgggactgggaaaaccctagcgttacccaacgttatcgtctttgaacacatatcatt

SEQ ID NO: 85636 - DNA, 504 bp, Zea mays
gaggtaagagggtcttgataagtggggggggggaggaaagttaaacctcgtccggaattcccgggtcgacccacgcgtccgaggcatctcactggagagtttgagaagaaatatgaaccaaccattggtgtggaagttgatccgttggatttcaccactaactgtggtaagatcaggttctactgctgggataccgcagggcaagagaagtttggtggcctcagggatggatactatatccatggccagtgtgcgatcatcatgtttgatgtaacctcaaggcttacttacaagaatgttcctacgtggcatagggacctgtgcagggtctgtgaaaacatccccattgtcctctgcggtaataaggttgatgtgaagaacaggcaggtcaaagccaagcaggttactttccacaggaagaagaatctgcagtactatgaaatttctgccaagagcaactacaactttgagaaacctttcctgtacctcgcaaggaagctggcc

SEQ ID NO: 85637 - DNA, 493 bp, Zea mays
  unsure (1)..(493): unsure at all n locations
nggttaggtgcttgatacgaagggggaagtactgtcatcccgtccggaattcccgggtcgacccacgcgtccgattgataccaaactgcctccttaaaaggcccattgtgtcccacattgcacttaggtatgtgcctcctatcctcctggccttctgcagtgctgctacagcgaccatgtttccacattgctcacaagctcctatagcttcccttcttacaccgtacctctcaccaacggtgtcttcggtatgtgaaaacccaattcttcaaccctacatgatccaacaggcaatcgcagctggcatcttacctttatcacccttgttcctccaacaatcatcagccctattacagcagttaccttaggtgcatttattggcacaaaacatcagggcacaacaactacaacaacttgtgctagcaaaccttgctgtctactctcagcaacagcagtttcttccattcaaccaactagctgcattgaactctgc

SEQ ID NO: 85638 - DNA, 495 bp, Zea mays
gtaggaagtgtgttagcgggtagactacagtatagctgttcggaattcccgggtcgacccacgcgtccgcgacggccccgccggttccgccggggttaaccccaataagatcgccaagctcttcgggaagctgttcggccagccctcggcgtcgctggggccgtcggccgaccccgcggagaccaggccgctaaaggtcggtgtcgagctctctggtggacaagcgcccggtgggcacaatgtcatctgcggcatctttgattacctacaggagcgtgcaaaaggtagcaccttgcttggactcaagggacgccctgctgggatcatgaagtgcaaatacgtggagctcacttcagactttgcgtatccctacagaaaccagggcggattcgatatgatctgcagtggaagggacacgattgatacaccggagcagttcaagcaagctgaagacacagccaacaagcttgattcggatggacttagtgtcattgg

SEQ ID NO: 85639 - DNA, 512 bp, Zea mays
  unsure (1)..(512): unsure at all n locations
ggtttaggaagctgtnctaacgaaagtcgggggaaacgggtagacttcgtaccggtccggaattcccgggtcgacccacgcgtccgctcgtagagagaaggaaaaatatccccaaaccctagctcccgatctcgatggcgaaccctcgcgtcttcttcgacatgaccgtcggcggcgccccggcgggccggatcgtgatggagctgtacgccaacgaggtgcccaagaccgcggagaacttccgcgcgctgtgcacgggcgagaagggcgtgggcaagtccgggaagccgctccactacaagggctccaccttccaccgcgtcatccccgagttcatgtgccagggcggcgacttcacccgcggcaacggcaccggcggcgagtccatctacggcgagaagttccccgacgagaagttcgtgcgcaagcacaccgtccccggtgtgctctccatggccaacgccgggcccaacaccaacggctcccagttcttcatctgcaccgtcgcgacc

SEQ ID NO: 85640 - DNA, 491 bp, Zea mays
  unsure (1)..(491): unsure at all n locations
agggagagctcnatacgaacgggggtaaaggtaggctctaccggtccggaattcccgggtcgacccacgcgtccgccgactcgtacggagcggattatcctaccactacggttcgggttcggattcgggagggtcatcctcgttcggcttcgtgggtgagcggatcgagatggcatgcgtccgatgttgagtaccgctgctacatctgcggtctctcctgggccactgacgaccactgcgtccacaacgccttcagcacctacggcgaggtcctagagtacaagatcatcctcgatcggtagactcagacgtccagcagcttcggctttgtcaccttcttcacggatgaggcgatgcggaacgccatcgcaggcatgaacggaaaggatctggacggacgaaccatcaccgctaacgatgcccaatcccgctgcggactctgaggcagaacaggtgggtacagtggtggacgtagatgcatcggatactgc

SEQ ID NO: 85641 - DNA, 503 bp, Zea mays
  unsure (1)..(503): unsure at all n locations
ngtggagaaggttanagtatagtaaggggggaaaaagtaatgctcgtaccggtccggaattcccgggtcgacccacgcgtccggcattcagaaacacaccacgcgaagctcattatcaacaacctaacatcaatggctaccagagtatattatccctccttgcgctatttgcgctttttgcgagcgcaacaaatgcgttcattattccacattgctcacttgctccaagttccattattacacagtatgctacatcaggtacttcaatgggcttcgaacacccagctgtgcaagcctataggctacaacaagcaattgcggcgagcgtcttacatcatccaatttcccagttgcaacaacaatccttggcacatctaacaatacatactatcgaaacgcaacagctacaacaatttctaccagctctgagccacctagccatggtgaacactggcgactacttgcaacagcagatgcttgcatcatacccacttgctctggcc

SEQ ID NO: 85642 - DNA, 460 bp, Zea mays
agggggttgatacagaaagaaagtactctataccgtcggattcccgggtcgaccagcttcgacaccgtacgaccgtactgatcctggcgccctgccgacgcgagacgagcggcgcagaattgtcaccgtgctatgagcagttaggtgcacgagctccgacgaagacaagactgactgcagcgcagtgaggagctgaagctgagctctaatcctcgcgtaggaacgtcaccggctgggcacccaaaagctctcaagataaggtggtgcgcaccttgatcgacacgtgatacagagatctcgcagaagcagaagtcggcgttgcgggaggcgtacaagatgaagaacctgctaccccctcgacctgcgccctaagaagacccgtgccattcgccggcgtctgaccaagcaccagatctgtatgaagaccgagagggaaaaaaagcgtgagaagttctctccc

SEQ ID NO: 85643 - DNA, 493 bp, Zea mays
gttgagtcttgattatgaaagacagtactgtatacccgttcggaattcccgggtcgacccacgcgttcgcgggagcgcttatgccttcttactggtacaaccgcttttggcatttcatttgcaaggggtgggaaacattggtgctttcttgagacaacaacatttggtggcattttacccacaagttgtgggaaacattaatggctttttgcaacagcaacaattggtaccattctacccacagaatgtggcaaacaattgtgccttcttacaacaacaacaattgctgccatttagccaacatgctttgacgaatcctaccaccttattgcaaccgcccaccattggtggtgccatcttctagattttttatgatttatactgtaataataaagttctcatgctgatatgtgcgacctctcagtaataaagtattagagatctatattttaaattcaaaaaaaaaaaaaaaaaaaaaaaaaaaaaaaaaaaa

SEQ ID NO: 85644 - DNA, 633 bp, Zea mays
  unsure (1)..(633): unsure at all n locations
aggttaggcatggtnnnactcacgcacccacgacagtaanagccattgctcgtactcggttccgtgaattcccgggntcgactccacgtcgtctcgtcccacgtcgtctcgcgtgacgtcgtgagggctatgagtctcgtaccggcagttgtctaagggacgtgagagacggctaaccgtacaaagtcttcgatctgtccctcgcttatttcggcaaaccatgttcgtctgcccgagggagtatctctcgtcgcctaggtttctgagcgtaagttcgcgtggatggatgccatctgaatgtttctctgaatggtagaaaatcatcaagaagcccagtggtctacaagttcccatgcataccttcaatggatctcacataagggaccagtcaacttaaaggatgcctgtgccgtcattgcacggaactaggaagtctcnttccgtattattgaatggaaccccaactgctnnngcatcgcttggcccctatggtnnttcgagtaagacaaaataactggaaacgatattctaagtgtttagactttgggaaggccggaacacttttgatggtatctcgtattgggaagattggtcgatgtgtgtgtgttgagagtgctctttcacatactggtg

SEQ ID NO: 85645 - DNA, 502 bp, Zea mays
  unsure (1)..(502): unsure at all n locations
gtggaggagtatttnatgtgtttctccgggaggaagtagtgctcttcgcgatctcggaattccgggctacgacccacgcgtgcgcaatccttcaagcgcaagctgcctccttctcgtcgtccggtcgtgagaagggagggcggtccatggcaaggctatcgacgctggctccgcgaataaggcaacgtcgaggagctccaaagccggactccagttccccgcctgcaggattgctaggtccctcaaggcgagcaagtactctaagcgcgtcagcgccggcgcccccgtgtacctcgccgccatcctctagtacctcgcggctgacgttctcgaacttgccggaaacgccgagagggacaacaagaagacccgcattgtgccgagccacatgcagcttgctgtgctcaacgacgaggagctgaccaaactgatgagtaggtgccaccatcgcgagcagaggcgttatgcctaacatccatcagcatctgctgcccaagaaggg

SEQ ID NO: 85646 - DNA, 501 bp, Zea mays
agggaagtaggttggttaagtgagtgtggggggaaaggtaaacctctccggaattcccgggtcgacccacgcgtccggcaacagttcactaagagcagcgataggagagagaccggattcaatctcgcagatgaggtccgtagcgtccagcccagagctagaaaacagtgcagaagttgtggaggatacggtgacagctatccttaatctctctatccacgagagcaacaagaagatcattggagacgacccactggcagtcccgttcctgatcaaggccttacagtcaggaagcatggaggcccggagcaacgccgccgccgccatcttcagcctatccgcgctggacggcaacaaggcgaggatcggcgagctcggcgcgatgaggccgctggtggagctcctcgagcacggcagcacggcagcgaggaaagacgcggcctcggccatcttcaacctgtgcacgctgcacgagaacaagtcgcgggccaccaagagcgg

SEQ ID NO: 85647 - DNA, 501 bp, Zea mays
agatagtaaggtgtggttcagcggtgcttgggagagagtatcctctccggaattcccgggtcgacccacgcgtccgaagggcaccagccggtgttggtttcagcttgtattcccactctgtcgcacagcgtcggccgtcgccgctgagatcctaggaagaaatggagctctctcgcaagctcttcacggccgtcctcctcgtcatgctgctgctgctgtccgcagaggtcgggccggtggcggtggcggaggcgcggacgtgccagtcgcagagccacaggttccggggcccctgcctccgccggtccaactgcgccaacgtctgcaggaccgaggggttccccggcggcaggtgccgcggcttccgccgccgctgcttctgcaccacgcactgccactgattcgctcgcccagcggccggctggcgtcgccgtcgatcgcgtcgcgaccagtccatggctccatgcatgaataacaagggtgtgcgcggtttgtgttgtg

SEQ ID NO: 85648 - DNA, 511 bp, Zea mays
  unsure (1)..(511): unsure at all n locations
nggataaaatagcgtggtctcacgtacaacgacatatacagtcattgctcgtaccggtccggaattcccgggtcgacccacgcgtccggaaacggatggacaagtatatttggagtttgatgtggtgtttccggatcgtgtgtgggtctcagatgcaggtgggcgctgtgggcgggaggcaggtgtaccagaacgtcctccacgctatctactgcatcctcaagaaggagggcgccggcggcctgtaccgaggtctcggccctagctgcatcaagctcatgcccgccgccggcatcgccttcatgtgctacgaggcgtgcaagaagatcctcgtcgacaaggaggatgaggaggaggaggacgaagccggcggcggagaggatgacaagaaaaaggttgaatgatcaaagttcttggccaagaaggtagcaatgtcgtgaagcgtacgtgaactggaaacggatggacaagtatatttggagtttgatgtggtgtttccggatcgtgtgtt

SEQ ID NO: 85649 - DNA, 507 bp, Zea mays
  unsure (1)..(507): unsure at all n locations
agtagggaggttaatacgacgacgggggtaaaaagtaacgctcgtaccggtccggaattcccgggtcgacccacgcgtccgcaccggccttgtctgcctggagctttacaaagtccttgctggtgggcacaaggttgaagactaccggaacacatttgcgaacctggcgatccccctcttctccatggcggagcctgtgccacccaagaccatcaagcaccaagacatgtcctggaccgtgtgggaccgctggacggtaactggcaacatgacgctgagggagctcctggagtggctgaaggagaagggcttgaatgcgtacagcatatcatgcgggacctcgatgctgtacaactccatgttcccgagacacaaggagcggctggacaagaaagtggttgatgtggccagggaagtggccaaattggaggtgccttactaccgncgncatctggacgttgttgtggcctgtgaggacgacgacgacaatgacgtcgacattccgtn

SEQ ID NO: 85650 - DNA, 507 bp, Zea mays
  unsure (1)..(507): unsure at all n locations
ggttagagaagtctgntcttccggacaccgaatatacagcatagctgtaccggtccggaattcccgggtcgacccacgcgtccggtggctgttaatgttgccctgtcactgagatatgagatcaacaggggctttgctacgttaagggagattgggcatggccgtgatctgaagaaattcctaattgttattgcaggtctctggcttctttcagttctcgggagctgctgcaacttcctgacactgttctatattgtctttgtggcactgtacactgtaccagttctgtatgagaaatatgaggacaaggttgatgcttttggcgagaaggctatgactgaactgaagaagtattatgccattttcgatgagaagtgcctatcgaagattccaaagggcccccttaaggataagaagcactagattggtagtaaggtatttgctatgaatcaacatctacattatgtcactagctgtcacctctttctctgaaggatggtgcttggn

SEQ ID NO: 85651 - DNA, 487 bp, Zea mays
gtaggagctgttacgaaggggggaaaagtaggctctaccggtccggaattcccgggtcgacccacgcgtccgggaagatgtcgtcggtgttcagcggcgatgagaccgcccccttcttcggcttgcttggcgccgccgccgctctcgttttctcatgcatgggggcggcgtacgggacggccaagagtggcgtcggcgtggcgtccatgggtgtcatgcgcccagagctcgtcatgaagtccatcgtgcccgtggtcatggctggtgtgctcggtatctacggcctcatcatcgccgtcatcatcagcactgggatcaaccccaaggccaagccatactacctctttgacggctatgcccacctgtcgtccggccttgcctgtggtcttgctgggcttgctgcaggcatggccattggcatcgttggtgatgctggtgtcagggcgaacgctcagcagccaaagctgtttgtgggcatgatcctcat

SEQ ID NO: 85652 - DNA, 502 bp, Zea mays
gtattaaaggctcattaagagaagatagtattgctctacccgtccggaattcccgggtcgacccacgcgtccgcaactagcaacatagaaagcacaatagtgtaccatcaatggccgccaaaatattttgcttccttatgctccttggtctttctgcaagtgttgctaccgcaaccattttcccacaatgctcacaagctcctatagcttcccttcttcccccatacctctcaccagcggtgtcttcagtgtgtgaaaacccaattgttcaaccctacaggatccaacaggcaatcgcaacaggcatcttaccattatcacccttgttcctccaacaaccgtcagccctattacaagagttacctttggtccatttggtggcacaaaacatcacggcacatcaactacaacaacttgtgctagcaaaccttgctgcatactctcagcaacatcagtttcttccattcaaccaactggctgcattgaactctgctgcttattt

SEQ ID NO: 85653 - DNA, 505 bp, Zea mays
ggttaggtaagagtgttctgtactccgcaaaacagtagacctcgtccgattcgcggtcgacccacgcgttcggaactagcggcataagaagcacaatgatcttctaacagtggcggacaaaatatcggggttggtgacgctccttggactgtctgaaagtggcgataccagatccatagcgctacaatgctcactagctcacatatcttcccttgttcagccatacctgtcaccagtggtgtcttcaatgtgcgaaaacacagtcgtttaaccctacaggatccaacacgcaatcgcaacaggcatcttaccatcatcacacttgatcctcaaacaaccgtcagccctattacaagaataacctttaggtccatttgacagccacaaaacatcactgcacatcaactacaacaacttgagctagcaaaccttgcttgatactctcaccaacatcactgtctcccaatgaaccaactggctgcattgaactatggtgccaatatga

SEQ ID NO: 85654 - DNA, 499 bp, Zea mays
agtcttaggtgcttgatccagcaagcacgtactgctcataccgtccggattcccggtcgacccacgcgtccgtgtacgcactagagtaacacagatgtataacaggtagaaagaccaaccatacaagcgagtatgctcccttaagatcattgaccacatcgtacgggatgggagtgacggtctcgatggtagtcccctcaaccatgaagacaggcttggggcccaacggctgcctcttggtgctgatgacctcgccgcgctcctttgtatgcgccttcagctggtcattgatcttaagggaggattctaggtatgctgcttgctgatcctacctggtcacactagagctacacagatgtagaacaggtagaaagacacaagcaaccgactactatgctgcatgaacatcagctgccacatgtgaccgtactctgagaggctgccgagaagcacggtgccgaaatgcttccgattggcggacatggctactgtgcctttt

SEQ ID NO: 85655 - DNA, 503 bp, Zea mays
ggtggacaggtctttaaggggaggggggaaaggagatgctctccggaattcccgggtcgacccacgcgtccgcaaaaagacattggagatcaacccatagaaccctatcatggatgagctccgcaagcgtgccgaggctgacaagaatgacaagtcagtcaaggatctcgtgatgctgctgttcgagactgctctcctgacctccggcttcagcctggatgaccccaacaccttcggcaaccggatccaccgcatgctcaaactcggtctgagcatcgatgaggacgagcctgttgaggcagaagccgagatgcctcagcttgaggacgacgctggtgaaagcaagatggaggaggtcgactaagtgtcgcatcgcatgcttgccgtttatcttatccctagctaagctacctgtgatagcttaattttcactattgttcgaggtttttggcacgttatcggttgtcctgctggccaggctataagtctggtttatctgttat

SEQ ID NO: 85656 - DNA, 509 bp, Zea mays
  unsure (1)..(509): unsure at all n locations
agggaagagaatactcgtactcacgtattctcgcacatataagtactacctctaccggtttcggaattcccgggctcgacccacgcgtccggncgcaactagcaacatagaaagcacaatagtgtaccaacaatggcagccaaaagattttgcctccttatgctccttggtctttctgcaagtgctgctacggcgaccattttcccgcaatgctcgcaagctcctatagcttcccttcttcccccgtacctctcaccagcggtgtcttcggtatgtgaaaacccaattcttcaaccctacaggatccaacaggcaatcacagctggcatcttacctttatcacccttgttcctccaacaatcatcagccctattacatcagttacctttggtgcatttattggcacaaaacatcagggcacaacaactacaacaacttgtgctagcaaaccttgctgcctactctcagcaacagcagtttcttccattcaaccaactagctgcattgan

SEQ ID NO: 85657 - DNA, 486 bp, Zea mays
  unsure (1)..(486): unsure at all n locations
cgaggtagggttttacgatatgatacagtatctcgtccgatcgcagtcgcccacgccgtcgaagttgcagcgntcnagcgcatgatcaggcatgttcgcatgcgcttgctgctgccagagaacgccaaagtggatcatgtcaaggcttgcctcgagaacggcctgctcacggtcaccgtgcccaaggcggaggacaagaagccctgagtgaacgctattgagatatctggttgagcatgcaatccaatatggacgtggaaggaaggtggactgcttgcggtccgtggctagtgctgtcttgcgtgaagtttactgtgtcttctacgatatataacgtacttccgtttgtttcgcttcgtatgtacaatcttccggttatatgaataataacatataaaatcgggttctcacggtcaaaccgttcagccaacaggcctgaaccctttcgaagagtggcccgaaaaatagggcgaacccgtctagagg

SEQ ID NO: 85658 - DNA, 501 bp, Zea mays
  unsure (1)..(501): unsure at all n locations
gtttagggcttgatcacgcaagtacgtactgctataccggtccggaattcccgggtcgacccacgcgtccgagcgcctncacgatctcgacgagaggatgcccaatcgcgaaaccgccgccctattgcaatggcgcccaaggccgagaagaagcccgccgtcgagaagcctgcggaggaggagccggcggcggagaaggccacggctgggaagaagcccaaggctgagaagcggctccccgccggcaagtacgcaggcaaggagggtggctagaagaaggggaagaagaaggcaaacaagtcggtggagacgtacaagatctacatcttgcaggtgctgaatcaagtgcacccagacattggcatctcgtccaaggccatgtccatcatgaactccttcatcaacgacatcttcgagaagctggcggcggaggcggccaatctggcacggtacaacaagaagcctaccattacgtccagcgagatccagacctgcgttcgn

SEQ ID NO: 85659 - DNA, 507 bp, Zea mays
  unsure (1)..(507): unsure at all n locations
agtttgactgtttgatccagttcacgcattaccgtcanactcgtaccggtccgtattcccgggtcgacccacgcgtccgagccatatccgaacttatgtccatcttcctgctcatccgccttcttatggagccggccaagccagggatcgccatgtcggactcggaggagcaccacttcgaatcgaaggccgactccagagcgtccaagacctaccctcagaaggctgtcaccgtccgtaagaacggcttcatcgtcatcaagaaccgcccctgcaaggatgtggaggtttctacctcagatactgttaagcatggtcatgccacatgccactttgttgccatagatatattcaacgggaaaaagctcgaagatatggatccttcgtcacacacctgtgatattccgcatgtgaaccgtactgagtatcatctgattgatatatcatacgatggatttgggagccttcttacatcagatggcaacactaaagatgatcttagactcc

SEQ ID NO: 85660 - DNA, 510 bp, Zea mays
aggttagagttcttgataagggggggacgagtactctcatccggtccggaattcccgggtcgacccacgcgtccgcccacgcgttcgcggacgcgtggtttccaacctattcccaaaggtccccttccttccggagggctaggctggtggtgtcatcaaaaagccaaaccgttcttgcttgtgctccaaggtcaccaaagaaactgagaaggttgtgtgcatggagaaggttgtgtatgttgctgagcagtgtaagaggccatttgagcatggcttccagtgcggaagctacaaggttccagcaaactgatgatatcgcaagagggaagcgcttgacgtagtctttagatttcaattgttgcagccgatcaaccttcttagggttgtataatatgaagtcaatgttgagactaatgtgaggtgggagaggcctattgatgcatcaaaagtattatgagctaataataaagccttctccacataaaaaaaaaaaaaaaaaagaagaaaaaa

SEQ ID NO: 85661 - DNA, 511 bp, Zea mays
  unsure (1)..(511): unsure at all n locations
agttaggcaggcttgaaaagaggagggagaaaagtacactcgttnnnnttncggaattcccgggtcgacccacgcgtccgaaccatcagggcacagcagctgcagcatctcgtgctacctgtgatcaaccaagtagctctggcaaacctttctccctactctcagcaacaacaatttcttccattcaaccaactgtctacactgaaccctgctgcttatttgcagcaacaactattaccattcagccagctagctactgcctactctcagcaacaacaacttcttccatttaaccaattggccgcactgaaccccgctgcttatttgcagcagcaaatactactaccatttagccagctagctgcagcaaaccgtgcttccttcttgacacagcaacagttgctgcctttctaccagcagtttgcggctaaccccgcaaccctcttacaactacaacaattgttgccctttgtccaacttgctttgacagacccagcggcctnctaccaac

SEQ ID NO: 85662 - DNA, 507 bp, Zea mays
  unsure (1)..(507): unsure at all n locations
tgttagaagcgtgtnctaccgtaaggccgggataaaagtagtgctcgtaccggttcggaattcccgggtcgacccacgcgtccgagaggtctgacttcgaaggcattttccgcgctatggatggactttcagtgactattcgacttctggaccctccccttcacgagttccttccagaagggaacgtcgaggaaatcgtgcgtgaactgcgttctgagacgggagccaaccaggaggatgccctcgcacggatcgaaaagctttcggaagtaaacccgatgcttggcttccgtggctgcaggcttggtatatcgtaccctgagctaacagaaatgcaagcccgtgccatctttgaagctgctatagcgatgaccaaccagggcgttcaagtctttccagagataatgggtcctcttgttggaacaccgcaggaattgggacatcaggtggcccttatccgtcaagtcgctaacaagagcttcaccagtatggggaaaactattgtgt

SEQ ID NO: 85663 - DNA, 525 bp, Zea mays
  unsure (1)..(525): unsure at all n locations
nagtttagggcagagttttaacctggaaaccctagngcaatngcctantcccttngnnntncggngttccagcgtcgacccacgcgtccgcgtgaaggcgaagatccaggacaaagtagggcatccccccagaccagcagcgtctgagcttcgccggcaagcagctggaggatggccgcaccctagcagactacaacatccagaaggagagcactctccacctggtgctccgcctccgcggtggtcagtaagccatggttcatttaagctgctgctgtacctgggtatctgcgtcgtctggtgccctctggtgtacctctatatggatgtcgtcgtctaataaacatctgtggctagtgtgtcatgaatcgtggttgtggcttcgttggtttaatggacctgttgtgtcctctgtgttgtccccaaaactcttctgcagcagtatggcttgaatccttatgaagtttgatatttgaacttaaaaaaaaaagcctttacggaacaaatattgctcctcaccacaaa

SEQ ID NO: 85664 - DNA, 497 bp, Zea mays
agaagggaggctatctaagaatatgtaagaaaagaaggctctaccggtccggaattcccgggtcgacccacgcgtccgagagcctcattcatctccattcgaaacaccctcgcacccacactctcccttcggcccgagcctaaatccccgcaacgatggctcgcacgaagcagacggcgcgcaagtccacgggcggcaaggccccgaggaagcagctggcgaccaaggcggcgcgcaagtcggcccctgcgaccggcggcgtgaagaagccgcaccgcttccgcccgggcaccgtggcgctgcgcgagatccgcaagtaccagaagagcacggagcttctcatccgcaagctgcccttccagcgcctggtccgcgagatcgcgcaggacttcaagaccgacctccgcttccagtcctccgccgtcgccgcgctgcatgaggccgtcgaggcctacctcgtcggcctgttcgaggacaccaacctctgcgccatccac

SEQ ID NO: 85665 - DNA, 495 bp, Zea mays
gagggaaaggttttgatagagggcggagagaaatctcaaccgcttcggaattcccgggtcgacccacgcgtccgataatgtttgggctagcacagccagcggaaacaggaagctggattctgcttaccgtgcggccagagagaaagaagagcattgccctattttcttgtttttctcggttaatggaagtggccaattctgtggcgtggctgagatgattggacctgtcgattttgacagaagtgttaattactggcagcaggataagtggagtggccagttcccagtgaagtggcacataattaaggatgtaccgaacaaccttctgcggcacatcattcttgagaacaatgacaataagcctgtcacaaatagcagggacacccatgaggtgaagctggaacagggcctccagatgctaacgatcttcaagagccatgaggctgagacaacaattgtggaagatttcgacttctatgagcagcgggagaaagc

SEQ ID NO: 85666 - DNA, 500 bp, Zea mays
  unsure (1)..(500): unsure at all n locations
agttagaccttntaaaaactgtaatcatagctagaccctttcaccccnctctgggtcgacccactctccgatacctttgcttctgaaatttcaattcaattcaagcccagcacacaaacatcaggggcaagggacttctcctcggatcgtactctatacactagtacccttcaaacccgtgcctgcaatgtggataacgtgtagaacgctagagcgaccttactcgccaggtgcaaggccaactccgaggctaccctcggcacctacaagggtgatgctgcncnncnacnccnagagccttcacctcaaagactacaagtattgactcgcttctctttgcgaccccgttagtttgaaactcctgcctgctaatatgttgctgagtgttgtttgcttgttagagcttttatattcgaacataaaaaaaacatgcttcctatgtggatgatggttatctttatattcgtatattaactacnnnnnnnnggnnngnnaaaaac

SEQ ID NO: 85667 - DNA, 542 bp, Zea mays
  unsure (1)..(542): unsure at all n locations
tataaaattttctgtgntttcgactcttcgtatgctgctactgtcctgaattcacgggtcgacccacgcgtccggaacgccatcgagggcatgaacggcaaggagtttgactgccgcaacatcaccgtcaactaggcggagtggtttttaggtcgtggaggcagcggtggttggtactgtggtggtcatttatgcgtttgatacatgtgtggctgacgccgtgatggcttcatgctacatactgctgtggcatatgctacagtgtctgctgctgctactgtggtggtggcagaagctactgcattggcaaccgtttctactgctactgtaactacgacagtaactgtacgaactgatcggtgtagtctgctcggacaagttatactgttaccttccgtgatgtataccctaatcaaatggtttatctttttcgtctagtttttgtggtttccaatatgtgtttttaattgcaagttgtttcttttcaatttattattcctgttataattttgtattcaatttaaccatttctttaaaaagtt

SEQ ID NO: 85668 - DNA, 548 bp, Zea mays
  unsure (1)..(548): unsure at all n locations
tgggaggagtgtgtcntgtctcgcatatgcatggaatagtattccgtcccggaattcccgggtcgacccacgcgtccggttgaaggcctgcagcagggttattgtgtcatttctagcgataaaaggttcttggttctgtatgctttgctaagaaagaagcggaataagaagataatggtgttcttctcatcatgtaattcagtaaagttccacgctgaacttctgaatttccttgggatagagtgttctgatatccatggaaaacagaagcaacagaagcgaactactacattctttagcttttgcaaggcagaaaagggcatcttattgtgcactaatgtggctgcccgtggacttgatattcctgacgtggattatatcttgcaatatgaccctccagatgaaccaaaggattacattcacagagttggtcgtaccgcacgtggtgagaaaagcaaagggaagtgcatntgctgtcttactaccagaagaactgaagtttctatttaacctgaaagcggccaaggttaccctgaccgaatatgagn

SEQ ID NO: 85669 - DNA, 543 bp, Zea mays
ggggggggttgtgttactatacgcatatagtagtcatccctctccggaattcccgggtcgacccacgcgtccgcggacgcgtgggagctcttgtcccctattaccttgatgaaaaaactgggtggggtttggagatgtctgatcttaagaaacaactcgaagatgctcggtcaaaaggcattgatgttagggccttggtggttatcaatccaggaaatccgactgggcaggttcttgctgaagacaaccaatatgatatagtgaaattctgtaaaaatgagggccttgttcttctagctgatgaggtatatcaagagaacatctatgttgacaacaagaaatttaactctttcaagaagattgcaagatccatgggatacggcgaggatgaatctcctttaatatcatttcaatctggcttcaaagggtactattgaaagtggtgtaaaaggaggaggttccttgaaaatactggcttcaattcttccgtaaggaagccaattttccaggtagcttcaatggacctgggcttcaatattaatg

SEQ ID NO: 85670 - DNA, 545 bp, Zea mays
  unsure (1)..(545): unsure at all n locations
gtgtaggcgactttctgtgncctgaaccgctccgtanctgaccagcacctgacttcaggttccaggtacacctacgcgtacgcgtcggagctcttgtcccctattactttgattaaaaaactgggtggggtttggagatcggtcgtcttaataaacaactcgaagatgctcggtcaaaaggcattgatgttatggccttggtggttatcaatccaggaaatccgactgggcaggttcttgctgaagacaaccaatatgatatagtgaaattctgtaaaaatgagggccttgttcttctagctgatgaggtatatcaagagaacatctatgttgacaacaagaaatttaactctttcaagaagattgcaagatccatgggatacggcgaggatgatctccctctagtatcatttcagtctgtctccataggatactatggacagtgtggtaaaagaagacgttacatggagaatactggcttcaatgctcccgtaagaaagcagatctacaaggtagcttcaatgaaccgtgcttccatatcactt

SEQ ID NO: 85671 - DNA, 540 bp, Zea mays
gtggaagtttcgtcaactgccagctcattgactcatccactaccggtcctgaattcccgggtcgagccacgcgtccgggatcctctgggaatgtgataattgacttctactggggtatggagctgtaccctcagatgggcgagtactttgatatcaaagtattcaccaactgtcgtttcagtatgatgtcctgcgctgttcttgccgtaacctattgcataaagcagtatgaaatgaatggcagagttgctgattctatgcttgagaatactgcacttatgttgatctatatcactaagttcttttgttgggaatctgcatattggtgtactatggacattgctcatgatagacctggtttctatatctgctggagatccttggtatgggtcccatccatatatacttcccttgaaatgtacctggtaaacccccttttgaatttggcccccaagttaccactttaaatcctcttacctggattgtggtccatatccttaaactatgatggtaaccttaaaccccaaaatatttaccgtg

SEQ ID NO: 85672 - DNA, 509 bp, Zea mays
  unsure (1)..(509): unsure at all n locations
agtnntttctganctaccgaacatgattgctaggctcntctntnttnntccggaattcccggcgcgacccacgcgtccgcccacgcgtccgtagcaacatacatagtgaagtacactagcaacatcttagcaggagtgggagccaagatttttgccctccttgccctccttgctctttcagcaagcgctgctacctcgacttttattccacaatgctcacaacaatacctctctccggtgacagccgcgggatttcaatacccaactatacaatcctacatggtacaagaggccatccaagcaagcatcttacggtcattagcattaaccctccaacaaccatatgctctattgcaacagccatccttagtgcatctgtatctccaaagaatcgcggcacaacaactacaacaacagttgctaccaacaatcaatcaagtagttgcagcgaaccttgctgctaacctccagcaccaccagttncttccattcaatcaactagctggggg

SEQ ID NO: 85673 - DNA, 549 bp, Zea mays
gggggggagatgggtctgtttatcgcaaaagaaagtatgggtagccctctcctgaattcccgggtcgacccacgcgtccggaccaacaagcaacatagaaagtggaatccagtagcaacaacagagcaacaatggcgaccaagagattgtccctccttatgctccttgctctttctgcatgtgttgctaacgcgacaattttccctcaatgctcacaagctcctatagcttcccttcttcccccataccttccatcaatgatagcttcagtatgtgaaaacccagctcttcagccctataggctccaacaagcaatcgcagcaagcaacatacctttatcacccttgttgtttcaacaatcgccagccctatctttggtgcagtcattggtacaaaccatcagggcacagcagctgcagcaactcgtgctacctgtgatcaaccaagtagctctggcaaacctttctccctactctcagcaacaacaatttcttccattcaaccaactgtctacacttgaccctgctgctaatttgcagcaacaactat

SEQ ID NO: 85674 - DNA, 542 bp, Zea mays
  unsure (1)..(542): unsure at all n locations
gggtgggagtggtgtgtgtatcaagaacaaagaaggtatccctgcccggaattcccgggtcgactcacgcgtccgggagggcgcagcggcgacgagctcagcgatacagcggcaccggagagctagccgcggcctccaggctcgcggggatctgaactagtgccgctgcccaatcgcgccgacgactgaggcgcccactcctcatatcccatttccatcactcgtttctccatttcccaccttcctaaacgccacttaaaagagaaaggagagcatcgcagtggcacacgcgcaatggaaggctcgccggtgacgcgcctnccggaggctaactccctccccgacggcttcgttcctgactctgagagccctggcacggacgcgacgtttcccttctccgcgcccatcgttgatgatgcgctcaactccgatatccccggcgcgaccaacccangcngcgaggaaaccctaaacgatcccnccctccctgcgtccagcgccgaagatgcctcttcggctgccggtgctgaagccttgtcacc

SEQ ID NO: 85675 - DNA, 542 bp, Zea mays
gtgggaattggttttgtactatttgacacacagtacgcatccctctcctgaattcccgggtcgacccacgcgtccgcttacttaagacaccagggaaggagcaagtctaatgtcaagcaccaaaacctatcttgctagacgctggtgaaatgaaggaaccatatgattgggcgcctgcaattcttccaattcagatcataagaatcggccagctggctatcttgtgtgtccctggagaattcacaacaatggctggcaggaggctacgtgatgccgtcaaagctgtacttacaagtgacaacagtggtgaatttaatacaatcatggtggtcttgcggggcctaccaatacatattcgcaggatattacaacttttgaagaattttaaatccaaagattccaaggaacatcgaccttgtattgcccccaaaccttgaacgcctaccttcaagaattccagaaacttggtacaaccattgtggcaaacaaagaagttccgaccaattttcaagccccagacattttggacaagccaattggac

SEQ ID NO: 85676 - DNA, 545 bp, Zea mays
  unsure (1)..(545): unsure at all n locations
gggggagtggttcngtcnctagctatgtatagtatagtatgcctgcccggtccggaattcccgggtcgacccacgcgtccgcccacgcgtccgcccacgcgtccgggggcgcagaggcgcagcagggctctggaggagggaggaggagggagccgctgcggcgcggggccgtcagcgcgcgcctcccggtgccggaccacatacgccggccgccctacgtcggcacggccgccgtcccggaggtgtgccccgaccggcaggtgcacgacggcgagagcatcatgcggatgctggacgcctgcgagctcgccgctcgggtgctgcaccatgccggggcgatggtcaagccctcggtgacgacggacgagatcgacagggctgtgcaccagatgatcgttgacgccggcgcctacccctnccctctcggatacggcgggttccccaagagcgtgtgcacgtncgtgaacgagtgcacctgccacggcattcncgactcacgcgagctacaggatggcgaccatatcaacatcgaccgtactggctac

SEQ ID NO: 85677 - DNA, 543 bp, Zea mays
  unsure (1)..(543): unsure at all n locations
gtgggaagcttctgttttacgaatgagacggatagtattcctcaccggtcctgaattcccgggtcgacccacgcgtccgcccacgcgtccgcagaaacacaccaagcgaagcacattagcaacaacctaacaacaatggctagcaagatattatccctccttgcgcttcttgcgctttttgcgagcgcaacaaatgcgttcattattccacaatgctcacttgctccaagttccattattacacagttcctcccaccagttacttcaatgggcttcgaacacccagctgtgcaagcctataggctacaacaagcaattgcggcgagcgttttacaacaaccaatttcccaattgcaacaacaatccttggcacatctaacaatacaaaccatcgcaacgcaacagcaacaacaatttctaccagcactgagccacctagccatggtgaaccctgccgnctacttgcaacagcagttgcttgcatcaaacccacttgctctggcaaacgtaattgcaaaccagccacaacaacagctgcaacat

SEQ ID NO: 85678 - DNA, 544 bp, Zea mays
  unsure (1)..(544): unsure at all n locations
tggaaagcgttcattgctcactgaacacattatgnatcgcactcaccggtcctgaattcccgggtcgagccacgcgtccgcccacgcgtccggagaccaacaagcatcatataaagtggaatccagtagcaacaacagagcaagaatggcgaccaagatatgttccctccttatgctccttgctctttctgcatgtgttgctaacgcgacaattttctctcaatgctcacaagctcctatagcttcccttcttcccccataccttccatcaatgatagcttcagtatgtgaaaacccagctcttcagccctataggctccaacaagcaatcgcagcaagcaacatacctttatcacccttgttgtttcaacaatcgccagccctatctttggtgcagtcattggtacaaaccatcaaggcacaagaacttgcacaactcgtgctaccttgtatcaacccaataactttggcaaacctttcttcctaatcttaacaaccaccatttctttcattcaaccaaccggctacacttaacccttgtttg

SEQ ID NO: 85679 - DNA, 502 bp, Zea mays
gtggtatctgaaggaggaggaagggtgatatgctcgtaccggtccggaattcccgggtcgacccacgcgtccgcggacgcgtgggcagaagcatccggtcaatctgctgctgctcggcctcttcaccgtggccatcagctttgccgtcggcatgacatgcgctttcactagcggaaaaatcattttggaggctgccattcttacagcagtggtggtgatcagcttaactgcgtacactttctgggctgcaaagaggggtcatgatttcaacttcctcggtcccttcctatttgctgctatcatggtgctcatggtgttttcactaatccagatctttttcccgctgggtaagatatctgtgatgatatacggtgggttggcatcgcttatcttctgtggatacatcatctatgacacggacaatgtcatcaagcgctacacctacgatgaatacatatgggctgctgtttcactctaccttgacgtcatcaacctgttcctg

SEQ ID NO: 85680 - DNA, 542 bp, Zea mays
taggaaggttcttgtatgtgggaatagatagtatgcactcaccggtccggaattcccgggtcgagccacgcgtccgatccactctagatcccgtgcaagaagggcacatgacgccaagcaaaagggacgccactcaggagatggtaagcgtaggggtaccagggaggctaggctacccaccaaggttctgtggatgaggaggatgcgtgtgctgaggcgccttctccgcaagtatcgtgaggccaagaagattgacaagcacatgtatcatgacatgtacatgaaggtcaaaggtaacgccttcaagaacaagaaggtgcttatggagagtatccacaagtccaaggctgaaaaggccagagagaagacactttctgaccagtttgaggcccaacgcgccaagagcaaggcaagccgtgagaggaaaatcgctaggagggaggaaaggttgcccaagggtcaacgagaattaccaccacttgtctaatccacagttcaagttactggggcaccgaagaaggcaaagaaatgaagttttgaaa

SEQ ID NO: 85681 - DNA, 543 bp, Zea mays
gtgggaagggtgttatcagcgcgagagggatagtattcctcaccggacttgaattcccgggtcgagccacgcgtccggccacgcgtccagttggcttctcctctatcttcggttcgactacgggttcgtgaggttgcggcggggttcacactcgtggatgaccggatctacatgtcaccttctgatgttgattaccgctgattattctactgcctcatctgagccacggactaccactccctacacaacgccttcatcacctacagagatgtcctcgagtccaaaatcattcctgatcggtagacgcataggtacctctgcttcggctctcacaacttttccacagaagaagccatgcgtaaccccatcgaaggccttgaacggctaagaacctgaccagcggaacattaccgtcatcaagtgccattccacatgcgaccgtggaaggcggcggccgttggtacaggtggtgcccgtgcagccgttctctacagccgatgcttgccgccgcgattgtgtagccggttacggctgttatcgcgc

SEQ ID NO: 85682 - DNA, 545 bp, Zea mays
  unsure (1)..(545): unsure at all n locations
gtgagatgttgtctgtaattagaaagcatagtatgtcttccctcgtccggaattcccgggtcgacccacgcgtccgcacacactcgagaactccatttcgatctcatttgaaatcaacccatcctcgtttcctccgtctggcaggctctcaccctcatggccaagatcaagatcgggatcaatgggtttggcaggatcggaaggctggtggccagggtggccctgcagagcgacgacgtcgagctcgtcgccgtgaacgaccccttcatcagcaccgattacatgacctacatgttcaagtatgacactgtgcacggacagtggaagcaccatgaggtcaaggtgaaggactccaagacccttctctttggtgagaaagangttgctgtgtttggctgcaggaacccctgaggagatcccatggggttcggttggcgctgaatatgttggtgagtctactggtgttttcactgaccaggagaaggctgcagctcaacttgaaggtggtgccaagaagggttgcaattctgctcctagcaaggatc

SEQ ID NO: 85683 - DNA, 542 bp, Zea mays
  unsure (1)..(542): unsure at all n locations
gtgggaaagggtctgtgtcacgacgagtagtacgtattgcctcaccggtccggaattcccgggtcgacccacgcgtccgcgcagggatgcacaagatgccattcgcgatttggatggtaagaatggttggagggttgagctggcaaccaaagatggtggtggccgtggccgagaccgtaatggttctgatatgaagtgctatgagtgtggtgaagttggccactttgcacgtgaatgtcgcttacggattggttcgggagggctgggtagtggaaggcgtcgcagccgaagtcctagatatcgcagccggagccgaagtcgcagccggagcccaagacatcgaaggagcccaagctatggcagaaggagctacagcccacgagatcgttctcctaggaggcgaagttacagcatgtcgccgncactgccaccaccgnctcctagaaataacagcatgtcaccacggngagcccgagaaatgagcagatcgtcaccaccacctcccataaataacagcagttcaacacgggaagcccgagaat

SEQ ID NO: 85684 - DNA, 544 bp, Zea mays
gggggagtgttcgttaatagagggggatggaatgtatgcactcaccggtccggaattcccgggtcgacccacgcgtccgcaacaagcaacatagaaagtggaatccagtagcaacaatagagcaacaatggcgaccaagatagtttccctccttatgctccttgctctttctacatgtgttgctaacgcgacaattttccctcaatgctcacaagctcctatagcttcccttcttcccccataccttccatcaattatagcttcaatatgtgaaaacccagctcttcaaccatataggcttcaacaagcaatcgcagcaagcaacatacctttatcgcccttgttgtttcaacaatcgccagccttatctttggtccagtcattggtacaaacaatcaggccccaccagttgcagcacctcgtgctacctttgatcaaccaagtagctttggcaaaccttcttccttactttcagcaccaaccatttctttcaattaaaccaattgcttacattgaaccttgttgttaattgcacacaccacct

SEQ ID NO: 85685 - DNA, 508 bp, Zea mays
  unsure (1)..(508): unsure at all n locations
tagctgtattctgacagttgaaggaatgatagtcatcgctcgtaccggtccggaattcccgggtcgacccacgcgtccgcattgagagtgctaataaggagattgccctgtggttccccgagggccctgctgatgggcagagcagccagcacccctggatctacgagaagtaaacatggaaagtttcacatcaaaccttgagagccagaggaagcatgtcaccatttgtgctttagcaatgttttcgaaaagattatgatctgtatcttggaaccttatttcaatggaccaaatttctttcaaaaaaaaaaaaaaaaaaaaaaaaaagggcggccgctctagaggatccaagcttacgtacgcgtgcatgcgacgtcatagctcttctatagtgtcacctaaattcaattcactggccgtcgttttacaacgtcgtgactgggaaaaccctggcgttacccaacttaatcgccttgcagcacattcccctttcggcagcttgcgtaan

SEQ ID NO: 85686 - DNA, 501 bp, Zea mays
  unsure (1)..(501): unsure at all n locations
tagtttatctgatgtgggtgatgaggtgattgcttctaccggtccggaattcccgggtcgacccacgcgtccgccagaatgcaccccaacaaacccttgtattccaaaaggggaatgcaattcctagcaggaaagctcttaccatctttaaatccagcacatttgaagttgatgttttgtatgtcgacccagataactcacaaattccacaaaaaataagcacttacacaattggccctttccaaacctccaacggagagaaggccaaactgaaagtgaaagtgcgtctcaacatccatgggaccgttacagttgattcggtgataatgctggaggaggatgtggaagttccagtctcatctgcaaatgaagctccaaacgatactatgaagatggacacagatgatgtgccaagtgatcctgctgctggatctgatgtgactatgcaggagcagcctnctgcagctggaaatggagcacaagataatgaggaaaagtctg

SEQ ID NO: 85687 - DNA, 542 bp, Zea mays
  unsure (1)..(542): unsure at all n locations
ngggagaagtgtgtgtctatcgaaagaaagtatgcatccctctcctgaattcccgggtcgacccacgcgtccgcaagatgatcctcgatcgggagacgcagaggtcccgcggcttcggcttcgtcaccttctccacggaggaggcgatgcggaacgccatcgagggcatgaacggcaaggagctggacggccgcaacatcaccgtcaacgaggcccagtcccgcggcggccgtggaggcggcggcggtgggtacggtggtggccgtggaggcggcggctacggcggtggcgggcgccgtgatggcggtggcggctacggcggtggcggcggctacggtggcggcggcggctacggtggtggtggcggcggctaccgcggtggcaaccgtggcggcggctacggcaactncgacgggaactggaagaactgagcggtggggccccgcgcggccaaattatccctggtcgctaccgtgatggttaccctaagtccagagggtttatcttcgttcgtgtcgggttggttgtggccaattggggtt

SEQ ID NO: 85688 - DNA, 552 bp, Zea mays
  unsure (1)..(552): unsure at all n locations
gagtttttggggggnaaaggcttcgtctaagaaagcatgtatgcatgactcaccggtccggaattcccgggtcgacccacgcgtccgcactcatcacgccgccactgatctgctctgttgctggtgactaggagcagtagcgagagggatgctggatggccaagtcgaagaaccacacggcgcataaccagtcgttcaaggcgcacaagaacggcatcaagaagcccaagcgccaccgccagacctccaccaaggggatggacccgaagtttctgaggaacttgaggtactcaaggaagggcaacaagaagagtggcgaggctgagtccgaggagtaagatgatggtgattgagtttgtggcgacaaatgcatctcttgtatcgctaagagtcttagctgtgaacttagttctcacttctgtgtgactgtgatcaaaggacttgtgtatgatcaaaggagaaccatcaattggtaccgaaatgtaatttaatgcttggtggttaccttgaatttaattaaaaccaatacttggattcttttgagaattgggc

SEQ ID NO: 85689 - DNA, 542 bp, Zea mays
  unsure (1)..(542): unsure at all n locations
nggaggagtgtgtcttcnctactcgaccatagnacgtatccctcaccggtcctgaattcccgggtcgacccacgcgtccgcggacgcgtgggggtgggttggcttctccttcccctccggttcgggttcgggttcgtggggttgtccgacgttcgggttcgtgggtgagcggatcgagatggcggcgtccgatgttgagtaccgctgcttcgtcggcggcctcgcctgggccactgacgaccactccctccacaacgccttcagcacctacggcgaggtcctcgagtccaagatcatcctcgatcgggagacgcacatgtcccgcggcttcggcttcgtcaccttctccacggaggatgctatgcggaacgccatctagggcatgaacggcaaggagcttgacggccgcaacatcaccgtcaacgaggcccagtcccgcggcggccgtgaaggcggcgccgttggttacggtggtggccgtggaggcggcggctacggcggtggcggcccccgtgatgccggtgccgctaccggcgtgacgg

SEQ ID NO: 85690 - DNA, 557 bp, Zea mays
tgtatttgtttgggtggttgaagctgttgtcttagaagaaggtagatgtatccctcaccggtcctgaattcccgggtcgacccacgcgtccgattgttgtagacgacaacgacaagaatcatatgatggagaatggaagtggtgcggttgtgcctgctaattcttcagataggtccgacaggtctgataaacctttggaccaaaagacaatgcgacggcttgcccaaaatcgtgaggcagcaagaaaaagtcggctgaagaaaaaggcatatgtgcagcagctggagagcagtaagctgaaacttgcacaactggaacaggaactccaaaaagctcgccagcaggaaatcttcatttttagttttgaaaaccaaaccaatccaataattgaaaatgaacctttgacttttgccttaaattttgctaaatggttagaggaccaaattaggcagttaattgagttgaggactgcattgattgctcatgcaggtaatagtgatctacaactaatggaaaatggcttattgccccattatgatgaaatatccaaggtcaag

SEQ ID NO: 85691 - DNA, 545 bp, Zea mays
ggtggaagggttcagtcctagtaaagcatagatagtatgactcaccggtcctgaattcccgggtcgacccacgcgtccgaccgagtcgacaaagacggtaaccaatggaaggaacggggcacgggcgctgtcaagcttctcagtcacaagcagaccggcaaggtccgcctagtcatgcgccaggctaaaacgcttaagatctgcgcgaaccacctcgtggcctccaccacgaagatgcaggagcatgcgggcagcgacaagtcgtgtgtttggcacgctgctgactttgccgatggcgaacttaaagaggagatgtttgccatcaagtttggttcggtagaaaactggaagaagttcaaggaattggttgaagaaatagctgaatcccttacaaagaaccaaggccagggaagttaaaattgtggttccaacgcttgattggttgccaaacttaattgtaaccaaggccaattttaaggaaagtgcaaggcttaattcaattgatcttgccaagatgcctgaacccaaagccgcacaagccccac

SEQ ID NO: 85692 - DNA, 496 bp, Zea mays
agggttctatgtgggggggggaaaatgttgtaccggtccggaattcccgggtcgacccacgcgtccgcaactctgacggcagcgagccagagcttcactattcatactggtgctgggaagatcgtgtcctgaaatacaaagtgatgggcaggtaaaggttgatatgggagagcccatcctttctggagcagacatccccacaaaactggtagctaccaagaacaaagctgttatccaagctgagttggcagttgagggcttaacatggcatgtcacatgtgttagcatgggcaacccccactgtgtcacatttggggcaaacgagttaaagaccttgcagatcgacgatttaaaactcagcgaaattgggcctaaatttgagcatcatgaaatgtttcctgctcgcacaaacacagagtttgtacaggttttgtctcgctcacacctcaaaatgcgagtctgggaacgtggtgctggagcaactctttgcctgtgg

SEQ ID NO: 85693 - DNA, 510 bp, Zea mays
  unsure (1)..(510): unsure at all n locations
agagttttctgnnaatgatagggagggataggtgtgaatcgctcgtaccggtccggaattcccgggtcgacccacgcgtccgcaccagccgccgtcatgtcgaagcgaggtaggggaggttcggctgggaacaagttcggcatgtcactgggtctaccggtggcggccacggtgaactgcgcggacaacacgggcgccaagaacctctacatcatctccgtcaagggcatcaagggccgcctcaaccgcctcccgtccgcctgtgtcggcgacatggtcatggccaccgtaaagaagggaaagcccgacctcaggaagaaagtgatgcccgccgtcatcgtccgccagcgcaagccgtggcgtcgcaaggacggtgtctacatgtacttcgaagataatgctggagtgattgtgaatcccaagggtgagatgaaaggttctgcaatcactggacctatcggcaaggagtgtgctgacctttggcctangatcgccagtgcagcaaatgcc

SEQ ID NO: 85694 - DNA, 543 bp, Zea mays
gggggaggggttgtttatacagaacatagtagtgcatcacctctccggaattccgggtcgacgcaggcgtccgcccacgcgtccgcccacgcgtccgcccacgcgtccgagggtttccgcgtcggctagtttggacgcatggctgctgcaggagagtagagaccacagcgcgcgaggcgaggagaataagctatgggcgcgccgaagcagaaatggacgtcggaagaggaggatgcgctccgcgccggcgtgcgcaagcacggcgccggcaaatggcggaccatccagaaggaccccgagttcagcccggtcctctactaccgctccaacatcgacctcaaggacaaatggaagaatttaagtttcagtgcaagtggactgggaatcaaataactgtcggttccaaagataactggacccttatcttccccatcatttaactcgcaacctttggtttttccaacgggaaacaaatttactggagcttcactggctgcatatgctgagaaaaaggcacaggatggggaaactttgcaaaggatg

SEQ ID NO: 85695 - DNA, 545 bp, Zea mays
  unsure (1)..(545): unsure at all n locations
aggggggtgttttctgtnctactagcaacaagtattgctccctcacctgtcctgaattcccgggtcgagccacgcgtccggcagagttttgaagctttgaaccccatagccgttgctgttgtgatagaccccatccagagtgggaatgggaaggtggttattgatgcattccgcctcattaatcctcagaccatgatgcttggccaggagccacgtcagacaacatcaaatgttgggcacctaaataagccatctattcaggctcttatccatgggctgaatagacactactactcaattgcaatcaattaccggaaaaatgaacttgaggagaaaatgctgttgaacttgcacaaaaagaaatggaccgattggctaattttgaaaaaggttgaccctcactcgaaaaccaacgagcaaactgtccatgaaatgcttaaccctaccatcaagtacaacaaggcaatgcaagatgaagacgaactggcctctgagaaactngcgattaccaatgggggtcggcaagattcacaaaagcatttgga

SEQ ID NO: 85696 - DNA, 545 bp, Zea mays
gggggggagaatgttctttcttactagcacatagtatagtaccctcaccggtcctgaattcccgggtcgagccacgcgtccgatctgcgtctttccatccagatggtcttatccttggaacaggaactactgatgctgttggtaagatttgggacgtgaaggctcagtcaaatgtcgcaaagtttgagggtcatgtcggaccagtcactgctatgtctttctctgaaaatggttacttcctagcgactgctgctcatgatggtgttaagctttgggatcttcgtaaattaagaaattttaggactttctctccctatgatttggacacgccaaccaatactgtgaaatttgattttagtggaaactatcttgccattggtggttcagatataagggtctaccaagtacctaatgttaaggccgaatggaatctaataagaacataccccgattaatcaggaccaggaaaggtaacttccgtaaaatccgaagtaaacccaaattccttagccttaggttttatggcaccgattttacggttattt

SEQ ID NO: 85697 - DNA, 497 bp, Zea mays
agtgtatctgatagaggagaaggagaggatgcttctaccggtccggaattcccgggtcgacccacgcgtccggtggagctctgtggaggctcttctgtcgtgatgttccatggggacctcccttactgggcaaaagacatcctcaagaagctagagactatagatgaagaaaatatcattggagcaggaggcttcggaactgtttataaacttgcaatggatgatggcaatgtctttgctttgaaaaggatagtgaaaacaaatgaagggctagatcggttctttgatagagaacttgagatattgggaagtgttaaacatcgctatttggtcaatctccgtggttattgcaactccccttcatcaaaacttttgatatatgattatcttcaaggtggaagtctggatgaagtgcttcatgaaaatcttgacagttggattggatgcaacgtattaacattatacttggagctgcaaaggcttgtcttacttgcatc

SEQ ID NO: 85698 - DNA, 503 bp, Zea mays
  unsure (1)..(503): unsure at all n locations
tagtnttttctgttgggtgggaggtgagagaacgctcgtaccggtccggaattcccgggtcgacccacgcgtccgctgtgcatctcccaccgccggtccacctgccgccgccggtccacctgccaccgcctgtccatgtgccgccgccggttcatctgccgccgccaccatgccactaccctactcaaccgccccggcctcagcctcatccccagccacacccatgcccgtgccaacagccgcatccaagcccgtgccagctgcagggaacctgcggcgttggcagcaccccgatcctgggccagtgcgtcgagttcctgaggcatcagtgcagcccgacggcgacgccctactgctcgcctcagtgccagtcgtgccgcagcagtgttgccagcagctcaggcaggtggagccgcagcaccggtaccaggcgatcttcggcttggtcctccagtccatcctgcagcagcagccgcanagcggccaggtcgcggngctgttgg

SEQ ID NO: 85699 - DNA, 551 bp, Zea mays
atggtgtagattgtctgttctcactgcaacatagtactgcatccccgtcctgaattcccgggtcgacgccagcgcgtccgcctagcgaagcgcactagcaacgacctaacatcaatggcttccaagacattatccctccttgcgcttggtgccctttttgtgagtgcaacaaatgcgttcattattccacaatgctcacttgctccgagtgccattattccacagttcctccctccagttacttcaatgggcttcgaacacccagctatacaagcctatagtctacaacatgcgcttgaagctagcgtcttagaacaacctattgcccaattacaacaacaatccttggcacatctaaccttacaacccatcgaaccgcaccaacaccaaccactaacccactaacccttgttgaacctaatggcttactgccaccaccacttgtttgattccaaccaatttcctttgccaacctaacttgcaaccaaccaccaccaccatttgaaccatttcttgcaacccttaatttacttaccattggtgaacctttt

SEQ ID NO: 85700 - DNA, 547 bp, Zea mays
atgggaaaggttgtttcctagtatcgacatagatagcatgcactcaccggtccggaattcccgggtcgacccacgcgtccgcccacgcgtccggggcacaacaactacaacaacttgtgctagcaaaccttgctgcctacgtgtcagcaacagcagtttcttccattcaaccaactagctgcattgaactctgctgcttatttgcaacaacaactaccattcagccagctagctgctgcctacccccaacaatttcttccattcaaccaactggcatcattgaactctcctgcttatttacagcagcaacaactactaccattcagccagctagctggtgtgagccctgctgccttcttgacacaacaacagttattgccgttctacctgaacgctgcgcctaacgctggcaccttctaacaactgcaacaattgctgccattcaaccaacttgctttgacaaaccaagcagcgttttaccaacaaccaataattggtggtgccctctttaagatttctaatgagttatagttcaatattaaagttt

SEQ ID NO: 85701 - DNA, 547 bp, Zea mays
  unsure (1)..(547): unsure at all n locations
gtgtggaatggtgttactacctgcaacatagtacgnacgcactcaccggtctggaattcccgggtcgagccacgcgtccgcccacgcgtccgtatagccgctggctagctagctagttgagtcatttagcggcgatgatggaggaataatgtgtcacgcatcaccatgggtggcagtgtcagtgtgagcaatgacctgaatgaacaattgaaatgaaaagaaaaaagtattgttccaaacaatgctggagagaccagcgatccagatgacggcagtgtgcagtacctgaggaggaggctcaaggaggagatgctgctgaatgatgatgctctcgacgagctgtagaaggataggcatgcctcatcgtctgaaggcgacgatgccatgtacaagattgcctgcctgtttaaccagaaggaactgttagacagggaggcttcccaattttaggggatgatccacatttaccattttgataactggcaaataatcaattaactcaaaccggtaaccattattcctgaattgcaaagcttgaagcgcaaag

SEQ ID NO: 85702 - DNA, 548 bp, Zea mays
gtggggagaatgttctttctatgaaaagacatgtatagaatgactcaccggtcctgaattcccgggtcgagccacgcgtccgacaatagaaaccatcgcaacgcaacagcaacaacaattcctaccagcactgagccacctagccagggtgaaccctgccgcctacttgcaacagcagttgcttgcatcaaacccacttgctctggcaaacgtagttgcaaaccagccacaacaacagctgcaacagtttctgccagcgctcagtcaactagccatggtgaaccctgccgcctacctacaacagcaacaactgctttcatctagcccgctcgctgtggccaatgcacctacatacctgcaacaacaattgttgcaacagattgtaccagctctgactcagctagtttggggcaaaccttggtgctaatttcaacaagtggtttcaatcaacccaatgactaatgtcaactctgcttggtacctaacacagcgaccaccggtacttaattcaattaccatggcttaaccaatggtcggttgctttctaa

SEQ ID NO: 85703 - DNA, 545 bp, Zea mays
  unsure (1)..(545): unsure at all n locations
aggtgggggaggtgtgtgtncctccgaaccatagtagtgcatccacgtcctgaattcccgggtccacccacgcgtccggaagaagtacagcaaggacatcagcaaggatttccgtgctcttggaaagctgaggagggaagccgagcgcgccaagagagccctcagcaaccagcaccaggtccgtgttgagatcgagtccctctttgacgggaccgatttctcggagccgctgacccgtgccaggtttgaggagctgaacaacgacctcttccgcaagaccatgggccctgtcaagaaggccatggaggatgctggccttgagaagagccagatccacgagatcgtcctggttggtggaagcaccaggattcccaaggtccagcagctcctgcgggactacttcgatggcaaggagctcaacaggggtgtcacccctgatgaggctgttgcctttggtgccgttgtcagggaacatttttaaccgccaaggttgttaccaggcctaagatattcttcttcttggaagtggttcccttaaccttggg

SEQ ID NO: 85704 - DNA, 547 bp, Zea mays
atggggagatgttgattcctatctagaacattagatagtacgcctcaccggtccggaattcccgggtcgacccacgcgtccggagaatggcatcctccgcaagtggatctctcgttttgatgtctggccatacctggagacgtacgctgaggatgtttccagtgaaataatgaaagaaatgcaggccaagcctgaccttatcattggcaactacagcgatggcaacctagtcgccactctgctcgcgcacaagttgggagtcactcagtgtaccatcgctcatgccttggagaaaaccaaataccccaactcggacatctacttggacaagttcgacagccagtaccacttctcttgccagttcacagctgaccttattgccatgaaccacaccgatttcatcatcaccagcacattccaagaaatcgcgggaagcaaggacaccgtggggcagtacgaggtccacatcgcgttcactcttcttggcttctaccgtgtcgtcaatggcatcgatgttttcaattccaagttcaacattgcttccctg

SEQ ID NO: 85705 - DNA, 546 bp, Zea mays
  unsure (1)..(546): unsure at all n locations
gagggtgggtgatctgttaatagtggggtagaagtcatccctcnctggncctgaattcccgggtcgacccacgcgtccgacgttgccttcgcgtacacctactccatgcttctcatagaaatccaggacactgtgaaggcagggccatcagagaacgtgacgatgaagagggccagcttctacggcatcagcgtgacgaccatcttctacgtctcgctcgggtgcatcggctacgcggccttcggcaacgccgcgccggggaacgtgcttaccggcttcgacgaagccgtctggctcgtcgacgtcggcaacatcggccgggtcctccaattgggtggggcctattaaggggtcgccccagccatctttgggtgcctacaaaaattgcctgggttcccggtggccgaactcggcctttttcaacaacaagtccccgttccccttgcccggtgtgccgttccggttaacgatttccaacctgggctctgccacggtgttcgtggcccccaaaacggtggtgtcgctgatgctccccttttataacgc

SEQ ID NO: 85706 - DNA, 552 bp, Zea mays
  unsure (1)..(552): unsure at all n locations
nggtgtggagtttttttttccatgatctgaaaatgantgcacgactcaccggtcctgaattcccgggtcgacccacgcgtccgagaccaactagcaacatagaaagcacaatagtgtaccaacaatggcagccaaaatatttggcctgcttatgctccttggtctttctgcaagtgctgctacggcgaccattttcccgcaatgctcgcaagctcctatagcttcccttcttcccccgtacctctcaccagcggtgtcttcggtatgtgaaaacccaattcttcaaccctacaagatccaacaagcaatcacagcttgcattttaactttatcacccttggtccttcaacaatcattaaccctattacattaattacctttggtgcatttattggcacaaaacattaaggcacaacaacttccacaacttgtgctaacaaaccttgctggctactcttaacaacagcagtttctttcattcaaccaactatctgtattgaactctgcttcttatttgcaacaacaacaactaccattcagacagatacctgt

SEQ ID NO: 85707 - DNA, 501 bp, Zea mays
  unsure (1)..(501): unsure at all n locations
aggggnnnnnncatgtatagatgataggatcgctgctcctggtcgccatggccggggggtacccacgcgtccgcccacgcgtccgcagaatacagcaagggcaatgcatatgctcaggttgccattggcaccaatgatgtgtacaagagcgccgaggcggttgatctggcgaccaaagaactaggtggcaagattttgcggcagccagggcctctacctgggatcaacactaagatcgcctcttttgttgatccagatggctggaaagtggttctggttgacaacaccgacttcctcaaggaactccactgaaggctcgggatacccaggtgctgtgctaggatgtagtaatgcttgtctgtggtgtaataagatgtgggtggtttgtttctgccctgatgaacttataatactgaatgttgctacagaggttgtgcttctgccagtgaggtttgggatttgctatgtaactgtgcctgcgggctccgattctggcgctgn

SEQ ID NO: 85708 - DNA, 493 bp, Zea mays
  unsure (1)..(493): unsure at all n locations
ntgaattctttaaccctttaaaaccccnnngttnggaattcccgggtcgacccacgcgtccgggggtcaccaagggctaccgctacaagatgaggttcgtctacgcccacttccccatgagcgcctccatcaccaacagcaacaccgccatcgagatcagaaacttcctcggcgagaagaaggtcaggaaggtggacatgcttgatggcgtgaccatcctccggtccgagaaggtcaaggatgagctcatccttgacggaaacgacgtcgagctcgtatctcgctccgccgccctcatcaaccagaaatgccatgtgaagaagaaggatatccgaaagtttttggacggtatctatgtgagcgacaagggcgtcatcgaagaggagcagtgagcgacagagtagccgaaatgccaggagatgaatatggatgtcgtttgagttgcaattttgtgagactgaatgtgaaccctntntctcattccttaaatagt

SEQ ID NO: 85709 - DNA, 520 bp, Zea mays
  unsure (1)..(520): unsure at all n locations
nagtttaaggcgaggattgattatgaaagggagtaatttgcaccgtttcggaattcccgggtcgacccacgcgtccgagcagctcaggcaggcggagccgaaggaccggtaccaggcgatcttgggcttggtcctgcagtcgatcctgcagcaggagccgtaaagcggacagatcgcggtgctgatggcggcgcagatcgcgcaccagctgaccgccgattgcggcctgcagcagccgactctatgcccctacgctgctgccggctgtgtcccccactgaagaaactatgtgctgtagtatagccgctgcatagctagctagttgagtcatttagcggcgatgactgagttatcatgtggcacgcatcaccatgggtggcagtgtcagtgcgagctgagaccctaatgaacaatggaactgaaacgcagcaagtcacgacacacaacatagtcgctatgagaaggcgtgtcacggtcgacaagacagtgatcagtatggctgcactgcaaaaagaatgaa

SEQ ID NO: 85710 - DNA, 528 bp, Zea mays
  unsure (1)..(528): unsure at all n locations
naggggnatggcagagtcgtgtactgataacgaatatatagtatngctcgtaccggtctcggaattcccgggtcgacccacgcgtccggtggagccgcagcaccggtaccaggcgatcttcggcttggtcctccagtccatcctgcagcagcagccgcaaagcggccaggtcgcggggctgttggcggcgcagatagcgcagcaactgacggcgatgtgcggcctgcagcagccgactccatgcccctacgctgctgccggcggtgtcccccactgaagaaactatgtgctgtagtatagccgctggctagctagctagttgagtcatttagcggcgatgattgagtaataatgtgtcacgcatcaccatgggtggcagtgtcagtgtgagcaatgacctgaatgaacaattgaaatgaaaagaaaaaagtattgttccaaattaaaaaaaaaaaaaactaaatcaaacaaataaataaaacaaaaacttataaatcacttcaaaaaaaatcaaaaacttacaacaga

SEQ ID NO: 85711 - DNA, 521 bp, Zea mays
  unsure (1)..(521): unsure at all n locations
naggtnaggctaagtcattatgtaaggggggagaaagtgatgctctaccggtccggaattcccgggtcgacccacgcgtccgaccaactagcaacatagaaagcacaatagtgtaccaacaatggcagccaaaatattttgcctccttatgctccttggtctttctgcaagtgctgctaccgcgaccattttcccgcaatgctcacaagctcctatagcttcccttcttcccccgtacctctcaccagcggtgtcttcggtatgtgaaaacccaattcttcaaccctataggatccaacaggcaatcgcagctggcatcttacctttatcacccttgttcctccaacaatcatcagccctattacagcagttacctttggtgcatttattggcacaaaacatcagggcacaacaactacaacaacttgtgctagcaaaccttgctgcctactctcagcaacagcagtttcttccattcaaccaactagctgcattgaactctgctgcttatttgcaacaac

SEQ ID NO: 85712 - DNA, 533 bp, Zea mays
  unsure (1)..(533): unsure at all n locations
agaagaggtgggaggtagaagggttttaaggctagcnactngtacgtcgtaacgcctcgaattccggtngacccaccctnccaggaatcagggtcccnacaacaaatctgcaatcttaagaggatcgtcaacagaggacatggggattgtcatcgttctcgtcgtgtgccaggctctgtcagctgccagcgcctctgcaatgcagatgccctgcccctgcgcggggctgcagggcttgtacggcgctggcgccggcctgacgacgatgatgggcgccagcaggctgtacccctacgcagagtacctgaggcaaccgcaatgcatcccgctggcagcggcgccctactacgccgggtgtgggcagccgagcgccatgttccagccgctccggcaacagtgctgccagcagcaaatgaggatgatggacgtgcagtccgtctcgcagcagctgcagatgatgatgcagcttgagcgtgccgatgccgncagcagcaacctgtacgagccaagctttatgcagcaaccacaacaac

SEQ ID NO: 85713 - DNA, 521 bp, Zea mays
gagtttaagcatgattgaatgttgaatggggaggtatatggtaccgcttcggaattcccgggtcgacccacgcgtccgcttggccctcactgagcagccttccaagtttgatttttacgatccaaaaacacctttcgtcactgcaccccgatgcttgcctacgacgcaattggacaagtgcacgatgaaatatgcatttatctcacatggttgcttactgagagaatgcaacatcgagcattctgagattggagtctgctcacgtgtcagctctggatgtgaactcaaggactccgtgatgatgggagcggacacctatgaaactgaagaagaagcttcaaagctactgttagctgggaaggtcccagttggaataagaaggaacacaaagataaggaactgtatcattgacatgaatgctaagattgggaagaacgtggtgatcacaaacagtaagggcatccaagaggctgatcacccggaagaagggtactacataaggtctggaatcgcggagatcc

SEQ ID NO: 85714 - DNA, 547 bp, Zea mays
  unsure (1)..(547): unsure at all n locations
ngggggnagtggggggaggaaaggagaggttttnaatgtgtagtggggggtgaagagatatgctctgcagttcccgggtcgacccacgcgtccgcccacgcgtccgcccacgcgtccgcaccaacgcatattgcaccaagaaatccatcgagaggccgtcgacaggggaattaatggcgtcgtcgtctagcagcagccaccgccgcctcatcctcgcagccgccgtcctgctctccgtgctcgcggctgccagcgccagcgccgggacctcctgcgtgccggggtgggccatcccgcacaacccgctcccgagctgccgctggtacgtgaccagccggacctgcggcatcgggccgcgcctcccgtggccggagctgaagaggagatgctgccgggagctggcggacatcccggcgtactgccggtgcacggcgctgagcatcctcatggacggcgcgatcccgccgggcccggacgcgcagctggagggccgnctagaggacctgccgggcttgccgcgggaggtgcagaggggattcggcgccac

SEQ ID NO: 85715 - DNA, 509 bp, Zea mays
gagtgatgatgttgctgtaatagggggtatttgcaccgcttcggaattcccgggtcgacccacgcgtccgggtgggttggcttctcctccccttccgttccggtttcggttccgtgaggttctccggggttcggtttcgtgggtgaacgtatcgagatggcgtcgtcggatgttgagtaccgctgcttcgtcagcggcctcgcctgtgccacggacgaccactccctccacaacgccttcagcacctacggcgaggtcctcgagtccaagatcatcctcgatcgggagacgcagatgtcccgcggcttcggcttcgtcaccttctccacggaggatgcgatgcggaacgccatcgagggcatgaacggcaaggatctggacggtcgcaacatcaccgtcaacgaggcccagtcccgtggcggccgtcgaggcggcggcggtgggtacggtggtggacgtggaggcggcggctacagcggtggcgggctccgtgatggcggtgccgactt

SEQ ID NO: 85716 - DNA, 521 bp, Zea mays
agttaagtgaatgttgttagagaggaggcgggataagatatcctctccggaattcccgggtcgacccacgcgtccggctctgtaaagaaggatgcaattagtccccatggtggcaccagtagctcaagtaatcagttggttcagcatggagtctacaaccaagggatgggctatatgcagccacagtaccacaatggggaaacctaataaagggctaatacagcagcaatttatgctagggaagtctctgcattgcttaccatgtgtattggcagaaaacaggaggcacttacaaagggtgttaatctctgcgatggctgcctctcaggtgtaaattggcttccgtttagcgctgcttttgtccgtatatttaggatgatttgacttgtgctacttttgggcaccttttacatttacagatatgtattattcagcataaatataatatagtagtcctaggcctaaataaatgtgattaacataccaagtcttttatcaggctactcggtttcttgaacaag

SEQ ID NO: 85717 - DNA, 516 bp, Zea mays
gagttaaggctcgattggtgagagaggggagtaggtgaaccgtttcggaattcccgggtcgacccacgcgtccgattggcacaaaacatcagggcacaacatctacaacaacttgtgctagcaaaccttgctgcctactctcagcaacagcagtttcttccattcaaccaactagctgcattgaactctgctgcttatttgcaacaacaactaccattcagccagctagctgctgcctacccccaacaatttcttccattcaaccaactggcatcattgaactctcctgcttatttacagcagcaacaactactaccattcagccagctagctggtgtgagccctgctgccttcttgacacaacaacagttattgccgttctacctgcacgctgcgcctaacgctggcaccctcttacaactgcaacaattgctgccattcaaccaacttgctttgacaaacccagcagcgttctaccaacaacccatcattggtggtgccctcttttagatttct

SEQ ID NO: 85718 - DNA, 523 bp, Zea mays
agttaaggcaagtgtttttatgatgatggggagagaaagtattgctgtaccggtccggaattcccgggtcgacccacgcgtccgcccacgcgtccgattgagaccaacaagcaacatagaaagtggaatccagtagcaacaacagagcaacaatggcgaccaagatattttccctccttatgctccttgctctttctgcatgtgttgctaacgcgacaattttccctcaatgctcacaagctcctatagcttcccttcttcccccataccttccatcaatgatagcttcagtatgtgaaaacccagctcttcagccctataggctccaacaagcaatcgcagcaagcaacatacctttatcacccttgttgtttcaacaatcgccagccctatctttggtgcagtcattggtacaaaccatcagggcacagcagctgcagcaactcgtgctacctgtgatcaaccaagtagctctggcaaacctttctccctactctcagcaacaacaatttcttccattcaa

SEQ ID NO: 85719 - DNA, 517 bp, Zea mays
agtgaggctatgtgtgatcgatggggggaagaggtatgctcgtaccggtccggaattcccgggtcgacccacgcgtccgcgcaaattgcaccaagaaaaccatggagaggccgacgacaggggaattaatggcgtcggggactatcagcagccaccgccgcctcattctcgcagtcgcggtcctgctctccgtgctcgcggatgccagcgccagcgccgggaccttctgcgagccgtggtgggccatcccgcacaacccgctcccgagctgccactggtacgtgaccagccggacctgcggcatcgggccgcgccttccgcggccggagctgaagaggagatgctgccgggagctggcggacatcccggcgtactgccggtgcacggcgctgagcatgctcatggacggcgcgatcccggcggacccggacgcgcagctggaggctcgtctagaggacctgcccggctgcccgcaggaggtgcaatagggatatctcttcaaccttgttacagaggc

SEQ ID NO: 85720 - DNA, 514 bp, Zea mays
  unsure (1)..(514): unsure at all n locations
gagttaatgatgattgnatgtgggaggaggggtgactgcaccgcctcggaattcccgggtcgacccacgcgtccgctccgttgagtcgaggcggctccaactccggctcgtggcctcgcggaccaacatggccgccccttcgccctcgccggtggaggctaccctaccgcctgaggccgcggctgccgccgaggaagaccagtgggatgctgacggatatgttattcctaatttgcccactcaagataatgatgtggctgagcctagtgtccccaaagaaaaagatcctgagcctctacaggcaagcgatgagaaaatatatctgggacctcatggagctccaccatctcaagcaaagcagcaggagctgaacaccgttggccgcaagcagcggttccggaacaaactgaaggaagcagataggaaattctccggcaatgctcaggagaacaagatggagagcctaagggagctgctgggtgctagaggtggtactggtaccagcctgccaaag

SEQ ID NO: 85721 - DNA, 520 bp, Zea mays
  unsure (1)..(520): unsure at all n locations
gagtnaagggctcggttgataaagcatcgaaagtaatctcaaccgctccggaattcccgggtcgacccacgcgtccgctctatcgtcccgatccgtcgttcatcagagtcgtaaccgtacgccctcgttcccctcgtcgctctcccaagtcccaaccccggttcctttggtctgcgcgagcgagcatggcgtcgccgtcgcccgccgtctcgtctctggagacggaggcgccccaggctaccgtcacgagggagcgcaggctcaaccccgacctgcaggagcaccttcccaagccatatctcgcgagggctatggtggcggtggacccggaccatccgaccgggaccgaggggcgcgacccccgcggcatgagcgtgcttcagcagcacgtggctttcttcgaccgcaacggcgacggcgtcgtctacccctgggagactttcaaaggcatgcgagcaatagggtgtgggttctttacatccctcgtcatctcgttcctcatcaacctcgtcatgagtta

SEQ ID NO: 85722 - DNA, 531 bp, Zea mays
  unsure (1)..(531): unsure at all n locations
agttaaagtaagagtttgntgctcggtattaagaacatattgtatggctcgtaccggttcggaattcccgggtcgacccacgcgtccgcaagggcaagcggttccgcgccggcgacgtgctcgcgttcaggtacaacgccaaggcgcacaacgtggtgcccgtgagcgcggctgagtacaggtcgtgcagtgcgcccaagggcgtgagggcgctcaccactgggaacgaccgcgtcactctgaagcgcggcgccaactactttatctgcagcttcccaggccactgccaggccggcatgaagatcgctgtcaccgacgcgtgaggccttcggccgatcagccgtgctggctacgacgaccgctggacacacggtctcgatcggtggccagcttattattattgttatttccctgttcaaagtaaaagcgtcgcgtccttaacctgcgtgtaggtagagcggtgttaggtgtgtagagaccggccggcactattgaaaacttaatcgaatgaaggtgttctcaattcgtact

SEQ ID NO: 85723 - DNA, 526 bp, Zea mays
agtaaggcctaatgtgtttatggtatgggggaggaagaagaggatagctcgtaccggtccggaattcccgggtcgacccacgcgtccggagaccaacaagcatcatagaaagtggaatccagtagcaacaatagagcaacaatggcgaccaagatattttccctccttatgctccttgctctttctacatgtgttgctaacgcgacaattttccctcaatgctcacaagctcctatagcttcccttcttcccccataccttccatcaattatagcttcaatatgtgaaaacccagctcttcaaccatataggcttcaacaagcaatcgcagcaagcaacatacctttatcgcccttgttgtttcaacaatcgccagccctatctttggtgcagtcattggtacaaaccatcatggcacaacagctgcagcaactcgtgctacctctgatcaaccaagtagctctggcaaacctttctccctactctcagcaacaacaatttcttccattcaaccaactgtctacac

SEQ ID NO: 85724 - DNA, 522 bp, Zea mays
aggtaaggcaagttttgtatgaggcgcggggagagagtgatgttgtaccggtccggaattcccgggtcgacccacgcgtccgcggacgcgtgggcttggacaagggggttttgggaaagtatataaaggagcacttccagatggcactaagattgctgtaaaacggttaactgattacgaaagtccaggtggagaggctgctttcttgcgtgaggttgagctaattagtgttgcagttcaccggaatcttttaagattgattggtttctgtacaacacaaacagagcgcctacttgtttatcctttcatgcaaaatcttagtgtggcctaccgactacgagaatttaaacctggggagccaatattagactggtctgcaaggaagcgagtggctataggcacagctcgtggactggagtatttgcacgagcactgcaatcctaagattatacatcgtgacgtcaaggctgccaatgtcttgcttgatgaaggttttgaaccggtggttggggatttccggcc

SEQ ID NO: 85725 - DNA, 538 bp, Zea mays
  unsure (1)..(538): unsure at all n locations
ngggnaggggnnnnggagtncagagattgntaatatgactttgtgagggagagaatagtcccggaattcccgggtcgacccacgcgntccggctctgtcagctgccaacgcctttgcaatgcaaatgccctggccctgccccgggctggaaggcttgtaccgggcttgcccccggcttaaaacaataatggcccccgccggcttgaaccctaacccgaagtacctgaggaagccgaatggaagccggttggcggcggccccctactacgccgggtgtgggcagacgagcgccatgtaccagccgttccggcacagtgctgccagcagcagatgaagatgatggacgtgcagtccgtcgcgcagcagctgcagatgatgatgcagctngagcgtgccgntggcgncagcagcaacctgtacgagccaactctgatgcaacaacagcagcagctgttggcagctcaaggtctcaaccccatggccatgatgatggcccagaacatngccggcatgggtggactctaccagaccagctgcc

SEQ ID NO: 85726 - DNA, 540 bp, Zea mays
  unsure (1)..(540): unsure at all n locations
nggtgtggggtnnnngagttcatgagtatggtattttgacccgggaggatatgaccgtcccggaattcccgggtcgacccacgccgtccgctgatcatcggttcttggccaccgaaattattgtggctggccaatacttggattaaccggttaaactagagcaggctgaaggccacctggcacacagtcaatttggtggtatgattatgccatcgcaacgaaagaaagagcaagaagagtctccactggctaatgtaacacgagatagctccaaaatcacagctgaacaggttcacggcctcatgtcacaggtcatagaagacatccttttcaactctgttcacccgtcaagcaaggcaagcacaagtgctccaccagattcatccggtcctgagcctatggttgaagcctgagttccagcggaaggggacaatggatatttgtgttatgttatctgattcagaaggtgcaaaacaagttatcttttgagtacagaatcatcatgtaattatgagttgccatcttgagctgncactgaga

SEQ ID NO: 85727 - DNA, 524 bp, Zea mays
agttaaggacaggtttggctagagagagggggaggtatgttgaacctgtccggaattcccgggtcgacccacgcgtccgcacaagcccacggagtgccttcctctgatcctcatcatcaggaacaggctcaagtatgctctgaactaccgggaggtcatttctatcctgatgcaactccatgtacttgttgatggcaaggtcaggactgacaagacctaccctgctgggttcatggatgtcatttccatccccaagacaatggacaactacaggctgctttatgacaccaagggccgcttacgtcttcacacaatcacggatgacgatgccaagttcaagctctgcaacgtgaggtctgttcagcttggccagagaggcatcccctacctgaacacctacgacagccgcaccatccgctaccccgactcgctcatcaaggccaactacaccatcaagatcgatctgtagaccaacatgatcatggacttcatcaagtgtgacgtccgcaaacgtgtcattgtgc

SEQ ID NO: 85728 - DNA, 512 bp, Zea mays
agtaagggctagttgctattgaaggggggtaagatgcacactgtcggaattcccgggtcgacccacgcgtccgcccacgcgtccgcggacgcgtggggtcaatatagtacctggcattgaatccgtgtactggtgggagggaaaggtacaatctgatgctgaagaattactcatcatcaagaccagggaatcacttctggatgccttgactgcacatgtcaaagccaatcatgaatatgatgttcctgaagttattgctctgcccataactggtggtaacaccaagtatttggaatggatcaagaacagcacccgggacaagtgatctctttttttttggagctcgacataatgcgatgatcgaagtgcccatggctccttagctcttccagtggcttgcacacaagggtgtatcctctcttgacctggacatctcaattacgttgctgtaccgaatccatatctaccatcttcaggtaacaagtgatttggtgtcccgtgtgggtaatcca

SEQ ID NO: 85729 - DNA, 519 bp, Zea mays
  unsure (1)..(519): unsure at all n locations
agttaganctaagtgtttatggtacgggggggtagagtgagtgctgtaccggtccggaattcccgggtcgacccacgcgtccgcggacgcgtgggttgtgattgcggcagcaccgccgaccacgagcccgccgaaaggctcctccgcctgccgttccagggtgcactgccgccattgctcatctccccgtggtgcggaggtccacccgggcgccaattggtctcctctttcgttggcagactgagtggcatccaatcctgaatcaatgaggggctggggtttgctcgtgttatcgctacatgttctttcatgcctggttagtggcgttgcttctggtcgaacaagctcttatgtgcgcacagagttcccatctacagatatacctctagaaagtgaatggtttgctattccaaagggatacaatgctccacagcaggttcatatcactcaaggtgattatgatggaaaggcagttatagtatcttgggttactccagaagaacctgggccaagtgaagt

SEQ ID NO: 85730 - DNA, 515 bp, Zea mays
gagttagggctcagtgtgatgtagaggggggggagagatgctgtaccggtccggaattcccgggtcgacccacgcgtccgcccacgcgtccgcccacgcgtccgcaggaaggacatggagtgtgcccactgcaagtcggcagagagcaacatgtgtgatctgctcaggatcaacaccgaccgcggtgtgatgattgccgatggcaagtcgcggttttcaatcaatgggaagcctatctaccactttgttgggacttacaccttcagcgagtacaccgtcatgcatgtgggttgtgttgcaaagatcaaccctcaggctccccttgataaagattgcgtccatagctgaggtatatctaccggtcttggtgcatcaattaatgttgcaaaacctgcgaagggttcgacagtagctgcattcggtgtacgagccgttggtcttgccgctgcagaaagtgcacggattgctggagcgtcaaggatcattggtgtcgacctgaaccgcagcagattcga

SEQ ID NO: 85731 - DNA, 512 bp, Zea mays
gttagcaaggtgtgtagtggggggggggtagatgtatccgtcccggaattcccgggtcgacccacgcgtccgcctactcagacccgagaagcgcagctgctgccatggacgccaccggcactggagctggagggaaggcgaagaagggagcggcctgtcgcaaggccggctgtccgaggaagaagtcggtgaccaggtccgtgaaggccgggctccagttccccgtcggccgcatcgggcgctacctcaagaagggccgctacgcgcagcgcgtcgtctgcggtgcccccgtctacctcgcggtcgtcctggagtacctcgccgctgaggtcctggagctcgtcggcaacgctgccaaggacaacaagtagacgcgcatcgtcctgcgccacgtgctgctggcgatccgcaacgacgaggagctcgtgaagctgctgaccggcgtgaccatcgtccacggctgcgtgttgaccatcatcaacctcgtcctgctgcccaagaagacggctgat

SEQ ID NO: 85732 - DNA, 523 bp, Zea mays
  unsure (1)..(523): unsure at all n locations
nagtttaggctatgttggtatgtaccagacttattgtattgctcgtaccggtccggaattcccgggtcgacccacgcgtccgggcaaactgacttatatcagcaagacgttcagaagtatggaaacattgagtacatgagatgcggtccagaaaatggattttttcctgatctgtcaactgtccctaggacagatattattttcttttgttcacccaacaatcctactggtgctgctgcatctcgggaccaactaaccaaattagtaaaatttgcaaaggacaacaggtccatcatagtctatgattctgcttatgcaatgtacatatcagatgacagcccaaagtctatctttgaaattcctggagcaaaggaggttgctattgagacagcctcattctcgaaatacgctgggttcacaggtgtccgtctaggttggactgttgtccccaaggagctccttttctcggatggacatccagttgctaaagatttcaatcgcatagtttgcacttgcttcaatg

SEQ ID NO: 85733 - DNA, 518 bp, Zea mays
  unsure (1)..(518): unsure at all n locations
nagtttaggctgagtttttaagaaacgagggtatatagaatgcttctaccggtccggaattcccgggtcgacccacgcgtccggaccaactagcaacatagaaagcacaatagtgtaccaacaatggcagccaaaatattttgcctccttatgctccttggtctttctgcaagtgctgctaccgcgaccattttcccgcaatgctcacaagctcctatagcttcccttcttcccccgtacctctcaccagcggtgtcttcggtatgtgaaaacccaattcttcaaccctataggatccaacaggcaatcgcagctggcatcttacctttatcacccttgttcctccaacaatcatcagccctattacagcagttacctttggtgcatttattggcacaaaacatcagggcacaacaactacaacaacttgtgctagcaaaccttgctgcctactctcagcaacagcagtttcttccattcaaccaactagctgcattgaactctgctgcttatttgca

SEQ ID NO: 85734 - DNA, 516 bp, Zea mays
  unsure (1)..(516): unsure at all n locations
ntaggttagaaagattcgttatttaggactttgtgaggaagagtattactctcggaattcccgggtcgacccacgcgtccgctccatacaagggaagcgcgacacacaagctacaggttttagaagatagcattcccagcttccaaagggctggtacaattgtgccaagaaaggacagattcagacgcagttctactcagatggtgaatgatccatacactctggtgatagcactcaatagctcaggtgctggagaaggcgaactttatgtggatgacgggaaaagttatgagtaccagcaaggggcattcatccatcgccgatttgtctttgcagacaataagctaacttcattcaatattgggcctgacgatttgggcaagaaatttagaagtgattgcgtgattgaaagaattataatcctcggtttacgatccggagtgaagaaggctattattgagcctggaaatcaagaactagaaattgaatcagggccaattagtttaaggagtggtn

SEQ ID NO: 85735 - DNA, 521 bp, Zea mays
  unsure (1)..(521): unsure at all n locations
agttaaggactagagtctgnctatgaggagggggaagtatgtgcatcctctccggaattcccgggtcgacccacgcgtccgcccacgcgtccgcggacacgtggggaatcagctgtggcggcagcaaacgcaggcgaatgcgacggtgtgagggaaggagcaccagccatggtgcacgtcaacttctaccgtaactatggtaagacgttcaagaaaccaatgcgttcttatgagaaggagcgtctagatgctgaactgaagctggtccgtgagtatgggctgatgtgcaagcgtgagctttggagggtccagtatgcactgagcaggatccgtaatgctacaaggcacttgctcacccttgacgagaagaactatcgtcgtatctctgagggtgaggcgcttcttcgccgcatgaaccgctatgatctgctagctgagggtcacaacacgcttgattatgtacttgccctcaccgatgagaacttnctagcacggatgcttcaaacacttgtcttcatggc

SEQ ID NO: 85736 - DNA, 526 bp, Zea mays
  unsure (1)..(526): unsure at all n locations
ngagtttcaggctaagattggtagtaggagggggggacgatgtatcctctctcggaattcccgggtcgacccacgcgtccgcggacgcgtgggcggacgcgtgggtgcaacaacaattaccattcagccagctagttgctgcctacccccagcaatttcttccattcaaccaactagcagcattgaactctgctgcttatttacagcagcaacaactactaccattcagccagctagctgatgtgagccctgctgccttcttgacacaacaacagttgttgccgttctacctgcacgctatgcctaacgctggcaccctcttacaactgcaacaattgctgccattcaaccaacttgctttgacaaactcaacagtgttctaccaacaacccatcattggtggtgccctcttttagattgcttatgagttatagttcaataatgaagttttttggatgatgtttgtggcgtcccagaaataagaaagtacatttctagattaaaaaaaaaaaaaaaaagggcggcc

SEQ ID NO: 85737 - DNA, 528 bp, Zea mays
  unsure (1)..(528): unsure at all n locations
nagttnaaggctgatgtgntttaggagatgttgaggaaaagggagtgttgtaccggtccggaattcccgggtcgacccacgcgtccgcccacgcgtccgctacactcctcaaattcttgagcaagcaggcgttggtgttcttctgtcgaacctcggccttaacgcttcttcggcatcaatcctcattagcgccctgacgaccttactgatgctcccaagcatcggcattgcgatgaggctcatggatatgtccggaaggaggtttctcctcctcgcgacgatcccagtcctaatagtcgcgctactcgtcctggtggtgtccaacatcgtggacgtgggggacgtggcgcacgcggcgctctccacggccagcgtcatagtctacttctgcttcttcgtcatggggttcgggcccgtccccaacatcctctgcgcagagatcttccgcaccacggtccgcggtgtctgcatcgccatctgcgccctggccttctggctcggtgacatcatcgtgacgtacactcttcc

SEQ ID NO: 85738 - DNA, 522 bp, Zea mays
  unsure (1)..(522): unsure at all n locations
naggtaaggcttagtcggtttgttgtagtggggaaaagagatatgcttctaccggtccggaattcccgggtcgacccacgcgtccgtagcaacatagaaagcacaatagtgtaccaacaatggcagccaaaatattttgcctccttatgctccttggtctttctgcaagtgctgctaccgcgaccattttcccgcaatgctcacaagctcctatagcttcccttcttcccccgtacctctcaccagcggtgtcttcggtatgtgaaaacccaattcttcaaccctataggatccaacaggcaatcgcagctggcatcttacctttatcacccttgttcctccaacaatcatcagccctattacagcagttacctttggtgcatttattggcacaaaacatcagggcacaacaactacaacaacttgtgctagcaaaccttgctgcctactctcagcaacagcagtttcttccattcaaccaactagctgcatngaactctgctgcttatttgcaacaacaac

SEQ ID NO: 85739 - DNA, 527 bp, Zea mays
  unsure (1)..(527): unsure at all n locations
agggngagaacaatgtggtctacgtatcgcggggaaatagtatagctgtaccggtccggaattcccgggtcgacccacgcgtccggagagggtgttttgtctctcttcaactccacatcaacaaaaccaatggaaccaactcgggatgctacttggtctttctgcaagtgctgctaccgcgaccattttcccgcaatgctcacatgctcctatagcttaccttcttcccccgtacctctcaccagcggtgtcttcggtatgtgaaaacccaattcttcaaccctataggatccaacaggcaatctcagctggcatcttacctttatcacccttgttcctccaacaatcatcagccctattacagcagttacctttggtgcatttattggcacataacatcagggcacaacaactacaacaacttgtgctagcaaaccttgctgcctactctcagcaacagcagtttcttccattcaaccaactatctgcattgaactctgctgcttatttgcaacaacaactacctc

SEQ ID NO: 85740 - DNA, 520 bp, Zea mays
agtagtgcagagttgttagtgtacggggagtattggatacttctaccggtccggaattcccgggtcgacccacgcgtccgggtggacgatgggggggtggcgtgggaggtcgtgggcacaagggcaagggtggcgaatagtggcagtgtcagtgtgagcaatgacctgaatgaacaattgaaatgaaaagaaaaaagtattgttccaaattaaacgttttaaccttttaataggtttatacaacaaaaaaaaaaaaaaaaaaaaaaaaaaaaaaaaaaaaaaaaaaaaaaaaagggcggccgctctagaggatccaagcttacttacacgtgcatgcgacgtcatagctcttctatagtgtcaacctaaattcaattcactggccggcgttttacatcgtcgtcactgggaaaaccctggcgttacccaacttaatcgctttgcagcacatccccctttcgccagctggcgtaataacgaagaggcccgcaccgatagaccttcccaacatttgagcatc

SEQ ID NO: 85741 - DNA, 519 bp, Zea mays
  unsure (1)..(519): unsure at all n locations
gaggggagaggattgctattgggagggggatgactgaaccgccttcggaattcccgggtcgacccacgcgtccgccgacgcgtccgcccacgcgtnccgcgtacccttggttcctggcccagaacccacggaggacacttcaaaggttgggcacctaattagccatcgattcaggctcttatccatgggctgaacaggcactactactcaattgcaatcaattaccggaaaaatgagctagaggagaaaatgttgttgaacttgcacaaaaagaaatggacagatggactaattttgaagaggtttgacactcactcaaaaaccaacgagcagactgtccaggaaatgctaaacctagccatcaagtacaacaaggcagtgcaagaggaggacgaactgccacctgagaaacttgcgatagcaaatgtgggtcggcaagatgcanaaaagcatttggaagagcatgtgtccaatttgatgtcatcaaacatagttcagaccctangaaccatgctcgac

SEQ ID NO: 85742 - DNA, 537 bp, Zea mays
  unsure (1)..(537): unsure at all n locations
tggtntntaggnnntnnnggagggtagagattattgttatcttgttgctcgttagatggatagttaccgccttcngaattcccgggtcgacccacgcgtccgaaaccatcagggcacaacagctgcagcatctcgtgctacctgtgatcaaccaagtagctctggcaaacctttctccctactctccgcaacaacaatttcttccattcaaccaactgtctacactgaaccctgctgcttatttgcagcaacaactattaccatttagccagctagctactgcctactctcaacaacaacaacttcttccatttaaccaattggccgcactgaaccccgctgcttatttgcagcagcaaatactactaccatttagccagctagctacagcaagccgtgcttccttcttgacacaacaacagttgctgccgttctaccagcagtttgcggctaaccccgcaaccctcttacaactacaacaattgttgccctttgtccaacttgctttgacaaacccagcagcctcctaccaacaac

SEQ ID NO: 85743 - DNA, 531 bp, Zea mays
  unsure (1)..(531): unsure at all n locations
ngagtntaagantgaggatgntgtcctcagttttgtatgctattcggatctcttccggaattcccgggtcgacccacgcgtccgcacgctcttgcgcccagacccaaatatttctccactcaatcactgcagtcatggacgccaacggagccagtagcaaggcgaagaacggggcggctgggcgcaaggctggcggccccaggaagaagtccgtgtctcggaccgtcaaggacgggatgcaatttcccgtaggtcggatcgggcgctacctcaagaagggccggtacgcgcaacgcgtgggcaccagcgcccacgtgctatctcgccgtcgtgcttgagtacctagccgacgaggtgctggagctggacgtcaacgcttcgaaggacaacaagaagacgcgcatcgtaccgtgccacgtgctcctggcgatcgcgaactacgttgaactcggcgcgctactgtctggcgtcaccatctggcacggaggtgtgctcacgaacatcaacccagttctactagcccagtagggg

SEQ ID NO: 85744 - DNA, 521 bp, Zea mays
  unsure (1)..(521): unsure at all n locations
gagttaaggggagagcttgnttaaagatgaagggggggatatttgttacagtcccggaattcccgggtcgacccacgcgtccgcccacgcgtccgcccacgcgtccgggctcacaccagctagctggctgaatggtagtagttgttgtgagccctgctaccttcttgacacaaccacagttgttgccgttctaccagcacgctgcgcctaacgctggcaccctcttacaactgcaacaattgctgccattcaaccaacttgctttgacaaacctaacagtgttctaccaacaacccatcattggtggtgccctcttttagatttcttatgagttatagctcaataataaagttttttgtctgatgtttgtggcttcccagaaataagaaagtacatttctaaaaaaaaaaaaaaaagggcggccgctctagaggatccaagcttacgtacgcgtgcatgcgacgtcatagctcttctatagtgtcacctaaattcaattcactggccgtcggtttacaacg

SEQ ID NO: 85745 - DNA, 524 bp, Zea mays
  unsure (1)..(524): unsure at all n locations
nagtttaaggctaggattgatagatggaggaggaaataaatcatacctctccggaattcccgggtcgacccacgcgtccgtttgcttgttagattgaaagggtttccacaccttgaaggttatgctgaaccatacatgaggcaactgtcagtcagtgatgttgtaactggtcctctacagacattcaatggcatagagaaggtcggccatatagttcatgtcttaaagacaactggccacaacggtttccctgtggttgatgagccaccattttcagatacccctacattgtatggtctaattcttcgagaccacctgcttgttctattgaggaagaaggatttcatccgtagttgcacagcgtctacactgaatgctttaaaccatttctcacatgctgagtttgctaaacgtggatcaggaaaacatgacaggattgaggacattgaattatgtccagaagaactggaaatgtttgtagacttgcatccattcacaaacacatctncatatactggccttgn

SEQ ID NO: 85746 - DNA, 512 bp, Zea mays
gttaggcagatcgtcactcacaccgatgagtagcacagcgtcgcattcccgggtcgacccacgcgtccgccagagcgcagaagaacccgatcgacaccatgatggtggtgctcgttgccctcgctcggctggggctcgctgcgagcgccacctacacgcatacaagcggcggctgcggctgccagccaccgtcgtcggttcatctaccgccgtcggtgcatctgccacctgcggttcacctgccacctacggtgcatcttccaccgccggtccacctgccgccgccgtaccacctgccaacgacggtccatgtgccgccgacggctcatgtgtcgtcgccaccatgccgataccctactcaacctgcacggactcaggctaacattagtcatacgcatgcccgggctaactgtctcatgcaagcccgtgccagcttgagggaacctgctggtgtggtcagcattttaaaactgttccagtgcgtttcagttaattagtcgtttatgtggtcg

SEQ ID NO: 85747 - DNA, 519 bp, Zea mays
  unsure (1)..(519): unsure at all n locations
gaggtnagacagagttgtatgtgagaggggggtaaatgcaaaactctaccggtccggaattcccgggtcgacccacgcgtccgacctttctccctactctcagcaacaacaatttcttccattcaaccaactgtctacactgaaccctgctgcttatttgcagcaacaactattaccattcagccagctagctactgcctactctcagcaacaacaacttcttccatttaaccaattggccgcactgaaccccgctgcttatttgcagcagcaaatactactaccatttagccagctagctgcagcaaaccgtgcttccttcttgacacagcaacagttgctgcctttctaccagcagtttgcggctaaccccgcaaccctcttacaactacaacaattgttgccctttgtccaacttgctttgacagacccagcggcctcctaccaacaacacatcattggtggtgccctcttttagattgcttattagttgtaattcaataataaagttttttggat

SEQ ID NO: 85748 - DNA, 526 bp, Zea mays
  unsure (1)..(526): unsure at all n locations
nggggagaaggggnagaggggagataggttgtatgtgcgtagcgggaagagagaatgctctacagttcccgggtcgacccacgcgtccgtagcaacatagaaagcacaatagtgtaccaacaatggcagctaaaatattttgcctccgtatgctccttggtctttctgcaagtgctgctacggcgaccattttcccacaatgctcacaagctcctatagcttcccttcttcccccgtacctctcaccaacggtgtcttcggtatgtgaaaacccaattcttcaaccctacaggatccaacaggcaatcgcagctggcatcttacctttatcacccttgttcctccaacaatcatcagccctattacagcagttacctttggtgcatttattggcacaaaacatcagggcacaacaactacaacaacttgtgctagcaaaccttgctgcctactctcagcaacagcagtttcttccattcaaccaactagctgcattgaactctgcttcttatttgcaacaacaacc

SEQ ID NO: 85749 - DNA, 522 bp, Zea mays
  unsure (1)..(522): unsure at all n locations
aggttntagttaaggtttgacccagctccgacgctatgcgaaccgcttcggaattcccgggtcgacccacgcgtccgagcgcacttactcccaaacggagaactttacaccatgaaggagctgatcgatggacttgctctgatggcgctgcctggcagcgcacgctccagtacaagccgcggctggcgctgccagacacaaccgtttgatctaccgcctcaaggctatatgccgtctccgctctatctgccgccggagcaacatccagaacgacggcaatacccaactcaagcaccgcagctaaccccgtgccatcagctccgatcctgatgcgtcagcagcgtcggccgcccgttcctgcgccagtgcgtcgaaggactgaggcaccactgcaatccggcggcgacactgtaccgctcgacacagtgccaggcgctgcatcagcagtgctgtcaccagatcacgcatgtggcaccgctgcacctgtaccaggcgacatacggtgtggtactgcagtacgtc

SEQ ID NO: 85750 - DNA, 525 bp, Zea mays
  unsure (1)..(525): unsure at all n locations
ngggtnnnggggctagagttgacaaggaagacgatgagtattgtcaacncctccggaattcccgggtcgacccacgcgtccgctactatactatactctaggaagcaaggacaccaccgccatggcagccaagatgcttgcattgttcgctctcctagctctttgtgcaagcgccactagtgcgacgcatattccagggcacttgccaccagtcatgccattgggtaccatgaacccatgcatgcagtactgcatgatgcaacaggggcttgccagcttgatggcgtgtccgtccctgatgctgcagcaactgttggccttaccgcttcagacgatgccagtgatgatgccacagatgatgacgcctaacatgatgtcaccattgatgatgccgagcatgatgtcaccaatggtcttgccgagcatgatgtcgcaaatgatgatgccacaatgtcactgcgacgccgtctcgcagattatgctgcaacagcagttaccattcatgttcaacccaatggccatgac

SEQ ID NO: 85751 - DNA, 530 bp, Zea mays
agggttagggccagagttctgaaaaggggtgatggggggaaggaagagaatacttctaccggttcggaattcccgggtcgacccacgcgtccggtggaatgtcaaataagatgtgggacagccttgttgagcatgcaaagacatgtgtcttaagtggaaagcattatgtatactatgctagagactcaagaaacgtgggtgcaatattcaataacatctacgagttcactggtttgattgccgatgatcagttcatttcagctgaaaatctcacagacaaccagaaggtctatgctgatgcattggtaaagaaagcatatgaggactggatgcaagttgtagaatatgatggcaaggcactcttgagcttcaagcagaaaaagaaaactgtcacgacaagaagtgacgttgcatctgcctcaacaagcaatcctgcttcatatggttcggccaattcacagaaacagttgtctcttccagcaaaagctggacaaacttcctcagcgggtactatgaatgaagatggaact

SEQ ID NO: 85752 - DNA, 524 bp, Zea mays
  unsure (1)..(524): unsure at all n locations
nggttntnagaacagagttcgtatgaaccgcggtaaaaagtatgctctaccggtctcggaattcccgggtcgacccacgcgtccgcggacgcgtgggtgctgcttatttgcaacaacaactaccattcagccagctagctgctgcctacccccagcaattacttccattcaaccaactggcagcattgaactctgctgcttatttacaacaacagcagctaccaccattcagccagctagctgatgtgagccctgctgccttcttgacacagcaacagttgttgtcgttctactcgcacgctgcgcctaacgctggcaccctcttacaactgcaacaattgctgccattcaaccaacttgctttgacaaacccagcagcgttctaccaacaacccatcattggtggtgccctcttttagattgcttatgagttatagttcaataatgatgttttttggatgatgtttgtggcttcccagaaataagaaagtacatttctagattcttatgtgcttctagtcttc

SEQ ID NO: 85753 - DNA, 529 bp, Zea mays
  unsure (1)..(529): unsure at all n locations
nagttttaagancagtgttnnnnnnttttgaanctcgttgccattgctgtannctccnnnnnnntnggnnnannggctcgacccacgcgtccggcttatttgcagcaacaactattaccatttagccagctagctactgcctactctcagggacaacaacttcttccatttaaccaattggccgcactgaaccccgctgcttatttgcagcagcaaatactactaccatttagccagctagctgcagcaaaccgtgcttacttcttgacacagcaacagttgctgcctttctaccagcagtttgcggctaaccccgcaaccctgttacaactacaacaattgttgccctttgtccaacttgctttgacagacccagcggcctcctaccaacaacacatcattggtggtgccctcttttagattgcttattagttgtaattcaataataaagttttttggatgatgtatgtggccaaccagaaataagaagttacatttccagaaaaaagaatcttatgtaattntaaaa

SEQ ID NO: 85754 - DNA, 517 bp, Zea mays
gagggaagaggattgtttattgtgtccaaaagatttaaccgtcttcggaattcccgggtcgacccacgcgtccgcccacgcgtccgcccacgcgtccggtaatcaccccaaatcctagggttctagtcgcttgtcgtcgtttcgttcgtagatcacagcgacaatggtgaaggcagttgctgtcctcgccggcactgatgtcaagggcaccatcttcttttcacaggagggggatggtccgaccaccgtgactggaagtatctctggcctcaagccagggctccatgggttccatgtgcacgcgcttggcgacaccaccaacggctgcatgtcgactgggccacacttcaatcctgttggcaaggagcatggcgcaccggaagatgaggaccgccatgccggtgatcttgggaatgtgacagcgggagaagatggtgttgttaatgtcaatattactgacagccagatacctcttgctggaccccactcgatcattggccgagctgttgttgtccat

SEQ ID NO: 85755 - DNA, 523 bp, Zea mays
  unsure (1)..(523): unsure at all n locations
aaaggtnnagaaggattgcatattggaggggaagaagaaagtgatcgtctcggaattcccgggtcgacccacgcgtccgcacagttcctccgaccagttacttcaatgggcttcgaacacctagctgtgcaagcctacaggctacaacaagcgcttgcggcgagcgtcttacaacaaccaattaaccaattgcaacaacaatccttggcacatctaaccatacaaaccatcgcaacacaacagcaacaacagttcctaccagcactgagccaactagatgtggtgaaccctgtcgcctacttgcaacaacaggtgcttgcatncaacccacttgctctggcaaacgtagctgcataccaacaacaacaacaattgcaacagtttctgccagcgctcagtcaactagccatggtgaaccctgccgnctacctacaacagcaacaactgctttcatctagccctctcgttgtgggtaatgcacctacatacctgcaacaacaattgctgcaacagattgtaccac

SEQ ID NO: 85756 - DNA, 530 bp, Zea mays
  unsure (1)..(530): unsure at all n locations
agtgtggggntgagttagggtgtgtactgataagaagcttactgtatcgctctaccggtccggaattcccgggtcgacccacgcgtccgcggacgcgtgggcgattcttaccaatccccctggcctgctgctttcctgataatcgaccagttccccagtcttgctccctgcagtcctccctcctccatctccagcgttgtgttctgactcacctgcaccaatggctgttctttctgctgctggtgctcccccggcctcagctatcgggtttgagggctatgagaagcgccttgagatcacattctctgaggcacctgtctttgtggacccccatggcagcggtttgcgtgccctctccaggtcccagattgactctgttctggatcttgcacggtgcacgatcgtgtccgagctctccaacaaggattttgactcctatgttctctccgagtcaagcttgttcatctatcctctgaagattgtcatcaagacctgtggcactaccaagctcctgctcacaattnccagga

SEQ ID NO: 85757 - DNA, 518 bp, Zea mays
  unsure (1)..(518): unsure at all n locations
nagttagagtgggtctnattctgacgcctacgcatacganttctcttngnntccggaatgcccgggtcgacccacgcgtccgagcgtcctgctggtagacgtgctggtggaatgcagcagcccatgccaatgggtgggcagcaacaggtgttccctagaggtggtcgtggctatcgctatcctactggacgtggaatgcctgatcctggcatgcacagtgttggtgctgtgatgccaccttcatatgagatgggagggatgccaatgagagaagctgccccccaacctgttccaattggggcgctagccactgcacttgctaacgccccaccagatcagcagagacttatgcttggtgagaacctgtatcctcttgttgaacagctggaacgtgagcaggctgccaaggtcactggcatgcttttggagatggatcagacggaggttcttcacctgctggagtcgccagatgctctgaaagccaaggttgctgaagccatggaagtccttcggtctgc

SEQ ID NO: 85758 - DNA, 524 bp, Zea mays
agtttaggaggctcatatacgagacggagggggaaaagagtaggctcgtaccggttcggaattcccgggtcgacccacgcgtccgagtttccaagatctagtttctttcaaacaacccccggcagatgataaaatagctctgattgacctaactactaacagggaattgccttctcagatggatctcgacatcactgatgcagagacaaaaaggtctaatgcggtctggaaaaatcttgagctcgcaaccatgaaattgtcccaagaactggcagagcaattgcgcctggttatggaaccaactcttgctagtaagcttcaaggggattatagaactggaaagagaataaacatgaagaaggttattccatatattgcgagtcatttccgcagggacaagatatggttgcgccgaactaagcctaataaacggaattaccaagtggttattgctgttgatgactctagaagtatgtctgagggcaaatgtggaaaatttgctatcgaggcattaggtactgtgt

SEQ ID NO: 85759 - DNA, 524 bp, Zea mays
  unsure (1)..(524): unsure at all n locations
gggttaggaggctcnttttaacgaaaggcgggataacggcatgctcgtaccggtccggaattcccgggtcgacccacgcgtccgatcaaggacaagcttatattccctttcgtagacctcgatagatttccagagcaccggggtcatctatcaaggacaagcttatattccctttcgtagacctcgacatcaaatattttgacctcgggcttccacaccgtgatgctaccgacgacaaagtcacagtggaggctgcggaggccacactcaagtacaatgtggctatcaagtgtgccaccattacaccagatgaagcaagggtaaatgagtttggcttgaaggctatgtggaagagcccaaatggcacaattaggaatattctgaatggcactgtgttcagagaaccaatcatctgcaaaaacatcccacggcttgttccagggtggacaaaacccatttgcatcgggaggcatgcattcggtgatcagtaccgggcaactgatgcagttatcaaggggccaggg

SEQ ID NO: 85760 - DNA, 523 bp, Zea mays
  unsure (1)..(523): unsure at all n locations
agggntntagtcngaaccctcagctctcatctgtatgctcgtcccggtccggaattcccgggtcgacccacgcgtccgccaactagcaacatagaaagcacaatagtgtaccaacaatggcagccaaaatatttggcctccttatgctccttggtctttctgcaagtgctgctacggcgaccattttcccgcaatgctcgcaagctcctatagcttcccttcttcccccgtacctctcaccagcggtgtcttcggtatgtgaaaacccaattcttcaaccctacaggatccaacaggcaatcacagctggcatcttacctttatcacccttgttcctccaacaatcatcagccctattacatcagttacctttggtgcatttattggcacaaaacatcagggcacaacaactacaacaacttgtgctaacaaaccttgctgcctactctcagcaacagcagtttcttccaattcaccaactagctgcatttgaactctgcttctattggcacaacaacactac

SEQ ID NO: 85761 - DNA, 516 bp, Zea mays
  unsure (1)..(516): unsure at all n locations
tagttagagagtcgtgggtcacgaaagggggggaaacagcatcacgttccgaattcccgggtcgacccacgcgtccgcgcacgcgtccgcccacgcgtccggtgactcccatggctccggccatgtcggcgcggttcagaagaataaccttcagcaacctgtttgtccgtcgggctggcccaggcagcacggagctgaccgtggagggaaggccatccgaccagctgggcaggagaaacctcactgacagccccgtatttgacggccgtggccctgacgccagcctcgtggctcgcgtacagggagtcgctacccagatgggcgacgtgcgccagttgtacaccgtcgtgttccaggagaggccgctcaagggctccacgctcgtcaccgaaggcgcgatgacagaagggtcagacgagtgggcgatctacggtggaactggagtgttcgcgatggcgagaggcgtcataaggagaacgtttcttgccgacacgagccggcggaactncgacgagc

SEQ ID NO: 85762 - DNA, 522 bp, Zea mays
  unsure (1)..(522): unsure at all n locations
agttaagaggctcgtctgcagacaacgaacattacgtcaaaccattaccggtccggaattcccggctcgacccacgcgtccgcgcactcgtccgcccacgcgtccggcaacatagaaagcacaatagtgtaccgacaagtgtagccaaaatattttgcctccttatgctccttggtctttctgcaagtgctgctacgacgaccattttcccgcaatgctcacaagctcctatagcttctcttcttcccccatacctctcaccagcgttgtcttcagtatgtgaaaacccaattcttcaaccctacaggatccaacaggcaatcacagcaggcatcttacctttatcacccttgttcctccaacaatcatcagccctattacatcaattacctttggtgcatttattggcacaaaacatcagggcacaacaactacaacaactcgtgctagcaaaccttgctgcctacgctcagcaacagcagttacctttggtgcaattgttggcacaaaacatcanggcac

SEQ ID NO: 85763 - DNA, 521 bp, Zea mays
  unsure (1)..(521): unsure at all n locations
agttaggagtggttcnnagttctgcagcccgaacttatcaggatcactcgtaccggtccggaattcccgggtcgacccacgcgtccgcccacgcgtccgcccacgcgtccgctgacgcgtgggcgcgccgccgccggcgccgggactgaaggaagaggaggagcaaggagcacgacgcgatgggccactccaacgtttggaactcgcaccctaagaactacggccctggctcccgcgtctgccgggtctgcgcgaaccctcacggtctgatcaggaagtacgggctcatgtgctgcaggcagtgctttcgcagcaacgccaaggacattggtttcatcaagtaccgttgaagaggccactgtgctgctgcggagaacttcctacatcaaagaaatgggtccttcattagaaggcctaatttatgcgctttagctttttgttcagaacttgagactcatgtgttaaactcgacttgttaaagttttgatggctactttgtgcttgttggaccagctataatc

SEQ ID NO: 85764 - DNA, 516 bp, Zea mays
agtaaagggctttgtacgcagaggggggtaagatatactcgtaccggtccggaattcccgggtcgacccacgcgtccgctatactatactctaggaagcaaggacaccaccgccatggcagccaagatgcttgcgattgttcgctctcctagctctttgtgcaagcgccactagtgcgacccatattccagggcacttgccaccagtcatgccattgggtaccatgaacccatgcatgcagtactgcatgatgcaacaggggcttgccagcttgatggcgtgtccgtccctgatgctgcagcaactgttggccttaccgtttcagacgatgccagtgatgatgccacagatgatgacgcctaacatgatgtcaccattgatgatgccgagcatgatgtcacatgggctctcgcagcacgtgatgtcacatgtgatgaccgcacagtgactgtgaaacgccgtctcacatattgcgctgcaacagctgcactttatgtgtaacaccagggcctgagc

SEQ ID NO: 85765 - DNA, 510 bp, Zea mays
  unsure (1)..(510): unsure at all n locations
aagtttcttatctgctactgaacacatatggatcncgcgttcggattcccgggtcgacccacgcgtccgtgagtctccaatgtgtggcttcagtgtactggctgttaaggtcttccagcaatatggcggccctgtctgtggtagagacattcttggggatcttaagctcaaagagtgtgttaaagcccacactaactggcctacatttccacaaatatttatcaaaggagagtttgttggggggtctgacatcatattaagcttgcaccagaagggtgagcttaaggatcttcttggggatattgcacaaagagacgaacaaaaagtgcatgctcacgattcatgaagcaatcaacagtaggttcttttactatgcgctatctactctgccactaaaatgttctatctcggagtctttaggcgacagcgtacgtgacattgtgaactgtccctacgcattggacatggatgaccggatgtgttcccagaatcaagttgtatgcatttggt

SEQ ID NO: 85766 - DNA, 511 bp, Zea mays
  unsure (1)..(511): unsure at all n locations
agctgtatcttgtgcctagcttagctgcaggactgtcncggtccggaattcccgggtcgacccacgcgtccgctggaagggccctgccaagaactgggagaacgtgctgctcagcctcggggtcgccggcggcgagccaggggtcgaaggcgaggagatcgcgccgctcgccaaggagaacgtggccgcgccctgaagagttcggcctgcagggcccctgatctcgcgcgtggtgcaaagatgttgggacatcttcttatatatgctgtttcgtttatgtgatatggacaagtgtgtgtagctgcttgcttgtgctagtgtaatgtagtgtagtggtggccagtggcacaacctaataagcgcatgaactaattgcttgcgtgtgtagttaagtaccgatcggtaattttatattgcgagtaaataaatggacctgtagtggtggagtaaataatccctgctgttcggtgttcttatcgctcctcgtatagaaattattttgaggaccttt

SEQ ID NO: 85767 - DNA, 513 bp, Zea mays
agtagtagggctcgtgcaccgaaagagaagtagcttgcaacccgtccggaattcccgggtcgacccacgcgtccgcggactcgtgggcacgtatatggacttgcaatcaaggtgaactgggcatatgcaagtacgcggagggaggatacgtcagggcatttccatatttttgttggtgatttaagttctgaagtgaatgatgcaactctttatgcctgtttctcagcatatccttcttgttctgatgctcgagtcatgtgggacaacaaaactggacgctccaggggttatggttttgtctccttccgtaatcaacaggaagctgaaactgctataactgaaatgactggaaaatggcttggaagcagacaaataaggtgcaactgggcaacaaagaacaattcggaagagaaaccagaaactgacaatcataacgcagtcatactaacaaatggtagcttcaacaattcagcaacggatgcaagccatgacgcatgaagtaaatagcccccc

SEQ ID NO: 85768 - DNA, 520 bp, Zea mays
  unsure (1)..(520): unsure at all n locations
agtattacttctctacttttcccacgccccncatcgctattcagtctctgattcccgtgctctacccactcttcctcccactcgtcctataaataataaagtccatttctaggaagccacaaacatcatacgaatagctttattatttctgtgacgccacaattctgatctcgatcttcctctcactatctatgttcaccctcttacaacttctacaatttcttccattcaaccaacttgcttttacaaacccatcatctttctaccaacaacccatcattgctggtgccctcttttagatttcttatcacttatagctcaatactaaagcttcttgtcttatatttactgcttcctatatattatccattccatttctaatcaacttttctctcacacatcatttttatatattaacctttaactgatccatctttacttacccttactttctattttataatccttcaatattttccaccaattcaatctcacttccctttatttaaaaacttttaac

SEQ ID NO: 85769 - DNA, 517 bp, Zea mays
gagtaggaaggttgtctacgatacgcgggagatagtactactcgtaccggtccggaattcccgggtcgacccactcgtccgggacaccaccgccatggcagccaagtatgcttgcattgttcgctctcctagctcttggtgcaagcgccactagtgcgacgcatattccagggcacttgccaccagtcatgccattgggtaccatgaacccatgcatgcagtactgcatgatgcaacaggggcttgccagcttgatggcgtgtccgtccctgatgctgcagcaactgttggccttaccgcttcagacgatgccagtgatgatgccacagatgatgacgcctaacatgatgtcaccattgatgatgccgagcatgatgtcaccaatggtcttgccgagcatgatgtcgcaaatgatgatgccacaatgtcactgcgacgccgtctcgcagattatgctgcaacagcagttaccattcatgttcaacccaatggccatgacgattccacccatgttctt

SEQ ID NO: 85770 - DNA, 517 bp, Zea mays
  unsure (1)..(517): unsure at all n locations
ggtagctgtgtcttagcctagcctattctcagtactcgtcccggtccggaattcccgggtcgacccacgcgtccgcgttgccctcgctctcctggctctcgctgcgagcgccacctccacgcatacaagcggcggctgcggctgccagccaccgccgccggttcatctaccgccgccggtgcatctgccacctccggttcacctgccacctccggtgcatctcccaccgccggtccacctgccgccgccggtccacctgccaccgccggtccatgtgccgccgccggttcatctgccgccgccaccatgccactaccctactcaaccgccccggcctcagcctcatccccagccacacccatgcccgtgccaacagccgcatccaagcccgtgccagctgcagggaacctgcggcgttggcagcaccccgatcctgggccagtgcgtcgagtttctgaggcatcagtgcagcccgacggcgacgccctacttggtcgctcaatggcaggccgtgcgn

SEQ ID NO: 85771 - DNA, 515 bp, Zea mays
  unsure (1)..(515): unsure at all n locations
agctcgtatcttgtgnaatgcccatccgtagtactgtctcggtccggaattcccgggtcgacccacgcgtccggggagattatgttgaccgtggttactactctgtcgaaactgtcacacttttggtgggttgaaaagttcgttatcctcagaggatcaccattctcagaggaaaccatgaaagccggcagattactcaagtgtatgggttctatgacgaatgcttaaggaagtatggaaacgcaaatgtctggaaaacctttacagatctatttgattacttccccttgactgcattggtcgagtcagaaatattttgcttgcatggtggattatcgccatccattgagaccctcgacaacatccgcaactttgaccgcgttcaagaagttcctcacgaaggtccaatgtgtgatcttctgtggtctgatccagatgatcggtgtggttggggtatttctcctcgtggtgcttggtatacccttcggacaggatatattataagcagttcaccc

SEQ ID NO: 85772 - DNA, 515 bp, Zea mays
  unsure (1)..(515): unsure at all n locations
atgaggtgtctgatcacagaaacagacagctactctcatacccgtccggaattcccgggtcgacccacgcgtccgcggacgcgtgggcggacgcgtgggtgctgagagtaggcagcagtttcttccattcgaccagctggctgcattgaactctgctgcttatttgcaacaacaactaccattcagtcagctagctgctgcctacccccagcaatttcttccattcaaccaactggcagcattgaactctgctgcttatttacaacagcaacaactaccaccattcagccagctagctgatgtgagccctattgccttcttgacacagcaacagttgttgccgttctacctgcacgctgcgcctaacgctggcaccctcttacaactgcaacaattgctgccattcaaccaacttgctttgacaaacccaacagcgttctaccaacaacccatcattggtggtgccctcttttagattgcttatgaggtatagntcaattattgagattttttgt

SEQ ID NO: 85773 - DNA, 520 bp, Zea mays
tagtttaggaggtatctgataagcgggaggaggagtagtcgtcatcccgtccggaattcccgggtcgacccacgcgtccgtgcactcgtccgagaagaccagttcccctctcctgatcgtcctgttcctcacagcagcagcgatggcggccgagccggagaagcaggcggcccccgcggcacaggagacggccgtgcacatcgtgtacgttgaccgccccgaggacgccgaccctgaggagttccacatccgcaccctcacccccgtcctcggcagcgaacagaaggccagggacgcagtgctctaccactacaagaacgccgtcagcggcttctccgcgaagctcaccccccagcaggtcaaggatctcaaggagcaaccaggtgttctccaggttgtgccgagccagacttaccagctacatggtcctgggtctggcactcaccagggcacgacacacaccttgggccttatgtgaaggcgtatgagaatcaagaggattgggttagtatggctggat

SEQ ID NO: 85774 - DNA, 520 bp, Zea mays
  unsure (1)..(520): unsure at all n locations
aggttaggagggttntgttactgaacagaagattatagcaatgctcgtaccggtccggaattcccgggtcgacccacgcgtccgggcagcagcgctcgcttcacgggcgttcctggtagcagctctcgcttcgcgggcggtcctggcagcagcgctcgcttctcgggcattgctggcgccagattggacaacgacgaggagagtgaaaccaaggagaggccactggtgcttcgtaataagccgcctaggtggcacgaacagctgcagtgttggtgcctcaacttccgtggccgtgtgacaattgcctcggtgaagaacttccagctgatcgccgcggctaccccgccaccggcaggtgcgccaaccccctctcagcctgccccgtcagatcccgacaaggtgattctccagtttggcaaagtggcaagggatatgttcacgatggactatcgctaccctctctcggctttccaggcctttgccatttgtctgagtagctttgataccaaagtagcctgtn

SEQ ID NO: 85775 - DNA, 521 bp, Zea mays
gagtaaaaggactgtagataggttaactgttactaagcatatacgttaccggtccggaacggccgcgtcgacccacgcgtccgggcagcagctctcgctccactggcttccctggtatcagctctcgcttctggatcggtcctgtcagaagcgctcgcttctcgggcattgctggcgccagattggacaacgactaggagagtgaaaccaaggagaggccactggtgcttcgtaataagccgcctaggtggcacgaacagctgcagtgttggtgcctcaacttccgtggccgtgtgacaattgcctcggtgaagaacttccagctgatcgccgcggctaccccgccaccggcaggtgcgccaaccccctctcagcctgccccgtcagatcccgacaaggtgattctccaatttggcaaagtggcaagggatatgttcacgatggactatcgctaccctctctcggctttccaagcctttgccatttgtctgagtagctttgatacaaagttaacctgtgaa

SEQ ID NO: 85776 - DNA, 522 bp, Zea mays
  unsure (1)..(522): unsure at all n locations
tagttagtgagaggctgntgtcactgaatcaagcaatatatagtatcgctcgtaccggtccggaattcccgggtcgacccacgcgtccgcggactcgtgggcgaatattgtcaagttcattggtgcgtgcaggaagccattggtgtggtgtattgtgacggagtatgcgaagggtggatctctcaagaatttcttgagcaagaggcagaacaggtctgtcccgctgaagttggcagtcaagcaggcattggatgttgcacgtggcatggcctatgtccatggccttgggttcattcatagagatcttaagtcggacaacctcctgatttctggtgataagtccattaagattgctgactttggagtggctaggattgaagtcaagactgaggggatgacacctgaaactggaacataccgctggatggctcctgaaatgatccagcataggccatacaaccagaaagttgatgtctacagttttgccattgtcctgtgggagttagtgactgggaatgtccc

SEQ ID NO: 85777 - DNA, 510 bp, Zea mays
atgtgtatctgtgcccagctatccttagtactgtcccggtccggaattcccgggtcgacccacgcgtccggggaggaaggaggcgatcctgctgctgaatgcggcggcgaggagacggaggtggagggggcggcggcgaagaagccgaagttggaggaggccaaggaggcggagaaggggagggtagaggagacggcggaggggaagacacaggaggcaaatgaggagaaggcagtggaggcggaggacaagcctgtgacagaggaggcaaatgagaagaaggcagttgaagcggagggaaagcctgtgacacaggaggcaaatgaggagaaggcagcggaggcggagggcaagcctgtgaagctggggcctaaagaattcgcctcggccatcgatatgttcaactacttctacgctctgctccactcctggacgccgcagcttgagttcaataagtatgaacaaatggtgcttgaggatttgcttaagaaaggttatgcttaaccttct

SEQ ID NO: 85778 - DNA, 514 bp, Zea mays
cggtgtatcttgtcctagctcactccgtagtgcctgcccggtccggaattcccgggtcgacccacgcgtccgcggacgcgtggggcaaattgcaccaagaaatccatcgagaggccgtcgacaggggagattgatggcgtcgtcgtctagcagcagccaccgccgcctcatcctcgcagccgccgtcctgctctccgtgctcgcggctgccagcgccagcgccgggacctcctgcgtgccggggtgggccatcccgcacaacccgctcccgagctgccgctggtacgtgaccagccggacctgcggcatcgggccgcgcctcccgtggccggagctgaagaggagatgctgccgggagctggcggacatcccggcgtactgccggtgcacggcgctgagcatcctcatggacggcgcgatcccgccgggcccggacgcgcagctggagggccgcctagaggacctgccgggctgcccgcgggaggtgcaaaggggattcggcggcacccttggc

SEQ ID NO: 85779 - DNA, 503 bp, Zea mays
  unsure (1)..(503): unsure at all n locations
gttagtgagttctgtgatttcatntcgacgcatagcatctcggtccggattcccggctcgcccacgcgtcggcaccgtcgccaccgtcgccacgcgtcgctgctgctgtcagaacgaatgaagagatggagaccccacgagtggcccccacgtgacagagcacacggctggtgtgtggcatggtgctacacgaacacgacacactaacgagacagattaaagctaaccgatcgaaggggccactcgtggggtctcctgctgctgtcagaacgaataagagaagatggaattgtgatgaaacaataaaaatgcatggttttaaaaaaaataaaataaatttataatataaaaaaataagtgggagaaaaaagggcggccgttctagaggatccaagcttacgtacgcttgcatgcgacgtcttagctcttctatagtgtcacctcaattaattcccttggccgtgttttgaaacgttattacttggtataccctggctattccc

SEQ ID NO: 85780 - DNA, 517 bp, Zea mays
agttattagggttgtgtactgatacagaatatattgcattctcgtaccggtccggaattcccgggtcgacccactcgtccgctgaggttctgcgatgacgtgagcatgccaaattcagattaggcttgctttgcctgtgtcccctctttttgtatcctggggacgcggatcttgtgagtatggccaaagaaatgtttactactttagcagtgttggaaacgcgtgacataactggttacgagtagttttagccgtcttctgtctagcggtgtggccggtagtggcagcatgcgtctgcagagaacatgtttggtttttattgcacattatttacatattaaattatcattatccatcttagatttaacgtctctattgaccattgtaatctataaataacacctttcatccctatatcttatcatgtcaggggtgtctttagcaaaatataccaaacaattagagacgttagatataagatgagtgatgataatttaatatatgtaatatatgcatt

SEQ ID NO: 85781 - DNA, 516 bp, Zea mays
  unsure (1)..(516): unsure at all n locations
gagaaatggctcntctcaggaggggggggtatagtatactcgtaccggtccggaattcccgggtcgacccacgcgtccgagagcttcgactcatatgttctgtccgagtccagcctctttgtgtatccggacagggttgttctgaagacctgtgggacgacgaagctgctgctcgccattcctcgcatccttgagcttgctgcagggctgtcactgcctcttctttcagcgaagtactctcgtgggaccttcatcttccccggcgcgcagcccgcgccacaccgcagcttctcggaggaggtatctgtgctgaacgctttctttggtaacctcaagtccggtggcaatgcctacctgatcggtgaaccgttcaagcccaacaagaagtggcatgtctactacgccacagaggagcctgagcgtcctatggtgacgcttgagatgtgcatgacagagcttgacgttaagaaagctgctgtgttcttcaagaactccactggtggcaactgcacttta

SEQ ID NO: 85782 - DNA, 518 bp, Zea mays
  unsure (1)..(518): unsure at all n locations
gtagtaaaggctgntttactgaaagggggagaaaagagaaggctcgtaccggtccggaattcccgggtcgacccacgcgtccgcccacgcgtccgcggacgcgtggggattggactcctttttgagctgctggtcatcggacccatgagggtgcctattgatgagagccctgtcttcctattgtatcaggattgggctctggggttaatattcttgaaaatatggactagactggttatgttggatcagatggcacctttggttgatgaaagctggaggtcaaagtttgagagagttagagacgatggcttctcccgtttaaagggtctgtgggtcctccatgaaattataatgccgatcgtgaccaagctccttactgctctctgtgtcccatacgtccttgcaaggggcatcttcccgttgctgggttacccactcatcgtgaactcagcggtgtaccggtttgcctggcttggaagcctgatcttcagcgcactcttcttttggggcaagagatt

SEQ ID NO: 85783 - DNA, 515 bp, Zea mays
  unsure (1)..(515): unsure at all n locations
agaaatggatcatacgtacgtgtctgtctaccgnattatataccggtccggaattcccgcgtcgacccactcgtccgtcgcactcgtcctcatacgctttggttttggactcctttttgatcttcttgtgatggtacccatgatggtgcctattgatgagagccctgccttcctattgtatcaggattgtgctctgtgcttaatattcttgaaaatatcgactagactgtttatgctggatcagatggcacctttggttgatgaaagctggaggtcaaagtttgagagagttagagacgatgacttctcccgtttaaagggtctgtgggtcctccatgaaattataatgccgatcgtgaccaagctgcttactgctctctgtgtcccatacgtccttgcaaggagcatcttcccgttactgggttacccactcatcgtgaactcatcggtgtaccgttttgcctggctaggatacctgatcttcagcgcactcttcttttggagcaagacatttt

SEQ ID NO: 85784 - DNA, 510 bp, Zea mays
  unsure (1)..(510): unsure at all n locations
atgtgtatctgattatgaaagatagtagnactcgtcccggtccggaattcccgggtcgacccacgcgtccggaaacacaccaagcgaagcgcactagcaacgacctaacaacaatggctaccaagatgttagccctccttgcgcttcttgccctttttgtgagcgcaacaaatgcgttcattattccacaatgctcacttgctcctagtgccattattccacagttcctcccaccagttacttcaatgggcttcgaacacctagctgtgcaagccaacatgcaacaacaagcgcttgcggcgagcgtcttacaacaaccaattgcccaattgcaacaacaatccttgccacatctaacaatacaagccatcacaacgcaacagcaacaacagttcctaccagcactgagccacctagccatggtgaaccctgccgnctacttgcaagagcagctgcttgcatccaacccacttgctctggcgaacgtagttgcaaaccaacaacaacaac

SEQ ID NO: 85785 - DNA, 513 bp, Zea mays
  unsure (1)..(513): unsure at all n locations
aggtgtatctgtgcctagctagctgcagtactgtcncggtccggaattcccgggtcgacccacgcgtccgcggacgcgtggggtcgagcaacatcttgcttgatggcagtttcgaggcccgtgtagtgagggtttggacttgcaaagcttttagaggatgaagaatcacatattactacaatagttgcaggaacatttggctaccttgcaccagagtatatgcaatttggcagagccaccgagaagactgatgtctacagttttggggttttggtactcgaaatactcagtggaaagcggcctactgatgcatccttcattgagaagggactaaacattgttggatggttaaattttcttgctagtgagaaccgggagagggaaattgtcgacctgaactgtgaaggagtgcagactgagaccttagatgctctgctctctcttgccaagcaatgtgttagctcctcgccagaggagaggccgacaatgcacaaggtggtacaaatgctggaa

SEQ ID NO: 85786 - DNA, 515 bp, Zea mays
  unsure (1)..(515): unsure at all n locations
agtaaggactcnagtcacgaaccgacgtatataggatactcgtaccggtccggaattcccgggtcgacccacgcgtccggttggcttctcctccccctccggttcgggttcgggttcgtgaggttctgggggggtcggtttcgtgggtgagcggatcgagatggcggcgtcggatgttgagtaccgctgcttcgtcggcggcctcgcctgggccacggacgaccactccctccacaacgccttcagcacctacggcgaggtcctcgagtccaagatcatcctcgatcgggagacgcagaggtcccgcggcttcggcttcgtcaccttctccacggaggaggcgatgcggaacgccatcgagggcatgaacggcaaggagctggacggccgcaacatcaccgtcaacgaggcccagtcccgcggcggccgtggaggcggcggcggtgggtacggtggtggccgtggaggcggcggctacggcggtggcgggcgccgtgatggcngccgccgctacc

SEQ ID NO: 85787 - DNA, 526 bp, Zea mays
tagtttagtaggggctcatgttctggaccccgacatatatagccatgctcgtaccggtccggaattcccgggtcgacccacgcgtccgcggacgcgtggggcgccgccgccgctgcagactcctccttttcgatccctgcacagagcgcctccgtcgccccatcgaacatggctccgaagaaggataaggccccgcccccgtcgtcgaagcccgccaagtccggcggtggcaagcagaagaagaagaagtggagcaagggaaagctaaaggagaaggtgaacaacgcggtgctgttcgaccaggctacctacgacaagctgctctctgaggtgcccaagtacaagcagatcaccccctccatcctatccgagcgcctcaggatcaatggctccctggctcggagggctatcaaggacctgatggcgcgtggcctcatccggttggtctcggttcactcaagccagcagatctacaccagggcaacaaatacctaaggatgggattcccttgtttgccctctctgta

SEQ ID NO: 85788 - DNA, 518 bp, Zea mays
agttaaggttctgattacgcagtcgacagtattagaagtacagtaccggtccggaattcccgggtcgacccacgcgtccgagaagatcaaacacaagctcaagaaggttaagctctccgtgctgcagttgtataaggtggacgacaccactagcaaggtgacccgcctccgcaaggagtgccccaacacagagtgcggcgcgggcgtcttcatggccaaccacttcgaccgccactactgcggcaagtgcggcctcacctatgtctacaaccagaaggcgtaattgcttgccccgatttgctttatccgcctaccctatcgaacatccagctgttggttactcgaattgtatctcatgtagatctgtctgaggttgaaacttaaatggagcagtagtatctgtcatattggtacccctgttactgaattgatgtgatgctgagtttaattttgttttcaaaaaaattaaacgcagcggctcatcttcgccggcaagcaactcgaggaccgtcgcaccc

SEQ ID NO: 85789 - DNA, 514 bp, Zea mays
  unsure (1)..(514): unsure at all n locations
aagtgntatcttatcctacgcctcagtcgtcagtactcgtcccggttcggaattcccgggtcgacccacgcgtccgagcaatcgcagcaagcaacatacctttatcgcccttgttgtgtcaacaatcgccaggcctatctttggtgcagtcattggtacaaaccatcagggcacaacagctgcagcaactcgtgctacctgtgatcaaccaagtagctctggcaaacctttctccctactctccgcaacaacaatttcttccattcaaccaactgtctacactgaaccctgctgcttatttgcagcaacaactattaccatttagccagctagctactgcctactctcaacaacaacaacttcttccatttaaccaattggccgcactgaaccccgctgcttatttgcagcagcaaatactactaccatttagccagctagctacagcaagccgtgcttncttcttgacacaacaacagttgctgccgttctaccagcaatttgcggctaaccc

SEQ ID NO: 85790 - DNA, 511 bp, Zea mays
  unsure (1)..(511): unsure at all n locations
cagtgtatctgagcctcacctgtatctnagtactcgctccggtccggaattcccgggtcgacccacgcgtccgcggacgcgtgggtcggagataaccttactggaacttctgctagttctggtcatgatgaggtttataacctgcaaatgctagaagctgcattccacaagcttccacaaccaaaggactctgagcgtgctaaaacttacatcccgcggcaccctgcagttacccctgctagctatccccaagttcagccatcaattgtatctcatccctccttctgggaaagaattggtagcgacacattagctaccgacatgctattctttgcgttctattaccagcagaacacatatcaacaatacatggctgctagagaattgaagaagcaatcgtggagatttcaccggaggtacaatacctggttccagcggcatgtggagccacaggttacgactgatgagtatgagcggngatcatatgtatactttgatttccatgtcaccn

SEQ ID NO: 85791 - DNA, 518 bp, Zea mays
cgaggtggtttctctgctacgctcatcgtcagtacggtctcggtccggaattcccgggtcgacccacgcgtccgacaagatcgacgagcggtcgcgcgccgtgctggtggacaaggtgggcggccccggggaggggtacgaggagctcgtggccgcgctgcccggcgacgactgccgctacgccgtcttcgacttcgacttcgtcaccgtcgacaactgccagaagagcaagatcttcttcatcgcctggtcaccggcggcgtcgaggatcagggccaagatcctgtacgcgacatcgaagcaaggcctgcggcggctgctggacggggtccactacgaggtgcaggccaccgacccctccgagatgggcttcgacgtcatcagaggccgcgcgcaatgaggcccccgctgcgctctgctcctatttacgtacttacctgtgcgtgggcgtgttctcctactactcactgctcagtagtcagtagtcatctgcgttcgtgtgtgtgtgtgtggtaacc

SEQ ID NO: 85792 - DNA, 523 bp, Zea mays
  unsure (1)..(523): unsure at all n locations
agtaagaggttcnnnttaccgaggacggggagtagatgtaatactcgtaccggtccggaattcccgggtcgacccacgcgtccgcccacgcgtccgcggacgcgtgggcctattgaggtgcgcttcaaagaatgggagagtagaggttctgctgttagccaactgctatactgcataaaaagcttcagagaagctgcactgtctaaggaccagaagtttgaacacatagacatgtcagaaaagcaaaaggtcattagcgagtgttcggaagcagagacttggctaatggagaaaaggcagcagcaggatgctctgccaaagcatgctaatccggtcctccttgctgctgaccttaagaagaaagctgaaacacttgacaggttctgcaagccgatcatgacgaaaccgaagccagttcctaagccacagactccgcctccggcagaaacccaagctcctgagcctcagacaccggagcagcagcgatcaaatggcgaaagcacaaccagacaaggaacctcaa

SEQ ID NO: 85793 - DNA, 519 bp, Zea mays
agttagagggttcgagttctgtccacgctatatcgcaatgacagtaccggtccggaattcccgggtcgacccactcgtccggaccccttggctcgacggcatgcacgtcgtcttcggccaggtcgtcaagggcatgggcgtcgtcaaggccatcgagaacgtgtgcacccgcaacggctccacctacaaggtggtcaaggtcgctgactgcggacagctctcctagatctctctgatctggtctgttcggtcgccctgcctccgtcatcgtcgactccccctgcgtacgttcctttggatctgaatactatggcggtgatctcaatggcggtcctagttgatcatgtatctgctcacagttcaatttaacttgacaggtgtggatctgcgaacatgatgacgcctatgctagattctagtctcacctgttatgctctgagattcatgataacgctatgagatctgaaattgcagctcagcaaacaaatggccaaagcacaaccagcgatggagcttcag

SEQ ID NO: 85794 - DNA, 524 bp, Zea mays
agtggagttatctgtgtccacccagcccacctagtattaataccgtccggaattcggacggcgggcgtcgacccacgggtccggcccgtaccccgcctcccgtttcatctcaaatccctctcgcctcatccccgccagggcaaagccgccctatcgtcctgtcgtgagaagcaatggcgggccgtggcaaggcgattggcgctggtgccgctaagaaggcaacgtctaggagctccaaggctgggctgcagtttcccgtcggcaggatcgctcggttcctcaaggccggcaagtacgccgagcgcgtgggctccggcgcccctgtctacctcgcagctgtcctctagtacctcgccgctgaggtcctggagcttgctgggaacgcatcgagggataacaagaagacccgcatcgtgccgtgtcacatccagctcgccgtgcgcaacgacgaggagctgaccaagctgcttggtggtgccaccatcgcgagctgcggcgttatgccccacattcaacaacttctt

SEQ ID NO: 85795 - DNA, 512 bp, Zea mays
  unsure (1)..(512): unsure at all n locations
agttttatctgaggctagcccagtacgtnagtactcgcccggttcggaattcccgggtcgacccacgcgtccgcgcacgcgtccgatgaggctctgcattacccatacttggcttcacttcatgagatcgaggatgaacctacctgccctgcacctttcagctttgattttgagcaaccatcctttacagaagcgcatataaaagaacttatctggagggaatctttagcatttaacccggatcctccctactaatatcaaaaggatgatgagttatctgctagacgcatatgaagatctctagctccagcggacgcaagaacttatgtcagtgtcagtgtgcgttgattatttacgtgcggtttgttgggcatgcgggcatgggttggtgctgcaatagcaactctattatggcttgtgagagcaaacaaacgtctgtattcattttcaggtgcctgaacccaggcttgtattataccgcttgactccataaattattctggtggatctan

SEQ ID NO: 85796 - DNA, 508 bp, Zea mays
gagtaagaggtatctgataggggggggaggatactgctcatcccgtccggattcccggtcgaccagctccgggcgagatgttcacttcaaggctaactgaaaggctgtaccagggaatggatgggcgtgtccaccgactacaaaggcaacatgatgctggtcggggactacccctggaatgagttctgcagcatggtgcacaagatcttcgtgtacacgagggaggaggtccagcgcatgaacccgggcgccctgaactcgaggccggaggacagcggcctcgccaattcgacggagaggggctccgcatctactgctgctgctagagaagcacccggctaccagtccgtctcgtcgcttaacttcgacaactgctgatgccttggcagctaacttgtcctcccaagtagtagaagaccaggcatatgtatccatagatctccttgtagcggaacctaatgcctttttttccctttctaatatgcaatggatgagcccgtatcgcacc

SEQ ID NO: 85797 - DNA, 521 bp, Zea mays
  unsure (1)..(521): unsure at all n locations
tagttagtatatctgatccagcacaagactagtagtattgcattaccgntanggncggnnggcgtcgacccacgcgtccggcaagtatccaggacaaggatggcattccaccggaccagcagcgcctgatgtttggtggcaagcatctggaggatggccgtaccctcgccgactacaacatccagaaggagagcaccctccacctggtgctccgcttgcgaggtggtatgcagatctttgtgaagaccttgactggcaagaccataaccctggaggttgagagctccgacaccatcgacaacgtgaaggcgaagatccaggacaaagagggcatccccccagaccagcagcgtctgatcttcgccggcaagcagctggaggatggccgcaccctatcagactacaacatccagaaggagagcactctccacctggtgctccgccttcgcggtggtcagtaagccatggttcatttaagctgctgctgtacctgggtatctgcgtagtcttgtgccctttgg

SEQ ID NO: 85798 - DNA, 522 bp, Zea mays
  unsure (1)..(522): unsure at all n locations
agtagaggnntnnnnnattagaantcgttngcatttcctatttcntttnnntttntntnngttttngttnnttttgggttttgggtnttnttgaccttagtttacattgtctttgtggtgctgcacacagtgcctgtcctgtatgagaagtacgaggatcagattgactcgtatggcgagaaggggtgggctgaaattaagaagcagtatgccgtgttcgatgagaaggttctgagcaaagtacccaggggtcctgcgaaagacaagaagcactagatgcaagtgattcgaggtccctgttagtagggaatgctagcaaaaccggttcgagtttctccggaggggcagcacttgtgggtgtgagcaccagtttgccacctgtgcattacgttgcgtatggctgcttagttgtttggtcttgatgggagtaagccgaattgctagctttgcgcttcatcagtgatgcagacgcagcatacgaatttctgtagtgctgtttgagtttgatctgtngttgatgat

SEQ ID NO: 85799 - DNA, 511 bp, Zea mays
gaggtgtgtcttagattgaatatattccatactcgtcccggtccggaattcccgggtcgacccacgcgtccgcccacgcgtccgcggacgcgtgggtgctgttgaagcttatgtgtatgacatgcgtagcaagctatatgacaagtacagtgattttgtcacacctgaggacaaggaaggtttgatcggtaaacttcaggaggttgaagactggctctatgaagatggcgaggatgagaccaagggagtttatattgctaaactagaagaacttaaaaaggttggtgatcctattgaggtgcgcttcaaagaatgggagattagaggttctgctgttagccaactgctatactgcataaaaagcttcagagaagctgcactgtctaaggaccagaagtttgaacacatagacatgtcagaaaagcaaaaggtcattagcgagtgttcggaagcagagacttggctaatggagaaaaggcagcagcaggatgctctgccaaagcatgctaat

SEQ ID NO: 85800 - DNA, 521 bp, Zea mays
  unsure (1)..(521): unsure at all n locations
gtgagtgtctattatcgacgttcaaacgtacgncnactctttccgtaattcccgggtcgagccacgcgtccgcgtcaaagcatgttggctaaatggcagcaattgttgttgttgtaagaaggcaacatgctgggacgaatcctaccaccttattgcaaccgcccaccatcggtggtgccatcttctagatttattattacagtataaatcataaagttctcatgctgatatgtgtgacctctcagtaataaagtattagagatctatattttaaaaaaaaaaaaaaaaaaaaaaaaaagggcggccgctctagaggatccaagcttacgtacgcgtgcatgcgacgtcatagctcttctatagtgtcacctaaattcaattcactggccgtcgttttacaacgtcgtgactgggaaaaccctggcgttacccaacttaatcgccttgcagcacatccccctttctccagctggcgtaataaccaagaagccccgaccgaacggcctttccaaacagttccc

SEQ ID NO: 85801 - DNA, 498 bp, Zea mays
  unsure (1)..(498): unsure at all n locations
nagtaaagtgactttaatcagacgcttcacgtattcctctaccggtccggaattcccgggtcgacccacgcgtccgggcgccgccctccgcgatatgcaggccaaggtcgccaaggagatgcaaggaggtggccctagtgcatctacagctgaggcaaaggagcaggtggatgcccgttctgtgtatgttggaaatgtggattatgcttgcaccccagaagaagtgcaacagcatttccaagcttgtggaactgtcaacagggtcacaatcttgactgacaagtttggacagccaaaaggttttgcttatgttgaatttctggaacaggaaagtgttcaagaagctcttaacttgaatgaatctgaattgcatggtcgccagaattaaagtcgcgccaaagaggactaatgttcctgggatgaagcagcgtncaccacgtggattatatccataccatggctacccttatagatcatacggngcaccgtatttccccc

SEQ ID NO: 85802 - DNA, 501 bp, Zea mays
  unsure (1)..(501): unsure at all n locations
tagttttaaatgatatgttaaggggaaggggagaattgtattctcgtccggaattcccgggtcgacccacgcgtccggccacgcgtccgctgggagctcgcctgttgggtctgtgcccaaatcttctccacagtctcagcatcttaacttttcaatcttttagaaaaaaataaactccagccgcaaaggtacaataagttcaaacatcactgccttatggagcgtaagaaattaggcactggccagagtgagcaaatgaactcactgtatcgcttctggtcatactatctgagagataattntaatgaagatatatacaaggattttaagaaactcgcactggaggatgctgcagcgagctacagatatggtctcgagtgtctattcagattttatagttatggtttggagaanaaattccaacccaatgtatatgaagatttcgagaaacttaacttcgaattctaccgtaatggtgatctttatggactcgaaaaatcc

SEQ ID NO: 85803 - DNA, 499 bp, Zea mays
ggtaaagacggtctggttatgaaaagatagtagtctcataccggtccggaattcccgggtcgacccacgcgtccgagcaacttacctttatcacccctgttctttcaacaatcgccagccctatctttggtgcagtgattggtacaaaccatcatggcacaacagctgcagcaactcgtgctaccagtgatcagccaagtagctctggcaaacctttctccctactctcagcaacaacaatttcttccattcaaccaactgtctacactgaaccctgctgcttatttgcagcaacaacaactactaccattcagccagctagctactgcctactctcagcagcaacaatttcttccatttaaccaattcgccgcactgaacccctctgctaatttccagcagcaaatactactaccatttggccagctagctacaacaagccccgcttccttcttgacacatcaacaatttgctccgttctaccaacaatttgtggcta

SEQ ID NO: 85804 - DNA, 503 bp, Zea mays
  unsure (1)..(503): unsure at all n locations
naggttaagtgtctctgataaccgaatatatagttactctctanttccntnnnnntncggaattcccgcgtcgacccacgcgtccgctagcaacatagaaagcacaatagtgtaccaacaatggcagccaaaatggtttggttccttatgctccttggtctttctgcaagtgctgctaccgcaaccattttcccacaatgctcacaagctcctatagcttcctttcttcccccatacctctcaccagcggtgtcttcagtatgttaaaacccaattcttcaaccctacaggatccaacaggcaatcgcagcaggcatcttacctttatcacccttgttcctccaacaaccgtcagccctattacagcagttacctttggtgcatttgttggcacaaaacatcaaggcacaacaactacaacaacttgtgctaggaaaccttgctgcctactctcagcaacagcagtttcttccattcaaccaactggctgcattgaactctgc

SEQ ID NO: 85805 - DNA, 519 bp, Zea mays
agctgtatcttctcctactgtcaccgtcagtcacactcgtaccggtccggaattcccgggtcgacccacgcgtgcgattgagaccaactagcaacatagaaagcacaatagtgtaccaacaatggcagcgaagatattttgcctccttatgctccttggtctttctgcaagtgctgctacggcgaccattttcccgcaatgctcgcaagctcctatagcttcccttcttcccccgtacctctcaccagcggtgtcttcggtatgtgaaaacccaattcttcaaccctacaggatccaacaggcaatcacagctggcatcttacctttatcacccttgttcctccaacaatcatcagccctattacatcagttacctttggtgcatttattggcacaaaacatcagggcacaacaactacaacaacttgtgctagcaaaccttgctgcctactctcagcaacagcagtttcttccattcaaccaactagctgcattgaactctgcttcttatttgcaaca

SEQ ID NO: 85806 - DNA, 518 bp, Zea mays
  unsure (1)..(518): unsure at all n locations
cagtatatgtgagttcgatctggttanagcaacgacggtacttgttcggaattcccgggtcgacccacgcgtgcgcaacaagcaacatagaaagtggtttacagtagcaacaatagagcaacaatggcggccaagatattttccatccttatgctccttgctctttctgcatgtgttgctaacgcgaccatttttcctcaatactcacaagctcctatagctgcccttcttcccccataccttccatcaatgaccgcttcagtatgtgaaaacccagcccttcaaccctacaggctccaacaagcaatcgcaacaagcaacttacctttatcacccctgttctttcaacaatcgccagccctatctttggtgcagtcattggtacaaaccatcagggcacaacagctgcagcaactcgtgctaccagtgatcagccaagtagctctggcaaacctttctccctactctcagcaacaacaatttcttccattcaaccaactgtctacacttaaaccttt

SEQ ID NO: 85807 - DNA, 496 bp, Zea mays
  unsure (1)..(496): unsure at all n locations
agttaaggaggttaattaagtaatcgacgataantgcaatactcgtaccggtccggaattcccgggtcgacccacgcgtccgcaacaagcaacatagaaagtggaatacagtagcaacaatagagcaacagtggcggccaagatattttccatccttatgctccttgctctttctgcatgtgttgctaacgcgaccatttttcctcaatactcacaagctcctatagctgcccttcttcccccataccttccatcaatgaccgcttcagtatgtgaaaacccagcccttcaaccctacaggctccaacaagcaatcgcaacaagcaacttacctttatcacccctgttctttcaacaatcgccagccctatctttggtgcagtcattggtacaaaccatcatggcacaacagctgcagcaactcgtgctaccagtgatcagccaagtagctctggcaaacctttctccctactctcatcatcaacaatttcttaca

SEQ ID NO: 85808 - DNA, 510 bp, Zea mays
  unsure (1)..(510): unsure at all n locations
ggtgtatctctgccggctcaccttagtactactgtaccggtccggaattcccgggtcgacccacgcgtccgggtgggttggcttctcctccccctccggttcgggttcgggttcgtgaggttctgcggggttcgggttcgtgggtgagcggatcgagatggcggcgtcggatgttgagtaccgctgcttcgtcggcggcctcgcctgggccacggacgaccactccctccacaacgccttcagcacctacggcgaggtcctcgagtccaagatcatcctcgatcgggagacgcagaggtcccgcggcttcggcttcgtcaccttctccacggaggaggcgatgcggaacgccatcgagggcatgaacggcaaggagctggacggccgcaacatcaccgtcaacgaggcccagtcccgcggcggccgtggaggcggcggcggtgggtacggtggtggccgtggaagcggcggctacggcggttgcnggcgccgtgatggccgtggccgctt

SEQ ID NO: 85809 - DNA, 514 bp, Zea mays
  unsure (1)..(514): unsure at all n locations
gggagggcttggtccatgccagcaatgatcgnacgctcgtaccggtccggaattcccgggtcgacccacgcgtccgcgcctctcgcgcatcctaccaggagggtgggagacccaggcagcggaggtgtgcgagagctcgcttcgcaccacgcgctgcggcctgcggggcgagagatcgaggcctgagctagggtctggtggcggagatgtcgacgccggcgaggaagcgcctgatgcgggacttcaagcgccttcagcaggacccgcccgccggcatcagcggcgcgccgtacgacaacaatatcatgctctggaacgccgtcatattcgggccggatgacacgccgtgggatggaggcacgttcaagctgactctgcaatttacagaagattaccccaacaaacctccaactgttcggtttgtttcgaggatgtttcatccaaacatctatgcggatggaagcatctgtttggacatctctacaaaccagtggagccctatatatgatggtgc

SEQ ID NO: 85810 - DNA, 515 bp, Zea mays
tgggaagggctctcatctgcttttgattccgtcgtactactgtaccggtccggaattcccggctcgacccacgcgtccggggttggcttctcctccccctccggttcgggttcgggttcgtgaggttctccgggggtcggtttcgtgggtgagcggatcgagatggcggcgtcggatgttgagtaccgctgcttcgtcggcggcctcgcctgggccacggacgaccactccctccacaacgccttcagcacctacggcgaggtcctcgagtccaaggtccgttcccgtcccagatccgtccatggcttcgtccagatctgacctgtcctgacacaccctcgcccggatctgtccctccttcccttctcccctgcagatcatcctcgatcgggagacgcagaggtcccgcggcttcggcttcgtcaccttctccacggaggaagcgatgcggaacgccatcgatggcatgaacggcaaggagctggacagtcgcaacatcaccgtcaacaaggccc

SEQ ID NO: 85811 - DNA, 551 bp, Zea mays
  unsure (1)..(551): unsure at all n locations
gggggaggaggcttgttaagggggctcccgggaatgggaatccttctccggaattcccgggtgcgactccacgtcgtcncgggtgctcttggtcaagcttggnccaaccgccnttcttggcaattgccaagaattgcccttgcnncccttgcctccgggggccttccaagggccttggtacctggcgccttggccggcccgggtccttggccgacctaattgaattgggccgcccggccggggcctgtaaccccctaacccggaatacctgaagcagccgcagtgcatcccgctggcggcggcgccctactacgccgggtgtgggcagccgagcgccatgttccagccgctccggcaacagtgctgccagcagcagatgaggatgatggacgtgcagtccgtcgcgcagcagctgcagatgatgatgcagcttgagcgtgccgctgccgccagcagcagcctgtacgagccagctctgatgcagcagcagcagcagctgctggcagcccagggtctcaaccccatggccatgatgatggcgcagaacatgc

SEQ ID NO: 85812 - DNA, 491 bp, Zea mays
  unsure (1)..(491): unsure at all n locations
ggtaagtgcttnatatgtaattcgcatagaagtatactcgtaccggtccggaattcccgggtcgacccacgcgtccgattttgagcattcagaaactcaccatgcgaagcgcactagctacaacctaacagcgaatggctaccaagatattatccctccttgcgcttcttgcgctttttgcgagcgcatcaaatgcgtccattattccacaatgctcacttgctcctagttccattattccacagttcctcccaccagttacttcaatggccttcgaacacccagctgtgcaagcctataggctacaacaagcgattgcggcgagcgtcttacaacaaccaattgcccaattgcaacaacaatccttggcacatctaacaatacaaaccatcgcaactcatcagcaacaacagttcctaccagcactgatccacctagccatggtgaaccctgtctcctacttgcaacagcagctgcttgcatccaaccca

SEQ ID NO: 85813 - DNA, 514 bp, Zea mays
tagtctcttcttcgaactccacccactcagtactactgtaccggtccggaattcccgggtcgacccacgcgtccgggacaaggagatgactctggaggaatttgagaaaataagagaggagaagaggagagcgactacttgcattgaaggctgaggagaggaaagttgaagttgacaaggatttgcagtctctgcagccactttcaaacaagaaagaaaatgatgaagttttcattaagctgggttctgacaaggataagaagaaggaaaatgctgagcgtgatgagcgtgccaagaagtcggtgagcatcaacgagttcctgaaacctgctgaaggagaaaggtactacggcggccgtggccgtggaaggggccgtggggatcgtggtggttttagaggcggatacggagggggatacagtcgtggcccagctgctgctgctccatccattgaagatcaagctcagttcccaagcctcggtgggaaatgaaaggcccccaacttcttctttca

SEQ ID NO: 85814 - DNA, 514 bp, Zea mays
  unsure (1)..(514): unsure at all n locations
ggaaggctctgtctcttatcgaaatgattgtactgctcgtaccggtccggaattcccgggtcgacccacgcgtccgccttgatggcagtgccatgtggatctcaggagatcactatcttgcctcaacagggaggagaaccttgtgtgttgcctcaacagggaaaagaaccgtctgtgttgcctcaaccgggaaaagaaccgtctgtgttgcctcaacagggaaaagaaccttctatgttgcctcaacagggaaaagaaccttctgtgttgcctcaactgggaaaagaaccttctgagttgcctcagcagggaaaagaatcttcaggagatatctctgtgaatcagaaggaccctcttaaggagatgaatggctttcctgaacaggaaaaaggacttgttgctggagaacttgtctctgcacatcataaggaccctctaatggatattacagatgcatttgaaatgantaaaaaacatcctgccagagagccttnctctgggcatcatcttgata

SEQ ID NO: 85815 - DNA, 515 bp, Zea mays
  unsure (1)..(515): unsure at all n locations
tgggagggcttngtcaatgccagtcactcagtactgcagtaccggtccggaattcccgggtcgacccacgcgtccggcaaggctcagggagatccgaagctatttggatcttgtaattgaagggaagctcccgactgaatcatgagattttgtatcatttgcaggatgtctttaatctccttccaaatctgaacgtaaatgagctaattaaagcctttgcagtgaaaacaaacgacatgatgttggtaatatatctgtcttctctgatccggagtgtcattgcgcttcacaatttgatcaacaataagatgctaaacaaggagcatgagaaggctgaggattcgaaaccagccgccattccaactgctgccggtggagggggagctaaatgaacttttgatcacttattgatggccaagaaaaaggaggaaacgtgattgcatgtttatcacggttgtgctggaaccaaatcgccttgaccttgaatggatattttcatggttacttcacgtatt

SEQ ID NO: 85816 - DNA, 497 bp, Zea mays
  unsure (1)..(497): unsure at all n locations
agtaaagagatgctgttttatagggataagggggatgtcagtaatcctcttccggaattcccgggtcgacccacgcgtncggagccacctatccgtggtgaaccctgtcacctacttgcaacagcagctgcttgcagtcaagccaattgctctggcgaacgtaactgcataccaacaacaacaacagctgcaacagtttatgccaatgctcaatcaactagccatggtgaaccctggcgtctaactaacaataccttcatttaaccccgctccggtgggcaatgcaactaactacctaccacaacagttgctgcaacaaattgtaccaactctgactcagctagctgtggcaaaccctgctgcctacttacaacagttgcttccattcaaccaactggctgtgtcaaactctgctgcgtacctacaacagcgacaacagttacttaatccattggcagtggctaacccaatggtcgctaccttcctgcagcagcacc

SEQ ID NO: 85817 - DNA, 495 bp, Zea mays
  unsure (1)..(495): unsure at all n locations
tggtaaggttttgataaggggaggaggggaatgttcatccggtccggaattcccgggtcgacccacgcgtccgatgaccgttttgctccaatttatacacaacctcgacacctgccaccttcaaaggttcttgatcctgatgtgacagacagtgttattggtgaaggatgtgttattaaaaactgcaagataaaccattctgtagttggcctccgatcttgcatatctgaaggtgctatcatagaggacagtttactaatgggtgcggactactatgagacagaagctgataaaaaactccttgccgaanaaggtggcattcctattggtattgggaaaaattcatgcatcaggagagcaatcattgacaagaatgctcgaattggagacaatgttaagatactcaatgctgacaatgttcaagaagctgcaagggagacagacgggtacttcatcaaaggtggaattgtcacagtgatcaaggatgctttactc

SEQ ID NO: 85818 - DNA, 494 bp, Zea mays
gagtaaggtgcttaataagagacgggcgtaaacagtatactcgtaccggtccggaattcccgggtcgacccacgcgtccgcagagtgctatgagtgtcaaccaaagcctgtccctaaatcatatcctgtgtgcacgaattacaaacacaccatcaaagtttgttcattgcattgtttgggcgaaagatctgctttttgcaaaattatttggtgataaaaaacaggataatgatcttaatgtgcactccaaagatgataccagttcaaaaacagatgtttttgaaaggagtgtagatgaagatcttgagcaatacacccagagaatatatgaccacgtatttggttacaacattgaagttgcattggataataaggaaacttggaagaatcggagaaagccaaaccctatttacattagagatgcattgcctgaagacgctgttcaacaaaatggtcgctctcaggatcacgtgaatgaggagcaagatccttct

SEQ ID NO: 85819 - DNA, 496 bp, Zea mays
aggtaagaggttagtacgacaccgcataatagtaatgctcgtaccggtccggaattcccgggtcgacccacgcgtccgcccacgcgtccgatgaaaagctatattacctcccgttctcgttatcccggtagtgcatttttaacgaaacagtgacaaatatgaactaaacagcaacaaataaaaagaaacggaggggtactacgcttttttttatttcagtgcgcgcgtgtctgctccagacggtgctgctgcgcccagtccttgacgatgtgcggctgctgacccgacgacgaggtcgtggtctgaaggtagcggtacacccacgccagcacagccaccgcagccacgccgaaccctcccgacgaaacgatgcctaccgtgagcagcgccaccgtgatggccgccggcaccagcacggggctgaagatcaccatcaatggcgtcgccacgatgagcgccagcaccgtgcccgtcaccgtcagccccgacaacaaca

SEQ ID NO: 85820 - DNA, 501 bp, Zea mays
  unsure (1)..(501): unsure at all n locations
gagtttaagtgcttntattaagacgaggggggttgcagtatactcgtaccggtccggaattcccgggtcgacccacgcgtccgcccacgcgtccgccgccgccatgcctcgccgcagctcaggaaggtctgccccacgcccagctccccgtgctgcttcactgaggaacccgccacagccagcacgccaggctcctcctccagctcctgttcgagatggtggtggctccatgtttggaggaattgggtccaccattgctcaaggtatggcgtttggcacgggtagtgccatggcacacagggctgttgactctgtattaggtccccggaccatccagcatgagactcttgccacagaagctcctgctgctgcccctgctgctccagcgatgaatgctgatgcttgcagcttccattctaaggctttccaagattgtctcaacaactatggcagcgagatcagcaagtgccagttctacctagacatgctgaacgagtgccg

SEQ ID NO: 85821 - DNA, 596 bp, Zea mays
  unsure (1)..(596): unsure at all n locations
ggtaagggctctcgtctgactgtcagcccagtacagctactactacgtactcggtctcggaattcccgggtgcgactccacgcctgtccgtgtatatgtctttacgttcatggattctctagatgctacgaaacagagggacttctctcttgaacctagaagtgacgatnntgaggcnnttcgaactaaagtactgaatatcagactacttacgtaggacctnnagtatgttagtatggcacattcgtgaagaaggttcattgggcctacttagctgtattaactctacttcggtatagtgttctagagtccaagaaaaggtgcattgaactttggatcatggttatgagattgagctggactttgttattgcagcacagtacanaatgcttgacgtaggttgttatattctgatggcaactccacaagtaagctgagtgtatgccttcttaatataatagacttttggtgagaccaaggttaaatctttgatactgcattgggacaaagagcaagcttcagaaatgttgaatacttttgacatcattgttgcaagtgactgcacatttttcaagcaattccataagggccttgcc

SEQ ID NO: 85822 - DNA, 512 bp, Zea mays
  unsure (1)..(512): unsure at all n locations
aaaggctatgtccctaccgaaaantgatagtaccactcgtaccggtccggaattcccgggtcgacccacgcgtccgcccacgcgtccgggagggctcttcgccttgatactggtaactactcatggggaagggaagctgttacccgcaagacccgtatcctcgacgtggtctacaatgcatcaaacaatgagcttgtgaggacacaaacccttgtgaagagtgccattgtgcaagttgatgctgccccattcaagcagtggtacctcactcactatggagttgacattggtaggaagaagaaaacccctgctgcaaagaaggataatgctgagggacaagaggttgaggcagcagctgaggaaacgaaaaagagcaaccatgtcacgaggaagcttgagaagcgcaaggagggacgtacccttgacccacacattgaggagcaatttggcagtggacggttgctggcatgcatttcttcccgccctggacagtgtggccgaactgattggtn

SEQ ID NO: 85823 - DNA, 490 bp, Zea mays
gaggaaagagtgcttgttcacgcgggggggggaatagtatcctcttccgaattcccgggtcgacccacgcgtcccggggacccttggccatccggaaacccaaaagtcccgccgcttccgcttcctcaacgttttggacgaagaagccattccgaacccccttcaaggccttaaccggcaagaacctgaacggccgcaccatcaccgtcaacaaggccaatccccgcggcggccgtggaggcggcggcggtgggtacggtggtggccgtggaggcggcggctactgcggtggcggtcgccgtgatggcggtggcggctacggcggtggcggcggctacggtggcggcggcggctacggtggtggtggcggcggctacggcggtggcaaccgtggcggcggctacggcaactccgacgggaactggaggaactgatcggtggggcccgcgcggccaagttatcctgttcgctaccgtgatgtttaccctag

SEQ ID NO: 85824 - DNA, 496 bp, Zea mays
agttaaggtctcttttcaccgaacgacagtaagctgtataccggtccggaattcccgggtcgacccacgcgtccggggaagaaagaggcattggcggtttttgaagagatgcttgatgctggagtcaggcggacacgcaaatcatataacattttgcttgatgcatttgcaatatctggattagtagaggaggctaatacagttttcaaggcaatgagaagacacagggttgagcctgacctttgctcttatacaactatggtcttagcttatgtaaatgcatctgaaatgaatggagctgagaaattctttcgtaggattaaagaggatggtctgaagcccaacgttgtggtttatggcactctgatgaaaggctattcaaagttaaataatcttgagaaagttatgcctgtgtatgaaaaaatgcggatccaaggtggtgaaaccaacccgactatatataccactaatatggacgcacaaagcatgaactcgg

SEQ ID NO: 85825 - DNA, 497 bp, Zea mays
  unsure (1)..(497): unsure at all n locations
ggagtnaagagagctcatatacggagagtggggagaaaggtaagtctcgtaccggtccggaattcccgggtcgacccacgcgtccgggcaaaacttgctcccagatatttgaggaggctggttgtgacacaccagggagtgctaattgtggtgcttgtttgggtggccctcgtgatacatatgcacggatgaatgaacctactgtctgcgtgtccaccacgaacaggaactttccgggcaggatggggcacaaggaagggcaaatctacctggcgtctccctacactgcggctgcctcagccctgacggggtacgttacggacccaagggacttcctcatgtaacgtcttgaaacaacaacagatttcatgatgtaacagagtggctgtactgctgtttttcgtgctgaacttttgtctaggcatgtccttcgttgagaaataaactgcactagaataagcagcgacttctcgggcgccatagcagatgtgacctca

SEQ ID NO: 85826 - DNA, 503 bp, Zea mays
aggtaaatgggtttgattaacgagacggggagtaaacagtatcgctcgtaccggtccggaattcccgggtcgacccacgcgtccgcccacgcgtccgcccacgcgtccgtattattgagaccaactagcaacatagaaagcacaatagtgtaccaacaatggcagccaaaatattttgcttccttatgctccttggtctttctgcaagtgttgctaccgcaaccattttcccacaatgctcacaagctcctatagcttcccttcttcccccatacctctcaccagcggtgtcttcagtgtgtgaaaacccaattgttcaaccctacaggatccaacaggcaatcgcaacaggcatcttaccattatcacccttgttcctccaacaaccgtcagccctattacaagagttacctttggtccatttggtggcacataacatcagggcacaacaactacaacaacttgtgctagcaaaccttgctgcatactctcagcaacatcag

SEQ ID NO: 85827 - DNA, 510 bp, Zea mays
  unsure (1)..(510): unsure at all n locations
aggctgtctccgatcttagcccatgatagnacactcgtaccggtccggaattcccgggtcgacccacgcgtccgcccacgcgtccgaaaagagctaaaagcaatacagtacttggagagaagagagtgtgagtacgaccagaaaatatccattgatttctacaaggaaggagatcccttgaaaccagctgtgacgggcgtcttagtgttcgtttccactccagatccaattggcaacaagtactatcttggccctgctcctctgcaggatatggcaaggcaaattgctacagccaatggccctactggctataatagggattacctgttctcaatggagaaggcattagccagcattagccacgaagatgattcgatcatagagcttgcaaacgaggtgaggaaggtgctcaacagaacaaaggagaccaagatcactggtgccaatgcttccatgaaatcacatgcccctcttgtgcacctgtccgcgctttcagaagcaccgttgtgg

SEQ ID NO: 85828 - DNA, 523 bp, Zea mays
  unsure (1)..(523): unsure at all n locations
tgggagaggctctncttctgacgataagaaatgattgtatactcgtaccggtccggaattcccgggtcgacccacgcgtccggcagcttggagcaaatctctagagtatatggcaatcaggctgtagttgtcagtatggatcctcgacgggtatatgtcaaaagtcaagaagatgtgccatttaaaactgtaaaggtgtccactaaaggtccatcgggagaagaatatgcatggtaccagtgcacagtgaatggtggacgtgatagccgagctataggagcatatgaactagcgaaagctgtggaagaattgggcgcaggagaaatacttcttaactgcattgattgtgatggccaaggttgtggatttgacatagatttggttaaaatggtttctgatgctgtgacaatccctgtcattgcgagcagtggtgctggagctgttcaacatttttctgaaatttttgagaaaacaaatgcttctgctgcccttgctgctggcattttccaccggaaagaagttt

SEQ ID NO: 85829 - DNA, 499 bp, Zea mays
  unsure (1)..(499): unsure at all n locations
aggtatagaaggcttanagtaccgtagcacagacttagcagtcacgctcgtaccggtccggaattcccgggtcgacccacgcgtccgcccacgcgtccgactgcctactctcagcaacaacaacttcttccatttaggcaaggggccgcactgaaccccgctgcttatttgcagcagcaaatactactaccatttagccagctagctgcagcaaaccgtgcttccttcttgacacagcaacagttgctgcctttctaccagcagtttgcggctaaccccgcaaccctcttacaactacaacaattgttgccctttgtccaacttgctttgacagacccagcggcctcctaccaacaacacatcattggtggtgccctcttttagattgcttattagttgtaattcaataataaagttttttggatgatgtatgtggccaaccagaaataagaagttacatttccagattctaaaaaaaaaaaaaaaaaaaaaaaaaaaa

SEQ ID NO: 85830 - DNA, 501 bp, Zea mays
  unsure (1)..(501): unsure at all n locations
aggtaaagggctcnagtaccgacgacgacggttatcagtatactcgtaccggtccggaattcccgggtcgacccacgcgtccgcccacgcgtccggcaccgctcaagctaagtcgcgccactccaatgggcagggccgctggcccgttaaatcagccaggttcatcctggatttgctgaagaatgctgagagtaacgctgatgtgaaaggcttggatgtggacaacctctatgtttcacacatccaggtgaatcaagcccagaagcagaggcgccgcacctaccgtgctcacgggcgcatcaatccctacatgtcctcaccttgccacattgagctgatcttgtcagagaaggaagagcctgtgaagaaagaggctgacaacattgtcgcagcaaggaagcagtgaagtatatcagcatgctgatcgaggccattttgtcgaagtattatagccgtagctcttttatgtaccttttcaggcagccttgcctctcgagacgt

SEQ ID NO: 85831 - DNA, 526 bp, Zea mays
  unsure (1)..(526): unsure at all n locations
ggaagtactctgcatctgactcccgactccccgtacgtacnaccggtaccggtccggaattcccgcgtcgacccacgcgtgtcgcgatactatactcctagaagccaggtcaccaacggcatggcagccaagatgcgtgggttggtcgctctcctagctctttgtgcaagcgccactagtgcgacgcatattccagggcacttgccaccagtcatgccattgggtaccatgaacccatgcatgcagtactgcatgatgcaacaggggcttgccagcttgatggcgtgtccgtccctgatgctgcagcaactgttggccttaccgcttcagacgatgccagtgatgatgccacagatgatgacgcctaacatgatgtcaccattgatgatgccgagcatgatgtcaccaatggtcttgccgagcatgatgtcgcaaatgatgatgccacaatgtcactgcgacgccgtctcgcagattatgctgcaacagcagttaccattcatggtcaaaccccatggccatgact

SEQ ID NO: 85832 - DNA, 565 bp, Zea mays
  unsure (1)..(565): unsure at all n locations
agtaaagcgttttgatagggggaggggcgagtaaatgtcatacccgtccggaattcccgggntcgtacccacgtccgtcccgaggactccatttaagccttnntattcctacacttcccaggagaccggccattaaggaacaccccggaatcggacaacnccatggagagangtggttgcgttcggttgcgccctcggctcttccttggcctccttcggttggcgaagcggccaacttncaacgccttaccaagccggcaagctggcgggctggccaagcccaaccggcggccgggtcaatctaacggtcgccggtgcattctgncaccttcggttcaactgccacctcctgtgcatctcccaccgccggtccacctgccgtcgccggtccacctgccaccgccggtccatgtgccgccgccggttcatctgccgccgccaccatgccactaccctactcaaccgccccggcctcagcctcatccccagccacacccatgcccgtgccaacagccgcattcaaacccgtgccatctgcagggaacctgcggcgttgcagcacccc

SEQ ID NO: 85833 - DNA, 500 bp, Zea mays
aggtaaggtcttgataacagagggggggaagtagtatacctcgtccggaattcccgggtcgacccacgcgtccgcagaaacacaccaagcgaagcgcactaatcacaaacctaacaacaatggctaccaggatatgatccctccttgcgcttcttgcgctttttgcgagcgcaacaaatgcgtccattattccacaatgctcacttgctcctagttccattattccacagttcctcccaccagttacttcaatggccttcgaacacccagctgtgcaagcctataggctacaacaagcgattgcggcgagcgtcttacaacaaccaattgcccaattgcaacaacaatccttggcacatctaacaatacaaaccatcgcaacgcaacaacaacaaccagtcctaccaacacttgaccaactaaccattgtgaaaccttgcggctaacttgaacaacaacttgttgcattccaaccaactggttctaacaaacgtagttgc

SEQ ID NO: 85834 - DNA, 493 bp, Zea mays
tggaaaggctgtctaagacagggggggataaggtatactcgtaccggtccggaattcccgggtcgacccacgcgtccggccgcggcctcgatcggagtcggaggcgaacacccccatggcggcggctggcggcggcgcaggagggaaggtatccttcaagatcatcctcacctccgaccccaagctccctttcaaagtgttcagcgtgcccgaggcggcgcccttcaccgcggtgctcaagtacgccgcggaggagttcaaggtcccgccccagaccagtgccatcatcaccaacgatggaattggcatcaacccccagcaaagtgcaggcaacgtgtttctgaaacatggttcggagctgcgtctcatccctcgcgatagagttggagctgtagtcatgtcttccggttagaggatatatacagtccaatgcataatgagcaaaacttgagagaaataaagctttgatgttggccttgcttggctgtaggat

SEQ ID NO: 85835 - DNA, 497 bp, Zea mays
aggggaaagggctgaatacggacaggggggttaaggaaaactcgtaccggtccggaattcccgggtcgacccacgcgtccgctagaatcgcattggttggtcccaatggtgcagggaagagcactcttctgaagcttatgactggtgaccttgctccattagatggcatggttcggcgccacaatcacctgcgcattgcacagtaccatcagcatcttgcggacaagctggatctggacatgccggctctggcttacatgatgaaggaataccctgggaccgaagaagagaagatgcgagctgctgttggcaggtttggcctatcaggaaaggcgcaggtgatgccaatgaggaatctttctgatgggcaaaggagccgtgtcatctttgcatggttggcatataggcagccgcaactgctactgctcgatgagccgacaaatcatttggacattgagaccattgactccctggcggaggcactgaatgaatgggat

SEQ ID NO: 85836 - DNA, 505 bp, Zea mays
  unsure (1)..(505): unsure at all n locations
tagtttaagtgattgatttatgtcagcgacgataatcgtcactacggtaccggtccggaattcccgggtcgacccacgcttcgcagcgccgccgccatcgtcggtcacgacggcagcgtttgggcgcagtccgagaggttccccgagttaaagcctgaggaggttgctggtatcataaaggactttgatgaacctggtactcttgcaccaactggtcttttcgttggaggtacaaagtacatggtgatccaaggtgaacctggagttgtcatccgaggaaagaagggcactgggggcattactatcaagaaaaccggcatgtccttgattattggtgtctacgacgagccaatgactccagggcaatgcaacatggtggtggagaggctcggcgattacctgattgagcatggcttctaaaagttcgctatatgctgttttggtcatttgggcaccaaagtttgcgcctcatttggttctgtaatccgtgggctcgtgcatgtcn

SEQ ID NO: 85837 - DNA, 512 bp, Zea mays
  unsure (1)..(512): unsure at all n locations
atgtgtgtgtctgctactgaaaattgatgtcacgctcgtaccggtccggaattcccgggtcgacccacgcgtccgcaaatctgcggcatcatcgcctcagatgagaagcgacatgaaactgcgtacacgaagatcgtggagaagctgtttgagatcgaccctgatggtaccgtggtcgctctggctgacatgatgaggaagaagatctcaatgcctgcccacctgatgtttgacgggcaggacgacaagctgttcgagcacttctccatggtcgcgcagaggcttggcgtttacaccgccagggactacgccgacatcctcgagttcctcgtcgacaggtggaaggtggcgagcctgactggtctgtcgggtgaagggaacaaggcgcaggactacctttgcacccttgcttcaagaatcaggaggctggaggagagggcccagagcagagccaagaaagccggcacgctgcctttcagctgggtatacggtagggacgtncaactgtgagg

SEQ ID NO: 85838 - DNA, 511 bp, Zea mays
agtgtgtctttccctaccgaaatatatagtatcctcgtaccggtccggaattcccgggtcgacccacgcgtccgctttccaacaatcaagatgagccgtggcggtagcgcgggtggtggtcaaagttgtgggggttacctctttggaagcggtgagccccccaaaccagcagtggcaccagctgtaagtgctccacctgctgctgcaggtgctccacctgctgagaaaccacctgctgcaaagcctgatggcaccagtcagattgctgctggggttaccagccaaaccaataactaccacagggccgacggtcagaacaccggaaacttccttacggaccgtccttcgaccaaggtccacgctgctcctggcggtggctcttccctgggatacctgtttggtggcaactgatgccgctcaccaagctatcaccccccactgtcgccgcatgctttttctgaatcgtgaacagccgttgtcatttcatgtgtacccaaaccttccgtcccgc

SEQ ID NO: 85839 - DNA, 521 bp, Zea mays
  unsure (1)..(521): unsure at all n locations
gggtgctgtcgtcggctacgctagccgtaagnacnactgtactggtccggaattcccggctcgacccacgcgtccgaacttgtgctagcaaaccttgctgcctactctcagcaacagcagtttcttccgttcgaccaactagctgcattgaactctgcttcttatttgcaacaacaacaactaccattcagccagctacctgctgcctacccccagcaatttcttccattcaaccaactggcagcattgaactctcctgcttatttacagcagcaacaactactaccattcagccagctagctggtgtgagccctgctaccttcttgatacaaccacagttgttgccgttctaccagcacgctgcgcctaacgctggcaccctcttacaactgcaacaattgctgccattcaaccaacttgctttgacaaacccagcagcgttctaccaacaacccatcattggtggtgccctcttttagatttcttatgagttatagttcaataataaaagttttttggc

SEQ ID NO: 85840 - DNA, 504 bp, Zea mays
  unsure (1)..(504): unsure at all n locations
agtaagagtgttttaaaatgagacgacgtaatagtatactactacgaattcccgggtcgacccacgcgttcgcaccaccaatgatgggttgttggtagaacactgttgagttttttggatgatgttggtggcgtcccagaaataagaaagtacatttctagattcttaaaaaaaaaaaaaaaaaaaaaaaaaaaaaaaaaaaaaaaaaaaaaaaaaaaaaaaaaaaaaagggcggccgctctaaaggatccaagcttacgtacgcgtgcatgcaacgtcatagctcttctatagtgtcacctaaattcaattcactggccgtcgttttacaacgtcgtgactgggaaaaccctggcgttacccaacttaatcgccttgcaacacatccccctttcgccagctggcgtaatagcgaataggcccgtaccgatcgcccttcccaacagttgcgcatcctgaatggcgaatgggacgcgccctgtagncgcgcaataagcggcgngg

SEQ ID NO: 85841 - DNA, 501 bp, Zea mays
  unsure (1)..(501): unsure at all n locations
aggtntaaataggctttattacgacncagccattatagcattgctcgtaccggtccggaattcccgggtcgacccacgcgtccgcggacgcgtgggccgcgcctctacatttcttctctctctgctcctccgcgtccgcctgatccatccaagacagggatcgccatgtcggactcggaggagcaccacttcgaatcgaaggccgacgctggggcgtccaagacctacccgcagcaggctggcaccgtccgtaagaacggcttcatcgtcatcaagaaccgtccctgcaaggttgtggaggtttctacctccaagactggtaagcatggccacgccaaatgccactttgtcgccatagacatattcaatgggaaaaagcttgaagatattgttccttcatcacacaactgtgacattccgcatgtgaaccgtactgagtatcagctgattgatatttctgaggatggatttgtgagccttcttacttcagatggcaacact

SEQ ID NO: 85842 - DNA, 500 bp, Zea mays
  unsure (1)..(500): unsure at all n locations
ngggtntaaaaggtcgtgtacgtatcccgacttacagtatactcgtaccggtccggaattcccgggtcgacccacgcgtccgcccactcgtccgctgccattctacccacaggatgtggcaaacaatggcagcaactgttgctgttgcaagaaggcgttaatgtttcccacaacctgtgggtaaaatggcagcggtcgcgtgggcggtcgcgtagttaattttgtggtatatgtagnttattgaatgggaaaaattggttatatagtaagaaatataggtgagtgatatatatgtttttgttttagtgaattaattgataagagtgttgaattgatagggtattttaatagtttgagaattataaatggagaatgggangtataatttagntgttaattaaaagtttatgtagatttggttgtgaaaagttagaagtataaattgattagtgatttataggatggtaatttgaattattataatttattatgtgataatt

SEQ ID NO: 85843 - DNA, 511 bp, Zea mays
  unsure (1)..(511): unsure at all n locations
gaagtgtatctcccctcagtctactacgtactgctgtaccggtccggaattcccgggtcgacccacgcgtccggtgcgtgaggagtctggagtcggacggaaatcgaaaaggcgaaaactcagtgggtggagtttcctcggagcggaggcgatggctgggaagggagggaaaggcttgctcgccgcgaagactacggcggccaagtccgccgagaaggacaaggggaagaaggccccaatctcacgctcctcccgcgccggcctccagttccctgttggacgtatccaccgtcagctgaagcaaaggactcaggcaaatggacgtgttggtgccaccgcagccgtctactctgctgccatcctggagtatttgactgccgaggttctggagctggctgggaatgctagcaaggatctgaaggtgaagcgtatcacccctcgccatttgcagctagccattcgtggagacgaggaactggacaccctcatcaaaggcaccatcgcaggccgn

SEQ ID NO: 85844 - DNA, 511 bp, Zea mays
  unsure (1)..(511): unsure at all n locations
agtctatgtctancctaactagctnagatcatctctaccggtccggaattcccggctcgacccacgcgtccgcccacgcgtccgcccacgcgtccgcccacgcgtccgatgaaaagaaaaaagtatgagtcattcaggtcattgctcacactgacactgccacccatggtgatgcgtgacacattattactcaatcatcgccgctaaatgactcaactagctagctagccagcggctatactacagcacccctatcctgggccattgcttcaagttcctgaggcatcactgcagcctgactgcaactccctactgctttcctcagtgccactctttgccgtatctttttatccagctactcattctatgggtatctcatatcttttaccattctattctttacttattctatctatccatcctcttctacatattctatatatctcatatctaatattattttattacactatatatttcaactactattcttttattaataattttaatt

SEQ ID NO: 85845 - DNA, 509 bp, Zea mays
  unsure (1)..(509): unsure at all n locations
ngttgattgaacagtacgtactactgtactggtccggaattcccggctcgacccacgcgtccgaaaccttgctgcctactctcagcaacagcagtttcttccattcaaccaactagctggattgaactctgctgcttatttgcaacaacaactaccattcagccagctagctgctgcctacccccaacaatttcttccattcaaccaactggcatcattgaactctcctgcttatttacagcagcaacaactactaccattcagccagctagctggtgtgagccctgctgccttcttgacacaacaacagttattgccgttctacctgcacgctgcgcctaacgctggcaccctcttacaactgcaacaattgctgccattcaaccaacttgctttgacaaacccagcagcgttctaccaacaacccatcattggtggtgccctcttttagatttcttatgagttatagttcaataataaagttttttggctgatggttggggcttccc

SEQ ID NO: 85846 - DNA, 512 bp, Zea mays
  unsure (1)..(512): unsure at all n locations
tggaatgtgtatctgggatgcatgtgatgcangctcgtaccggtctcggaattcccgcgtcgacccacgcgtccgcagctagcaacatagaaagcacaatattgtaccaacaatggcagccaaaatattttgcttccttatgctccttggtcgttctgcaagtgctgctaccgcaaccattttcccacaatgctcacaagctcctatagcttcctttcttcccccatacctctcaccagcggtgtcttcagtatgtgaaaacccaattcttcaaccctacaggatccaacaggcaatcgcagcaggcatcttacctttatcacccttgttcctccaacaaccgtcagccctattacagcagttacctttggtgcatttgttggcacaaaacatcaaggcacaacaactacaacaacttgtgctaggaaaccttgctgcctactctcagcaacagcagtttcttccattcaaccaactggctgcattgaactctgctgcttatttgcaacaat

SEQ ID NO: 85847 - DNA, 499 bp, Zea mays
  unsure (1)..(499): unsure at all n locations
atgttcatctctaccgcaatagnatgcactacgggttcggtaattcccgctcgacccacgcgtccgcgcacgcgtccgcccacgcgtccgcatcaatgcacacttctttcaatcaagactgntggagtcagtgaagattgttcttactgtcctcagtcatcaagatacaacactggattgaaggcccaaaaattgatgaacaaatatgctgtcttggaagcagcaaaaaaggcaaaagagtctgggagcacccgtttttgcatgggagctgcatggagagaaaccattggcaggaaatcaaacttcaaccagattcttgaatatgtcaaggaaataaggggtatgggcatggaagtctgttgcacactaggcatgatagagaatcaacatgctgaagaactcaagaaggctggacttacatcatataatcataacctagatacatcaagagagtattatcctatcatttttaccacatgaacattttgatgttttgatt

SEQ ID NO: 85848 - DNA, 514 bp, Zea mays
aggggagtcgtatctgagccacgcatacgaagtacgctagactcgtactcgtccggaattcccgggtcgacccacgcgtccgcggacgcgtgggattcctgatatcatctattcgttggccagatgattagagggctggaaatatattaagaacaataccatagagagaagttcctcagtgctctcgcagcttaaggagcaaacagcaacactttacttcgttttttatactttattatagccgcactgtttattactcgggctacatttgtgaacagcgactgtaatatttttttactctatattcgtagtgagatgaaaaaaaaaaaaaaaagggcggccgctctagaggatccaagcttacgtacgcgtgcatgcgacgtcatagctcttctatagtgtcacctaaattcaattcactggccgtcgttttacaacgtcgtgactgggaaaaccctggcgttacccaacttaatcgccttgcagcacattctctttttgtcagcttgcgtta

SEQ ID NO: 85849 - DNA, 505 bp, Zea mays
atggtaggagctcagtccaaggagtatggaacactcgtactcggtccggaattcccgggtcgacccacgcgtgcgcgcacgcgtccgcttaaacatgtgattacgaaaatgattgatgatatagcctgacagactcattcacatcctgcagactaccaccattaccgatggtgtttgaacaatcgtcagccctatctttggtgcagtcattggtacaaaccatcatggcacaacagctgcagcaactcgtgctacctctgatcaaccaagtagctctggcataccttactccctactctcagcaacaacaatttcttccattcaaccaactgtctacactgaaccctgcttgcttatttgcagcatcaactattaccatttagccagctagctactgcctactctcatcaacaacaacttcttccatttaaccaattggccgcactgaaccccgctgcttatttgcagcagcaaatactactaccatttaaccagctagcttctg

SEQ ID NO: 85850 - DNA, 504 bp, Zea mays
  unsure (1)..(504): unsure at all n locations
tgggaagtttcatggctccagctcttgtatccatngcagtactcgtccggnattcccgggtcgacccacgcgtgcgatcgaatcgtctcgctcgtggctgctttactcgtgctgcttgccctcgccgcacgttcctccacgcgcagcgcacaaaaggagtccgtggctgacaacgccgggatgttggcaggcggcatcaaggacgtgccggcgaacgagaacgacctccagctccaggagctcgcgcgcttcgccgtcaatgagcacaaccaaaaggccaatgctcttctggggttcgagaagcttgtgaaggccaagacacaagttgttgctggcacgatgtactatctcactattgaagtgaaggatggcgtagtcaagaagctttatgaagctaatgtctgggagaagccatggtataacttaaagcatctgcatgatttcaagcctttttaagatgtttcttgctcctaatgtatttatcttattctttttcaatttctt

SEQ ID NO: 85851 - DNA, 500 bp, Zea mays
  unsure (1)..(500): unsure at all n locations
aagtatcatcgnctacggaacacgtacgtatcactgtactcggtccggaattcccgcggcgacccacgcgtgcgcgattccacttctagatagagaaactaactaaaggagaatacttaataatagggcggaacatttatacaaaacacctatcccgagcacacgcaagggaaccgtagacaggcaagtgaaatccaatccacgaaataaattgatccatggacggcaccgttgtggtaaaggtcgtaatgccagaggaatcattaccgcaaggcatagagggggaggtcataagcgcctataccgtaaaatcgattttcgacggaatcaaaaagacatatctggtagaatcataaccatagaatacgaccctaatcgaaatgcatacatttgtctcatacactatggggatggtgagaagagatatattttacatcccataggggctataattggatatacctattgttctggtacaaaatttcttattctaatggttt

SEQ ID NO: 85852 - DNA, 530 bp, Zea mays
  unsure (1)..(530): unsure at all n locations
ggaaagtgcctgtatgcctgcaccgctctagnatcgcanancagtactcggtccggaattcccgggtcgacccacgcgtccgcggacgcgtggggcgaaggctacccttcctccttcgctccttccgcgccgccgccggtccgtcgccgccatggtgaagtactcgcaggagccgggcaaccctaccaagtcggctaaggccatgggcagggatctgagggtccacttcaagaacacaagggagacagcctttgcgcttcgcaagttgtctttgaccaaggctaagcgataccttgaggatgttattgctcacaagcaggcaattcccttccggagatactgtgggggtgtttgttatttttttttaatcttaattgtgggggtattctaatttttaattaattttttattatttattttttattattatatattttttattttttattaataattattttattatattatttattttatttctattttttttatttatattttatattttattatatttattattatta

SEQ ID NO: 85853 - DNA, 487 bp, Zea mays
  unsure (1)..(487): unsure at all n locations
agagtgatcgcngcctacgcacactgacgcnatcagcggtactggtccggaattcccgggtcgacccacgcgtccgcggacgcgtgggcaactagcaacatagaaagcacaatagtgtaccaacaatttgatccaaaatattttgcctgcttatgctccttggtctttctgcaagtgctgctacggcgaccattttcccgcaatgctcgcaagctcctatagcttcccttcttcccccgtacctctcaccagcggtgtcttcggtatgtgaaaacccaattcttcaaccctacaggatccaacaggcaatcgcagctggcatcttacctttatcacccttgttcctccaacaatcatcagccctatgacaacagttacctttggtgcatttattggcacataacatcagggcacaacaactacaacaacttgtgctagcaaaccttgctgcctactctcagcaacagcattttctttcatttcaacg

SEQ ID NO: 85854 - DNA, 498 bp, Zea mays
  unsure (1)..(498): unsure at all n locations
gtgtgtttctgatncctaggtnactgnagtactgcagtactggtccggaattccggcggcgacccacgcgtccgcggacgcgtggggtgctgtagtatatccgctggctagctagctagttgagtcagttagcggcgatgattgagtaataatgtgtcacgcatcaccatgggtggcagtgtcagtgtgagcaatgacctgaatgaacaattgaaatgaaaagaaaatagtattgttccaaattaaatatttttttatatttaaaaagggcgtccgatctagagtgatccaagcttacgtacgcgtgcatgctatttcataactcttctatagttttacctaaattttattcacattctcgttgggggggtgatgtttagtcttgtttaatctttttcttttcctattttaattttatttactgttattatatttttttcttttcttttctttatttttattagtctatatttttatgttttttttatttttttattt

SEQ ID NO: 85855 - DNA, 494 bp, Zea mays
ggttgctcttctcctcacctccgtacgctcgttctgtccgtattcccgctcgacccacgcgtccgcggacgcgtgggcgacgccgccgcctctagccgtccgccttgcccttcacgaaggcgtgggcctcctccttgtatctgcactccccccttcacagatccgttcctccagctagggttagcgttcctctgcagcgatggcgatcaagcggaccaaggcggagaagaagatcgcgtacgacaagaagctgtgcagcctgctcgatgagtacaccaaggtgctcatcgccctcgccgacaacgtcggttccaagcagctccaggacatccgccggggcctcatgggcgactcggtggtgctcatggtgaagaacacgctcatcatgcgttgcattcaagtgtacgccgagaaaaccgttacccacacctttgacccgctcatggaccttcttgtcgtcaacgtatgccttaattttaccaaggtagaccctt

SEQ ID NO: 85856 - DNA, 503 bp, Zea mays
  unsure (1)..(503): unsure at all n locations
agtaagatgttagcaatgctttgacggtagnctcgtctcggtccggaattcccgggtcgacccacgcgtccgagcaacatacatagtgaagtacactatcaacatcttagcaccaatgggagccaatgtttgtgtcctccttgccctccttgctctttcagcaagcgctgctacctcgacttttattccacaatgctcacaacaatacctctctccggtgacagccgcgggatttcaatacccaactatacaatcctacatggtacaagaggccatccaagcaagcatcttacggtcattagcattaaccctccaacaaccatatgctctattgcaacagccatccttagtgcatctgtatctccaaagaatcgcggcacaacaactacaacaacagttgctaccaacaatcaatcaagtagttgcaacgaaccttggtgcttacctcgagcaacatcagtttcttccattcaatcaactagctggggtgaaccctgcttttn

SEQ ID NO: 85857 - DNA, 518 bp, Zea mays
  unsure (1)..(518): unsure at all n locations
ggtctgaagagttctgtcgcctaccgcaatatgntcgcactgctgtactcggtccggaattcccgggtcgacccacgcgtccgcgcacgcgtccggaaatggaaaggaataatatataaggaaaaaagatgattggaaagtatgtactgtagtaataatgtaatggagccgctggctagctacctagctcgctagtttactcatttagcggcgatgagtaacgtagtgtcacccatcaccatgggtggcagtgtgagcaatgacctgaatgaaccattgaaatggaaaggaataatatataaggaaaaaagatgattggaaactgataaaattaataatttaaattataataaataaattttaatatttaaatagaagggggttaataataatataatttaatatttaaattggatttatatataaataaaaaaggggcggcctttttaaaggttccaggttaacttacgcttccatgctactttttaacctttttaagggtttcccttaatttattt

SEQ ID NO: 85858 - DNA, 514 bp, Zea mays
  unsure (1)..(514): unsure at all n locations
cggaaagtttcatcggtttccatncnccgtacgtacnatctgtactcggtccggaattcccggcggcgacccacgcgtgcgagttagaccaactagcaacatataaatcacaatagtgtaccaacaatggcanccgaaatattttgcctccttatgctccttggtatttctgcaagtgctgctacggcgaccattttcccgcaatgctcacaagctcctatagcttcccttcttcccccgtacctctcaccagcggtgtcttcggtatgtgaaaacccaattcttcaaccctacaggatccaacaggcaatctcatctggcatcttacctttatcacccttgttccttcaacatatcatcaaccctattacagatggggcgttttattcattttattgtcacaattcattattacacatcatcttacacactttatgctagcaattctttgcttcttatttaatcaatctcttttcatctacatatattcttattatctacatttatcttttcg

SEQ ID NO: 85859 - DNA, 487 bp, Zea mays
ggaatgtgtatacgccatccgaatatagatagtatgcctcgtaccggtccggaattcccgggtcgacccacgcgtccgcaacaggcatcttaccattatcacccttgttcctccaacaaccgtcagcccgatgacaagagttacctttggtccatttggtggcacaaaacatcagggcacaacaactacaacaacttgtgctagcaaaccttgctgcatactctcagcaacatcagtttcttccattcaaccaactggctgcattgaactctgctgcttatttgcaacaacaactaccattcagccagctagctgctgcctacccccagcaatttcttccattcaaccaactagcagcattgaactctgctgcttatttacagcagcaacaactactaccattcaaccagctagctgatgtgagccctgctgccttcttgacacaacaacaatttgtgccgttctacctacacgctatccctaacgc

SEQ ID NO: 85860 - DNA, 477 bp, Zea mays
  unsure (1)..(477): unsure at all n locations
gaggtggttcggncccagctccgccatgtcgtgtactgtccgtattcccgcgcgacccacgcgtccggttggtagccaagctgttatttcatcaacattctccattgtgaaacaatgccagtctttgggatgtttgcgacgagtgaaggttgttcacacatcgaggtggatctatgggcagatatatattccagaaataaattggattcttatggttctttgtgttgctgtcactattgcatttcgtgatactactcttatcggcaatgcctacggtattgcctgcatgactgctatgttcgttactacattcttgattgcttttataattaatattgtttgtcatttggtggtggggggtgtatttatttttttttatatttttgtaattattttattttataaatattatttatgttttttttttatatattttttttattttttttttttttttatttttttttatcttttttt

SEQ ID NO: 85861 - DNA, 342 bp, Zea mays
ggttttggccagtcgagacgtcgcgtcgaattccgggggacacgcgcacaatgctcgctcgggctgttactcgtgctgcttgccctccgtttcctcacgcggaaaaagagtccggctgcaacccggatgttggcggcgataagactccggcaacgaaacacctcactcaggactggcgcttgcctatgaccaccaaagcctgcttttgggttcagagctgtaggcaaccaagtgtgtgcacatacactatatgagggggggtgtattgaactttttatctagttgttttatctttggaattttttttttgattattctttgttatttttttttttttttttt

SEQ ID NO: 85862 - DNA, 507 bp, Zea mays
  unsure (1)..(507): unsure at all n locations
tgtggaaggctctttgctcctgccttcgtaggctacgtaccgntccgtaattcccgggtcgacccacgcgtccgcggacgcgtgggatgatcatcagtgctgccatttggatcagctcggttcttcttcggcgggaaggttccggcggcttccagtgatgtgttcgccacagaacgagcagcacctgctgcaggaacaaacacttaacaacaatgctcgtcctccggagaagaggcagcgggttccgtcggcgtataacagattcatcaaggaagagatacgcaggatcaaagcgaacaaccccgacattaaccacagggaagccttcagcacggcagccaagaattgggcacattatccaaacatccatttcggtttaaacgactccgggcgagaaggcaagaagaagcctcgggatcatgaagcggccgcgtctgtcctcccaatcgcaacaacaccgactggctctaaaaagattccaggtttctactgatggtagcagatatt

SEQ ID NO: 85863 - DNA, 497 bp, Zea mays
  unsure (1)..(497): unsure at all n locations
tggagatcttacctccactcncgtacgctcgtctcgtctcggtattcccgctcgagccacgcgtccggctcggcgctctcctctcccgacgactgctacacctcacaaccgtgagctcgcgaaggagcgctgttcgcaattccggcgccggcaccatgagtaagctgcagagtgattctctgagggacgcgattgcctcaattaccaatgattcccgtgagaagcagcgcaaatttattgaaaccattgagctacaaattggactgaagaactatgaccctcaaaaggacaagcgcttcagcggttctgttaagctgcctcacatccctcgccctaagatgaacgtatgcatgcttgatgatgctcagcatgttgaggaggcatagagaatggttatagacactatggattttgaagctcttaataagtattaacattactagaatcttagtaattaatcttgcataaatatattatgctatctttgtatttttgtt

SEQ ID NO: 85864 - DNA, 503 bp, Zea mays
  unsure (1)..(503): unsure at all n locations
ggagacggttgttattcttacctccgtacgncgtctggtccggattcccgctcgacccacgcgtccgcgcacgcgtccgatttcaaatccttctatcgcgcagcgccgcccgccctctcgcaggttgtccgatggcccgcacgaagcagacggcgaggaagtcaactggcggcaaggcgccgcggaagcagctggccaccaaggcggcgcgcaagtcggctccggccaccggcggcgtgaagaagccgcacaggttccgccccggcaccgtcgctctccgcgagatccgcaagtaccagaagagcacggagctgctcattcggaagctgccctttcagctgctggtgcgtgtgatcgcgcaagagttgaataccgacctttggttccagactttcttagttttcttgcatcatgaggcctttcttttcatttttttttgatttattttattgtaatttttcttttattattatatttctattatttttattttttttcttttt

SEQ ID NO: 85865 - DNA, 513 bp, Zea mays
agatgaagctcttatgcatgattcgataagtactgccacgctcgtaccggtccgtaattcccgggtcgacccacgcgtccgctgggtcttcagaccattagctttatctactccagagcgcagaagaacccgagctgcaccatgagggtgttgctcgttgccctcgctctcctggctctcgctgcgagcgccacctccacgcatacaagcggcagctgcggctgccagccaccgccgccggttcatctaccgccgccggtgcatctgccacctccggttcacctgccacctcctgtgcatctcccaccgccggtccacctgccgccgccggtccacctgccaccgccggtccatgtgccgccgccggttcatctgccgccgccaccatgccactaccctactcaaccgccccggcctcagcctcatccccagccacacccatgcccgtgccaacagccgcatccaagcccgtgccagctgcagggaacctgcggcgttggcagcaccccgatc

SEQ ID NO: 85866 - DNA, 503 bp, Zea mays
  unsure (1)..(503): unsure at all n locations
aggtaatttcgtcgccttcagctncagtcgcactgctgtactcgtccggattcccgggtcgacccacgcgtccgcaaggagggcgcatattggggcactgttgctggagtttatgtgggcatggtggacgtcgtgtaaagggtccgtggccgcagtgactggaagaacgcgatgatcgggggcgccttgtccggcgccctgatctccggcgccagcaacagctacagaggcatggtcgtctaggactccatcaccgtctgcgcggttgccacagccgtttatttcattatctgcattacctatctgttcttttatcatctgcatttttatttttattgtcttgctttttttttatttttttcttggggggtggttttttttttatttatttttttttttattttttttttttttttatttttttctttttttattatttttttttttatttattttttttatttttttcttttattttttattttattttttttttatttttt

SEQ ID NO: 85867 - DNA, 488 bp, Zea mays
  unsure (1)..(488): unsure at all n locations
aagtctcttgtcagncccagctccngacgctactgcggtactcgtccggaattcccgggtcgacccacgcgtccgcaaaaaatggctttcagatgtatacatcatggacacaatgtcactggagtttagataattagctgttactggatctgtgccacctccaagatgtgggcattcggcaaccatgattgagaagagactccttatatttggaggcagaggtggagcaggaccaataatgggtgatttatgggctttaaagggtattactgaagaagacaatgaggcgccaggttggacacagttgaaacttccagggcaatctcccttaccacgattcggtcattcattatcatctggtggggggtatctattgctttttggatgactattgtatctgtttttttgctttatttatattttgttttctttttatgtatgcttttatttttatcttggttttatgattaatgttttactttcttttg

SEQ ID NO: 85868 - DNA, 503 bp, Zea mays
tgcgtatgttactatcagcaaatagctaggtcgtccggtctcggattcccgggtcgacccacgcgtccgagcgcagcaagcaacatacctttatcgcccttgttgtgtcaacaatcgccagccctgtctgtggtgcagtcattggtacaaaccatcagggcacaacagctgcagcaactcgtgctacctgtgatcaaccaagtagctctggcaaacctttctccctactctccgcaacaacaatttcttccattcaaccaactgtctacactgaaccctgctgcttatttgcagcaacaactattaccatttagccagctagctactgcctactctcaacaacaacaacttcttccatttaaccaattggccgcactgaaccccgctgcttatttgcagcagcaaatactactaccatttagccagctagctacagcaagccgtgcttccttcttgacacaacaacagttgctgccgttctaccagcaatttgcggctaaccc

SEQ ID NO: 85869 - DNA, 516 bp, Zea mays
ggttagaagtcttcgttccatgacttgacaagtatgcatactcgtactcggtccggaattcccgggtcgacccacgcgtccgtgcagcattcaaaaacacaccaagcgtaagcgcactagcaacgacctaacaccgattgctaccaagatattagccctccttgcgcttcttgcccttttagtgagcgcaacaaatgcgttcattattccacagtgctcacttgctcctagtgccagtattccacagttcctcccaccagttacttcaatgggcttcgaacatccagccgtgcaagcctacaggctacaactagcgcttgcggcgagcgccttacaacaaccaattgcccaattgcaacaacaatccttggcacatctaaccctacaaaccattgcaacgcaacaacaacaacaacagtttctgccatcactgagccacctagccgtggtgaaccctgtcacctacttgcaacagcagctgcttgcatccaacccaatttgctctggctaacgttg

SEQ ID NO: 85870 - DNA, 503 bp, Zea mays
  unsure (1)..(503): unsure at all n locations
ggataagtatcntaggcaatgcccnagnctccacgtnagtactgtaccggtccggaattcccggggcgacccacgcgtccgagcaactagcaacatagaaagcacaatagtgtaccaacaatggtagccaaagtatgtgcctccttatgctccttggtctttctgcaagtgctgctacgacgaccattttcccgcaatgctcacaagctcctatagcttctcttcttcccccatacctctcaccagcgttgtcttcagtatgtgaaaacccaattcttcaaccctacaggatccaacaggcaatcacagcaggcatcttacctttatcacccttgttccttcaacaatcatcagccctattacatcaattacctttggtgcatttattggcacataacatcagggcacaacatctacaacaactcgtgctagcaaaccttgctgcttagctcagcaacagcatttacctttggtgcaattgtggcacaaaaccttaaggccca

SEQ ID NO: 85871 - DNA, 483 bp, Zea mays
tatgggtcctgccaccgaaacgtagcatcctcgtactcgtccggaattcccgggtcgacccacgcgtccgcaatgccaacatggatacagaagcttacacagaagttcctcaacagtcctgttgcagtggaccttgttggtgaggatgaccagaagctggctgaaggaattagtctgctctctgtctcttcggaaaaccgtgaaaaaccagctgttcttgggaaattgattaaggaacatgcaaaaggtggcaagtgcattgtttttacacaaacaaaaagggatgcagatagattgtcacacaatatgagtcgaagtttccaatgtgaggcgcttcatggggatatctctcaatctgaaagagagaggacactggcaggatttcgggatgggcggtttaatatattgattgttactgatgtcgtctttcgtttattggatattctattttataatctgtttatatcttttttttttcctatt

SEQ ID NO: 85872 - DNA, 490 bp, Zea mays
tgcgtcactggaagcccccgctccccgcccgccatcgcggtactcggtccggaattccgcgggtcgacccacgcgtccgcgcacgcgtccgcccacgcgttcgttctactctcagcaacaacaacttcttccgtttaaccaaatggccgcagtgaaccccgcttcttatttgcagcagcaaatactactaccatttagccagctagcttcagcaaaccgtgcttccttcttgacacagcaacagttgctgcctttctaccagcaatttgcggctaaccccgcaaccctcttacaactacaacaaattgtgcccctttgccaacttgctttgacagacccagcggccttctaccaacaacacataattggtggtgccctcttttaaaatggcttataatttgtaattcaaaaattaaagttttttgatgaatctatgtgtcccaacctaaattattaaatttcattttctgtatattattaattattattt

SEQ ID NO: 85873 - DNA, 504 bp, Zea mays
cgaagtttcatacgttcccggaccctcccgcacagtctgtactcggtaattcaccgcggcgacccacgcgtccgtgtccgtgctatggatggactctcattgactattcgacttctggaccctcccctccgctagttcctaccagaagggaacgtcgaggaaatcgtgcgtgaactgtgttctgagacgggagccaaccaggaggatgccctcgcacggatcgaaaagctttcggaagtaaacccgatgcttggcttccgtggctgcaggcttggtatatcgtaccctgagctaacataaatgcaagcccgtgccatctttgaagctgctatagcgatgaccaaccatggctttcaagtcttttcaggggggaatgtttccttctgtataacatactatgtaattggtcctcattttttccttattctttatatctcttattatgttttaacttattttttataaatattttttttttatttttttaataattttattttattt

SEQ ID NO: 85874 - DNA, 500 bp, Zea mays
  unsure (1)..(500): unsure at all n locations
aagcttgtagtcatccgtaaaaagaatgcacactcgtactcggtccggaattcccgggtcgacccacgcgtccgctctacctctacctaccggagcaggtagcacgccgcacgagccctttccgccgccgccaaaatggtgaacgttcctaagaccaagaagacctactgcaagaacaaggagtgcaagaagcacactctccacaaggttactcagtacaagaagggtaaggatagcctgtctgcccagggaaagcgccgttatgaccgcaagcagtcaggatatggtggccagaccaagcctgtcttccacaagaaggccaagaccaccaagaaaatcgtgttgaagctgcagtgccagagctgcaagcactactcacagcacgcaatttaaaggttcaagccttttgaggatggttgaagacagaaaggccagggaaccttttttttctaagnttttattaatcattttgattttggatcgaaccttgggtttacatt

SEQ ID NO: 85875 - DNA, 487 bp, Zea mays
  unsure (1)..(487): unsure at all n locations
tgagtgtatctgcaccatgatatagatagcatcctcgtaccggtccggaattcccgggtcgacccacgcgtccgcaacaagcaacatagaaagtggaattcagtagcaacaatagagcaacaatggcgggcaagatattttccctccttatgctccttgctctttctgcatgtgttgctaacgcgacaattttccctcaatgctcacaagctcctatagcttcccttcttcccccataccttccatcaatgatagcttcagtatgtgaaaacccagctcttcaaccctataggctccaacaagcaatcgcagcaagcaacatacctttatcacccttgtttcaacaatcgccagccctatctttggtgcagtcattggtacaaaccatcagggcacagcagctgcagcaactcgtgctacctgtgatcaaccaagtagctctggcaaacctttctccctactctcagcaacaacaatttcttccatn

SEQ ID NO: 85876 - DNA, 482 bp, Zea mays
  unsure (1)..(482): unsure at all n locations
tgatctctattatggnnnnccgttcncgcnncgctatctagtcactgctcacataattcccgcgtcgacccactcgtccgcttataggcaacatcaacaactacttttcatccagctacctgttgcctaccagcgctttttcttccattcaaccaactaacatcattgaactctcctgcttatttacagcatcaacaactactaccattcatccagctatctgctgtgagccctgctaccttcttgacacaaccacatttgttgcctttctaccatcacgctgcgcctaacgctgtcaccctcttacaactgcaacaattgctgccattcaaccaacttgctttgacaaacctatcatttttctaccaacaacccatcattgtttttgccctcttttatatttcttattatttatatttcattattaaagttttttttctgattttttatactttttacaaattataaagttcttttctaat

SEQ ID NO: 85877 - DNA, 487 bp, Zea mays
  unsure (1)..(487): unsure at all n locations
gaggtagttgagccaccgatcacagcagtactgcagtaccggtccggaattcccgggtcgacccacgcgtccggcaacatagaaagcacaatagtgtactcaacaatggcagccaaaatattttgctgtgttatgctccttggtctttctgcaagtgttgctaccgcaaccattttcccacaatgctcacaagctcctatagcttcccttcttcccccatacctctcaccagcggtgtcttcaatgtgtgaaaacccaattgttcaaccctacaggatccaacaggcaatcgcaacaggcatcttaccattatcacccttgttcctccaacaaccgtcagccctattacagcagttacctttggtccatttggtggcacataacatcatggcacaacaactacaacaacttgtgctagcaaaccttgctgcatactctcaacaacatcaagttcttccattcaaccaactggctgcattgaactctn

SEQ ID NO: 85878 - DNA, 484 bp, Zea mays
  unsure (1)..(484): unsure at all n locations
gagtgtgtcgtgcgnccaggcctcaccgacgcacnagcggtactcggtccggaattcccgggtcgacccacgcgtccgagggtgacaacattgttcaggatgctcctgcagatattccttccctcctataagtnaagcgtatctactatgaactgatgattcgatattacttgcacaacaatgattacctggaaatctgtcgttgttacaaggctatttatgatatcccagcaataaaggaagatccaaccaagtggataccgattcttaggaagatctgttggtacttggtgctagcacctcatgatcctatgcaatcgagccttctcaatgctacactagaggataaaaacctatcagagatgggggatttcaggatattgctgaagcagctggttaccatggaggtcattcagtttacagtattgtgggaattctttttatccgaattttgataactttgtataatccttcttgtatgttt

SEQ ID NO: 85879 - DNA, 539 bp, Zea mays
cggagtcgtctatcttttctacccctttcacgtcactatagtactcggtcacgcaatgctcgacccacgcgtccgataaggagttacatttccagattctttttttccacatacatcatccaaaaaacttgattgtttaattacaacttataagcaatctaaaatagggcaccaccaatgatgtgttgttggtaggatgctgctttgtttttcaaattcaatatttacaaatttcttcaattgttattttttttaattttttttttatatatttcaatttcttttaattttttttttttcatttttttttatattatattattataatttttttatttttatattttttttattttttttttttatattttatatttgtgtcttaatatttttctttattctttttaatttttattttttctttctttttatttttttatatatattttatttttattttttatattattctttattaatattttttattttatattattataattttatattatttttctaattatatttattttatt

SEQ ID NO: 85880 - DNA, 499 bp, Zea mays
cataaatcttctatattttgatcctgttgaatatcatactcattcgaaaccaactctaccaccatgctagacaaacacaatctgtacttcatctacacccaaaatattttgcttcctgaccgttctttttcaatcttcaattcttctacctcaaccattttcccacaattctcacaatctcctatagcttcctttcttcccccatacctctcaccatctatttcttcagtattttaaaacccaattcttcaaccctacattatccaacattcaatctcatcatacatcttacctttatcaccctttttcctccaacatccatcatccctattacatcaataacctatatttacattttcttgtctcataacatcaattcacaacatactactacttctttatcttatatacctttcattctacttttatcatcttcattttcttttttttcatttcttctttctattttaaattttatttttttattttatcaatattt

SEQ ID NO: 85881 - DNA, 506 bp, Zea mays
gaggtccatcgcaatccgtaaatagtacgcatcgtcacgactcggtccggaattcccgggtcgacccacgcgtccgcgagaaacacaccaagcgaagcgcactatcaacaacctaacaacaatggctacgaagatattatccctccttgcgcttcttgcgctttttgcgagcgcaacaaatgcgtccattattccacaatgctcacttgctcctagttccattattccacagttcctcccaccagttacttcaatggccttcgaacacccagctgtgcaagcctataggctacaacaagcgattgcggcgagcgtcttacaacaaccaattgcccaattgcaacaacaatccttggcacatctaacaatacaaaccatcgcaacgcaacagcaacaacagttcctaccaacactgagccacctagccatggtgaaccctgtcgcctacttgcaacagcagctgcttgcatccaacccacttgctctagcaaacgttaattgcaaac

SEQ ID NO: 85882 - DNA, 509 bp, Zea mays
  unsure (1)..(509): unsure at all n locations
aagctatctgtcgnccccctacgcctttcnatcgcacgtccaggtccggttcggaattcccgggtcgacccacgcgtccgaggtgacacctgaggtgatcgctccagtacaccgtccgtaccctccagaggagcgtgcctgctgctgtgcctgctgttgtcttcctctctggtggacagagcgaggaggaggccaccctgaatctcaatgccatgaacaagctcagcaccaagaagccatgggccctgtccttctccttcggccgtgccctccaggcgagtaccctcaaagcctgggctggcaaggtggagaacgtggagaaggctagagcggccttcctcgccaggtgcaaggccaactccgaggctaccctcggcacctacaaaggtgatgctgccgcctacacctagagccttcacgtcaaggactacaagtattgagttgcttctctttgccatcccgttgttttgaaacttctgtctgctagtaattttcctaattttgttttg

SEQ ID NO: 85883 - DNA, 491 bp, Zea mays
  unsure (1)..(491): unsure at all n locations
tgagtgttatctgccccncccacgtcncccnatcgcagtaccggtccggaattcccgcggcgacccacgcgtccgagtcggggaggattgtctgtaacgtgtcctagtagagtatctgcagctatgggacgtggtttatggggtagtgctgcaacctgacatcgcagaccaacacatctggcgcctctctgctcatggtacttattgtagcaaatcggcctatgatgctctctttgttggctctatcccttttggcccttggcgacgtgtctggaagacctgggcccccttaagatgcaaattctttgtatggttggcaatcaaaaacagggtttggacagctgatcgacttgcataatgagggggggggcatccatttgcttgccctctgtgtgatcatgctgatgtatccatttagcattattcttgtcttctaccttttctttctgtcttatattgtattttatttttcctctatttatcttttattt

SEQ ID NO: 85884 - DNA, 488 bp, Zea mays
  unsure (1)..(488): unsure at all n locations
cagctgtgtcgtcagncccgactcgnncgcagtacagtcccggttcgtaaaccttcggcggggggcccattcgtgcgggagaaagcacaatagtgtaccaactaatggcagccaaaatattttgcttccttgttctccttggtctttctgcaagtgctgctaccgcaaccattttcccacaatgctcacaagctcctatagcttcctttcttcccccatacctctcaccagcggtgtcttcagtatgtgaaaacccaattcttcaaccctacaggatccaacaggcaatcgcagcaggcatcttacctttatcacccttgttcctccaacaaccgtcagccctattacagcagttacctttggtgcatttgttggcacaaaacatcaaggcacaacaactacaacaacttgtgctaggaaaccttgctgcctactctcagcaacagcagtttcttccattcaaccaactggctgcattgaactctgct

SEQ ID NO: 85885 - DNA, 511 bp, Zea mays
  unsure (1)..(511): unsure at all n locations
nggtcgaagtgcttcatcgcctcaccgcccatatgntcgcctcggcacggttcggtattcccgggtcgacccacgcgtccgcgccattcgccacaaagccatttgaacccttcacgtctcctcgcctcgttccccatgtgctgcgtctccttgcccgcgccgccgctcgccgtttgcccctcgtctccgcaccgcgcgctgttgtccatccttgtgcagcaaaaatgacggctggctacattgttggctcactggtcggatcctttgccattgcatacctgtgtgacacatttatctctgacaagaaggcatttggaggtagcacccccaagactgtttctgagaaggagtggtggcaagccacagacaccaagttccaggcctggcctcgcactgctgggccaccggttgtcatgaaccctatcagccgccagaacttcatcgtcaagttcactgagtaggtttgggctggagaagctggttctgctacttggtgccttccattaacctt

SEQ ID NO: 85886 - DNA, 507 bp, Zea mays
  unsure (1)..(507): unsure at all n locations
tgggaaaatcttcatcaacgccatttacgangacnactgtactcggtctcggaattccgcgctcgactccacgcgtgcgcacaacaacaattgcaacagtttctaccagcgcttagtcaactagccatgggtaagcctgccgcctacctacaacagcaacaactgctttcatctagccctctcgctatggttaatgcacctacatacctgcaacaacagttgttgcaacagattgtaccagctctgactcagctagctgtggcaaaccctgctgcctacttgcaacagctgcttccattcaaccaactgactgtgtcgaactctgctgcgtacctacatcagcgacaaccattacttaatccactgtcagtggctaatccattggtcgttgcctttttacatcaacaactattgctgtcattcaaccagttctttttgattaaccctgccttatcgtgtcatcaactcattttagtaaggtccttttttaaatttcatttgaaattg

SEQ ID NO: 85887 - DNA, 480 bp, Zea mays
  unsure (1)..(480): unsure at all n locations
gttggattgattcgtagtacntcgttactggtccggaattcccgcggcgacccacgcgtccgactgaaccctgctgcttattggcattatcaactattaccattcagccagctatgtactgcctactctgagcggcaacaacttcttccatttaaccaattggccgcactgaaccccgctgcttatttgcagcagcaaatactactaccatttagccagctagctgcagcaaaccgtgcttccttcttgacacagcaacagttgctgcctttctaccagcagtttgcggctaaccccgcaaccctcttacaactacaacaattgttgccctttgtccaacttgctttgacagacccagcggccttctaccaacaacacatcattggtggtgcccttttttagagtgcttattagttgtaatttcaataattaatgttttttggatgattgttttttccttttctgttttagttatttctt

SEQ ID NO: 85888 - DNA, 509 bp, Zea mays
  unsure (1)..(509): unsure at all n locations
gaaagtttttcctccctgatttttctgctagcgtcgtactcgtccgnattcccggtcgacccacgcgtccggccacgcgtccgctttggtccaactggcctgactaccgaggtgaagtctggtgagatgcactcacgaggcgcttcaggaggctcttccgggtgacaatgttggcttcaacgtgaagaacgttgctgtcaaggatctcaagcgtgggtttgtggccttcaactccaaggatgaccctgccaaggaggctgccagcttcacctcccaggtcatcatcatgaaccactctgggcagattggcaacggctattctccagtgctggactgtcacacctttcacattgttgtcgagggggctgatcttatttttaatttttacattttttttattttgttttttgtgtttgtttttttattttttttttttattttttttttttattttttattttttttcttttttttttactatcattttttttatatttttaaatttattg

SEQ ID NO: 85889 - DNA, 503 bp, Zea mays
aggaggtccatgctcgtatggggggatgcagtctcgtactcgtccgtgattcccgggtcgacccacgcgtccgcgccgtcatgtcgaagcgaggtaggggaggttcggctgggaacaagttcgggatgtcactgtgtctaccggtggcggccacggtgaactgcgcggacaacacgggcgcgaagaacctctacatcatctccgtcaagggaatcaagggccgcctcaaccgcctcccgtccgcctgcgtcggcgacatggtcatggccaccgtcaagaagggaaagcccgacctcaggaagaaagtgatgcctgccgtcatcgtccgccagcgcaagccgtggcgtctcaaggacggtgtgtacatgtactttgaagataatgctggagttattgtgtattctaaaggtgagatgaaaggttctgcaattattggacctattgtcaagtttttttttaccttttgtcttttattcgtattcctgttatattcatttattttt

SEQ ID NO: 85890 - DNA, 531 bp, Zea mays
  unsure (1)..(531): unsure at all n locations
ggtgaagagtttnactttcccacgcccttccatgcactactgatacggtatcccgcgtcgacccacgcgtccggccacgcgtccggagcacatcaagatacattttttctgagcaaccgccggntccggancgtttcaaccctgcatgcggggccagcttattatatataatatctgaggtggagcatatctatctggctgtgtactacaagcaatcctagtactccttcttctcgtttctactattacacattatacatattttctttttttttgcttatttcttttttcccttatttttttaatttattatttttattctttttatataattttatttttttaatctatcttattaatatttattatggtaggtatttatatttttttttatatattttatttatttttttatttttatatttataattttttatatttttcttttttattttaatttatatttttttttttattttttttttcttttttttttattattttattttattattattttttttaattttt

SEQ ID NO: 85891 - DNA, 527 bp, Zea mays
aggatgatcttattcttaacctccgtagactacgtctcggtccgtattcccgcgtcgacccacgcgtccggaggcatcagtgcagcccgacggcttcgccctactgctcgcctcagtgccagtcggtgcgttagcagtgttgccagcagctcatgcaggtggagccgcagcaccggtaccaggcgatcttcggcttggtccttcagtccatcctgcatcatcagcctcaaagcggccagttctcgtagcttttgtcattttcaattattttaacatctttatttttattttctttcctttttttttttcttattttttattattttttttattttttttttttttaaatttctattattttttttttggttgggtttttaatattaatattattattttttttttatttattatttttatatttttttttatttatatttttttttatattttttttttatattatattattttattttattatttttttatttttattatttattttttttatatatattttatcg

SEQ ID NO: 85892 - DNA, 510 bp, Zea mays
  unsure (1)..(510): unsure at all n locations
gtgaagtacnctgttagtaaagagggataatggacgctcgtaccggtccggaattcccgggtcgacccacgcgtccgcgccacgcgtccggaccaactagcatctatagaaagcacaatagtgtaccaacgatggcagccaaaatattttgcttccttatgctccttggtctttctgcaagtgttgctaccgcaaccattttcccacaatgctcacaagctcctatagcttcccttcttcccccatacctctcaccagcggtgtcttcaatgtgtgaaaacccaattgttcaaccctacaggatccaacaggcaatcgcaacaggcatcttaccattatcacccttgttcctccaacaaccgtcagccctattacagcagttacctttggtccatttggtggcacaaaacatcagggcacaacaactacaacaacttgtgctagcaaaccttgctgcatactctcagcaacatcaagttcttccattcaaccaacttgcttcattgaact

SEQ ID NO: 85893 - DNA, 515 bp, Zea mays
  unsure (1)..(515): unsure at all n locations
agtaaaatgtgtatgccttcagccctgcactgcacttcatgtctcggtccggnattcccgcgtcgacccacacgtccggtttcactgtttagatactgtacgttttaacctgcacaataatgtcccaagcttgtctactataaatattttgcttccttatcctcctaactctttctccacatgtttctactgcaaccattttaccacaatgctcacaagctcctataacttcccttcttcccccatacctctcaccatcattgtcttcaatttctaaaatcccaattcttcaaccctacatgatccaacaatcaattccaacattcatctttaccattatcacccttaatccttcaacaaccttcatccctattacttcaattacttttttttcattttttttctcattaacatcattttacatcatctacatcatctttttctatcatatctttcttcttctttttttttccttattttactttcatttataccatttatttatattttaaatt

SEQ ID NO: 85894 - DNA, 479 bp, Zea mays
ggaggtgatgccgttcccccgatcccccctactacgctcctgattcccgggcggcccacgcgtccgggtacttctccctccgccgccactctcctcccattctccgccaccgccaattccatgccgttctccgccacggctgctgagagcgagaagagatggcaggcaagggtgatgggccggcaatcggcatcgatctcggcacgacgtactcttgcgtcggcgtctggcagcacgaccgtgtcgagatcatcgccaacgaccagggtaaccgcaccacaccctcgtacgtcgccttcaccgactccgagcgcctcatcggagatgcggccaagaaccaggtcgccatgaacgggagggacaccgtctttgatgccaagcatctcattggcaggaggtttagtgatgcctctgtccatagtgatattaatctgtggccctttaatgtcatttcattgtcttgttagtaatctattatt

SEQ ID NO: 85895 - DNA, 504 bp, Zea mays
  unsure (1)..(504): unsure at all n locations
gaaaaatgtatgcctctacggttgnacgcactacagtactcggtccggaattcccgggtcgacccacacgtccgacgaggggcatgattgtaattccttacaggctgtgtcctgtgcctataaagagtgaatagttctcctttactgttcaaaaaaaaaaaaaaaaaaaaaaaaaaaaaaaaaaaaaaaaaaaaaaaaaaaaaaaaaaaaagggcggccgctctaaaggatccaagcttacttacccttgcatgcaacttcatagctcttctatagtgtcacctaaattcaattcactggccgtcgttttacaacgtcttgactggaaaaaccctggcgttacccaacttaatcgccttgcagcacatccccctttctccagctggcttaataccaaaaaggcccgaaccgatcgccctttcaaacagtttctcatccttaatggcaaatggtactccccctttatcgtcacattaaccacctccattttttttgtaaactcta

SEQ ID NO: 85896 - DNA, 511 bp, Zea mays
tggaagatgtctacttctccaccttcgggtacgctcgtaccggtccggtattcccgcgtcgacccacgcgtccgagcaagctaagcgcactagcaacgatctatcaccaatggctaccaagatattatgcctgctttctcttcttgcccgtttagtgagcgcaacaaatgcgttcattattccacagtgctcacttgctcctagtgccagtattccacagttcctcccaccagttacttcaatgggcttcgaacatccagccgtgcaagcctacatgctacaactagcgcttgctgcgagcgccttacaacaaccaattgcccaattgcaacaacaatccttggcacatctaaccctacaaaccattgcaacgcatcaacaacatcatcagtttctgccatcactgagccacctagccgttgtgaaccctttttacctacttgcaacatctacttctttcatttatattcatttcctcttgcgaacttattcttcttaccaataactattt

SEQ ID NO: 85897 - DNA, 500 bp, Zea mays
ggtagatcagtttcttacttccgtacgctctcctgtccgtattcccgcgtcgacccacgcgtcctgcgccagacttcgtagccgaggctttgttctaccaggagttcatcaacgtgaaggtctgttattacattgggaagaagtacgtcattctgttcttctaccccttggatttcaccttcgtctgcccgaccgagattactgcgtttagtgacagatacgaggaatttgagaagttgaacactgaggttcttggtgtttccattgacagtgtgttctcccaccttgcatgggtgctgacagacatgatgtctatttttctcttctttcttattttcttatttttttttgttgtgtctttatttttttcttttttcttttttttttttttcttttcttatttttttttattattttttttttttattttcttcatttcatttttttttattctttttttttttatttttttctttttcttattttcttattctttattg

SEQ ID NO: 85898 - DNA, 566 bp, Zea mays
ggtaaaatttttttgccttcactttttgtacttagctatgttattgtttcggattcccggtcgactctagcgtccgatttgaagaaaaaacaaaacttaaatatggtggtgagggaacctggtaagggttggttttgttgaaatatcgtgggagaggttgtgataatttactttttttattttttttaattttatttttttttgttttattttttttttaattttttttttatttttttattttatttattattttatatttttttttttttattatttattttattttttttttttttattttttttttttttattatttttttttttttttttttttttttttatttttttattattttttttttattttttttttatttttttttgttttttttttatattttttattttatttttattttatttttatttattattttattttttattttttatttttttttattttatttatattttattattttttttttattttttttatattatattattttattttattttttatatttttattttatttttttttttattttattt

SEQ ID NO: 85899 - DNA, 497 bp, Zea mays
ggtagattttcgcctcactctgtatgctcctcgtactcgtccggattcccggtcgacccacgcgtcgcttcagtatgtgaaaacccatctcttcaaccatataggcttcaacaagcagtcgggagcaagcaacatacctgtatcgcccttgttgtgtcaacaatcgccagccctatctttggtgcagtcattggtacaaaccatcagggcacaacagctgcagcaactcgtgctacctgtgatcaaccaagtagctctggcaaacctttctccctactctccgcaacaacaatttcttccattcaaccaactgtctacactgaaccctgctgcttatttgcagcaacaactattaccatttagccagctagctactgcctactctcaacaacaacaacttcttccatttaaccaattggccgcactgataccccgctgcttatttgctacatcaaatactactaccaattaaccagttagcttcagtaatgcctttg

SEQ ID NO: 85900 - DNA, 523 bp, Zea mays
  unsure (1)..(523): unsure at all n locations
ggtaagatctgtgnccttagtccttgcgtcgccacttctgtactcggtccgtgattcccgggtcgacccacgcgtccgaaagtatatgaagggttgtactgctttgcaactagaaacttcaagaaagcgtctgttttattcttggattgaatgtcaactttcacgacatatgagctattcacatatgatacattcatcttctacacagtcctcacgagtgttatatctcttgaccgtgtatctctgaaacaaaaagttgtagatactcctgatatcttatccataattttcaaatttccttacctatcatattttcttaattctcttttcatttcctctttttatttttttttttatatatattttttggtctagtatttttttattcttattttcactcttcctttttctatcattatttttatatttattttattttttatttatcttatttttcttttttttttatattttcttttttatttctttttttttttttttttttttctatttctttatattg

SEQ ID NO: 85901 - DNA, 487 bp, Zea mays
  unsure (1)..(487): unsure at all n locations
tgttggtgtggnnnaagtttcngnagtactgctcctggtcgtgattcccggtgcggccacgcgtccggcacgcgtccggccttctacagccttatgagcaaatttagaacttctacctctttgaataagaataaagcgtgtactctcaaagactctaaaatatgaaacattgggcttgtaaggaaaatggaccccgggccatttggctaattgagttttggtgtttgatgaacaacacaatccatgagctaataagttttctagtgtttatgtntgtaagtttatatttttcaatgatttttttgactttatgaatttatgtatgtttttttttttttttatatctttttattggggggggggtttttttttttttttatttattttttttttttctttattatttttttttttattatttttttattatttttgttttttttttttattttttttattttatttttttattttatttttttttttt

SEQ ID NO: 85902 - DNA, 482 bp, Zea mays
  unsure (1)..(482): unsure at all n locations
tagttatttgagncccgatcgncgnactagcgctaccgtccgtattcccgggtcgacccacgcgtccgcaaatgatgaagtgaaaagtcagctatctcatttccttccaacttctcgccggatcgttcagttttcaaatgggcaggctccttcgccaggtgctcgtgttgtctatgtagatggcacatttgatcttttccacgctggccatgttgagttcctcaggagtgccagacaacttggtgactttcttcttgtgggtatctatgacgactagtcgatcagggatagaagaggctgtcgttctataatgctattttcatgagcgtactcttgttgttcttgccttctcttttgggggtgtatttatttattttttcatttttttatgtttttttttttctttatctttcttttttattttatattcttttatttttgttttttttttttttttttttatttttttttttttttattat

SEQ ID NO: 85903 - DNA, 511 bp, Zea mays
  unsure (1)..(511): unsure at all n locations
ggtaagtcgttgctctcatgcctttcntcgctacgtacaggtccggtattcccgggtcgacccacgcgtccggtcggctgctgagctccgccatgttatgaccaacctcggcgagaagctgacttagtaggatgtcgacgagatgatccgtgaggccgatgttgacggcgactgccagatcaactactaggagttcgtcaaggtcatgatggccaagtgaggagcgatccccgttatctatgaatgaattgaagtgaaatatcaggcacacaagctgtactttgccatgttccttttgagtacacattattatcatgcatgatgtcttgtctagtaatttatcaacttactactttttttatggggggatttttttcttactgaactcttctttttattttgtatcttttattactattttctattttttctacttttctttatttttttttttttttcttttttttctcatctttttttttttttttttctatctttatatttttttttt

SEQ ID NO: 85904 - DNA, 505 bp, Zea mays
  unsure (1)..(505): unsure at all n locations
gtggaagtatctgttcccaccctgaatagtatgcaacactcgtactcggtccggaattgccgggtcgagccacggggcacgcgtccgccttgttcctccttcaatcatcagccctattacaacagttacgtttggtgcatttattggcacaaaacatcagggcacaacaactacaacaacttgtgctagcaaaccttgctgcctactctcagcaacagcagtttcttccattcaaccaactaggttcattgaactctgcttcttatttgcaacaacaacaactaccattcagccagctacctgctgcctacccccagcaatttcttccattcaaccaactagcagcattgaactctcctgcttatttacagcagcaacaactactaccattcagccagctagctggtgtgagccctgctaccttcttgacacaaccacagttgttgccgttctaccagcacgttgcgcctaacgctggcaccctcttacaactgcaacaantggt

SEQ ID NO: 85905 - DNA, 517 bp, Zea mays
  unsure (1)..(517): unsure at all n locations
tgtggttagagactgtatgccttcacttttggatcaggtctgtactcgtccgnattgccgggtcgacccacgcgtccgcgaagagccaactgcaacagatcgcatgaccaatgtacagcaacccacctggtcagtgtgcactggttgtttgtataatcctcagtgatccagaattgaagagtttgtggttaaaagaagtcaagggtatggctgatcgtatcattggaatgcgtaattcacttaaggataaatcttaatagctaggttcacctttgttatggtatcatatatttaattattattgtattgttctttttttgttttatttatttttttttttttttttttttttttttttttataagtgggggggttttttatttttatatttatttttattttttatttttttattttttttatattttttaatttattttttttatttatatttatattttattattttattatatttctttatttttttattatttatattttatttatttttttt

SEQ ID NO: 85906 - DNA, 505 bp, Zea mays
ggtagtactgtgcctaaatcccgtcacgcatacagctctcgtccggaattgccgggtcgacccacgcgtccgcggtcgcgtgggctgacgctttggtttcagcattcaaaaacacaccaacgtaagtctactatcatcgatctgaacaccaatggctaccaagatattagccctccttgctcttcttgcccttttagtgagcgcaacaaatgcgttcattattccacagtgctcacttgctcctagtgccattattccacagttcctcccaccagttacttcaatgggcttcgaacattcagccgtgcaagcctacaggctacaactagcgcttgctgctagcgccttacaacaaccaatggcccaatttcaacaacaatccatggcacatctaaccctacaaaccattgcatctcatcatcaactacaacattttcttccatcacttatccaacttaaccgtttttaactcttgtcatctactttgcaacattcaacttttttt

SEQ ID NO: 85907 - DNA, 477 bp, Zea mays
  unsure (1)..(477): unsure at all n locations
gatgtactcgagncccggatccncgcagcatctactcggtccggattcccgcgtcgacccacgcgtccgcggacgcgtgggtgctgcatactcttatcaacatcagtttcttccattcaaccaagttgctgcatagaactgtggtgcttatttgcaacaacaattaccattcagccagctagttgctgcctacccccagcaatttcttccattcaaccaactagcagcattgaactctgctgcttatttacagcagcaacaactactaccattcagccagctagctgatgtgagccctgctgccttcttgacacaacaacagttgttgccgttctacctgcacgctatgcctaacgctggcaccctcttacaactgcaacaattgctgccattcaaccaacttgctttgacaaactcatcagtgttctaccaacatcccatcattggtggttcccctctttaagattgcttatgatn

SEQ ID NO: 85908 - DNA, 510 bp, Zea mays
  unsure (1)..(510): unsure at all n locations
tggtataaggtcgttgccctcacctncgctacgctcgtaccggtccggaattcccgcgtcgacgccacgcgtccgagagcaacatagaaagtggaatccagtagcatcaacagagcaacaatggcgaccaggatgttttccctccttatgctccttgctctttctgcatgtgttgctaacgcgacaattttccctcaatgctcacaagctcctatagcttcccttcttcccccataccttccatcaatgatagcttcagtatgtgaaaacccagctcttcagccctataggctccaacaagcaatcgcagcaagcaacatacctttatcacccttgttgtttcaacaatcgccagccctatctttggtgcagtcattggtacaaaccatcatggcacagcagctgcagcaactcgtgctacctgtgatcaaccaagtagctctggcaaacctttctccctactctcagcaacaacaatttcttccattcaaacaactgtctacacctgac

SEQ ID NO: 85909 - DNA, 514 bp, Zea mays
aggtaaaagctgtatgctagtgttaggaatgatgctgctctcgtactcggtccggaattcccggggcgacccacgcgtccgcgtaccattcagccagctacctgctgtctacccccagcaatttcttccattgaacgaactgtcagcattgaagtctcctgcttatttacagcagcaacaactactaccattcagccagctagctggtgtgagccctgctaccttcttgatacaaccacagttgttgccgttctaccagcacgctgcgcctaacgctggcaccctcttacaactgcaacaattgctgccattcaaccaacttgctttgacaaacccagcagcgttctaccaacaacccatcattggtggtgccctcttttagatttcttatgagttatagttcaataataaagtttttttgtctgatgtttgtggcttcccagaaataagaaagtacatttctaagatctaatgtgcttctagtcttcaaaatttgttgtatgttatatttgtt

SEQ ID NO: 85910 - DNA, 513 bp, Zea mays
gggaggcttgtgcgtcacgtcttggatcagctgtctgtactcgtccggattcccgggtcgacccacgcgtccgggactgactcactgacccgtaccctttcccggcgggacttcctctcgaatgttggcagtcgagaccctagttgccccacgaaccgaggatccaagatgagtttcctgttcgggaagaggaagacgcccgccgagctgttaagagaaaacaagagaatgctagatcgatccatcagggaaattgagcgagagagacaaggattgcatgcccaggagaaaaagctcatcactgatatcaagaaaacagctaatgatggccagattggagcttgtcaaagtattgttcggggaggtgattttttccctttttttatataacttatattctactaacttttttttttatcttctagttgtttttttttatatgttaaacttttttatttttttttatgttatttatttttaattttttattttatttttattatttttattttg

SEQ ID NO: 85911 - DNA, 490 bp, Zea mays
  unsure (1)..(490): unsure at all n locations
caggtctattcttgagnccgaactgcncgnagtacntcattactcggtccggaattcccgggtcgacccacgcgtgcgatgcaacgtacaaagcacaattttgtaccaacaatggcagccaaaatatttttgctccttatgctccttggtctttctgcaagtgctgctacggcgaccattttcccacaatgctcacaagctcctatagcttcccttcttcccccgtacctctcaccagcggtgtcttcggtatgtgaaaacccaattcttcaaccctataggatccaacaggcaatcgcagctggcatcttacctttatcacccttgttcctccaacaatcatcagccctattacagcagttacctttggtgcatttattggcacaatacatcatgtcacaacatctacaacaacttttgctagcaaaccttgcttcctacttcttatcatcaaccagtttctttcattctactcaattatccttcttct

SEQ ID NO: 85912 - DNA, 508 bp, Zea mays
  unsure (1)..(508): unsure at all n locations
agttaagtnnntnntnttttgaaactaggtcatgcanatcntntcnggtccggaattcccgcgtcgacccacgcgtccgcctagtgccattattccacagttcttcccaccagttacttcaatgggctgcnaacacctatctgtgcaagccaacatgcaacaacaagcgcttgcggcgagcgtcttacaacaaccaattgcccaattgcaacaacaatccttgccacatctaacaatacaagccatcacaacgcaacagcaacaacagttcctaccagcactgagccacctagccatggtgaaccctgccgcctacttgcaagagcagctgcttgcatccaacccacttgctctggcgaacgtagttgcaaaccagcaacaacaacagctacaacagtttctgccaacgctcagtcaactagccatggtgaaccctgccgcctacgtacaacaacaacaactgctttcatttagcccgctcgctgtgggccatgcacctacatacctt

SEQ ID NO: 85913 - DNA, 484 bp, Zea mays
  unsure (1)..(484): unsure at all n locations
gggtatttataatnnnggtccccgnagtacgtcnttattggtccatacttcctcgagccacgcgtccgcgtgtttcaacaatcgccagccctatctttggtgcagtcattggtacaaaccataagaactcatcagcttcggcagctcgtgctacctgtgatcaaccaagtagctctggcaaacctttctccctactctcatcaacaacaatttcttccattcaaccaactgtctacattgaaccgtgctgcttatttgcagcaacaactattaccattcaaccagctagctactgcctactctcatcaacaacaacttctttcatttaaccaatttaccgcactgaacccctcttgcttagtgcatcttcaaatactactaccatttatcctgctagcttcatcaatctctttctttattttttacacttttatcaactttctctctttttactatcatttattctctttatttttatacattt

SEQ ID NO: 85914 - DNA, 498 bp, Zea mays
  unsure (1)..(498): unsure at all n locations
tctgatgcagttgnatgtacttcgttacttgtccggaattcccgcgtcgacccactcgtcacgactgaactcggcacaatctaacccattattatacccatcggcaaccgcaaccaaccaaccaaatgaccgtgatccaacctaaccgtgggtgaaccctatcgcctacttgcaacaacagctgcttgcatccaacccacttgctttggcaaacgtagctgcataccaacaacaacaacagttgcaacagtttctaccagcgctcagtcaactagccatggtgaaccctatcgcctacctacaacagcaacaacttctttcatctagcccgctcgcttttggcattgcacctacatacctgcaacaacaggttttgcaacaacatttgcttcaactaaattgtacctactcttacttaacttagctttttctaaaccttgtcttcttattttcaacttcttacttttatttatctaactttattgtttttactttttt

SEQ ID NO: 85915 - DNA, 504 bp, Zea mays
gagtaagaggatcttcctagtaaacgactagttgcatcctgtcggaattcccgggtcgacccacgcgtccgcccacgcgtccgcacgaaaaccctaaaccctcgctacccggcggcggctacaagctcttcgtcggttcagcaccatgaggccaccggctagaggaggacgtggtgggaggggtggcaggttcgatggcggctgccgtgggggctgcggcggctagccgtgggtttggcggtggtagaggcctgagaggggacaggggagggagaggtggcaggacccgcagaggcggccgtggcggctgtggcaggggtggccgcggcggtggcatgaagggcgtgagcaaggccgtcgtggtggcgcacaagcacgccggtgtcttcatcttcaagtccaaggaggatgcgctctgcactaagaacatggtcccgggagagtccgtgtactgagagaagcgtgtcttcgttcagaatgaggatggaacaaaagttggattca

SEQ ID NO: 85916 - DNA, 502 bp, Zea mays
  unsure (1)..(502): unsure at all n locations
gagtaagctgttctgagcaagcccacatcgnagcacgtacnactcttnnnnntcggaattcccgggtcgacccacgcgtccgagatcatccacagagaccatcttccgtgtaagagacaagagagtgggagagaggggggatatatggcagacatcgcgttgctggtgacggagcagttcgacaagaagctgaagcgaggcgcccccggcgaggacatcggcggcggcgccggcgaatataggaggaacttcggggccgtggccaaggtgtggagctcgtgggtggagtccgccgccgccgcgtccggggtgaggttcagcgtctcggtgcacctggagcccaagaccgcgctcgccctggccgccgacgacggcctcttctccgcctagctagctagctagctactagtgtcgcctagctgcttncaggcccttcttctgagtgagcatcagtagtcgagttcttctggaccatataatacaatgcgcgggtcacctgtan

SEQ ID NO: 85917 - DNA, 500 bp, Zea mays
  unsure (1)..(500): unsure at all n locations
gagttagagggattgggcctagctctcgctccatcgctactacgttccgntcggaattcccgggtcgacccacgcgtccgatgcaaaaccctcccatctcttaccctttgccgccgtctctgctctcaagagcgccagggcgtcagaaaagaagcagtcgaacccgatgcgggagatcaaggtgcagaagctcgtgctcaatatctccgttggagagagtggagatcgactcacccgcgccgccaaggtgttggagcagttgagtgggcagtctccggttttctccaaggcaaggtatactgtgaggtctttcggtattcgtcgtaatgagaagattgcatgctacgttacggtcaggggttagaaggcaatgcagcttcttgagagtggccttaaagtgaaagagtatgaacttctgaagaggaacttcagtgaatctggctggtttgggtttggtattccaggacccattgatccttggattaagtatgaccccgtta

SEQ ID NO: 85918 - DNA, 510 bp, Zea mays
  unsure (1)..(510): unsure at all n locations
ggttaggagggtcngngctcgatgacgggaagtatataggatgcttctaccggtccggaattcccgggtcgacccacgcgtccgagcgggggcggcaagcaaccacgggcggagctcggagcgtcctcctcctcccgtctgtaaattcccctccttttcttcctccatatataggggccatcagatccaagaagagggaaaagcaccaaggaccttcggcgcccgttcaggatccacatcttcccgagcgagttcttggttgacctcttcccccttcggaccacctgcaaggctcttggtgtagcttgccactctcaccaatcaagttttcatgtctgatctcgacattcagatcccaactgccttcgatcccttcgctgaggccaatgctggggactctggtgcggcagcagggtcaaaggactacgttcacgtgcgcatccagcagcgtaatggtcgcaagagcctgactaccgtccagggattgaagaaggagttcagctacagcaa

SEQ ID NO: 85919 - DNA, 556 bp, Zea mays
  unsure (1)..(556): unsure at all n locations
aganagnggagggttagaggttaagatgaatctgctttgttgttactcttgagaggaatgatgagtgttctgcagttcccggatcgccgggtcgacccacgcgtccgccaatccagatcagcaaagcggcagtgcgtagagaggatcgtcgaacagaacagcatgaagatggtcatcgttctcgtcgtgtgcctggctctgtcagctgccagcgcctctgcaatgcagatgccctgcccctgcgcggggctgcagggcttgtacggcgctggcgccggcctgacgacgatgatgggcgccggcgggctgtacccctacgcggagtacctgaagcagccgcagtgcatcccgctggcggcggcgccctactacgccgggtgtgggcagccgagcgccatgttccagccgctccggcaacagtgctgccagcagcagatgaggatgatggacgtgcagtccgtcgcgcatcagctgcagatgatgatgcagcttgagcgtgccgattgccgcagcaacagcctgtccgagccagcttttatgcagcaccagcatcaac

SEQ ID NO: 85920 - DNA, 522 bp, Zea mays
  unsure (1)..(522): unsure at all n locations
gaggtaggaatttgttatgataatgggtgtaggagagcattgcttgtaccggtccggaattcccgggtcgacccacgcgtccgctgaaccccgctgcttatttgcagcagcaaatactactaccatttagccagctagctgcagcaaaccgtgcttccttcttgacacagcaacagttgctgcctttctaccagcagtttgcggctaaccccgcaaccctcttacaactacaacaattgttgccctttgtccaacttgctttgacagacccagcggcctgctaccaactacacatcattggtggtgccctcttttagattgcttattagtcgtaattcaataataaagtttcttggatgatgtatgttgccaaccagaaatatgaagttacatttccagaaaaagaacctactagcgcatgatccgactagatgtggtgaacgctgtatcctactaggggctgccgttctagagtatccaagcttacgttcgcgtgcatgtaactgcatacctnttgtatag

SEQ ID NO: 85921 - DNA, 495 bp, Zea mays
tgtatgggttttgtcatgttgaggggggagattgttacactgtcggaattcccgggtcgacccacgcgtccgactgaaatgaggatagtatcgcagctttcgtgattaaaacctgaatcacccacagcggtgttctaagtactcagccagtggtatttactggttgacctactgtagtttgcgtcggaatagatttgtttttttactcttcgtggggcagttttgtactggtggattcataaggactctgattatggtgcgttcggaacttataataataagcacatgaaattttgcttcaaaaaaatactaccattcaaacagataaaaagggcggccgctctagaagatccaagcttacgtacgcgtgcatgcgacgtcatagctcttctatagtgtcacctaaattcaattcactggccgtcgttttacaacgtcgtgactgggaaaaccctggcgttacccaacttaatcgccttgcaggacattcccctt

SEQ ID NO: 85922 - DNA, 503 bp, Zea mays
gagttaggctgatggctcatgtaaaagatttagtagcacactctcggaattcccgggtcgacccacgcgtccgcccacgcgttcgaacggagccgacatgcttgagatctaaacccaagtcgtgcctacggtccggtcacccgtcgctccacgcaaccatgttgaggaggaagaccagggatcccaaggaggagaacgtcaaccttggacccactgtccgtgaaggagagtatgtctttgatgttgatcacatctttgcatactacaatgacacctacattgatatgactgatttgtctggtaaggaaactctggttcggatcaccggcggcatgaaggtgaaggctgaccgagactagaccgaaccttacgctactatgcttactgctcaagatgtatcacatagctgcaaggagcttggcattactgcactgcacattaagcttcgtgccaccggaggcatcaagaccaatacccctggacctggggcccagtctggcctt

SEQ ID NO: 85923 - DNA, 510 bp, Zea mays
agttagaaggcttgtgctcgaagtcccgattatataggatggctcgtaccggtccggaattcccgggtcgacccacgcgtccggctgcaacagtttatgccagtgctcagtcaactagccatggtgaaccctgccgtctagctacaactactttcatctagcccgctcgcggtgggcaatgcacctacgtacctacaacaacagttgctgcaacaaattgtaccagctctgactcagctagctgtggcaaaccctgctgcctacttacaacagttgcttccattcaaccaactggctgtgtcaaactctgctgcgtacctacaacagcgacaacagttacttaatccattggcagtggctaacccattggtcgctaccttcctgcagcagcaacaacaattgctgccatacaaccagttctctttgatgaaccctgccttgcagcaacccatcgttggaggtgccatcttttagattacatatgagatgtactcgacaatggtgccctac

SEQ ID NO: 85924 - DNA, 508 bp, Zea mays
  unsure (1)..(508): unsure at all n locations
ngagtnaagagagacttggttcatgggaggggggagtgagtagcatngctcgtaccggtccggaattcccgggtcgacccacgcgtccgctcgagtccaagatcatcctcgatcgggagacgcagaggtcccgcggcttgggcttggtcaccttctccacggaggaggcgatgcggaacgccatcgagggcatgaacggcaaggagctggacggccgcaacatcaccgtcaacgaggcccagtcccgcggcggccgtggaggcggcggcggtgggtacggtggtggccgtggaggcggcggctacggcggtggcgggcgccgtgatggcggtggcggctacggcggtggcggcggctacggtggcagcggctgctacagtggtggtggcggcggctacggcggtggcaaccgtggcggcggctacggcaacttcgacgggaactggaggaactgaacggtggggcccgcgcggccaagttatcctgatcgctaccgtgatgtttaacc

SEQ ID NO: 85925 - DNA, 518 bp, Zea mays
gaggttagaatgttgtatgtttgatgtgggaaggagatgatgcttctaccggtccggaattcccgggtcgacccacgcgtccgagaaacacaccaagcgaagctacctatcaacgacttaacaacaatggctaccaagatattagccctccttgcgcttcttgccctttttgtgagcgcaacaaatgcgttcattattccacaatgctcacttgctcctagtgccattataccacagttccttcgaccagttacttcaatgggcttcgaacacctagctgtgcaagcctacaggctacaacaagcgcttgcggcgagcgtcttacaacaaccaattaaccaattgcaacaacaatccttggcacatctaaccatacaaaccatcgcaacacaacagcaacaacagttcctaccagcactgagccaactagatgtggtgaaccctgtcgtctacttgcaacagcacgtgcttgcatccaacccacttgctctggcaaacgtagctgcataccaacaaca

SEQ ID NO: 85926 - DNA, 544 bp, Zea mays
  unsure (1)..(544): unsure at all n locations
tagtattaggtgngtggaggtagatagttgnttatgttgatgggggaatatgtatactctaccggttcggaattcccgggtcgacccacgcgtccgaggaacacaccaagcgatgcttcctatttgcgaattaacaacaatggctaccaagataggagcacctacttgcgcttcttgcccttcatgtgagcgcgtcaaatgcgttcattattccacaatgctcacttgctcctagtgccattatgccacagtttctccgaccagatacttcaatgggcttcgaacacctagctgtgcaagcctactggctacaacaagctcttgctgctagcgtcttacaacaaccatttaatcaattgcaacagcaatccttgtcacatctaaccatacaaaccatcttatcacaacagcaacaacagttcctaccagcactgagccaactagatgtggtgaaccctgtcttctacttgcaacagcaagtgctagcatccaagctactagctctggcaaacgtagctgcataccatcatactcaacaattgct

SEQ ID NO: 85927 - DNA, 510 bp, Zea mays
  unsure (1)..(510): unsure at all n locations
gaggagaatgtgtatgtgtgattttttaggagatagtctctaccggttcggaattcccgggtcgacccacgcgtccgaactggttgttggtggattggaccgtgtttatgaaattggaaagcaattcaggaatgaaggtattgatttaacacacaatcctgaattcacaacttgtgaattttatatggcgtatgcagattataatgatttgatggagcttactgaaaccatgttgtcaggcatggttaaggacctgacaggtggctataagataaaatatcatgcaaatggagttactaaccccccaatagaaattgatttcacgcctaccttcagaaggatagatatgattaaagatttggaggctatggccaatctcagtataccaaaagatctatcaagtgatgaagcgaatcgttatttgatagaagcatgtgtgaagtatgatgtgaaatgtccaccttcccaaacgacatcgcggttgcttgacaagttggttggccatttctn

SEQ ID NO: 85928 - DNA, 493 bp, Zea mays
  unsure (1)..(493): unsure at all n locations
gtnatatgctcgtgtcagtgaggggagtagttgcacactttcggaattcccgggtcgacccacgcgtccgcgacgtcggactcagcgagaaaggtggtcgagctgaaggctttcaacaagtttgagagcacatctgatgccctatccgcggcaaccctgattattgatagcaagcctagcaagggtctgcgcaagttcttgcagaaacattgtgagggtgaaacattagcagtagctgattctaagcttggaaatgctataaaagaaaagctgaaaattgactgccttcacaatagtgctgtgatggacctgatgagaggactgagaaatcagcttaccgagcttataactgggtcgggtgcacaagaccttggtccaatgagcttgggattgtcccacagcttgtctaggtataagctgaagttcagccctgagaaggttgatacaatgatcattcaagccattggattattggatgatcttgacaaggagc

SEQ ID NO: 85929 - DNA, 515 bp, Zea mays
  unsure (1)..(515): unsure at all n locations
gaattggtttntgngagtaatgctgattgatttgggagaggaaaaggtgcaccctttcggaattcccgggtcgacccacgcgtccgcgcaaattgcaccaagaaatccatcgagaggccgtcgacaggggaattaatggcgtcgtcgtctagcagcagccaccgccgcctcatcctcgcagccgccgtcctgctctccgtgctcgcggctgccagcgccagcgccgggacctcctgcgtgccggggtgggccatcccgcacaacccgctcccgagctgccgctggtacgtgaccagccggacctgcggcatcgggccgcgcctcccgtggccggagctgaagaggagatgctgccgggagctggcggacatcccggcgtactgccggtgcacggcgctgagcatcctcatggacggcgcgatcccgccgggcccggacgcgcagctggagggccgnctaaaggacctgccgggctggccgcgggaggtgcaaaggggatttgcccgccccccttt

SEQ ID NO: 85930 - DNA, 497 bp, Zea mays
gagtaggggattgatattgaaagggaagtagtttcatcacttccggaattcccgggtcgacccacgcgtccgcccacgcgtccgcggacgcgtgggtggcgacacaactattgcatttctcctgatggagaaggaaatgtacactggcatgtcagacttgcagcctgcttcacctacaattgatcgagggattgcactccaaaagatgattcacttcatcacaatggcccttggaggtgatggctacttgaattttatgggaaatgagtttggtcacccagaatggattgactttccaagagaagggaacaactggagctatgataaatgcagacgacagtggagccttgtggacactgatcacttgcggtacaagtacatgaatgcgtttgaccaagcgatgaatgcgctcgatgagagattttccttcctttcgtcgtcaaagcagatcgtcagcgacatgaacgatgaggaaaaggttattgtctttgaacgcc

SEQ ID NO: 85931 - DNA, 508 bp, Zea mays
  unsure (1)..(508): unsure at all n locations
tagtnaaggagatttgagctacgacatgaggagttattatcatcactcgtaccggtccggaattcccgggtcgacccacgcgtccgcgatgctggggctgctaaggagctgatggcaaacctagtaagcatgcagtcgtcactttctgatgttaacaagttgatcaaggagatccggtctgatgtttctgaagtagttgcagctgacgagtttgagtacaaggatccagttgatggctctgtgtccaagcaccacggcatccgatacctcttcggagatggttcacgactggtgttccgtctatccggaaccggttctgttggtgccaccatccgtgtctacatcgagcaatacgagaaggattcctgcaagaccggcagggattcacaggaggcccttgctccactgagttgatgttgcgctcaagctctccaagatgcaagagtacactggccgctctgcccccaccgttatcacatagatttttgaagagtgatttacaatgagg

SEQ ID NO: 85932 - DNA, 509 bp, Zea mays
  unsure (1)..(509): unsure at all n locations
agagttaaggagctcngcgcctagcctcttgcattgatcgtcangctcgtaccggtctcggaattcccgggtcgacccacgcgtccgcaaagatttgtgagggtgatccgcgcttagaagagatggctaagatcgccgcggcgggggcggcggcgctgtgcttcgcggccctggtggccgtggccgtctgccaaggcgaggtcgagcggcagaggctcagggacctgcagtgctggcaggaggtccaggagagcccgctcgacgcgtgccgtcaggtcctcgaccggcagctaaccggcggctgcggctgcagcagcgttggcccgttccggtggggcaccgggctccggatgcggtgctgccagcagctccaggacgtgagccgcgagtgccgatgcgccgtcatccggagcatggtcaggggctacgaggaggccatgccgccgctgcagaaaggctggtggccatgggggcggcagcagcagccgccgccgaagggaggaggaggc

SEQ ID NO: 85933 - DNA, 527 bp, Zea mays
  unsure (1)..(527): unsure at all n locations
tgtgtagaggnattgatgagtaaggaaagcttgtgatagtcatgttggggtaaaaagaatacttctaccggttcggaattcccgggtcgacccacgcgtccgattgagaccaactagcaacatagaaagcacaatagtgtaccaacaatggcagccaaggtattttgcctccttatgctccttggtctttctgcaagtgctgctacggcgaccattttcccgcaatgctcgcaagctcctatagcttcccttcttcccccgtacctctcaccagcggtgtcttcggtatgtgaaaacccaattcttcaaccctacaggatccaacaggcaatcacagctggcatcttacctttatcacccttgttcctccaacaatcatcagccctattacatcagttacctttggtgcatttattggcacaaaacatcagggcacaacaactacaacaacttgtgctagcaaaccttgctgcctactctcagcaacagcagtttcttccattcaaccaactagctgcattgaactt

SEQ ID NO: 85934 - DNA, 499 bp, Zea mays
  unsure (1)..(499): unsure at all n locations
tgtaaagtccttgagttcgaatcctgcccagtacnatcactntcggaattcccggctcgacccacgcgtccgccgacgcgtccgcggacgcgtggggttttatatattacctggcattgaatccgtgtacgcgtgggatggaaaggtacaatctgatgctgaagaattactcatcatcaagaccagggaatcacttctggatgccttgactgcacatgtcaaagccaatcatgaatatgatgttcctgaagttattgctctgcccataactggtggtaacaccaagtatttggaatggatcaagaacagcacccgggacaagtgatctctttttttttggagctcgacataatgcgatgatcgaagtgcccatggctccttagctcttccagtggcttgcacacaagggtgtatcctctcttgacctggacatctcaattacgttgctgtaccgaatccatatctaccatcttcaggtaacaagtgatttggtgtcccg

SEQ ID NO: 85935 - DNA, 510 bp, Zea mays
tagttttggcatgatctgataaagtggaggggggagaaatctgtactactcccggaattcccgggtcgacccacgcgtccgcccacgcgtccgccaacaagcaacatataaagtggaatccagtagcaacaacagaacggcaatggcgaccaagatattttccctccttatgctccttgctctttctgcatgtgttgctaacgcgacaattttccctcaatgctcacaagctcctatagcttcccttctttcccccataccttccatcaatgatagcttcagtatgtgaaaacccagctcttcaagcctataagctccaacaagcaatcgcagcaagcaacatacctttatcacccttggtggttcaacaatcgccagccctatctttggtgcaatcattggtacaaaccatcaaggcacagcaactgcagcaactcgtgctacctgtgatcaaccaaagtgcttttgcaaaccttttttcctaattttaaaaccaccatttttttcatt

SEQ ID NO: 85936 - DNA, 515 bp, Zea mays
  unsure (1)..(515): unsure at all n locations
ngagtaatggcaagctcgtncatggagttctcgtattagtagtnatngctcgtaccggtccggaattcccgggtcgacccacgcgtccgcggacgcgtgggaacgcaaaaccgcatcctctcatcagcttccttccacatgcgtctggagatctcgccccgtcgccatggacgcgatcgacagcgtggtggatcccctccgcgacttcgccaaggacagcgtccgcctcgtcaagcgctgccacaagcccgaccgcaaggagttcaccaaggtggcggcgcggacggcgatcgggttcgtcgtcatgggcttcgtcggcttcttggttaagctcatcttcatccccatcaacaacatcatcgtcggttccggctaggcttacaggagtacagggcgactagcatgggagtagtgcaatacttttgggagcaatagataacgaggatcctggtctttcgaatagtattggtaatgaaatttttcgttcggttgcgtttctgatgtaatcgctgtac

SEQ ID NO: 85937 - DNA, 513 bp, Zea mays
  unsure (1)..(513): unsure at all n locations
gagttagggtaatgttgtgcatggagtgtggtgataataggattgctcgtaccggtctcggaattcccgggtcgacccacgcgtccgcggacgcgtgggcggacgcgtgggcggacgcgtgggcggacgcgtgggagaccaacgtggcaacatagaaagcacaatagtgtaccaacaatggcagccaaaatattttgcctccttatgctccttggtctttctgcaagtgctgctaccgcgaccattttcccgcaatgctcacaagctcctatagcttcccttcttcccccgtacctctcaccagcggtgtcttcggtatgtgaaaacccaattcttcaaccctataggatccaacaggcaatcgcagctggcatcttacctttatcacccttgttcctccaacaatcatcagccctattacagcagttacctttggtgcatntattggcacaaaacatcagggcacaacaactacaacaacttgtgctagcaaaccttgctgtctactcttaa

SEQ ID NO: 85938 - DNA, 530 bp, Zea mays
  unsure (1)..(530): unsure at all n locations
agggtagaagttctgtcatcgcgatgtgggggaaatagtattgctcgtaccggtccggaattcccgggtcgacccacgcgtccgcccacgcgtccggaacaagaggatctccaagggaaagaagggtggcaagaaggagaccgtcgaccctttctctaagaaggattggtatgacatcaaggcaccgtcggtgttcagtgtgcgcaacatcgggaagactctcgtatccaggacacagggtaccaggattgcttctgagggtctgaagcacagagtctttgaggtttgcctagctgatcttcagggcgacgaggatcaagcttacaggaaaatcaggctccgtgctgaagatgtgcagggcaggaatgtgctcacaaacttttggggtatgaattttaccactgataaactgagatccctagtgaagaagtggcagacattaatcgaagcccatgttgatgtcaagacaaccgacaactacatgttgcgtttgttctgcatcggcttcacgaagaggcgcccaaaccagn

SEQ ID NO: 85939 - DNA, 501 bp, Zea mays
  unsure (1)..(501): unsure at all n locations
nagtnaaagtttttgatagtggaaggagagtattctgaacccgtccggaattcccgggtcgacccacgcgtccgatgattttgcaaggacaggaagtactgctatcgatacggttgagcttaaggaaggccctctggaacagttcacacatgagatggagccatttctacgcaagcaaggacttccagttcgcttgaacaaaggtgttgtagagttggttgcagaccatgtagtttgtgaggaaggaaagcccctttcgccagaagcagcgcagactctgcggctgcttgggatacaaatggcgacattccgtctataccttgtgtgtcgctggtcgggcgatgactttgaagtttacaaagaaggcttgatgcacctaggagctgatgaatcctcttaagcttttgtttcctgtatacacaaagggctcacttgctgtctttgctgggacagcttttggtaactgtgcgtgtggccatgtaccaaggagtattggaaggt

SEQ ID NO: 85940 - DNA, 505 bp, Zea mays
gagttaggccagtctgattatgaatgggagtaatatcatcactcctcggaattcccgggtcgacccacgcgtccggctgcattgaactctgctgcttatttgcaacaacaactagtactaccattcagccagccagctgctgcctaccaccagcaatttcttccattcaaccaactagcagcattgaactctcctgcctatgtacagcagcaacaactactaccattcagccagctagctgctgtgagccctgctgccttcttgacacagcaacaattgttgtcgttctacctgcacgctgcgcctaacgttggcaccctcttacaactgcaacaattgctgccattcaaccaacttgctttgacaaacccagcagcgttctaccaacaacccatcattggtggtgccctcttttagattgcttatgagttatagttcaataataaagtttttttgatgatgtttgtggcttcccagaaataagaaagtacatttctagattctt

SEQ ID NO: 85941 - DNA, 507 bp, Zea mays
  unsure (1)..(507): unsure at all n locations
aggatagtctaggattgcaagtgggacgaggagtacgtgcaacccctccggaattcccgggtcgacccacgcgtccgcccacgcgtccgctcgctagtggctgtcctactcgtgctgcttgccctcgccgccgtgtcctgcacgcgcagcgcacaaaaggagtccgcggctgacaacgccgggatgttggcaggcggcatcaaggacgtgccggcgaacgagaacgacctccagctccaggagctcgcgcgcttcgccgtcaatgagcacaaccaaaaggccaatgctcttctggggttcgagaagcttgtgaaggccaagacacaagtggttgctggcacgatgtactatctcactattgaagtgaaggatggcgaagtcaataagctctatgaagctaaggtctgggagaagccatgggagaacttcaagcagctgcaggaattcaagcctgttgaagagggtgctagcgcctaaggttgtggccacagnccgggtcttgcagga

SEQ ID NO: 85942 - DNA, 513 bp, Zea mays
tgttaagaggcttcgtgcttgttagcatcgaatatattaggatagctcgtaccggtccggaattcccgggtcgacccacgcgtccgcccacgcgtccgcccacgcgtccgcggtacgcgtgggctagcaacatagaaagcacagtgagtgtaccaacaatggcagccaaaatattttgcctccttatgctccttggtatttctgcaagtgctgctacggcgaccattttcccgcaatgctcacaagctcctatagcttcccttcttcccccgtacctctcaccagcggtgtcttcggtatgtgaaaacccaattcttcaaccctacaggatccaacaggcaatcgcagctggcatcttacctttatcacccttgttcctccaacaatcatcagccctattacagcagttacctttggtgcatttattggcacaaaacatcagggcacaacaactacaacaacttgtgctagcaaaccttgctggctactctcaacaaccgcagtttctttcct

SEQ ID NO: 85943 - DNA, 512 bp, Zea mays
  unsure (1)..(512): unsure at all n locations
ggaggtnacgggacttgntnggttggatcaaagatcacanagcattgctcgtaccggtccggaattcccgggtcgacccacgcgtccggatccaacaggcaatcgcagctggcatcttacctttatcacccttgttcctgcaacagtcatcagccctattacagcagttacctttggtgcatttattggcacaaaacatcagggcacaacaactacaacaacttgtgctagcaaaccttgctgcctactctcagcaacagcagtttcttccattcaaccaactagctgcattgaactctgctgcttatttgcaacaacaactaccattcagccagctagctgctgcctacccccaacaatttcttccattcaaccaactggcatcattgaactctcctgcttatttacagcagcaacaactactaccattcatccagctagctggtgtgagccctgctgccttcttgacacaacaacagttattgccgttctacctgcacgctgcgcctaat

SEQ ID NO: 85944 - DNA, 531 bp, Zea mays
agtggtgggtggtgagttagctggtgtgttgtgtgtggggaaaggtatggtgtaccggtccggaattcccgggtcgacccacgcgtccgcggacgcgtgggcggacgcgtgggcggacgcgtgggcggacgcgtgggtgaggatctggagagttgggatgccttgagagctgccttgcccgttggaacagtcagtggtgcaccaaaggtgaaggccatggagttgattgataagttggaagttacgaggcgaggaccatatagtggtggtctaggaggaatatcgtttgatggtgacatgcaaattgcactttctctccgcaccatcgtattctcaacagcgccgagccacaacacgatgtactcatacaaagacgcagataggcgtcgggagtgggtcgctcatcttcaagctggtgcaggcattgttgccgacagtagcccagatgacgaacaacgtgaatgcgagaataaggctgctgcactagctcgggccatcgatcttgcagagtcagcttttgtagacaaagat

SEQ ID NO: 85945 - DNA, 546 bp, Zea mays
  unsure (1)..(546): unsure at all n locations
gagagtatgagnntngtagagttaagacagtatcgtttttgtcatgttgtggaggaaagtatgcttctaccggttcggaattcccgggtcgacccacgcgtccgctggcaccatagaaagcacattagtgttccaacaatggcagccaaaatatggggcctggttatgctccttggtctttctgcaagtgctgctaccgcgaccattttcccgcaatgctcacaagctcctatagcttcccttcttccaccgtacctctcaccagcggtgtcttccgtatgtgaaaacccaattcttcaaccctataggatccatcaggcaatcacagctggcatcttacctttatcacccttgttgctccaacaatcatcagccctattacagcagttacctttggtgcatttattggcacaaaacatcatggcacaacagctacaacatcttgtgctagcaaaccttgctgcctactctcagcaacagcagtttcttacattcaaccaactagctgcattgaactctgctgcttatttgcaacaacaactacca

SEQ ID NO: 85946 - DNA, 529 bp, Zea mays
  unsure (1)..(529): unsure at all n locations
agagatgtgggtcattgaggggagagggttnatcatgatttctgcatatattgnatagctctaccggttcggaattcccgggtcgacccacgcgtccgcccacgcgtccgcggacgcgtgggtctttaatctccttccaaatctgaacgtggatgggctaattaaagcctttgcagtgaaaactaacgacatgatgctggtgatatacctgtcttctctgatccggagcgtcattgcgcttcacaatttaatcaacaataagatgctaaacaaggagcacgagaaggccgaggattcgaaaccaaccgccattcctactgctgccggaagctaaacgtgcttttgatcactgattgcattggtggctaagaaaagggaagaaacttgtgatgacatgttagcacggttgtgctcgaaccaactgtcttgaccttgaatggacattcaatatgtgcattctatgtatgatcaggtcaacggcaagagaaaccaattacactgtatgagctttagatcacacctcaagtta

SEQ ID NO: 85947 - DNA, 502 bp, Zea mays
tgtaatgttattggtagggggaggaggatagtcttctaccgcgtccggaattcccgggtcgacccacgcgtccgctagcaacatagaaagcacaatagtgtaccaacaatggcagccaaaatattttgcctgcttatgctccttggtctttctgcaagtgctgctaccgcgaccattttcccgcaatgctcacaagctcctatagcttcccttcttcccccgtacctctcaccagcggtgtcttcggtatgtgaaaacccaattcttcaaccctataggatccaacaggcaatcgcagctggcatcttacctttatcacccttgttcctccaacaatcatcagccctattacagcagttacctttggtgcatttattggcacaaaacatcagggcacaacaactacaacaacttgtgctagcaaaccttgctgcctactctcagcaacagcagtttcttccattcaaccaactagctgcattgaactctgctgcttatttgc

SEQ ID NO: 85948 - DNA, 506 bp, Zea mays
  unsure (1)..(506): unsure at all n locations
nagttagtctatgtcgttagtggagatttgtgggaattgtatcactcccggaattcccgggtcgacccacgcgtccgggaaaccctagccgccatatctcacgatccactcgagcaccaagccgagggaaggtgaggagcgatggcgcgcggcgtggtgtcggcgaagggcggcgcggtcgcgggcaagaagaaggggtcggtttccttcacgatcgactgcaccaagccagtggaggacaagatcatggaagtcgcctcgctcgagaagttcctgcaggagcgcatcaaggtcgccggcggcaaggctggcaacctcggcgactccgtcaccatctctcgcgagaagaccaaggtcaccgtcacctctgacggacccttcttcaagaagtacctgaagtacttgaccaagaagtacttgaagaagcacaacgtgcgggattggctacgcgtggttgctgccaacaaaggacggaacgtgtatttacttcggttcctaaacattgg

SEQ ID NO: 85949 - DNA, 511 bp, Zea mays
  unsure (1)..(511): unsure at all n locations
agttagaactagagttntgcatgcatttcgccatgagtagtagtgctcgtaccggtccggaattcccgggtcgacccacgcgtccgcgatcgacaccatgagggtgttgctcgttgccctcgctctcctggctctcgctgcgagcgccacctccacgcatacaagcggcggctgcggctgccagccaccgccgccggttcatctaccgccgccggtgcatctgccacctccggttcacctgccacctacggtgcatctcccaccgccggtccacctgccgccgccggtccacctgccaccgccggtccatgtgccgccgccggttcatctgccgccgccaccatgccactaccctactcaaccgccccggcctcagcctcatccccagccacacccatgcccgtgccaacagccgcatccaagcccgtgccagctgcagggaacctgcggcgttggcagcaccccgatcctgggccagtgcgtcgagtttctgaggcatcagtgcaacccc

SEQ ID NO: 85950 - DNA, 513 bp, Zea mays
gagatttaagttagaacaggttgtgatgagataagcatatattggatactcgtaccggtccggaattcccgggtcgacccacgcgtccgctttgttggaaggaacgatggagcagtccttcatcatgatcaagcccgacggcgtccagcggggcctgatcggggacatcatcagtcgcttcgagaagaaagggttctacctcaaggggatgaagttcatgaacgtggagaggtccttcgcgcagcagcactacgctgacctttccgacaagcctttcttccccgggttggtggagtacatcatttccggccccgtggtggcgatggtgtgggaggggaaggacgtcgtgttgactggccgcaggatcattggggccaccaggccttgggaggcagcccccggtaccattcgtggggactacgccgtggaagtcggcaggaatgtcatccatggaagcgactccgtggagaacgggaagaaggagatcgctctctggttccctgaaagtgtggc

SEQ ID NO: 85951 - DNA, 538 bp, Zea mays
  unsure (1)..(538): unsure at all n locations
ggatgttgggttgagtggagttgagatgcttncgcatacataaagatttattgcaaactgtaccgtttcgattcccggtcgactccacgcgtccgctgacgacccacacgagcacttagccgttgggaggggcgatggctagaggtgtggtgtgagcgaagggcggcacggccgcgggcaagaagaaggggtcggtcgccttcacgatcgactgcaccaagcccgtggaggacaagatcatggagatcgcctcgctcgagaagttcctgcaggagcgcatcaaggtcgccggcggcaaggccggctacctctgcgaatccgtcatcatctcccgcgagaagaccaaggtcaccgtcacctgcgactggcccttctccaagaggtatctgaagtacttgaccaagaagtacttgaagaagcacaaggtgcgagattggctccgtgtgattgcagccaacaaggaccacagcgtctatgagctgcggtacttcaacattgctgagaacgagggcgaggaataagattagactgcattgcn

SEQ ID NO: 85952 - DNA, 526 bp, Zea mays
aggttaagaagggttttcaatgtattgttggggaagaaagtatagctgtaccggtccggaattcccgggtcgacccacgcgtccggtgtcgaccaccatgagtggaaccccatggtggacgtgcacctgccgtcggacggctagaccaactacttgctcgagacactcgaggctggaaagcggcagagcacggaggccctgctatagcagctgttcctggaagtgcacgacgacgtgcgattgctccacttcatgaaacgtctggatggacagaatgtcgtgtacatcatgcgggacgcgatggcagtggatcgtggatgcaggacgtgcagatgatgatgctaggcacctgacgcgcagacatggaacgaatgctgcagcactcagagcgtgagcatactaacacgtgccgctgatagatcgggttctctgagcctatggtgcatcgtatcacagcagccgcagacgtgctgatgataccaactggctacgagccctgctgcctgtaacagctatagcaactgct

SEQ ID NO: 85953 - DNA, 505 bp, Zea mays
  unsure (1)..(505): unsure at all n locations
ngagtntagagtgattgatattgaaggggaagtattctcaaccctttcggaattcccgggtcgacccacgcgtccgcggacgcgtggggcaaaaattttcttcagtgctgcagttgaagcctgggatgcaaaagtttatgtcaaagttgaagataacattaatcttgacttagctgggttaattgagatgctcgaaggccgtccaggtagccaaggattgtacatgggttgtatgaaatcagggatggtcataagtgaagagggccaacaatggtatgaacctgagtggtggaaatttggagattcaaaaacgtattttcgacacgcttctggttctttgtttatcctctcaaaaaatttggctcgctacatcaacataaatagcgcgtcactgcagagttatgcacacgatgatatatcagtaggttcatggatgatgggactgaatgcaacttacgtggatgatgaccggttgtgctgcagcagttccagacaagagaaaatc

SEQ ID NO: 85954 - DNA, 513 bp, Zea mays
  unsure (1)..(513): unsure at all n locations
naggttagggcagagattgttatgtcgaagggggagaaagagtagacttcgtcgcgattcccgggtcgacccacgcgtccgcaggaaagtgttcgtcctcatggcgcctccgcagccgaagtagggcctcttcctgggcatcaacaagggccatgtcgtcaccaagcgcgagctgcctctgcgcccgtcccaccgcaaggggaaagcaacgaagagggtgtacatggtcaggggcctgatcagagaggttgctggctttgctccttatgagaagcgtatcaccgagcttctgaaggttggcaaggacaagcgcgctctgaagcttgccaagagaaagcttggaactcacatgagggcaaagaagaagagagaggagatgatcggcgtcctcaggaagatgagatcggctggtacgcacactgacaagaagaaataaagcatttcaagtacatgaatgtggcaaccagagattatcaactgtgttctttcactacctctaggaactagacatgg

SEQ ID NO: 85955 - DNA, 514 bp, Zea mays
  unsure (1)..(514): unsure at all n locations
gaggttnagaaggctggtgctcggtatctacgaatatattagtcagagctcgtaccggtctcggaattcccgggtcgacccacgcgtccggtcagcgttgaagggctcccacttcattgaattgtgcgctcagcggcatatgccttggattttccttcaaaacattactgggttcatggtcggatcaaagtctgaagctagtggaattgccaaagctggagcaaagatggtcatggcagtttcctgtgctaaggttcctaaaattacaataattgttggtggaagttttggggctgggaattatggaatgtgcggacgtgcatatagcccaaactttttatttctttggccaactgctaggatatctgctatgggtggcatccaggcagctggagttctcgctcaaatagaatagaacaacataaggagacaaggagtggagtggagcaaggacgaggaagaagccttcaaagccaaagtcgtggatgcttactacagagaaggaagccctacc

SEQ ID NO: 85956 - DNA, 512 bp, Zea mays
  unsure (1)..(512): unsure at all n locations
gagggagatctgagttgtaatagtagaaagtcgcttattgaatncttgtaccggtccggaattcccgggtcgacccacgcgtccgattttgagcattcagaaacacaccaagcgaagcgcactagcaacaacctaacaacaatggctaccaagatattatccctccttgcgcttcttgcgctttttgcgagcgcaacaaatgcgtccattattccacaatgctcacttgctcctagttccattattccacagttcctcccaccagttacttcaatggccttcgaacacccagctgtgcaagcctataggctacaacaagcgattgcggcgagcgtcttacaacaaccaattgcccaattgcaacaacaatccttggcacatctaacaatacaaaccatcgcaacgcaacagcaacaacagttcctaccagcactgagccacctagccatggtgaaccctgtcgcctacttgcaacagcagcttgttgcattcaacccaattgcgttataaaa

SEQ ID NO: 85957 - DNA, 505 bp, Zea mays
  unsure (1)..(505): unsure at all n locations
agtnnagaagcgtgtatattgatttggcagagagagaatgctgtaccggtccggaattcccgggtcgacccacgcgtccgcccacgcgtccggttcttagatcgattgctcgccaggctgttggcgaggagtcgtcgaccctcacggcagccatgtctgtggagctcatcctgtggcttttctccttcgtctccgtcatggtcctcatcggcctcaccgcataccagcttatctgtctgtcagatttggagtatgattatatcaacccatatgattcatcgtctcgcatcaacgctgtggtgctgatagaatactcactccaaggggccctgtgtgcttctttcctcttgacattgcattggttcccgtttctagtcatgacaccagtaacatactaccatgtcaaactgtatttggctcggaaacatcttgtagatgtcactgaaatttttagacaattaagtgacgagaagaagtacaggatgatcaagcttgccttctactn

SEQ ID NO: 85958 - DNA, 517 bp, Zea mays
agtaaagagagtttgataattgacacgcggggacgatgagaaagcttctaccggtccggaattcccgggtcgacccacgcgtccgatccagtagcaacaatagagcaacaatggcgaccaagatattttccctccttatgctccttgctctttctgcatgtgttgctaacgcgacaattttccctcaatgctcacaagctcctatagcttcccttcttcccccataccttccatcaatgatagcttcagtatgtgaaaacccagctcttcaaccctataggctccaacaagcaatcgcagcaagcaacatacctttatcacccttgtttcaacaatcgccagccctatctttggtgcagtcattggtacaaaccatcagggcacagcagctgcagcaactcgtgctacctgtgatcaaccaagtagctctggcaaacctttctccctactctcagcaacaacaatttcttccattcaaccaactgtctacattgaaccgtgctgcttatttgcagca

SEQ ID NO: 85959 - DNA, 538 bp, Zea mays
  unsure (1)..(538): unsure at all n locations
naggttatgggtgnngtggagttnagaagatcgttatgtaagtattgtaggagagaaaagttgtaccggtccggaattcccgggtcgacccacgcgtccgaggacgcgtgggcggacgcgtggctatatctggctcagggcatcctccagcgtgacccgtgctaggttctcgaccagagatgaatgggccagctggttaagcttgctacagacaggggctagcaaagctaggcctaacttgaacgtggacattggtggagaacatggtggagagcctcaatcggtagctttattcgccaagactgggctggattacgttgctcgctcccttatcagggtcccgatcgctatgctagctgcatatcatgtgccagtctgagggtgcctctgttaggtcgcagccggatcacctgctggtgctacatgtgatgaatcatgatactactatgacagagccatgctactgtgagagcatcagtagcagcgctcataccagctgcagtcacggaactgtgctgatcaatgtcaaactcaccta

SEQ ID NO: 85960 - DNA, 508 bp, Zea mays
  unsure (1)..(508): unsure at all n locations
tgagtnnaagaagtatcttttcacggggtgttggggagatagtaacctctccggaattcccgggtcgacccacgcgtccgggccatggcaaaggtggtggaattgggcatgacatgggtggtggattcggcaaaggcggtggtggtcttggcggcggtagtggctacggtgctggtggcggcgggggccttggtggtggaagtggacatggcatgggtgccggattcggcaagggtggtggtcttggcggcggcgatggccttggcggtggaagtgggcatggcatgggtgccggattcggcaagggtggtggtcttggtggcggcggcggcggaggtggtggcggcggcggcggtgggtttggcaaaggatttggctttgggtttggcaaaggcagcgggttcggtggtggtggcggcggtgggggcggcggcggcatcggtgatcaccattgatacgtcagcatgcagcatacgtctnctatggttctatcacttacttttgtatt

SEQ ID NO: 85961 - DNA, 519 bp, Zea mays
  unsure (1)..(519): unsure at all n locations
gggtaagaggctcncgattgaaagggggtaaatgagatgctctaccggtccggaattcccgggtcgacccacgcgtccgcgacaccatcctgaggatgtttcggatccctcgggggtccaagaaggcagagcaagtcgccgccacgctccggacatgcgaggctgagtccccagaggctcatgcctgcgccacctccgagcaggcggcggccgacttcgctgcctcctcgctcggggtcagggccagcaagctggtcgcgctcgtcaccaccgtccatggggggaaggacgccactagatacgtggtggcgcccaacggcatcacacgcatcggcaaggcggcaggggccgcggccgtagtgccgtgccacccgatgccgtacccgtacatggtccactactgccaccagccggcggacgtggaagcgctccgtgttgagctgaccgggctcggagacggtggcgtgacaaccgcgatcgccatgtgccacgccaacaccatgaactgggacgatcgct

SEQ ID NO: 85962 - DNA, 525 bp, Zea mays
  unsure (1)..(525): unsure at all n locations
ngaggtnaaggcaatgttgnttattgaattgttgggggtggggagatagcttgtaccggtccggaattcccgggtcgacccacgcgtccgcggacgcgtggggcaggatttcataatttttggttcagcagttttggagatatcgaattttaaagttaaccatactgctgtctaaaatagattcagtcagttatcttgtcagatgttttagaacttgtagatggcagaatttaattatctattgaatactgaagttgtagagtattttgtgtagatactcctagagtatttgtttgatatcaccgctgttttaattttaaagatacaaaattaacaaacagcgttgctgctgtatggcatgtggttcagggtgggagtctttccactgggtcttggtttcaagtgtaggagtgttttgttgattgatggcaaatgtttgtgaaatatttgtactaagttttatgcccactagcangtggctacactccagatcatgtctagtacatttcttctcttcgatgaagg

SEQ ID NO: 85963 - DNA, 521 bp, Zea mays
  unsure (1)..(521): unsure at all n locations
agaagtctttgtcctactcctaagctactgctcgtaccgcgtccggaattcccgggtcgacccacgcgtccgcccacgcgtccgtttttttttttttttttttttttagaatctggaaatgtaacttctgatttctggttggccacatacatcatccaaaaaactttattattgaattacaactaataagcaatctaaaagagggcaccaccaatgatgtgttgttggtaggaggccgctgggtctgtcaaagcaagttggacaaagggcaacaattgttgtagttgtaagagggttgcggggttagccgcaaactgctggtagaaaggcagcaactgttgctgtgtcaagaaggaagcacggtttgctgcagctagctggctaaatggtagtagtatttgctgctgcaaataagcagcggggttcagtgcggccaattggttaaatggaaagaagttgttgttgctgaaagtangcagtaactaactggctaaatggtaataagtgttgctgcaaataan

SEQ ID NO: 85964 - DNA, 527 bp, Zea mays
  unsure (1)..(527): unsure at all n locations
tggttnatagttttgtctacgaaaggaagtattctcattaccgtccggaattcccgggtcgacccacgcgtccgtgttcctgttgttggaggccatgcgggtattactattctgccactcttctcgcaggccactcctgcaagcaattcgttgtcccaagaagacattgaggccctcaccaagaggacacaagatggtgggacagaggtggttgaagcaaaggcgggaaaaggctctgcaacgttgtccatggcatatgctggtgctgtttttgcagatgcatgtttgaagggtctgaatggagttccagacattgtagagtgctcttttgtgcaatcaactgtgacagagttgccattctttgcctccaaggttcggctcggcaagaatggagtggaggaagtgcttggtctgggtgagctcaacgagttcgagaagaagggcttggaaaacctcaagggcgagctcaagtctttcatcgacaagggtattcaagttgcccacgggaactaggcaccttgccccgt

SEQ ID NO: 85965 - DNA, 515 bp, Zea mays
  unsure (1)..(515): unsure at all n locations
ngggagggtcngttaagaaggaagatattgtcaacctctccggaattcccgggtcgacccacgcgtccgagggaacagaactttatggcagccaacgagatcattgagctcttctgcgagctgattgttacacgccttcctatcatcgcaaaacagaaggaatgtccagcagacttgaaagaaggtatctgcagtttgatatttgcagctccaaggtgctctgaactccctgaacttggtcgcatacgtgacatttttgaaaagaagtatggcaaagattttgtttctgctgcagttgacttgcgcccagatgctgctgttaacaaccttctgattgagaagctgtcgattaagaagccttccgggcaaattaaactgaaagttctgaaggatatagcaaaagagcatcagattgattgggataccactgagagtgagcaagagcttctgaaacctnctgaagaagtgataaaaggccaagtacattttgtgaagcttncaacatgcctgttaaa

SEQ ID NO: 85966 - DNA, 525 bp, Zea mays
  unsure (1)..(525): unsure at all n locations
tagttaaagttttgtctacgaaagatagtattgtcaacncgtccggaattcccgggtcgacccacgcgtccggtgaattcggcccgaggttgaaggaccatatgcagtattgtgttaatcatccagaggaaattaacaagctctccaaggttaaagcccacctatcggatgtcaaagggatcatgatggacaacattgaaaagatattggatcgcggggagaagattgagcttttggtgggtaagacagagaccctacagtcacaggcggacagcttccacaggcatggcagagagttgaggcgaaagatgtggcttcagaacctgaggtttaagctgatggtgggtggcggcattgcggctctgatccttatcatttggctgatggtctgcaagggattcaaatgttagagcacaccaagttgctcgccttttttttttcttttcaagcgtttgatatgcacagactttcaacccaaatggggtttcagtgtcacgggtatcgcaatggtatggacttcaatcc

SEQ ID NO: 85967 - DNA, 515 bp, Zea mays
gggaggttctgtcactcacagtagaatagctatgccgtaccggtccggaattcccgggtcgacccacgcgtccgcggacgcgtgggtgagccaagagctactaggatctttcatgctgaacttctggtttggggttggccacatacatcatccaaaaaactttattattgaattacaactaataagcaatctaaaagagggcaccaccaatgatgtgttgttggtaggaggccgctggatctgtcaaagcaagttggacaaagggcaacaattgttgtagttgtaacagggttgcggggttagccgcaaactgctggtagaaaggccgcaactgttgctgtgtcaagaaggaaacacggtttgctgcaactagctggctaaatggtagtagtatttgctgctgcaaataaacagcggggttcactgcggccaattggttaaatgcgaaaaagtgtggtgctgaaaataggcaatagctaacttgctaaaaggtaataggtgtagctccaatagcc

SEQ ID NO: 85968 - DNA, 528 bp, Zea mays
ggagtgagctgtgtcatgcaaaagaagctcagctactgccgtaccggtccggaattcccgggtcgacccacgcgtccgagcttcccttgttcccccataccttacatcaatgatagcttcagtatgtgaagacccagctcttcagccctataggctccaacaagcaatcgcagcaagcaacatacctttatcacccttgttgatacaacaatcgccagccctatctttggtgcagtcattggtacaaaccatcatggcacagcacctgcagcaactcgtgctacctgtgatcaaccaagtagctctggcaaacctttctccctactctcagcaacaacaatgtcttccattcaaccaactgtctacactgaaccctgctgcttatttgcagcaacaactattaccattcagccagctagctactgcctactctcagcaacaacgacttcgtacatttaaccgaatggccggactgaaccccgctgcttatttgcagcagcaaatactactaccaatttaccagctagg

SEQ ID NO: 85969 - DNA, 593 bp, Zea mays
  unsure (1)..(593): unsure at all n locations
agtttaagagtctgtatgcacgtataaagcacataattgncactgctcgtactcggttctcggaattcccgggtacgacgccacgccgtaccggcaacaaaggcctaagaacgaagacacgaatagacggcatgactactgtcgtgaatgaggaactggcgtgaagtggatctgaatgcttggatggacttacgcagtcctgaaaagaggcatacatgatgacggaatacttcagaagtttctacgcaactcacgtagcacaaggcacttcaggagtatgacccatcgctagtgggttgagagcacacttcaactggatgaaaggagatgctttaatctcaaaggctttagctattcattccactcgaaagctacagcatgatctactatgaggagttactacaacagacaagcaagtcaaactctcaagctgtatgccagaagaatgttcatatgtgctgaatctgatgaccttgttccaaaatatctgagctatttgaggtgtattgttgactcagacgcactgtacgttgatgtgtcacgagatatgctccaacaacataacaagctgaacactatcaggaatatctgat

SEQ ID NO: 85970 - DNA, 529 bp, Zea mays
  unsure (1)..(529): unsure at all n locations
nggaggctagatctgtgcctgcnttctactccctccgnagtancgctaccggtccggaattcccgggtcgacccacgcgtccgtgagaccaactagcaacatagaaagcacaatagtgtaccaacaatggcagccaaaatattttgcctccttatgctccttggtctttctgcaagtgctgctacggcgaccattttcccgcaatgctcgcaagctcctatagcttcccttcttcccccgtacctctcaccagcggtgtcttcggtatgtgaaaacccaattcttcaaccctacaggatccaacaggcaatcacagctggcatcttacctttatcacccttgttcctgcaacaatcatcagccctattacatcagctacctttggtgcatttattggcacaaaacatcagggcacaacaactacaacaacttgtgctagcaaaccttgctgcctactctcagcaacaagcagttcttccattcaaccaacttgctgcatttgacctgggttttattttcgaccaaccac

SEQ ID NO: 85971 - DNA, 531 bp, Zea mays
  unsure (1)..(531): unsure at all n locations
agttaggtgttgtcctagctagatgtatgctcatacncgtccggaattcccgggtcgacccacgcgtccgaacaacagttgttgccgttctacctgcacgctatgcctaacgctggcaccctcttacgactgcaacaattgctgccattcaaccaacttgctttgacaaactcaacagtgttctaccaacaacccatcattggtggtgccctcttttagattgcttatgagttatagttcaataatgaagttttttggatgatgtttgtggcgtcccagaaataagaaagtacatttctaaaaaaaaaaaaaaaaaaaaaaaaaaaaaaaaaaaaaaaaaaaaaaaaaaaaaaaaaaaaaaaaaaaaaaaaaaaaagganaaaaaaaaaaaaaaaanaaaaaaaaaataaaaaaaaaaaaaaaaaaaaaaaaaaaaaaaaaaaaaaaaaaaaaaaataaaaaaaaaaggggggcctttttaaaaggctccaattttttaaacgcgggtttgcaaacttaaatttttttttc

SEQ ID NO: 85972 - DNA, 519 bp, Zea mays
  unsure (1)..(519): unsure at all n locations
nagttgatgctgtngcatcgaaaggaagtattgtcatactcgtccggaattcccgggtcgacccacgcgtccgtcccaatcctctcttacgccgatttctaccagctcgcgggagttgtggccgtggaggtcaccggtgggcctgagattcccttccaccccggtagggaggacaagcctcagcccccacctgagggccgccttcctgatgccactaagggttctgaccacctgaggcaagtttttggcaagcagatgggcttgagcgatcaggacattgttgccctctctggtggccacaccttgggaaggtgccacaaagagcggtctggtttcgagggggcctggactacaaaccctttggtctttgacaactcttacttcaaggaacttctgagtggtgataaggagggccttcttcagctcccaagtgacaaagccctgctgagcgaccctgtttttccgcctcttgtcgagaaatatgctgcggatgagaaggctnntcttgatgactacaan

SEQ ID NO: 85973 - DNA, 525 bp, Zea mays
  unsure (1)..(525): unsure at all n locations
aggttagagttttgttcctccacgtcttccatccnatacctgtccggaattcccgggtcgacccacgcgtccgctttctgcaagtgctgctacggcgaccattttctcgcaatgctcacaagctcctataggttccgttcttcccccgtacctctcaccagtgttgtcttcagtatgtgaaaacccaattcttcaaccctacacgatccaacatgcaattgcatcaggcatcttacctttatcacccttgttcctccaacaatcatcagccctattacagcagttacctttggtgcatttattggcacaaaacatcagggcacaacaactcgtgctagcaaaccttgctgcctactctcagcaacaacagttacctttggtgcataatgtggcacataacatcacggcacatctactacaacaactcgtgctatgcaaccttgctggctacttttagcaactccagtttctgtcattaacccaactatctgcattgaactctgctggttatttgcaacaaccact

SEQ ID NO: 85974 - DNA, 531 bp, Zea mays
  unsure (1)..(531): unsure at all n locations
aggtaggagctgtgtctagattaagacaatatagtattgctcgtaccggtccggaattcccgggtcgacccacgcgtccgcttgctttgacagacccagcggcctcctaccaacaacacatcattggtggtgccctcttttagattgcttattagttgtaattcaataataaagttttttggatgatgtatgtggccaaccagaaataagaagttacatttccagattctaaaaaatacaaaaaatgagtataagaaacaaaataaaaaaaaagggcggtcgctctaaaggatccaagcttacatacgcttgcatgcgacgcagtcactgttctatagtgtcacctgaattaaattcactggccttagtttaacaacngtctagactggtaaaaccctgacgttacccaacttaatcgtcttgcatgagattcccatttcgccagctggcgaaatatcaaagaagcatgcaccgatcgcctttaccaatggttgcgcattcttaatggcgaatgtgacgcgcccttgaaac

SEQ ID NO: 85975 - DNA, 528 bp, Zea mays
gagaggctcaagtcgtcctactctaaagcagcatagtatcactcgtaccggtccggaattcccgggtcgacccacgcgtccgcccacgcgtacggccacgcgtccgtgcagatcaaattcatgttatcgtggcatctttgtatcaaaaagatgcagaagagacagttgatggtattgaaaatacaactgctacccagcttgatgttgctgatattggaagcctttcagatcttgtttctcaggttgaggttgtaattagcttgctgcctgctagttttcatgctgccattgcacgagtatgcatagagttgaagaagcacatggtaacggcaagctatgttgatgaatccatgtcaaacttgagccaagctgccaaagatgcacgtgtaactatactttgtgaaatgggcctagatcctggcatagatcacttgatgtcaatgaagatgattgatgaagctcatgcacgaaagggaaaaataaaagcatttacaatctacaggggggggaatggcaattccccatttg

SEQ ID NO: 85976 - DNA, 523 bp, Zea mays
  unsure (1)..(523): unsure at all n locations
gaggaggctcaagttgtgcctgcnatttgatagtactgtatcactcgtaccggtccggaattcccgggtcgacccacgcgtccggaaggatccaggagacttgagtggattctaaagaagattgctggtggttctgagcgcaccctccgtgcaaagctgacattttctcaggagtcacatgggaatatcacaaaggaagctggcccagtgaacatgaatttcactataccgatgtacaatgcatcaaagttgcaggtcaggtatcttcagatcgcaaagaaatcgaaggcatacaacccttatagatgggtgcgatacgttacacaagccaactcctacgtagctcgtctatgaggaatcagcatctgtactcttgtttgcagtccattttttatgggtgtaatatttgagcgttatcatggacatagtggcgtgtattgtgtaactgtatattgaggttcgcataccgctcaactactgtagtaacaattgtttttcgacgtgcaatgtgcacaattataat

SEQ ID NO: 85977 - DNA, 526 bp, Zea mays
  unsure (1)..(526): unsure at all n locations
ggggtaaggggtctgtctacgcaagtatgcagcgctcatacccgtccggaattcccgggtcgacccacgcgtccgcggacgcgtgggcggacgcgtgggcgccgcgctgctcgtgctagggctctctggcgcgcccgccgcggatgtggccagggtgcccgttgacttcatcgagctgctcgggatcaggcagagcctctctccctccaggaacagcggcctgctcaacatgctcagcctcatgaagcgcaaggcgcttgagatcgccggtggtgactcaacgtcaagtcagcaatcagtccaagaggttaccagaccgcgtctagtgaacgggaaagagcctgaatttgcagctttcgaggtgcaaganaaggaaaaggaaaggccacaggatgcanagaggcgcgacgaggatgaacaattgggtcaacttctaccacttgatgcaaaaatgaatggtgctggcggcggtgggagggaaggagaggatnagggaaaagtttgagagggcactttcttccggaga

SEQ ID NO: 85978 - DNA, 523 bp, Zea mays
tgggtaagtctgtggctagataagatagaatagcatcgctcgtaccggtccggaattcccgggtcgacccacgcgtccgcagctaagcccgggccagcagttcagatcctgcggcgtaggcagcgtcagcagcccgttcctgagccagtgcgtcgagttcctgaggcaccagtgcagcccgacggcgactccctaccgctcgccacaatgccaggcgcttcaacaacattgctgccaccagatcaggcaggtggagccgttgcacctttaccagacgacatacggtgtggtcctgcagtacttcctgcaacatgaaccgtacggcgagctagcggcactgatggctgcccatgtagcggcaacagtgactgctatgtgcagcctgcaaatgcagcagacagatccgtgccgttgcaacgcagatgcctgcagagtctactactgatgaaactatgtactgtaggcataatggaaaaggagccctggctagctacctagctcgctagtttactcatttagcggg

SEQ ID NO: 85979 - DNA, 525 bp, Zea mays
aggttggagctgtttcatgaaagaatactgagtactgctcgtaccgtccggaattcccgggtcgactcacgcgtccgagctcttgaaccatataggctttaacatgctgtcgcagcaagcaacatacctgtatcgcccttgttgagtcaacaatcgccagcgactatctatggcgcagtcattggtacaaaccatcagggcacaacaggtgcagcaactcatgctacctgctatcaaccaagtagctctggcgaacctttgtacctactctacgcaacatcaatttgttccattcaaccaactgtctacactgaaccctgctgcttatttgcagcagcaactattaccatagaaccagctagctactgcctactctgaagaactgcaactgcttacatttgaccaatgtgccgcactgaacctggctgcttatttgcagtagcaaatactactaccatgtagccagctagctacagcaagccgtgcttacttcttgacacgacaacagacgctgtcagtgtacac

SEQ ID NO: 85980 - DNA, 521 bp, Zea mays
  unsure (1)..(521): unsure at all n locations
ggaagaggtctgttatcgaaaggaagtattggtatacccgtccggaattcccgggtcgacccacgcgtccggagggataatatcttggtagccattgttgttaggttgttgcgctttttgcgagcgcagcaaatgcgttcattattccacaatgctcacttgctccaagttccattattacacagttcctcccaccagttacttcaatgggcttcgaacacccagctgtgcaagcctataggctacaacaagcaattgcggcgagcgtcttacaacaaccaatttcccagttgcaacaacaatccttggcacatctaacaatacaaaccatcgcaacgcaacagcaacaacaattcctaccagcactgagccacctagccatggtgaaccctgccgnctacttgcaacagcagttgcttgcatcaaacccacttgctctggcaaacgtagttgcaaaccaggcacaacaacagctgcaacaagttctgccaacgctcagtcaactagccatggtgaaccct

SEQ ID NO: 85981 - DNA, 523 bp, Zea mays
  unsure (1)..(523): unsure at all n locations
aggttagaggtctgtcctcgaaagagagtattggtataccggtccggaattcccgggtcgacccacgcgtccgcttccccgcgtgccgcgtcaaacaaatctaggcttccaagcgagcgaaagccttcctgcgccagccgatctaccaacatcctctccgccgattggaggcacctgcgaagatgccgcagcggcactcaaagaacaacaacgacctcgccttcttcacgtacgaggagaagcggaagctcgggtacggcacgcagcgggagcgcctggggaaggactccatcaagcccttcgacgcctgctgcctctgcctcaagccgctcatcgacccgctctgctgccccaagggccataccttctgcaaggagtgcatccttgagtgcctnctcgcccagaagaaggacatcaagcgtaagctagcagctcacgaggcccagaagaagcangagaaggaagaggaggagggaaagctaattctgcagaaggctaanngagttgatgcccttgatcagca

SEQ ID NO: 85982 - DNA, 517 bp, Zea mays
  unsure (1)..(517): unsure at all n locations
gagtaggtctgtgtcagaagaagacatatagtatctcgtaccggtccggaattcccgggtcgactcacgcgtccggccaactagcaacatagaaagcacaatagtgtaccaacaatggcagccaaaatatttggcttccttatgctccttggtctttctgcaagtgttgctaccgcaaccattttcccacaatgctcacaagctcctatagcttcccttcttcccccatacctctcaccagcggtgtcttcaatgtgtgaaaacccaattgttcaaccctacaggatccaacaagcaatcgcaacaggcatcttaccattatcacccttgttcctccaacaaccgtcagccctattacagcagttacctttggtccatttggtggcacataacatcagggcacaacaactacaacaatttgtgctagcaaacctgctgcatactctcagcaacatcagtttctnccattcaaccaactggctgcattgaactttgttgttatttgcaacaacaattc

SEQ ID NO: 85983 - DNA, 522 bp, Zea mays
tgggtagaaggtgtgtcatgataaagaataatgcatgctcgtaccggtccggaattcccgggtcgacccacgcgtccggctgcattgaactctgctgcttatttgcaacaacaactaccattcagccagctagctgctgcctacccccaacaatttcttccattcaaccaactggcatcattgaactctcctgcttatttacagcagcaacaactactaccattcagccagctagctggtgtgagccctgctgccttcttgacacaacaacagttattgccgttctacctgcacgctgcgcctaacgctggcaccctcttacaactgcaacaattgctgccattcaaccaacttgctttgacaaacccagcagcgttctaccaacaacccatcattggtggtgccctcttttagatttcttatgagttatagttcaataataaagtttttttggctgatgtttgtggctttcccagaaattataaagtccattttttaaaaaaaaaaaaaaaggccggccgc

SEQ ID NO: 85984 - DNA, 525 bp, Zea mays
  unsure (1)..(525): unsure at all n locations
gagaggctcgagttgtgactggatacgacagcatagtatactcgtaccggtccggaattcccgggtcgacccacgcgtccgcataaagctgctgttctttgtgttcagtggtcacctgacagagcatctgtttttggaagttctgcagaagatggtttcttaaacgtgtgggatcatgagaaggtggggaagaagaaaaattctaatgtcccagccgggcttttctttcagcacgctggtcatagggataagattgtagacttccactggaattcgtcagatccttggacaattgtcagtgtctctgatgatggcgagagcactggtggaggtggaacactgcagatttggcgcatgagtgatttgatctaccgcccagaggatgaagttcttgcagagctggagaatatcaaggctcatttggccagctgtgcaccgaataattgagtcatgtgggttacctgctgaatgcaatcctgtggaaacttgatangtgatgtagtttcattgggccttaggtttaac

SEQ ID NO: 85985 - DNA, 524 bp, Zea mays
  unsure (1)..(524): unsure at all n locations
gggttgggggtcngtcatagtaagatagtattgctcatacccgtccggaattcccgggtcgacccacgcgtccgcccacgcgtccgcaaagcactggaagcatccattctaagaaatgagggttcatggtctggttcatctcattcctcagccgctgaaagaacactgcccttccaagttaaaggtggtgagtgggaaatcgacaaacgacttctgaagatgggagggatggttgcttctggttcttgtggggacttgtatcacgggacttaccttggtgaggatgtagctgttaaagttataagagctgagcatttgaataagaatgtttggaacgagtttacgcaagaagtatatatactaagagaagttcaacataaaaatgttgtgcgattcattggtgcatgcacaaaaccaccccattttgcataattacaggatacatgtcttgaggaagcctatatgactttgtgcacaagcagcataatgttctaaacctcaggactttattaaaagtttgccgg

SEQ ID NO: 85986 - DNA, 507 bp, Zea mays
  unsure (1)..(507): unsure at all n locations
gggttagagctttgtcatgatatgtaatagtgcacgctcgtaccgtccggattcccgggtcgacccacgcgtccgcggacgcgtgggagcccgagcagcaggattcaccgaagagagtgggacgctgggtgatatatgggagactgtatcaaacagtgatcttgttttgctactgatatctgattctgctcaggctgataactacgagaaaattttctcgcacatgaaaccaaacagtattcttggtttgtcacatggatttctccttggacatttgcaatctctgggttttgatttccctaatagcatcagtgtgattgctgtatgccccaagggaatgggcccatcagtcagaagactttatgttcagggcaaagagatcaatggtgctggtatcaatgctaagcttgctgttcanccagatgttgatggaagggcaacagatgtagctctagggtggtcagtaactttaggttctcctttcacatttgctactactctaaagca

SEQ ID NO: 85987 - DNA, 521 bp, Zea mays
tggttagggactgtcgtatgtaaagaagtgatgtactgctcgtaccgtccggaattcccgggtcgactcacgcgtccgactcgtaaacgctcccgttctcctccgcctgcccccaccggctccccttgtacacgagcgccggagacgccatggcggcggcgcagccgaagccggccaagaggctgggcggcatggcggaggcgctcgccatcgccgccgacctcggattccccgcctctaccacgcaggaagatcagactagctccgacaaaagcgatgatttggtgaaggttttgagggaactgactgtcgtgcagaggaacattgccaacttgcaagtggagctacagggaagaaaggatgataaaaacattgctcatttgactcatgtgagtgagatggaaaagaagtgcgagtctttggccagaatgactgcaatttggaagatgtatttcagaacagggatcgtattattgctcggctgcaacagccctattccttgactgcataccagttgaagc

SEQ ID NO: 85988 - DNA, 531 bp, Zea mays
gtaggagtggtggggttagaggttttgtatagagaagagagtattgtcatgctgtaccggtccggaattcccgggtcgacccacgcgtccgcagaaacacaccaagcgaagctacctagcaacgacttaacaacaatggctaccaagatattagccctccttgcgcttcttgccctttttgtgagcgcaacaaatgcgttcattattccacaatgctcacttgctcctagtgccattataccacagttcctccgaccagttacttcaatgggcttcgaacacctagctgtgcaagcctacaggctacaacaagcgcttgcggcgagcgtcttacaacaaccaattaaccaattgcaacaacaatccttggcacatctaaccatacaaaccatcgcaacacaacagcaacaacagttcctaccagcactgagccaactagatgtggtgaaccctgtcgcctacttgcaacagcaggtgcttgcatccaacccacttgctctggcaaacgtagctgcataccaacaacaaccc

SEQ ID NO: 85989 - DNA, 521 bp, Zea mays
  unsure (1)..(521): unsure at all n locations
gtttagaggtcgatctccattcgtgctgggtataccgtctcggaattcccgggtcgacnacgcgtccggccaggtcgcagcagtagccatgtttttgctcctcctggccttgggtgctgaggccgacctctgcgtcacgcgtagcaggaccttcaaagggtggtgccaccagagcgagaactgcatcaccgtctgcaagagcgagggcaataccggcgggttctgcaagctcggggcttgcatgtgcaccaaagagtgtgtccgaagtactgacgctgctggtgctaataaagccccacagcagcatttgagttgatgagtagtaaagaagaacgcttttgttatgccagcgcaagctctagaattcgaggccgagatgaccaaaaataaatgattttgttactctattatatgagcgaatatcgggtgtggttgttctcgacctattgaccaaaaaaagaantgtnttaaatggtgggtttgaagaagattaattttcttgacggaataccaagaaaggg

SEQ ID NO: 85990 - DNA, 524 bp, Zea mays
gggtttagtgggggatagtgtctgatctcatgtatatgctagctataccgtccggattcccgggtcgacccacgcgtccgcccacgcgtccgcacgcttgtatgttggaagattgtctccccgcacccgttctcgtgagctagaataccttttcagcaaatatgggagaattcgagaagtggagttgaagcgtgactatgcattcattgaattcaggacccccgtgaatctgatgaatcacaatacaacctaaaatggcaggacgtcgattggaaccccattattggtgaaattgcttaaaggggtcctcgggggtcttgggggtcacgtgattaccaccgaagaagaccttcaccaggaacaaggcggtggtttaaccggggaagttattgtcaatgggcaaaaaactgtcaagcttgtgactcggaaaacaaatgctaacgttttggggaaaggggccctatataaagaaaattgccaaacaattccaaggaactctaggggagaaaaacttttacagggtc

SEQ ID NO: 85991 - DNA, 510 bp, Zea mays
  unsure (1)..(510): unsure at all n locations
nagaggctcgaatctgcttagtctacaagacagttatgtcacactcgtaccggtccggaattcccgggtcgacccacgcgtccggtgaaaacccagctcttcaaccatataggcttcaacaagcaatcgcggcaagcagcgtacctttatcgcccttgttgtttcaacaatcgccagccctatctttggtgcagtcattggtacaaaccatcagggcacaacagctgcagcaactcgtgctacctctgatcaaccaagtagctctggcaaacctttctccctactctcagcaacaacaatttcttccattcaaccaactgtctacactgaaccctgctgcttatttgcagcaacaactattaccatttagccagctagctactgcctactctcagcaacaacaacttcttccatttaaccaattggccgcactgaaccccgatgcttatttgcagcagcaaatactactaccatttagccagctagctgcagcaaaccgtgctttctttt

SEQ ID NO: 85992 - DNA, 526 bp, Zea mays
  unsure (1)..(526): unsure at all n locations
ggttagagtatctgtgtattaagaaaatagtattgtcaacccgtccggaattcccgggtcgacccacgcgtccgcccacgcgtccgcccacgcgtccggccaccaccaccgagcctggactaccgccgccggccttcgccgatatcttcagcggcgaacagcgcccaccagatcccgcccctgcgatggagtccgtggtgaacccgaaggcatacccgctggctgatgcgcagctgacgatgggtatcctcgatatcatccagcaggccgccaactacaaacagcttaagaagggagcgaatgaagcgacgaagaccctgaataggggcatatcggagtttgtagtgatggcggcggacacagagcctctcgagatcctgctccacctncccttgttagctgaggaatagaacgtgccatatgtggttgttccatcgaagcaagctcttggccctgcctggggtgtgaccagacccgttatttctttgctcagtgacccgtnatgagggtaggcagctgaaactac

SEQ ID NO: 85993 - DNA, 528 bp, Zea mays
  unsure (1)..(528): unsure at all n locations
ggagtttaacgatctgttatagaaaagtagtattgtgatacctcgtccggattcccgggtcgactcacgcgtccgcccacgcgtccgcccacgcgtccggggtgagaacgatctgcctggtttaactgacactgagaagccaaggatgaggggtcccaaaagggcctccaagatcaggaagctgttcaatcttgcaaaggatgacgacgtgcgcaagtacgtgaacacgtaccgcaggacattcactaccaagaatggcaagaaggtgagcaaggcacctaagatccagcggcttgtgacccccttgacccttcagaggaagcgtgctagaattgctgacaagaagaagaggatcgctaagaagaagtctgaggctgctgagtaccagaagctctttgccaaaggcttgaagaacagagggaccgncgcagtgagaagctggccaaaaggaggtctaagctttcttgccgcgccaaagcttctgttgncaactcttgctaagaatgatcagtgcttttgagaaggttt

SEQ ID NO: 85994 - DNA, 521 bp, Zea mays
  unsure (1)..(521): unsure at all n locations
ggttgagtttctgactacccaagacaaatatatgattactgtccggaattcccgggtcgacccacgcgtccgcacttctccaggtaaggaaagtgttcgtcctcatggcgccgccgcagccgaagtcgggcctcttcgtgggcatcaacaagggccatgtcgtcaccaagcgcgagctgcctctgcgcccgtcccaccgcaaggggaaagcaacgaagagggtgtccatggtcaggggcctgatcagagaggttgctggctttgctccttatgagaagcgtatcaccgagcttctgaaggttggcaaggacaagcgcgctctgaagcttgccaagagaaagcttggaactcacaagagggcaaagaagaagagagaggagatgatgggcgtnctcaggaagatgagatcggctggtacgcacactgacaagaagaaataaagcatttcaagttcatgaatgtggcagcccagagattatcaactgtgttttttccctaactctataaactagacatggcaa

SEQ ID NO: 85995 - DNA, 520 bp, Zea mays
  unsure (1)..(520): unsure at all n locations
agggttcgtctttgtccctcnaaagaatactgcatgctcgtaccggtccggattcccgggtcgacccacgcgtccgaattgctgtcattcaaccaacttgcttttacaaacccacggcgttctaccgacaacccatcattggtggtgccctcttttagatctcttatgagttatagttcaatattaaagttatttgtctgatgtctgtggcttaccagaaataataaagcccatttctaaaacatgaaaagtaaagggcggtcgctctagaggatccaagcttacgtactcgtgcatgcgacttcatagctgttctatagtgtcacctaacttcaattcactggccgttgttttacaacgttttgactgggaaaaccctggcgttacccaacttaatcgccttgcagcacatgctgcctatcgacagctggcgtaatagcgaacaggcccgcacctatcgcgcttaccaacagttgcgcagcctgaatggttaatggaacactcacttgtatcgggcatt

SEQ ID NO: 85996 - DNA, 528 bp, Zea mays
tgggttggagctgtgtctagagaagacattattgcacgctcgtaccggtccggaattcccgggtcgacccacgcgtccgcggacgcgtgggcggacgcgtgggttgccaagaagtaccatgctttcttggcatcagaggccatcatcaagcagattccccgtctccttggtcctggtctcaacaaggcaggcaagttcccgaccctggttactcaccaggaatccctcgaatccaaggtgaacgagactaaggcaaccgtcaagttccagctcaagaaggtcctttgcatgggcgtcgccgtcggcaacttggcgatggaggagaagcagatccagcagaacatccagatgagcgtgaacttccttggttcccttctgaagaagaactggcagaatgtgaaatgcctctacgtcaaaagcaccatggggaaaccatacagggtgttctaagtatgctcttttgtgaagtctgctaggttctggcaccgaggttttatcgaattaaactcttggtaaagatatggtttt

SEQ ID NO: 85997 - DNA, 509 bp, Zea mays
agaggctcgaatgtagccatgcctaccaggaaccatccgcaagaccacaggatcttcggtaccgagcgttagtcccacgcgttcgcgaatgctccacatgatctctatgatagttactacaacagttacaagtcaaacctgaagttgtatgttatgagagttttcatctctgacgaatttgatgatcttcttcccaagtaccttagctttttgaagggtattgttgactcggacacgctgcccctgaacgtgtcacgagaaatgcttcaacaacatagcagtctcaagaccatcaagaagaagctgatccgcaaagcccttgacatgatcaggaaacttgctgaagaagaccctgatgagtacagcaacaaggataagacagatgaagagaaaagcgagatggaggacaagaagggcagttcgccaagttctggatgagtttggcaaatcaatcaagctgggtttcatcaaaaacaccactatacggaaccggcttttcaaattttttc

SEQ ID NO: 85998 - DNA, 520 bp, Zea mays
  unsure (1)..(520): unsure at all n locations
nggtaaaggctggagctcattagaataatattgtatacctgtccggaattcccgggtcgacccacgcgtccgcagcaagcaacatagaaagtggaatccagtagcaacaacagagcaacaatggcgaccgagatattttccctccttatgctccttgctctttctgcatgtgttgctaacgcgacaattttccctcaatgctcacaagctcctatagcttcccttcttcccccataccttccatcaatgatagcttcagtatgtgaaaacccagctcttcagccctataggctccaacaagcaatcgcagcaagcaacatacctttatcacccttgttgtttcaacaatcgccagccctatctttggtgcagtcattggtacaaaccatcaaggcacagcagctgcagcaactcgtgctacctgtgatcaaccaagtagctctggcaaacctttctccctactctcagcaacaacaatttctttcattcaaccaactgtctacacttgaccctgctgttt

SEQ ID NO: 85999 - DNA, 523 bp, Zea mays
  unsure (1)..(523): unsure at all n locations
agttttagctgtgtctagtaagaaaggtagcatgctcgtaccggtccggaattcccgggtcgacccacgcgtccggcaaagcggcagtgcgtagagaggatcgtcgaacagaacagcatgaagatggtcatcggtctcgtcgtgtgcctggctctgtcagctgccagcgcctctgcaatgcagatgccctgcccctgcgcggggctgcagggcttgtacggcgctggcgccggcctgacgacgatgatgggcgccggcgggctgtacccctacgcggagtacctgaggcagccgcagtgcagcccgctggcggcggcgccctactacgccgggtgtgggcagacgagcgccatgtaccagccgctccggcaacagtgctgccagcagcagatgaggatgatggacgtgcagtccgtcgcgcagcagctgcagatgatgatgcagcttgagcgtgccgctgccgncagcagcagcctgtacgagccactctgatgcagcagcaacaacagctgttggcagctca

SEQ ID NO: 86000 - DNA, 537 bp, Zea mays
  unsure (1)..(537): unsure at all n locations
gagtntttgtatgctgtttgcacgataaagacatatattagcatagctcgtaccggtccggaattcccgggtcgacccacgcgtccgcggacgcgtgggaacaaatgcgttcattattccacaatgctcacttgctcctagtgccattataccacagttcctccgaccagttacttcaatgggcttcgaacacctagctgtgcaagcctacaggctacaacaagcgcttgcggcgagcgtcttacaacaaccaattaaccaattgcaacaacaatccttggcacatctaaccatacaaaccatcgcaacacatcagctacaacagttcctaccagcactgagccaactagatgtggtgaaccctgtcgtctacttgcaacagcaggtgcttgcatccaacccacttgctctggcagacgtagctgcataccaacgactacaacaattgcaacagtatctgccagcgctcagtcaactagccatggtgaaccctgccgactacctacaacagcaacaactgctgtcatctacccttcc

SEQ ID NO: 86001 - DNA, 525 bp, Zea mays
  unsure (1)..(525): unsure at all n locations
nggaggggttcaagttgtcatgatgataaganagtatagtattgctcgtaccggtccggaattcccgggtcgacccacgcgtccggcaaagcggcagtgcgtagagaggatcgtcgaacagaacagcatgaagatggtcatcgttctcgtcgagtgcctggctctgtcagctgccagcgcctctgcaatgcagatgccctgcccctgtgcggggctgcagggcttgtacggcgctggcgccggcctgacgacgatgatgggcgccggcgggctgtacccctacgcggagtacctgaggcagccgcagtgcagcccgctggcggcggcgccctactacgccgggtgtgggcagccgagcgccatgttccagccgctccggcaacagtgctgccagcagcagatgaggatgatggacgtgcagtccgtcgcgcagcagctgcagatgatgatgcagcttgagcgtgccgctgccgccagcagcagcctgtacgagaccgatctgatgctcaaaacagcaaaatttgt

SEQ ID NO: 86002 - DNA, 527 bp, Zea mays
  unsure (1)..(527): unsure at all n locations
agtaggganctgnagttttaattacgaaactaagcatgtcgtaccggtccggaattcccgggtcgacccacgcgtccgcggacgcgtgggcggacgcgtgggtctgaattgtcaggtccatcagctggccctaagggttcaaagaaggttgcacaacagtctccaagggcccaggttgcaatctttgttgttcttgccatgactttaagaagaaagcctgatgtactggtaaatgttatgccaaagataatgggaaacaataaatatctgggacaggaaaagcttcccatcattgtctgggttattgctcaggcctctcaaggtgacctagtgtctggcatgttttgctgggctcattctctatttcccacattatgtgcgaagtcaagtgggaatccccttgcaagagatttggttttgcagttgcttgaaagaattttgtctgtcaccaaagctcgttctatattattgaatggtgctgttagaaagggagaacgcttagttccccctgtttcatttgacttgtn

SEQ ID NO: 86003 - DNA, 530 bp, Zea mays
aggagggtcctcgaatctgcctacaagcactaacagcaactactgtcaggctctgactgcccggatcgacccactcgtccgacgcatccggtgccacgctcttactccgtcctagcgctacttgccctctttgtgagcgcagcaaatgtgctcattattccacaatgctcacttgctcctagtgccattattccaaagttcctcccaccagttactttaatgggcttcgaacacccagctgtgcaagcctacaggctacaacaagcgcttgcggcgagcgtcttacaacaaccaattgcccaattacaacaacaatccttggcacatctaacaatacaaaccatcgcaacgcaacagcaacaacagttcctaccagcactgagccacctagccatggtgaaccctgccgactacttgcaacaacaactgcttgcatccaacgcacttgctctggcaaacgtagttgcaaaccagcaacaacaatagctgcaacagtttctgccagcgctcagtcaactagccatggtgaa

SEQ ID NO: 86004 - DNA, 516 bp, Zea mays
  unsure (1)..(516): unsure at all n locations
ggagtntnctnagtcgaccagactactgcatcctctacacggccggaattcccgggtcgacccacgcgtccgctaggcctaacttgaaggtgggcatttgtggagaacatggtggagagccttcatcggtggctttcttcgccaagactgggctggattacgtttcttgctcccctttcagggtcccgatcgctaggctagctgcagctcaggtgcttgtctgagggtgcctctgctcgttggcagccggatcgcctgctgttggtgcatctggtgattaataatactactatgacagagccatgctctgtgaagagtattagtagcagcgctcataaaagctacagttccgtctcttttctcagctatgtaaaacttccaaactgttcatgcctaaaactganggttttctggtgtgaggtgtgcatggtcgtggttgaggccattgtggacaattcaaccaatgaagcccttcccaaattaagccttggaaaagccggaatcttttcgtagaaa

SEQ ID NO: 86005 - DNA, 532 bp, Zea mays
  unsure (1)..(532): unsure at all n locations
aggaggntcctagtgtctnactcactgacctcactgtactcatcgtaagaccgggaaggcctcggacgacccagtcgacccacgcgtccggcgaagcgcactagcaacgacctaacaacaatggctaccaagatattatcgctctttgcgcttcttgccctttttgtgagcgcaacaaatgcgttcattattccacaatgctcacttgctcctagtgccattattccacagttcctccctccagttacttcaatgggcttcgaacacccagctgtgcaagcctacaggctacaacaagcgcttgcggcgagcgtcttacaacaaccaattgcccaattacaacaacaatccttggcacatctaaccatacaaaccatcgcaacgcaacagcaacaacaatttctaccagcactgagccaactagctgtggtgaaccctgtcgcctacttgcaacagcagttgcttgcatccaacccacttgctctggcaaacatagttgcataccaacaacaacaacaattgcaacagtttc

SEQ ID NO: 86006 - DNA, 523 bp, Zea mays
  unsure (1)..(523): unsure at all n locations
agtagggactcgagtctaaattattacagcatatctagtagtacataccgtttcggattcccggctcgacgccacgcgtccggcgaaccgcactatcaacgttctaaccttaatggctaccacgatattatccgtctttgggcttcttgccctttttgtgagcgcaacaaatgctttcattattacacaatgctcacttgctcctattgccattattccacacttcctccctccagttacttcaatatgcttgcaacacccagctgtgcaagcctacaggctacaacaatctcttgcagcgagcgtcattacaacaaccaattgtccaattacaacatcaatccttggcacatctaaccatacaaaccatcgcaacgcaacagcgacaacaatttctaccatcactgatccatctacctgtgctgaaccctgtcgtctacttgcacagcaattgcttgcatccaacccacttgctctgcaaacatataatcataccacctcatcaacaatcgccacatttttn

SEQ ID NO: 86007 - DNA, 529 bp, Zea mays
  unsure (1)..(529): unsure at all n locations
agtagtnnncttagggttctnctactgatctaccgaacttatcgtaatgctctaccggtccggaattcccgggtcgacccacgcgtccgcagaaacacacctagcgaagcgcactagcaacgacctaacaacaatggctaccaagatgttatccctctttgcgcttcttgccctttttgtgagcgcaacaaatgcgttcattattccacaatgctcacttgctcctagtgccattattccacagttcctccctccagttacttcaatgggcttcgaacacccagctgtgcaagcctacaggctacaacaagcgcttgcggcgagcgtcttacaacaaccaattgcccaattacaacaacaatccttggcacatctaaccatacaaaccatcgcaacgcaacagcaacaacaatttctaccagcactgagccaactagctgtggtgaaccctgtcgcctacttgcaacagcagttgcttgcatccaacccacttgctctggcaaacatagttgcataccaacaacaacaa

SEQ ID NO: 86008 - DNA, 525 bp, Zea mays
  unsure (1)..(525): unsure at all n locations
nagttagtggnanccttcgggtatgaatacccgccaaacgaaggcaattctgcnaccgcctcggaattcccgggtcgacccacgcgtccggcaggctgaattcttctccttcggaacgaacgacctgacgcagatgacctttgggtacagcagggatgatgtgggaaagttcattcccgtctatcttgctcagggcattctccaacatgaccccttcgaggtcctggaccagaggggagtgggcgagctggtgaagcttgctacagagaggggccgcaaagctaggcctaacttgaaggtgggcatttgtggagaacacggtggagagccttcctctgtggccttcttcgcgaaggctgggctggattacgtttcttgctcccctttcagggttccgattgctaggctagctgcagctcaggtgcttgtctgaggctgcctcctcattggcaaccggattgcctgctgctggtggatgtggtgatcaacagtattattacagagccatgctatgtgaacattact

SEQ ID NO: 86009 - DNA, 536 bp, Zea mays
  unsure (1)..(536): unsure at all n locations
agtagggancgtcagggttctggtactgacnctatcagcanngctttagttaanactgtncnnnttcngaattcccgnctcgacccacgcgtccggagaataaatttttttccatcggaatgtctgaaactatgttgggtgtatcctagtggggggttgagcattaatggctcatattttgtcaggtctatgtgtcgccgtgaaacttttaatcaaatcagttcactcttttgcctctaaaaaaaaactaaaagaacaaaaagacctaaaaaaaaaaaaaaaaaaaaaaatgcaaagcaagtactgctggtgaagacatgtttcattggcaagcaacaattatgggaccacctgacagtccttatgctggtggtgttatcttagtgaacatgccattgccgacagattacctgttcaaacctccaaaggtttctttgaagacaaaggtcttccatcctaatatcaacagcaatggaagtatatgccttgacattcctgaagagcattggagccctgctttgtcgataactaaggtc

SEQ ID NO: 86010 - DNA, 526 bp, Zea mays
  unsure (1)..(526): unsure at all n locations
agtagttanctcaaggtcctctacgatntaccgccaatatagcatgctctaccggtccggaattcccgggtcgacccacgcgtccgcccaactcctgaccttactggatacattactgagggacagatatacattgataggcaggtccataacagacagatttatccacctattaatgtcctgccatctctttcacgattgatgaagagtgctattggtgagggcatgacacgtcgagaccattcggatgtatctaatcagctttatgccaactatgctattggaaaggatgttcaggccatgaaggctgtcgttggagaggaggcactctcgtctgaggatctgctttacttagagttccttgacaagtttgagaggaagtttgtgacacaaggagcatatgacacacggaacatcttccagtcactcgatcttgcatggacattgcttcggatcttccctggcgaacttctccaccgtattccagcaaagaccttgaaccagtactatagcagagatgctttcc

SEQ ID NO: 86011 - DNA, 524 bp, Zea mays
  unsure (1)..(524): unsure at all n locations
agagtntnttaggtctgcaatcgaactactgagtcctacgaaggccgtaccggttcggaattcccgggtcgacccacgcgtccgcttgcatttaaccaattgggcgtactgaaccccgctgcttatttgcagcagcaaataggactaccatttagccagctagctgcagcaaaccgtgctgccttcttgacacagcaacaggtgctgcctttctaccaacagtttgcggctaacccagcatccctctgacaactacaacaattgttgcccttaggccaacttgctttgacagacccagcggactgctaccaacaacacatcattggtggtgccctgtgttagagtgctaattagatgtaattgacatagtaaagtaggatggatgatgcatgtggacaaccagaaatacgaagttacattcacagaatctaacatgcatggacattgcttcggatcttccctcgcgaacttctccaccgtattccagcaaagaccttggaccagtactatagcagagatgctag

SEQ ID NO: 86012 - DNA, 513 bp, Zea mays
  unsure (1)..(513): unsure at all n locations
agtagttnntctagggtatcataaggcgaacgggggataatagcaacgctcctccgttccgggtcgacccacgcgtccggcaacatagaaagtggaatccagtagcatcaatagagcaacaatggcgaccaagatatgttccctgcttatgctccttgctctttctgcatgtgttgctaacgcgacaattttccctcaatgctcacaagctcctatagcttcccttcttcccccataccttccatcaatgatagcttcagtatgtgaaaacccagctcttcaaccctataggctccaacaagcaatcgcagcaagcaacatacctttatcacccttgtttcaacaatcgccagccctatctttggtgcagtcattggtacaaaccatcagggcacagcagctgcagcaactcgtgctacctgtgatcaaccaagtagctctggcaaacctttctccctactctcagcaacaacaatttcttccattcaaccaactgtctacattgaaccgtgc

SEQ ID NO: 86013 - DNA, 524 bp, Zea mays
  unsure (1)..(524): unsure at all n locations
agtagggancttgaggtcgataaagcataacggtattatcgaacggctcggaattcccgggtcgacccacgcgtccgaccatctgtcgactggtagcagagagaagagatagaccgagagagggagggagagagagaacctgagactgagactgaagcatccgcgctagctagcttgggcagcaacatcacgatgtcgtccaactgcggcgaggatgagaaggagctggtgtgcgtgaccggcgccggcggcttcatcggctcgtgggtggtgaatgagctgctccagcggggttaccgcgtcaggggaaccgcgagggaccctgcggacagcaagaacgcgcacctgctggctctggagggagccaaggagcgcctcaccctgtgccgggccgacgtactagaccgcgcctacctgcgcgccgnctttgccggctgacacggcgtcttccacgtcgccatcccggtgtccaacgacccggagcttgtccggtggcggtggagggcacccagaacgtcatcaac

SEQ ID NO: 86014 - DNA, 514 bp, Zea mays
  unsure (1)..(514): unsure at all n locations
agtagtggactcaagttctcgctgagattctagctatcatgtatgatcatccgtctcgattaccacccgcgccacgcgtccgccggactttccttctgcttgtggggttcgtcaaaaaagcattggcttgcgtataaggggactctattggatgtctgtatccaaggcactgagatgctgtcattagaatcatttaaaacaccaaccattctattgagtcgactttttgtgtatgacattttctgcttgtacttcactccacttatagacagtgtggctaaatcatttgatgctccgataaagcttctgtttcctactgcngatgatgcaaggccattctccatgcttgaccttggtgacattggaatacctgacattttagttgcacttgccttgaactgtgatgtctcaagaggcattaacatacgttacttcaacaacgcattttccgaatacgccgaagctatggcggagaccatcattgtaatgaactggtttcaaagctcacagcccn

SEQ ID NO: 86015 - DNA, 538 bp, Zea mays
  unsure (1)..(538): unsure at all n locations
agtaggggaacgtcggagtgctgttccgatnctacccgccaatatcgtatagccgtaccggtctcggaattcccgggtcgacccacgcgtccgcccacgcgtccgtgaggatgatggacgtgcagtccgtcgcgcagcagctgcggatgaggatgcagcttgagcgtgccgctgccgccagcagcagcctgtacgagccagctctgatgcagcagcagcagcagctgctggcagcccagggtctcaaccccatggccatgatgatggcgcagaacatgccggccatgggtggactctaccagtaccagctgcccagctaccgcaccaacccctgtggcgtctccgctgccattccgccctactactgattcatgatatttgggaaatctcctctatccatctctctctatctatatatgtaataatgcagtaagacgacacacattatcatgtgtggtatgaccaataatatatgcatggtcataataaagttttggttttaatgaatcaaaagctaacaaacccaaccttaaaaaga

SEQ ID NO: 86016 - DNA, 512 bp, Zea mays
  unsure (1)..(512): unsure at all n locations
agtttaggggntaagtctgaaccagcaacgccgcatatatgctaccgcctcggaattcccgggtcgacccacgcgtccgcccacgcgtccgcccacgcgtccgtgttttttttttttttttgttccaagtaccagttgtttttggcactgagaattacagcttccaagtgacacaatacagcagcattcagcaccacacgcggcactgtactgcaaacccaattcggttcatcattatacaggaaggatagaacgaatacatggaggcacgtccaggtcccggcaacacaacgcagcagcgaccccaaaggccaggtagagaaaatactacatggcatacctctgggtccaggtcctcgcggtgttctcgtacttgtgccggtccgtcttgtacatgtgagctatctcggggaccaaagggtcgtcggggttcggatcagtcagcaaggaacagatggacagcagcaccttggagatggttagtgcctgacttcatggtccttcaagatgtn

SEQ ID NO: 86017 - DNA, 512 bp, Zea mays
  unsure (1)..(512): unsure at all n locations
agttaagggactaaggtctgaacccgcatccgggcaacatgctacggctcggaattcccgggtcgacccacgcgtccgcccacgcgtccggaaaacagaagttccagggattcacggtggatgaagccctgatggagattgctggcccacaggcctaccttatgcactgtttgcccgcagagagaggagtggaggtgaccgacggtgccatcgaggctccaaattcaatcgtgttcccccaggctgagaacagaatgcacgctcagaacgccatcatgcttcacgttctcggtgcttaaccctcctattgcacaccagtgtttaacttttcttgaatttgcttagggattgaggcagttttggctttagggcatatgtgagagcttaattcagcgaactgttcagtaacgtggtaactgttcttcagggtgggagtttgttgtactggaaaagtttggcaacctgaataaaaaataatcttttgtgctggttttactgagcagcanggaaaa

SEQ ID NO: 86018 - DNA, 512 bp, Zea mays
  unsure (1)..(512): unsure at all n locations
aggagggntcgtcgttatgatcacgcatacgaagcatatcgtacctcctcggaattcccgggtcgacccacgcgtccgcctggatttttcttctgcttgtggtatgcgtcaaagaagcattggcttgcaaataatggtctgggattggctttctgtattcaggggattgagatgctgtcattgggatcatttaaaaccggagccattctcttgggtggactttttgtgtatgacattttctgggtgttcttcactccagttatggtcagtgtggctaaatcttttgatgctccgataaagcttctgtttcctactgcggatgatgcaaggccattctccatgcttggccttggtgacattgtaatacctggcatttttgttgcacttgccttgcgctttgatgtctcaagaggcatcaagaagcgttacttcaacagcgcattttcgggatacgccgtgggtatggcggtgaccatcattgtaatgaactggtttcaagctgcacagccggc

SEQ ID NO: 86019 - DNA, 523 bp, Zea mays
  unsure (1)..(523): unsure at all n locations
agaagggnctcgaggttcctacgcgctaccgacattattgcacgctctaccggtccggaattcccgggtcgacccacgcgtccgcaacaagcaacatagaaagtggaatccagtagcaacaatagagcaacaatggcgaccaggatattttccctccttatgctccttgctctttctacatgtgttgctaacgcgacaattttccctcaatgctcacaagctcctatagcttcccttcttcccccataccttccatcaattatagcttcaatatgtgaaaacccagctcttcaaccatataggcttcaacaagcaatcgcagcaagcaacatacctttatcgcccttgttgtttcaacaatcgccagccctatctttggtgcagtcattggtacaaaccatcagggcacaacagctgcagcaactcgtgctacctctgatcaaccaagtagctctggcaaacctttctccctactctcagcaacaacaatttcttccattcaaccaactgtctacactgaacc

SEQ ID NO: 86020 - DNA, 542 bp, Zea mays
  unsure (1)..(542): unsure at all n locations
acgtaggganncttcggagtgctngaattgaatnctacacgcacatcatagcaatagcctgtaccggttcggaattcccgggtcgacccacgcgtccgccaagaacctcaagcttggcatccacgaggactccacgaacaggaccaagattgctgagctcctgaggtaccactcgaccaagagcggggatgagctgaccagcctcaaggattatgtgaccaggatgaaggagggccagaacgacatcttctacatcactggtgagagcaagaaggctgtggagaactccccgttccttgagaagctgaagaagaggggctatgaggtgctgttcatggtggatgccattgacgagtattctattggacagctgaaggagtttgagggcaagaagctcgtctctgccaccaaggagggcctgaagctggacgagagtgaggatgagaagaagcgcaaggaggagctcaaggagaagtttgagggcctctgcaaggtcatcaaggaggtgctgggcgacaaggtgganaaggtggtggtctccg

SEQ ID NO: 86021 - DNA, 523 bp, Zea mays
  unsure (1)..(523): unsure at all n locations
atgtagtttnaaacttagggtgtgaaacaacgcacaaccagaacagcatcgctaacgtcatcggaattcccgggtcgacccacgcggccgctcactaccatgtttgatctcagcgagcagcatgcccacagcattgttagcaagatggggatgcgtgaagagcttcatgctagctgggaccagccaacaaagtgcatcgtattccatagtgtggaccaaactaggcttcaggggctactcttccagatggcagataagctctcggtcctggtggagatcaatgagagggcatacgaggcaagaactggtggtgctctcgagggggtaccgcccaggcgcaggggtgagggtcaggataatatgggaaagtggcaggataactttgtctcgtcacaggggcggcagggtggtggcaaccggtttggatactccggcagaggtgcaatatctggtcaaagtggtggtggacaccagagggacaggggcaatcagggttaccgcgggggctatggtggcgtttcaa

SEQ ID NO: 86022 - DNA, 520 bp, Zea mays
  unsure (1)..(520): unsure at all n locations
nagagggtnanactagtctcgataaacgcaacnccgcctcagtctgctaccgcttcggaattcccgggtcgacccacgcgtccgcccacgcgtccgcccacgcgtccggaaatccatctagaggccgtcgacaggggaattagagggcggcgtcgtctagcagcagccaccgccgcctcatcctcgcagccgccgtcctgctctccgtgctcgcggctgccagcgccagcgccgggacctcctgcgtgccggggtgggccatcccgcacaacccgctcccgagctgccgctggtacgtgaccagccggacctgcggcatcgggccgcgcctcccgtggccggagctgaagaggagatgctgccgggagctggcggacatcccggcgtactgccggtgcacggcgctgagcatcctcatggacggcgcgatcccgccgggcccggacgcgcagctggagggccgcctagaggacctgccgggctgcccgcgggaggtgcagaggggattcgccgccaccct

SEQ ID NO: 86023 - DNA, 531 bp, Zea mays
agagtgaccgtggagttttgtaaagcactaggggaattatcgtacacggcctcggaattcccgggtcgacccacgcgtccgcgacaaaatccctcaccctcgtgagtcctgacgccctcgcccgtgctcgcagttggtagggttgtagccatggcgtggagcgccgccgccgtctccaggttcgccgccgcctccccacccgcggcacccatctccgtcaggcttggagccgccgcttctcgctcctccctgtccttctccagtgggcgccgacgccccgtggccgcgtccctctcgacctctgccaccgttgtaaaggaggctgttcagacagagaaggcaccaccagcactaggcccttattctcaggccatcaaagcaaataatcttgtgtttgtttctggagttcttggcttgaatcccgagaccaggaagtttatctctgaaaatgttgaggagcaaactgagcaggttatgaaaaacatgggcgagatattgaaagctagtggtgctagctattcttcagttgtg

SEQ ID NO: 86024 - DNA, 527 bp, Zea mays
  unsure (1)..(527): unsure at all n locations
agagtnncttngagtccgaacccgcattagcgaacatttgtacaggcccggaattcccgggtcgacccacgcgtccgcccacgcgtccgcccacgcgtccgggctcacaggtaaaggcggcatggtcttcggttcgggcctgtgccccaagcgcatcgtggtggacgcgcgccaacacatgctgggccgtctctcctcgaacattgccaaagagctgctcaatgggcagaaggtggtcgtcgtccgctgcgaggagatctgcatgtcgggcggcctcgtccgtcagaagatgaagtacctccgcttcctccgcaagcggatgaacaccaagccgtcccacgggcccatccacttccgcgcccccggcaagatcctgtggcgcaccatccgcgggatgattccgcacaagaccaagaggggggaagcggctctggcgaagctcaagacgtacgagggcgntccggcggcgtacgacaagaccaagcgtatggtcattcctgacgcttttaaggttctgaggctacagc

SEQ ID NO: 86025 - DNA, 525 bp, Zea mays
  unsure (1)..(525): unsure at all n locations
agagggnccttgaagtctnctatgaanctaccgcatatacggcaagctctaccggtccggaattcccgggtcgacccacgcgtccgcctccatccgcactactgagagcgacaaagctagctctctccagggatcggattcggagcaccatgccgtccaccgtgaactccgcgtccctcgaccagaaccttgagctcgccaagcaatgctcgcgagaggccgccctcgcagggttcaaggcagcagctgtcgcgaccgtcgcctctgcagttcccaccctggttagcgtcaggatgctgccatgggccaaggccaacatcaaccccgctggccaggccctcatcgtctccacaggtcgatctctgaaactctccctgatccctctacgacgacctaactagctattactaccaagatgccttcacatgtctttctgggtgtaactaatggcggaatgcctgctttaatttgctccacgaaaactgggtcgtcgtgcagttgctggcatggcgtacttcatcgcgg

SEQ ID NO: 86026 - DNA, 528 bp, Zea mays
  unsure (1)..(528): unsure at all n locations
agagggtnctggagtctntactgaataccgccattatagcaagctctaccggtccggaattcccgggtcgacccacgcgtccggtagcaacaacagagcaacaatggcgaccaagatattttccctccttatgctccttgctctttctgcatgtgttgctaacgcgacaattttccctcaatgctcacaagctcctatagcttcccttcttcccccataccttccatcaatgatagcttcagtatgtgaaaacccagctcttcagccctataggctccaacaagcaatcgcagcaagcaacatacctttatcacccttgttgtttcaacaatcgccagccctatctttggtgcagtcattggtacaaaccatcagggcacagcagctgcagcaactcgtgctacctgtgatcaaccaagtagctctggcaaacctttctccctactctcagcagcaacaatttcttccattcaaccaactgtctacactgaaccctgctgcttatttgcagcaacaactattaccatt

SEQ ID NO: 86027 - DNA, 529 bp, Zea mays
  unsure (1)..(529): unsure at all n locations
agtagtntccttnaagtctncatgatctccgccaatacggaaagctctaccggtccggaattcccgggtcgacccacgcgtccgcgcaaattgcaccaagaaatccatcgagaggccgtcgacaggggaattaatggcgtcggggtctagcagcagccaccgccgcctcatcctcgcagccgccgtcctgctctccgtgctcgcggctgccagcgccagcgccgggacctcctgcgtgccggggtgggccatcccgcacaacccggttcccgagctgccgctggtacgtgaccagccggacctgcggcatcgggccgcgcctcccgtggccggagctgaagaggagatgctgccgggagctggcggacatcccggcgtactggcggtgcacggcgctgagcatcctcatggacggcgcgatcccgncgggccccggacgcgcagctggagggcccgcttagaggacctgccgggctgcccgccgggaagggcccagggggatttgccggcaccctttggccaggaaggg

SEQ ID NO: 86028 - DNA, 535 bp, Zea mays
  unsure (1)..(535): unsure at all n locations
acgaggganctcgnagtctgcactgatntacagccctcatctgtatagccgtaccggttcgngattcccggctcgacccacgcgtccgatcagcagcttctgcttgctttgtgggggaaggagagagagagagagagagatctaggggagaggctagtaggtggtcctcgaacgaagatgttggcggtgttcagcgctcaggtggtggaggtgccggccgcactgctggcagctggcagccggacgccgtcgcccacgacgaaggtctctcatctggtggtcgcgcttcctggccgcctccgagcctgccgtgtccgtgcagttcggccaccacagtcacctcgcctacttccacaccaaccacgcgctcctacgccccaggtcgttcgcggcccaggaccaggtgttctgactgatcgagcgggtgctgcacaccctgagtcgtctgaaccatgcacacgggctgtcatgcaagggcgccaacgaggtgctcctagccatggatgcctacaagacgctgcgctatcgcgctccc

SEQ ID NO: 86029 - DNA, 517 bp, Zea mays
  unsure (1)..(517): unsure at all n locations
agtaggttnatcntcgggtctgattcccgccataaccgctcagcatgctaccgcctcggaattcccgggtcgacccacgcgtccgcggacgcgtgggcggacgcgtggggggttggcttctcctccccctccggttcgggttcgggttcgtgaggttctccggggttcgggttcgtgggtgagcggatcgagatggcggcgtcggatgttgagtaccgctgcttcgtcggcggcctcgcctgggccacggacgaccactccctccacaacgccttcagcacctacggcgaggtcctcgagtccaagatcatcctcgatcgggagacgcagaggtcccgcggcttcggcttcgtcaccttctccacggaggaggcgatgcggaacgccatcgagggcatgaacggcaaggagctggacggccgcaacatcaccgtcaacgaggcccagtcccgcggcggccgtggaggcggcggcggtgggtacggtggtggccgtggaggcggcggctactgcggtg

SEQ ID NO: 86030 - DNA, 503 bp, Zea mays
tagagttatctgaggttcaaaaacgcatccgccagattgcatcgctccggattccgggtcgacccacgcgtccgatcgggcggtgggcgtaataggcgcggtgcagatggctcgggcatcgccactcggcgcggcggagctgtgccgtcttctcctcgacgccgaccccactgccctctcccgtgccgtcatctccatctccgcctccctacggcgcctcgccgccaagggccagctctcccaggccgcgtgcgaggactcaataaagcggataaggtgcgtctccgccgtgcaggatctcagggacgcggatcttgtgatcgaggccgtcgtggagaacgaagctgtcaagaagaagctattcgtggagctggataaggtcacgaagccctcggccatcctcgcctccaacacgagctccatctccataacccgcctggcttcagctaccaaacgcccctctcaggtgataggcatgcacttcttcaacccttctccgtaat

SEQ ID NO: 86031 - DNA, 530 bp, Zea mays
agaggtatttagagtccggtatagaactaaaggtattgatggaacggtccggaattcccgggtcgacccacgcgtccgcccaacgagaagagcggcggcgcgggcggacaaggagcaggcggaggaagagctgtgcgaagccagaatgggtatctcacgcgactcgatgcacaagcgccgtgccaccggtggaaagcagaaggcctggaagaagaagcgaaagtatgagcttggtcgccagccggccaacaccaagttgtcaagcaataagacagtgaggagggtccgtgttcgtggaggtaacgtgaagtggagggctcttcgccttgatactggtaactactcatggggaagtgaagctgttacccgcaagacccgtatcctcgacgtggtctacaatgcatcaaacaatgagcttgtgaggacacaaacccttgtgaagagtgccattgtgcaagttgatgctgccccattcaagcagtggtacctcactcactatggagttgacattggtaggaagaagaaaaccc

SEQ ID NO: 86032 - DNA, 534 bp, Zea mays
  unsure (1)..(534): unsure at all n locations
agagggnctcggagtctncatcgaanctcggggggaataacggtagtgctcgtaccggtccggaattcccgggtcgacccacgcgtccggcaccagaaggagctctttgtcgcagccgagggcatgtacacgggccagttcgtctactgcggtcgccgcgccaccctctccatcggcaacgtgctgcccctccgcgggatccctgagggtgccgtcgtctgcaacgtcgagcaccacgtcggtgaccgcggtgtcttcgccagggcctctggggactacgccattgtgatcagccacaaccctgacaacggcacatcgaggattaagctgccctctggcgccaagaagattgtccccagcagctgccgtgccatgattgggcaggttgctggtggaggcaggactgaaaagccgatgctcaaggctggtaacgcgtaccacaggtaccgtgtgaagaggaacagctggcccaaggtgcgtggtgtggccatgaaccctgtggagcatccncacggaggaggtaaccaccaacac

SEQ ID NO: 86033 - DNA, 534 bp, Zea mays
  unsure (1)..(534): unsure at all n locations
aggagggncgtcgaagctgtnttacggaactacccgccattatcgtaggctctaccggtctcggattcccgggtcgacccacgcgtccggttggcttctcctccccctccggttcgtgttcgggttcgtgaggttctccggggttcgggttcgtgggtgagcggatcgagatggcggcgtcggatgttgagtaccgctgcttcgtcggcggcctcgcctgggccacggacgaccactccctccacaacgccttcagcacctacggcgaggtcctcgagtccaagatcatcctcgatcgggagacgcagaggtcccgcggcttcggcttcgtcaccttctccacggaggaggcgatgcggaacgccatcgagggcatgaacggcaaggagctggacggccgcaacatcaccgtcaacgaggcccagtcccgcggcggccgtggaggcggcggcggtgggtacggtggtggccgtggaggcggcggctacggcggtggcgggcgccgtgatggcggtggcggctacggcggtggcg

SEQ ID NO: 86034 - DNA, 519 bp, Zea mays
  unsure (1)..(519): unsure at all n locations
gaggagggntncgtaggtgtgatacccgacatcccgatagatctgtcaccgcactcggaattcccggctcgacccacgcgtccgggagttctggggtctcgaggtcaaacctgtatccactgtcaagtgtgagcctgtactgactttgtcctgcacgtttcccaggctgcccttggggaatcaaagaaaagtgacagtgccttaatgtatgtcaaagttgatgacaagaagcttgccattggaacgctctctatcgacaaatacccacagatacaattcgatttggttctcaataaagagtttgagctgtcacacacatcgaaaactaccagtgtatttttctctggttacaaggttgagcagccaattgagggagatgaaatggatcttgattctgacgatgaacaggaggagctaaacattccagtaatcaaggaaaatggcaaaggtgatgggaaggaggagcagaaaaatcaagagaaggcagtagctgctacagcttcaaaatcaagtcttggc

SEQ ID NO: 86035 - DNA, 530 bp, Zea mays
actaggggaccgtcgagagtctgataaacgcactaaggggaacgtccggcaggtccggaattcccgggtcgacccacgcgtccgcggacgcgtgggtgccgccgccggttcatctgccgccgccaccatgccactaccctacgcaaccgcgccggcctcagcctcatccccagccacacccatgcccgtgccaacagccgcatccaagcccgtgccagctgcagggaacctgcggcgttggcagcaccccgatcctgggccagtgcgtcgagttcctgaggcatcagtgcagcccgacggcgacgccctactgctcgcctcagtgccagtcgttgcggcagcagtgttgccagcagctcaggcaggtggagcccggacacccggtcccaggcgatcttgggctggtccctcagtccaatccggaacaacaggccgaaaaccggccagtcccggggcctttggccgggccaaatgggcaacaaccgaccgccaagttccggcttgaaccagccgattcatggccctacgtt

SEQ ID NO: 86036 - DNA, 522 bp, Zea mays
  unsure (1)..(522): unsure at all n locations
gagagttntnctaagatgtgataagaggagacgcggggatgaatagttatcgctctcggaattcccgggtcgacccacgcgtccgcccactcgtccgattgagaccaactagcaacatagaaagcacaatagtgtaccaacaagtgcagccaaaatattttgcttccttatgctccttggtctttctgcaagtgttgctaccgcgaccattttcccacaatgctcacaagctcctatagcttcccttcttcccccatacctatcaccagcggtgtcttcagtatatgaaaacccaattgttcaaccctacaggatccaacaggcaatcgcaacaggcatcttaccattatcacccttgttcctccaacaaccgtcagccctattacagcagttacctttggtgcatttggtggcacaaaacatcagggcacaacaactacaacaacttgtgctagcaaaccttgctgcatactctcagcaacatcagtttcttccattcaaccaactggctgcattgaactc

SEQ ID NO: 86037 - DNA, 517 bp, Zea mays
  unsure (1)..(517): unsure at all n locations
naggaggntncgaggatgtgttttcgaagaagcggggtagacagtaccgcttcggcattcccgggctgacgttcattccggttggttgactgatccaggtattagcagtcaaccggttcctcggagcacgatgaagttggctgctgactacctgctagctgtcctcgctgggaacgccagcccctgcgctgacgatttgactgccattctggagtcagttggctgtgaagttgacaatgaaaagatggaactcctgctgtcccaactgagcggtaaggacatcaccgagctcattgccgctggcagggagaagtttgcttcagtcccatgtggaggcagcggtgtcgctgctgcagcagctgcacctgctgctggcggagctgctactgcagatgaggctaagaaagaagagaaagcggaagagaaggaagaaagcgatgatgatatgggcttgagactcttcgactaggctgcacagtcatgacactattggtatgggcagtgaaaccagacgaaa

SEQ ID NO: 86038 - DNA, 530 bp, Zea mays
  unsure (1)..(530): unsure at all n locations
agaagggncgtgagattngttaagagactaaggggaagtacagtaagctcgactgctgggtcgacccacgcgtccgacgactcgtccgaccacgcctcacgggtaccgtggtccaatgcgtatttcaaacgtttggcaatgagattcaagaaaaagccggcttgccagacagactaccaggccaggataaaggctgttaacccaagacaaaacaagtacaacacacccaaatacagatttggtgtgcgatttaccaacaaggacatcactgcccaaatcatatctgctagtatagcgggtgatatggttcttgcttctgcctactcgcatgagttgccacgatatggtcttgaagttggtctgaccaactatgcagctgcctactgcactggccttctgttggctcgccgtgtgctcaagatccgtggtttggatcaggagtacgagggcaatgttgaagccaatggtgaggacttctctngtgagccaacttgatagaggaaggcttttcgtgctctttgggatgttgc

SEQ ID NO: 86039 - DNA, 526 bp, Zea mays
  unsure (1)..(526): unsure at all n locations
agtagtnncctcnaagtgtgtacgaanctcaagcatatacagcatgctctaccggttcggaattcccgggtcgacccacgcgtccgaagaacatcgccttgaggacagccttcactttccctggcagtgtgtttgctattttttgcttcttgaatgctcttatctgggggcaaaagtcctcaggtgctgttccattcaccaccatgtttgctcttgtcctcctttggttcggtatttcagtacctttggtttttgttggaagcttccttggcttcaagaaacctaccattgaagatccagtgaagacaaacaagataccaagggcaaatccctgagcaggcctggtacatgaacccaatcttctcgattctaatcggagggatccttccatttggtgctgtcttcatcgaactcttctttatccttacttccatctggctgcaccagttctactacatctttgggttcctcttccttgtgttcctgattctcatcgtgacatgtgctgagatctcgatggcctatg

SEQ ID NO: 86040 - DNA, 533 bp, Zea mays
  unsure (1)..(533): unsure at all n locations
agtagtgactcgagttcgatttcgttctatccgccacttacgtatnattactctaattcgcctaagcacctggaggcacgcatccgaaggacatcgccttgaggttagccggttctttccctggcagtgtgtttgggatttttggcttcttgaatgcgcttatctggcggcaaaagtcctcaggtgctgttccattcaccaccatgtttgctcttgtcctcctttggttcggtatttcagtacctttggtttttgttggaagcttccttggcttcaagaaacctaccattgaagatccagtgaagacaaacaagataccaaggcatatccctgagcatgcctggtacatgaacccaatcttctcgattctaatcggagggatccttccatttggtgctgtcttcatcgaactcttctttatccttactttcatctggctgcaccagttctactacatctttgggttcctcttccttgtgttcctgattctcatcgtgacatgtgctgagatctcgattgtcctatgttacttc

SEQ ID NO: 86041 - DNA, 515 bp, Zea mays
  unsure (1)..(515): unsure at all n locations
agtagggatctagttatacaaagaataagagtaanctgctaccgccttcggaattcccgggtcgacccacgcgtccgcccacgcgtacggtacgacacttcgttcagtgaagatgagaagaagcaatccaagcagctgaagagcagctgctacctaaacaatgctgcctgcaaactgaagttgaaggattacaaggaagctgcgaagctttgcaccaaggttctggaactagacagccaaaatgtcaaggctctctacaggagggtgcaagcttacattcaacttgctgacctagagctagcagaggccgatatcaaaaaggcactggaaatcgatcctgacaacagggatgtcaagttggaatataagatcctgaaggagaagatcaaggagtacaacatgaaggacgccaaattctacagcaacatgttcgccaagatgacaaagtagcttttggggtggaggatgttgtggtgaagcgaacggattaaaaacaccgatttctgctgccgaaa

SEQ ID NO: 86042 - DNA, 466 bp, Zea mays
  unsure (1)..(466): unsure at all n locations
agaggacgggtttaaatgagacagaaaacgtatctctaccggtccgattgcggagcgtccgccaccgtcgccaccgtcgccaccgtcgattgatccactagcaacatcatatggatacactacacatttacaccaatggcagccaaattttgcctcttgccctccttgctctttcagcaaacgttgctaccggactattattcacaatgctcacaacaatacctcttccggtgacagccgcgagatttgaatacccaactatacaatcctacaggctacaagaggccatcgcacaagcatcttacggtcgtagcattgactgttcacaccatatgccctattgcaacaaccatcctaatgaatctatatcntccaagaatcgtagcacatcaactacaacaacaattgcttccacaatncaaacaagagtttcagcgaacttgagcttacctcagcaaaacaattn

SEQ ID NO: 86043 - DNA, 531 bp, Zea mays
  unsure (1)..(531): unsure at all n locations
agtagggtaggtcttngattcagctcctactgnatcgatcgtaccggcccggaattcccgggtcgacccacgcgtccgtcctgcggcgtcggcagcgtcggcagcccgttcctgggccagtgcgtcgagttcctgaggcaccagtgcagcccggcggcgacgccctacggctcgccacagtgccaggcgctgcagcagcagtgctgccaccagatcaggcaggtggagccgctgcaccggtaccaggcgacatacggtgtggtcctgcagtccttcctgcagcagcagccgcagggcgagctcgcggcgctgatggcggcccaggtagcgcagcagctgacggcgatgtgcggcctgcagctgcagcagccaggtccctgcccttgcaacgcagctgccggcggtgtctactactgaggaaactatgtactggagtaataatgtaatggagccgctggctagctacctagctcgctagtttactcatttaaaaaaaaaaccaatttcttcatttaaacaaatggtttagcg

SEQ ID NO: 86044 - DNA, 528 bp, Zea mays
  unsure (1)..(528): unsure at all n locations
agtaggggactaggtttgagtcacgcactacagcaccctcgtaacggctcggaattcccgggtcgacccacgcgtccggttgacaagaagactagaaccgaacctgaccatgtcgctgatccgccgcagcaacgtgggcgatcggttctccctcgacctatgggacccctttgagggcttccccttcggctccggcagcagcagcagtctcttaccctcgttcccgcggaccagctcggagaccgcggccttcgctggcgcgcggatcgactggaaggagactccagaggcgcacgtgttcaaggcagacgtaccggggctgaagaaggaggaggtcaaggtggaggtcgaggacggcaacgtccttcagatcagcggcgagcgcaacaaggagcaagaagagaagacggacacctggcaccgcgtggagcggagcagcgggagattcctgcgcatgttccgactgcccgagaacgccaagacggagcagatcagggccgncatggagaacggcgtgcttacagtcan

SEQ ID NO: 86045 - DNA, 535 bp, Zea mays
  unsure (1)..(535): unsure at all n locations
agagaggggcggnnttnnaattacgtaactaccgatactcatcgtaangtctctnnnnnttnggnnnnnnnggctcgacccacgcgtccgcccacgcgtccgcaacaagcaacatagaaagtggaatccagtagcaacaatagagcaggaatggagaccaagatattttccctccttatgctccttgctctttctacatgtgttgctaacgcgacaattttccctcaatgctcacaagctcctatagcttccctttttcccccataccttccatcaattatagcttcagtatgtgaaaacccagctcttcaaccatataggcttcaacaagcaatcgcagcaagcaacatacctttatcgcccttgttgtgtcaacaatcgccagccctatctttggtgcagtcattggtacaaaccatcagggcacaacagctgcagcaactcgtgctacctgtgatcaaccaagtagctctggcaaacctttctccctactctccgcaacaacaatttcttccattcaaccaactgtctacac

SEQ ID NO: 86046 - DNA, 541 bp, Zea mays
  unsure (1)..(541): unsure at all n locations
tagttagtnnncagatctcntgattcacagacatacaagancatctactgtaactgctcgtaccggtccggaattcccggctcgacccacgcgttcggcaacatacatagtgaagtacactagcaacatcttagcaccaatgggagccaagattgggccctccttgccctccttgctctttcagcaagcgctgctacctcgacttttattccacaatgctcacaacaatacctctctccggtgacagccgcgggatttcaatacccaactatacaatcctacatggtacaagaggccatccaagcaagcatcttacggtcattagcattaaccctccaacaaccatatgctctattgcaacagccatccttagtgcatctgtatctccaaagaatcgcggcacaacatctacaacaacagttgctaccaacaatcaatcaagtagttgcagcgaaccttgctgcttacctgcagcaacaacagtttcttccattcaatcaactagctggggtgaaccctgctatctacttgcaggcacaac

SEQ ID NO: 86047 - DNA, 516 bp, Zea mays
  unsure (1)..(516): unsure at all n locations
aggaggggnaaagagttgttaagaataggggggaaaagagaaagcttctaccggtccggaattcccgggtcgacccacgcgtccgcaacaagcaacatagaaagtggaatacagtagcaacaatagagcaacaatggcggccaggatattttccatccttatgctccttgctctttctgcatgtgttgctaacgcgaccatttttcctcaatactcacaagctcctatagctgcccttcttcccccataccttccatcaatgaccgcttcagtatgtgaaaacccagcccttcaaccctacaggctccaacaagcaatcgcaacaagcaacttacctttatcacccctgttctttcaacaatcgccagccctatctttggtgcagtcattggtacaaaccatcagggcacaacagctgcagcaactcgtgctaccagtgatcagccaagtagctctggcaaacctttctccctactctcagcaacaacaatttcttccattcaaccaactgtctac

SEQ ID NO: 86048 - DNA, 527 bp, Zea mays
  unsure (1)..(527): unsure at all n locations
nagtaggaactgagtttgaaagagataacggcaaaacagtatgctctaccggtccggaattcccgggtcgacccacgcgtccggtttcacagacagcatccattccacagtcaccagagcactagagcagagcggcaaccgacaagagcagagtgagatcgtcgtcagcgagcccagcagatacgagagagaggatggcggacatcgcgttgctggtggcggagcagttcgagaagacggcaaggcgaggcgcccccggcggggacagcggcagcagcagcgggagcggcggcgagacaaggaacttcggggccgtggccaaggtgtggagctcgtgggtggagtccgccttcgtcgtcgcgtccggggtcagattcaccgtcgcggtgcagctggagcccaagaccgggctcgcgctggccgctgccgacggccttttttccgcctagcttcctgcctgcttccatgtctttctcctgagcagtgccagtgatcgagcgagtcctgctcctgcaccccgtactatn

SEQ ID NO: 86049 - DNA, 522 bp, Zea mays
  unsure (1)..(522): unsure at all n locations
agtagtnnnncctagggtgcgttacggaataggggggaaaagagaaagcttgtaccggtccggaattcccgggtcgacccacgcgtccgcccacgcgtccgcccacgcgtccgcccacgcgtccgcccacgcgtccgctcgtcgcatgttccttgcaaccgattgcctatccccctcccaaccaaagaccgatggcgcccaaggccgagaagaagcccgcggcgaagaagccggcggaggaggagcccgcggccgagaagacgaccgccgggaagaagcccaaggcggagaagcgggtccccgcgggcaagtccgccggcaaggagggcggcgagggcaagcgtggcaagaagaagggcaagaagagcgtggagacgtacaagatctacatcttcaaggtgctgaagcaggtgcacccggacatcggcatctcctccaaggccatgtccatcatgaactccttcatcaacgacatcttcgagaagctggccggcgaggccgtcaagctcgcgcgctacaacc

SEQ ID NO: 86050 - DNA, 464 bp, Zea mays
agttagtgaactaagactctaattcgtaccaccccgcctcagtccgtatcgacattaccggttcggacttccggacgcgacccactcgtccgccgacacgtacgcccacgcctccaccctctcgtccgcccacgcatcctctagtcacaagttccttgcaaacgattgcctatccccctcccaaccaaagacctatggcacccaatgccgagaagaagcccactcccaagaaacccccggaacaaaagcccaagaccgataagaccaccatctggaagaatcccaatgcagataaacacgtccccgagtcaacacctccaccaagaggacccaaggctaacttacatgaaaagacacaacacgtgagcatacaaacacagctcaatctaacactcacccaatcgcttctcatacttcatataaccatatcacactttgaaacttacccatctcaaattccctac

SEQ ID NO: 86051 - DNA, 534 bp, Zea mays
tagtagttttctaaggtctaatcaccgacatcaacgacaattatagttattgctcctgcattcccggatcgacccactcgtccgattgagaccaactagcaacatagaaagcacaatattgtaccaataatggcagccaaaagattttggctcattatgctccttggtctttctgcaagtgctgctacggcgagcattttcccgcaatgctcacaagctcctatagcttcccttcttcccccatacctctcaccagcgatgtcttcagtatgtgaaaatccaattcttctaccctacaggatccaacaggcaatcgcagcaggcatcttacctttatcacccttgttcctccaacaatcatcagccctattacagcagttacctttggtgcatttattggcacaaaacatcaaggcacaacaactacaacaactcgtgctagcaaaccttgctgcctactctcagcaacagcagttacctttggtgcatttgctggcacaaaacatcaaggcacaacaactacaacaactcgtg

SEQ ID NO: 86052 - DNA, 529 bp, Zea mays
gagtagtttcctagggtctgtttaaagaataaaagatatgttgtaccggcccggaattcccgggtcgacccacgcgtccgcccactcgtccgcgatggtggaactggtaaaactacatttgtgaagaggcatctcactggagagtttgagaagaaatatgaaccaaccattggtgtggaagttcatccgttggatttcaccactaactgtggtaagatcaggttctactgctgggataccgcatggcaagagaagtttggtggcctcagggatggatactatatccatggccagtgtgcgatcatcatgtttgatgtaacctcaaggcttacttacaagaatgttcctacgtggcatagggacctgtgcagggtctgtgaaaacatccccattgtcctctgcggtaataaggttgatgtgaagaacaggcaggtcaaagccaagcaggttactttccacaggaagaagaatctgcagtactatgaaatttctgccaagagcaactacaactttgagaaacctttcctgt

SEQ ID NO: 86053 - DNA, 527 bp, Zea mays
  unsure (1)..(527): unsure at all n locations
nagagggnctcagtttgttcacgcataccgatatcatcgtaccggcccggaattcccgggtcgacccacgcgtccgcccactcgtccggcgtcgtcacaactggccgcaagatcattggcgccaccaaccccctggcttctgagcccggcaccatccgtggcgactttgctgtcgacattggcaggaatgtcattcatggaagtgacagcattgagagtgctaataaggagattgccctgtggttccccgagggccctgctgattggcagagcagccagcacccctggatctacgagaagtaaacatggaaagtttcacatcaaaccttgagagccagaggaagcatgtcaccatttgtgctttagcaatgttttcgaaaagattatgatctgtatcttggaaccttatttcaatggaccaaatttctttcaaaaaaaaaaaaaatcactaatctaaagacaaaaaatataataaactttacaaattattacaaaaaaaaaaaaaagggcggccgctctaaaggatc

SEQ ID NO: 86054 - DNA, 534 bp, Zea mays
  unsure (1)..(534): unsure at all n locations
acgtagtgatcgtagtgtctgtngactganntttccatnnngtcnagtactactctaccggttcggaattaccgactcgacccacgcatcctagcgcgattgcggaactgcttaaacttcatttgtgaagaggcatctcactgcagagggtgagatgaaatatgaaccaaccattggtgttgaagttcatccgttggatttcaccactaactgttgtaagatcacgttctactgctgggataccgcatggcaagagaagtttggtggcctcatggatggatactatatccatggccagtgtgcgatcatcatgtttgatgtaacctcaaggcttacttacaagaatgttcctacgtggcataaggacctgtgcaatgtctgtgaaaacatgcgcatagtccattgcggtaataaggttgatgtgaaaaacatgcatgtcaaaaccaagcaagttactttccacaggaaaaagaatctgcagtactattaaatttctgccaataacaactacaacttttagaaaccttttctgtg

SEQ ID NO: 86055 - DNA, 526 bp, Zea mays
agagtttcttagtttgttaagatacccgacaatattgtattgctcgtaccggtccggaattcccgggtcgacccacgcgtccgcccactcgtccgggctggcaagacagactacagggccaggataaggctgattaaccaggacaaaaacaagtacaacacacccaaatacagatttgttgtgcgatttaccaacaaggacatcactgcccaaatcatatctgctagtatagcgggtgatatggttcttgcttctgcctactcgcatgagttgccacgatatggtcttgaagttggtctgaccaactatgcagctgcctactgcactggccttctgttggctcgccgtgtgctcaagatccgtggtttggatcaggagtacgagggcaatgttgaggccactggtgaagacttctctgttgagccagctgatgagaggaagcctttccgtgctctcttggatgttggccttatcaggactacaacagggaaccgtgtctttggtgccctcaagggagcattggatg

SEQ ID NO: 86056 - DNA, 534 bp, Zea mays
  unsure (1)..(534): unsure at all n locations
naggagtntnctttcagtctgtaacagacacatgcggggaaaacaggatagctcgtaccggtccggaattcccgggtcgacccacgcgtccgttccttctcgccgataagcagcagctcatcacctgaaggagagcagcccggaggagggggagcaagcagcagccgtcggtggaagatgtcgtacctgctgccgcatctgcactcggggtgggcggtggaccaggccatcctcgccgaggaggagcgcctcgtcatcatccgcttcggccatgactgggacgagacctgcatgcagatggatgaagtgctagcagcagtagctgagaccataaagaactttgcggtcatctaccttgttgacatcacagaggtccctgatttcaacaccatgtatgagctgtacgacccttcgacagtgatgttcttcttccggaacaagcacatcatgattgatctcgggactggaaacaacaacaagatcaactgggccctgaaggtacagcaagagttcatcgacattgtggagaccgta

SEQ ID NO: 86057 - DNA, 525 bp, Zea mays
  unsure (1)..(525): unsure at all n locations
agaagtnnnnnnttaaggtctcgttaaggacaacggggggaaagagagaaatgcttgtaccggtccggaattcccgggtcgacccacgcgtccgttcagaaacacaccaagcgaagctacctagcaacgacttaacaacaatggctaccaagatattagccctccttgcgcttcttgccctttttgtgagcgcaacaaatgcgttcattattccacaatgctcacttgctcctagtgccattataccacagttcctccgaccagttacttcaatgggcttcgaacacctagctgtgcaagcctacaggctacaacaagcgcttgcggcgagcgtcttacaacaaccaattaaccaattgcaacaacaatccttggcacatctaaccatacaaaccatcgcaacacaacagcaacaacagttcctaccagcactgagccaactagatgtggtgaaccctgtcgcctacttgcaacagcaggtgcttgcatccaacccacttgctctggcaaacgtagctgcatacc

SEQ ID NO: 86058 - DNA, 522 bp, Zea mays
  unsure (1)..(522): unsure at all n locations
aggtaagttatnactaaggtctnattacgtaanacagcgggtataacagcaatgcttctaccggtccggaattcccgggtcgacccacgcgtccgtaagaactgtttggtcattcagtggtctggagataatcctaatagccttgcaggtttagctctgaatacccctggtgatcttgccattagccttggtactagtgatacagtattcgggataacaacagaagctaaaccaagccttgaaggacatgttttccccaatcctgttgagcctaatggttatatggtcatgctatgctacaaaaatggctccttgaccagagaagatgtacgaaatctctgtgcagacaaatcatgggacgtttttaacagctatctggagaaaacgccccctctaaatggtgggaagttaggattctactactaagaccatgaaatcctccctacacttccagtgggtttccatcggtacactgttgaaaacctgaacgacgtctcatcagacgctctgttggagcgtgaa

SEQ ID NO: 86059 - DNA, 521 bp, Zea mays
  unsure (1)..(521): unsure at all n locations
agtaggtnctggtctgtaacgaattaagcaagatcgtacggctccggattcccggtcgacccacgcgtccgtcaagcgaagcgcactagcaacgacctaacaccaatggctaccaagatattagccctccttgcgcttcttgcccttttagtgagcgcaacaaatgcgttcattattccacagtgctcacttgctcctagtgccagtattccacagttcctcccaccagttacttcaatgggcttcgaacatccagccgtgcaagcctacaggctacaactagcgcttgcggcgagcgccttacaacaaccaattgcccaattgcaacaacaatccttggcacatctaaccctacaaaccattgcaacgcatcaacaacaacaacagtttctgccatcactgagccacctagccgtggtgaaccctgtcacctacttgcaacagcagctgcttgcatccaacccacttgctctggcgaacgtagctgcataccagcaacaacaacagctgcaacagtttat

SEQ ID NO: 86060 - DNA, 525 bp, Zea mays
  unsure (1)..(525): unsure at all n locations
agaggaactgagtctgttacgattaccgatagtacttactgctcgtaccggtccggaattcccgggtcgactacgcgtccgtcttccttcatgaagctcgtgtcttggtatgacaactagtggggctacagcaaccgggttctggatctgatcgctcacatggctcttgtgagcgccaagcactgatgttcgtactcgttcctccagtaccagtagtagcctagataagaggctgcagttttgacggccattttcttttagctgttgtttggaataaaagaccaaatgttggaacacttggaactcgcgcaaaactggaatccgattcatgacctgtgttttagttgtagagggggcaaatttgcatcgtactatatgcgggattgttgatcggatgtcgtatggttcaaaagaaatacanactacaactggttcaaacaccggaactacatggctcagtactagattaatcaaccggtgtacccaatggtaacggtttgctaagaccagattcaatttggctta

SEQ ID NO: 86061 - DNA, 528 bp, Zea mays
agtagtttttagtgttattatgaataccgaatatattgtattgctcgtaccggtccggaattcccgggtcgacccacgcgtccgaactagcaacatagaaagcacaatagtgtaccaacaatggcagccaaaatattttgcctccttatgctccttggtctttctgcaagtgctgctacggcgaccattttcccgcaatgctcgcaagctcctatagcttcccttcttcccccgtacctctcaccagcggtgtcttcggtatgtgaaaacccaattcttcaaccctacaggatccaacaggcaatcacagctggcatcttacctttatcacccttgttcctccaacaatcatcagccctattacatcagttacctttggtgcatttattggcacaaaacatcagggcacaacaactacaacaacttgtgctagcaaaccttgctgcctactctcagcaacagcagtttcttccattcaaccaactagctgcattgaactctgcttcttatttgcaacaacaacaacta

SEQ ID NO: 86062 - DNA, 528 bp, Zea mays
  unsure (1)..(528): unsure at all n locations
aagtnagttttnnncctgaagggctcaattactgatatacgcgggggaagaaagagaaagcttctaccggtccggaattcccgggtcgacccacgcgtccggcgtcagcgactcccggcgaagacgatggggaaggggttcgcatcctacctggcgatgaagacggggccggagggcggcgacgcggcggcggcgcagcaggctctgatcgacgcggacctgcgggagctcggcgtcgccgcgcggaagctcgccaaccacgcattcgtcctcggcggcgggctggggttcggcacctccttcctcaaatggctggccttcctcgccgcagtgtatctcttgatattggatcgcacaaattggaagaccaacatgctgacagctctcttggttccttacattttcttcaccctgcctaatgtgctgttttctctgatcagaggagaggtggggaaatggattgcgattattgctgttattctgcgtctattctttccacgacacttcccagatgggttagagcttncc

SEQ ID NO: 86063 - DNA, 514 bp, Zea mays
  unsure (1)..(514): unsure at all n locations
agtagtnnnnctaaggttgttaagaataggggggaaaagagaaagcttgtaccggtccggaattcccgggtcgacccacgcgtccgattcccaactgcagctgcgcgcctcgactggtagcccgaaccctagctagcaggtcggaggcgagagagcagccatggcgcggtgcctcgcgctcgtctccttccttctcctcggcctcgcctccgccgcctccgctgccgatgcgccctttgtcgtcgcgcacaagaaggtttcgctctcccgccccaagccgggcgtcgagcgcgtcgccgtctccctcgacctctacaaccagggatccgcgactgcctatgatgtgtcacttaatgacgactcttggccaacacaagcatttgagcttgtcactggagagaaatcgaagacattggaaaggcttgaccctggtgccactgctacacacacatatgtcctggagaccaaaacacagggcaggttccagggttcaccagctattattacgtaccgt

SEQ ID NO: 86064 - DNA, 519 bp, Zea mays
  unsure (1)..(519): unsure at all n locations
gagagttnnncttaggttcattacgaataggggggagaagggaaagcttctaccggtccggaattcccgggtcgacccacgcgtccgccgacgcgtccgcccacgcgtccgcccacgcgtccgcccacgcgtccgcggacgcgtgggcgccgccatgtcgaagcgaggcaggggaggttcggcggggaacaagttccgcatgtcgctgggtctgccggttgccgcgacggtgaactgcgcggacaacacgggcgccaagaacctctacatcatctccgtcaagggcatcaagggccgcctcaaccgcctcccgtccgcctgcgttggcgacatggtcatggccaccgtcaagaaggggaagcccgacctcaggaagaaggtgatgcccgccgtcatcgtccgccagcgcaagccgtggcgccgcaaggacggtgtctacatgtacttcgaagataatgctggagtgattgtgaatcccaagggtgagatgaaaggttccgctatcactggacctatcgn

SEQ ID NO: 86065 - DNA, 532 bp, Zea mays
  unsure (1)..(532): unsure at all n locations
naggaggaacgtnagtatgattaacgcactacaagcnagngatggtaccgctccggaattcccgggtcgacccacgcgtccgaatccatcgagaggccgtcgacaggggaattaatggcgtcgtcgtctagcagcagccaccgccgcgtcatcctcgcagccgccgtcctgctctccgtgctcgcggctgccagcgccagcgccgggacctcctgcgtgccggggtgggccatcccgcacaacccgctcccgagctgccgctggtacgtgaccagccggacctgcggcatcgggccgcgcctcccgtggccggagctgaagaggagatgctgccgggagctggcggacatcccggcgtactgccggtgcacggcgctgagcatcctcatggacggcgcgatcccgccgggcccggacgcgcagctggagggccgcctagaggacctgccgggctgcccgcgggaggtgcagaggggattcgccgtcaccctcgtcacggaggccgagtgcaacctggccaccatcagcggcg

SEQ ID NO: 86066 - DNA, 543 bp, Zea mays
  unsure (1)..(543): unsure at all n locations
gaggagttnnccttttagctgtgattatagacantccacgacaatatacagtaattgctcgtaccggtccggaattcccgggtcgacccactcgtccgaagaaattagcgaatattggaaaaatcatctagagaaaaatgttgaagaacttcgcacatccaaggaaaggtgctttgagaaatccttggattgcgtgaagaaaataaaagctagcttcgccaaattgggtgcctactcttctgaaaaaaacttcatatgaggcgaccccgaaggcgttgttgaatggataagtggagaagccgaaacctttgaagaaattttgagtgattgcggggatgtttgcgcgtttttcggtgcacggggaatttgagccatgttggagaaggctggatgtgatcatattaaacccatagcctaggccgaaactgccttctccgtagatgatacanaggatccttcagccgaggcaaccttaatggatggaaatttttacaatgatgtctgggtgaatggtggccaagagatggcccatgagattataan

SEQ ID NO: 86067 - DNA, 536 bp, Zea mays
  unsure (1)..(536): unsure at all n locations
naggaggnnncntaaggtctnnttactgagctaccgaatatattgtattgctcgtaccggtccggaattcccgggtcgacccacgcgtccgatccaagtcttctgcatatctgaagaggataccgacgcagaggagctgaaagctgatggcaaaaagttcttgtatgatcttaggatgcaagctgaggtcattgttgtcactatgaaatcatgggagtcacacatggagagcagcagtagcggtgttcagcaggataactcccatgaggcttacacaagtgcacagcaaaggatcgaaacataccttgacgagatgaaggaaactgctcaaagagaaaggcagccactaaaggagaatgggaggcaagttgttgtgaatgaacagaaggttgataaattcctttacacaatgttgaaattgaactccacgatactcaggtactccagaatggcagctgtagttcttgtgagccttccaccaccaccactaaatcatcctgcatatttctacatggagtacatggatttgcttgtaa

SEQ ID NO: 86068 - DNA, 521 bp, Zea mays
  unsure (1)..(521): unsure at all n locations
nagtagtnnnnnnttagggtttgattaacgatattggggggaaaaaggaaagcttctaccggttcggaattcccgggtcgacccacgcgtccgcggacgcgtgggttttacacccagcgctcaagccagattattgaagcaaacaaggacataagtagaagacggtaagagtgcatgcatgaaacattaattctactcatgatcgaccacgacacacaacaattgagcacgcatgcaagctgttttttttattcagaagattccgaggagcggggacgacgacgacgtcctgctgctcctgcatgcatgtagtcctctacgcacgacggcggtcgccgcagctcggcgcgggctcctcctcctcggcggccgggccggcgacgaggtgctcgtagacgacgccggagaggccggcgccgaccatgggccccacccagtacacccattggtgtctccagcgacgggagcccacgacggcgggcccgaacgcgcgcgccggattcatcacggcgccctccagc

SEQ ID NO: 86069 - DNA, 523 bp, Zea mays
  unsure (1)..(523): unsure at all n locations
gaggaggggtccgtaggtgtgnttactgagtacccgccatatacagcaacgcttctaccggtccggaattcccgggtcgacccacgcgtccgggcaaaactactcttgggtttgctccttgcccttgctattctagggacaacatcgggggctggttgtgtacaagacgcggaagacatgaaacgagagtgcaagcagtttgagctattcccagcgaacccaaagttgccaccgtcggcagcatgttgtgctgtgtggaagagggcagatgttccatgcctatgcaaatatgttaacaaggaagtagagaaggtatggtgcatggagaaggttgtgtacgtcgccaactattgtaagaggccgtttcaacctggctacaagtgcgggagttatacagttcctcttagtatgtaaaaggagtggttgggacatgtggtactctctcctagaactttaatttgagatttgtaacatgtgagagactattgagaataatatgtatggagtaatatgcttccttctt

SEQ ID NO: 86070 - DNA, 524 bp, Zea mays
  unsure (1)..(524): unsure at all n locations
agaggnnctaggttgatcacgaatagaagtaccatccgtacggcncggaattcccgggtcgacccacgcgtccgcacggaggaggcgatgcggaacgccatcgagggcatgaacggcaaggagctggacgggcgcaacatgaccgtcaacgaggcccagtcccgcggcggccgtggaggcggcggcggtgggtacggtggtggccgtggaggcggcggctacggcggtggcgggcgccgtgatggcggcggcggctacggcggtggcggcggctacggtggcggcggcggctactgtggtggtggcggcggctacggcggtggcaaccgtggcggcggctacggcaactccgacgggaactggaggaactgagcggtggggcccgcgcggtcaagttatcctgttcgctgccgtgatgtttaccctagtccagagggtttatcttcgttcgtctcgtgtttgttgttgcccatctgtgtttttgattgcaaggtcgctctgtgtcagttgttaatgctgtgttc

SEQ ID NO: 86071 - DNA, 528 bp, Zea mays
  unsure (1)..(528): unsure at all n locations
nagaggtnctgagtttgatacagaataaaagctaggaatgtaacggcccggaattcccgggtcgacccacgcgtccggcaaccatcaacgatgggtctgtcatatagatcggctgcgtttgcgtctacaaaacaagaacctacaatggtattgcatcgatggatcgtgtaaccttggtatggtaagagccgcttgacaggaagtcgagcgttcgggcgcaagatgcgttgtctggcatgctgttccttgaccatttgtgctgctagtatgtactgttataagctgccctagaagttgcagcaaacctttttatgaacctttgtatttccattacctgctttggatcaactatatctgtcatcctatatattactaaatttttacgtgtttttctaaaaaaaaaaaaaaagggcggccgctctagaggatccaagcttacgtacgcgtgcatgcgacgtcatagctcttctatagtgtcacctaaattcaattcactggccgtcgttttacaacgtcgtgactgggaan

SEQ ID NO: 86072 - DNA, 527 bp, Zea mays
  unsure (1)..(527): unsure at all n locations
agaggtctgagtgtgtaagagattgaaggaaatactgttacgctccggaattcccgggtcgacccacgcgtccggtccgcgtggagccggagcacggctttcaccagctgaatccgtcgccgtcgtcgtcgtcgttttggttcccatcgtcacaagtccagtaccaaacgtgccagcgcgacgtcgacaggcacaacgtctgcgccatggaggtgaggcacagcgtcgaacggctggaccaggccgacgtctacagccctggggctgggaggatcacacgcctcaccagccacaagttccccgtcctcaacctcgtacagatgagcgcggtgcgggtagacctgtaccaggacgccatcatgtcgccgttctggaacttcaacgcccacagcgccatgtacggcatcaggggcagtgcaagggtccaggtcgccagcgacaacgggaccacggtgttcgacgacgtgctccgtgcggngcagctgctcatcgtaccccagggctacctcgtcgccaccaatgcgcag

SEQ ID NO: 86073 - DNA, 530 bp, Zea mays
  unsure (1)..(530): unsure at all n locations
aggagtnnnctaagatctgttccgaaaacacgccaatatagtattgctctaccggtccggaattcccgggtcgacccacgcgtccgcttatttgcaacaacaattaccattcagccagctagttgctgcctacccccagcaattgcttccattcaaccaactagcagcattgaactctgctgcttatttacagcagcaacaactactaccattcagccagctagctgatgtgagccctgctgccttcttgacacaacaacagttgttgccgttctacctgcacgctatgcctaacgctggcaccctcttacaactgcaacaattgctgccattcaaccaacttgctttgacaaactcaacagtgttctaccaacaacccatcattggtggtgccctcttttagattgcttatgagttatagttcaataatgaagttttttggatgatgtttgtggcgtcccagaaataagaaagtacatttctagattcttaaaaaaaaaaaaaaaaaaaaaagaaaaaaaaaaaagaaa

SEQ ID NO: 86074 - DNA, 533 bp, Zea mays
  unsure (1)..(533): unsure at all n locations
nagaggnnctgagtccnaacagagttaccgcngaaaaatggaattgctcgtaccggtccggaattcccgggtcgacccacgcgtccggcctcgcctcgcccctgtttgtttgcttctggccggaccccttccccttctccggtgcgcgccactctgcaacccccctcctctcgagcagagcagtcgagcagagcggcagcctcggcgcgcgccggcgccagccgacatgactgccggtcagtgcggcaacatccaggaccaggaggcagctcctggcgccgacctctacgccgtgctcgggctcaacagggagtgcaccgacgccgagctcagggtcgcgtaccggaggctcgccatgatatggcatccggacaggtgctcggcgtccggcagctcggcgcgcgtggaggaggccaaggagcggttccaggagatccagggcgcctactccgtgctctccgactccaacaagcggctcctctacgacgtcggcgtctacgacagcgaggacgacgacgctgacctgtcggggt

SEQ ID NO: 86075 - DNA, 529 bp, Zea mays
  unsure (1)..(529): unsure at all n locations
agtagggncntaagatctgttacgattaccgaatatattgcaacgctcgtaccggtccggaattcccgggtcgacccacgcgtccgcggactcgtgggcggactcgtgggcggacgcgtgggctttgttcccatctgtggtttggaaggtgacaacatgattgagaggtccaccaaccttgactggtacaagggcccaaccctacttgaggctttggacttgatcaatgagccgaagaggccttcagacaagcccctgcgtctccccctacaggatgtgtacaagattggtggtattggaactgttcctgttgggcgtgttgagactggtatcatcaagcctggtatggttgttacctttggtcctagtggccttactactgaggtgaagtctgttgaaatgcaccatgaggctctccaggaggcccttcctggtgacaatgttggcttcaatgttaagaatgttgctgtgaaggatctgaagcgtgggtatgtggcctncaactccaaggatgaccctgccaaagagg

SEQ ID NO: 86076 - DNA, 513 bp, Zea mays
  unsure (1)..(513): unsure at all n locations
aggagtnnnctaaggttgttaggcataggggggaaagaggaaagctctaccggtccggaattcccgggtcgacccacgcgtccgcgcaaattgcaccaagaaatccatcgagaggccgtcgacaggggaattaatggcgtcggcgtctagcagcagccaccgccgcctcatcctcgcagccgccgtcctgctctccgtgctcgcggctgccagcgccagcgccgggacctcctgcgtgccggggtgggccatcccgcacaacccgctcccgagctgccgctggtacgtgaccagccggacctgcggcatcgggccgcgcctcccgtggccggagctgaagaggagatgctgccgggagctggcggacatcccggcgtactgccggtgcacggcgctgagcatcctcatggacggcgcgatcccgccgggcccggacgcgcagctggagggccgcctagaggacctgccgggctgcccgcgggaggtgcagaggggattcgccgccaccctcgt

SEQ ID NO: 86077 - DNA, 529 bp, Zea mays
  unsure (1)..(529): unsure at all n locations
tagtaggancctaggtttgaaaacagcatagaagatactgtggtaacggcccggaattcccgggtcgacccacgcgtccgcaaaagggaggggagagtgtcgtcatggcttccattgtcgcttccaggagggccgttcgtctagttcgcgctctggagaagctcatcgcagcgtcctccgctcccgggactggctccgccctcaggccggtggcagtcgccggcggcctccgcggctacaacaccggcgctccgctccgacgctacgagggggccgagtcggaagacgatagcgtccgcgagtacgatgggcggcacggcggccgggactacgctgtgcccagcctgttctcagatattttccgtgatccgcttagtgcgccgcacagcattggccgtctgctgaaccttgtggacgacttggcggtggcggcgccaggtcgtgcggtgcgccgtggctggaacgcgaaggaggacgaggaggcgctgcaccttgaggtggacatgccaggcctggggaaggagcacgt

SEQ ID NO: 86078 - DNA, 529 bp, Zea mays
  unsure (1)..(529): unsure at all n locations
aggagtncctaagtctgatacagaataaagacagtactgtaccgctccggaattcccgggtcgacccacgcgtccgcccttgttcctgcaacaatcatcagccctattacagcagttacctttggtgcatttattggcacagaacatcatggcacaacaactacaacaacttgtgctagcaaaccttgctgcctactctcagcaacagcagtttcttccattcaaccaactagctgcattgaactctgctgcttatttgcaacaacaactaccattcagccagctagctgctgcctacccccaacaatttcttccattcaaccaactggcatcattgaactctgctgcttatttacagcagcaacaactactaccattcagccagctagctggtgtgagccctgctgccttcttgacacaacaacagttattgccgttctacctgcacgctgcgcctaacgctggcaccctcttacaactgcaacaattgctgccattcaaccaacttgctttgacaaacccagcagcg

SEQ ID NO: 86079 - DNA, 533 bp, Zea mays
  unsure (1)..(533): unsure at all n locations
aggaggancgtaagtgttattaccgcatacacgacaagtgacggatcggcacggaattcccgggtcgacccacgcgtccgggcgactccaggtttgtcggcgatgctgcgagcgggaggcaggcggctcctcgccccggggctccgtcggctcggcctgggcacaggcgcctccggcgaggcgggtcctgccgcggcggcggcggcggtgagggcgtaccacgagcgggtggtggaccactacaacaacccgcggaacgtaggttccttcgacaaggacgaccccaacgtcggcactgggttggtcggcgcgccagcctgcggcgacgtcacgaagctgcagatccgcgtcgacgagaactccggcatgatcgtcgacccctgcttcaagactttcggctgcggctccgtcatagcgtcctcgtccgtcgctactgaatgggtgaagggaaaaccaatggatgaagttttgacaatcaggaacacggagatcgcgaagcacttgtcccttcaccagtaaagctgcattgcagc

SEQ ID NO: 86080 - DNA, 520 bp, Zea mays
  unsure (1)..(520): unsure at all n locations
agggagtnnnnntaaggtgtgattacgtaataggggggaaaatgggaaagcttgtaccggtccggaattcccgggtcgacccacgcgtccgcccacgcgtccgtgactggcgaggcaaaagcattgcgaccacagacagcgcgcgcttcggggccttttttttgagataacaaggaggagaggaggagatggcggtcacgatcacgtgggtgaaggcgaggcagatcttcgacagccgcggcaaccccaccgtcgaggtggacgtgggccttagcgacggcagctacgcgaggggggccgtacccagcggcgcatccactgggatatatgaggccttggagttgagggatggaggatctgattatcttggcaagggtgttcttaaggctgtcagcaatgtaaataacattattggaccagcaattgttggaaaggaccccactgagcatgttgagattgacaacttcatggtccaacagcttgatgggacctccaatgagtggggctggtgcaaacagaa

SEQ ID NO: 86081 - DNA, 527 bp, Zea mays
agttagggtcgtagttatgaggtcagttcttccaactctccatcgctacgtcctctgaattcccgggtcgacccactcgtccggggaattaatggcgtcgtcgtctagcatcagccactgacgcctcatcctcgcagccgtggtcctagtgtccgtgctcgcggctgccagcgccagcgccgggacctccttcgtgccggagtgggccatcccgcacaacccgctcccgagctgccgctggtacgtgacctgccggacctgctgcatcgagccttgcctcccgtggccggagctgatgatgagatgctgccgggagctgacggacatcccggcgtactgtctgcgcacggagctgaacatcctcatggactgctcgattacgtccggcctggactcccatctataggccctttattaaacactcctgacatcctacaatgaggccacatagtttacatcttgcactccaatggatgccgacttcattctggatctatcatcgcagtcgacattgccaaagtattccg

SEQ ID NO: 86082 - DNA, 535 bp, Zea mays
  unsure (1)..(535): unsure at all n locations
taggaggnncntaagttctgttcacgagttacccgatattactgtacggcactgattcccgggtcgacccacgcgtccgattgagaccaacaagcaacatagaaagtggaatccagtagcaacaacagagcaacaatggcgaccgggatattttccctccttatgctccttgctctttctgcatgtgttgctaacgcgacaattttccctcaatgctcacaagctcctatagcttcccttcttcccccataccttccatcaatgatagcttcagtatgtgaaaacccagctcttcagccctataggctccaacaagcaatcgcagcaagcaacatacctttatcacccttgttgtttcaacaatcgccagccctatctttggtgcagtcattggtacaaaccatcagggcacagcagctgcagcaactcgtgctacctgtgatcaaccaagtagctctggcaaacctttcttcctactctcagcaacaacaatttcttccattcaaccaactgtctacactgaaccctgctgctt

SEQ ID NO: 86083 - DNA, 525 bp, Zea mays
agtagggaactaggtatgttcacgattacagcactcgtcgtacggcccggaattcccgggtcgacccacgcgtccgaaatgattcttcagaacagtgaagctatggtatctatagacatgcctgctggcccttgtgaagttgtagtcattgctgataaatacgcgaacccagttcatgttgctgctgatctgctatcccaggcagaacatggcccagatagtcaagttgttctagttgttgctggagatggtgttgatctgggtgccattgatgcagaagttagcatgcagtgcaacgcgctttcaagaggtgaattcgcttcaaaagcacttagccacagcttcactgtgttcgcgaaagatatggttgatgcgatatcattctcaaatctgtatgcccctgagcatttgatcatcaacgtaaaggatgctgagcagtgcgaggagttcatcggacacgcatggtcagttatcttgggccaatggaccccagagagcgtgggcgaatatgcgagcgtgacgaac

SEQ ID NO: 86084 - DNA, 609 bp, Zea mays
  unsure (1)..(609): unsure at all n locations
tagtagggatcgtagggttttaaaaccgtaactacaagcaactattgttatcgcctgtaccggttccggaatctgacccacgtcgtctcgtaggaccatactagtcaactatagtaaagtcacatatagtgtactcaacacatgtgcatgccataaatattgggtgcttccgttatagcatccttggtcttttctgcatagtgctagctacacgcataccattttctccacatatgctcacaagtctcctatagtcttcctttcttcccccatacactctcaccagccggtgtcttcaatatggtgaaaaccccaatgtcttcaaaccctacaaggatccatacangtcaatcgcaagcaagcatctttacctttatcaccgcttgtttcctacaacataccgtcgagccctattacaagcagttacctttgggtgcaatttgttggcacaaaaacatcaaaggcacaaacatcttacatacaatcttgttgctaggaaaaccttgcttgnctaactctcagtcaacagcaggtttcttccatttcaaccaaactggctgcattgaacctctgctgcctaatttgcaacaacaactaccattcagtcan

SEQ ID NO: 86085 - DNA, 534 bp, Zea mays
  unsure (1)..(534): unsure at all n locations
agttagttttttagggtctgttacgtatcacccgacatatactgcaacgctctaccggtccggaattcccgggtcgacccacgcgtccgcaggctccaaatcaagctgctgcatttccagatctcaagctgacagaggtgtcaaaagagaatgtaagtgaaaagaaagattctgagattgttcgttcgcctagagctccaacccattctttcaagaagccgattggtgctaaaaagcctggaaataagactggtggacttggtgcacggaagcttacatcaaagccaaatgaaagcctctatgagcagaagcccgaggaaccagctcccgtcctgccatcatcggtgattgagagtactacaactaggagcaaatcacatacttcccgatttgattacgttgaaaatgcacctgctcttaagaatgggaatagctcagaaggcaaccacatgagtggacatgttgcacccccaatgtcgtcaaacttctttgctgaattcgggatggacagtggttatcagaaaaaatctacgn

SEQ ID NO: 86086 - DNA, 542 bp, Zea mays
  unsure (1)..(542): unsure at all n locations
nagtagggatcgtagactctgtatcaccgcactancagacacccatcgttacttcctcgccggtccggaattcccgggtcgacccacgcgtccgggggtatggagctgtaccctcggattggcaagtactttgatatcaaagtcgtcaccagctgtcgtttcggtatgatgtcctgggctgttcttgccgtaacctattgcataaagcagtatgaaatgaatggcagagttgctgattctatgcttgtgaatactgcacttatgttgatctatatcactaagttcttttggtgggaatctggatattggtgtactatggacattgctcatgatagagctggtttctatatctgctgcggatgcttgatatgggttccatccatatttacttnccctggaatgtaccttgtaaaccaccctttgaatttgggcccccaactagcactctcaattcttctagctggaatgttgtgcatatacttaacctatgatggtgaccgtaagcgccaagaatttcgccggaccaaaggcaaatgctcgtc

SEQ ID NO: 86087 - DNA, 532 bp, Zea mays
  unsure (1)..(532): unsure at all n locations
agtagtntttttagggtctgtaaccgtaaacacgccaatattgtaatgctctaccggtccggaattcccgggtcgacccacgcgtccggcaaagcggcagtgcgtagagaggatcgtcgaacagaacagcatgaagatggtcatcggtctcgtcgtgtgcctggctctgtcagctgccagcgcctctgcaatgcagatgccctgcccctgcgcggggctgcagggcttgtacggcgctggcgccggcctgacgacgatgatgggcgccggcgggctgtacccctacgcggagtacctgaggcagccgcagtgcagcccgctggcggcggcgccctactacgccgggtgtgggcagacgagcgccatgtaccagccgctccggcaacagtgctgccagcagcagatgaggatgatggacgtgcagtccgtcgcgcagcagctgcagatgatgatgcagctngagcgtgccgctgccgncagcagcagcctgtacgagccagctctgatgcagcagcagcagcagctggtggcc

SEQ ID NO: 86088 - DNA, 531 bp, Zea mays
  unsure (1)..(531): unsure at all n locations
nagagagggantcgtggtcctctgaatacaaagacatcccgctcacatactgtaaactcttcngnnnntnnggnnnnnnnnnnnggacccacgcgtccggcgttacctcccaggtcatcatcatgaaccaccctggccagattggcaatggctatgggccagttctggactgccacacctcacacattgctgtcaagtttgctgagctcgttaccaagattgataggcgatccggcaaggagctggagaaggagcccaaatttctcaagaacggtgatgctggtatggtgaagatggttcccactaagcccatggtggtggagaccttttctcagtatcctcctcttggtcgatttgctgtccgtgacatgaggcaaacggtggctgtcggagtcatcaagagtgtggagaagaaggacccaactggagccaaggtgacgaatgctgctgccaagaagaaatgatctatctgtctggtgctgtgcttgctttgtggttacctcgtggaagctaaaaatatctcgtcttgtn

SEQ ID NO: 86089 - DNA, 517 bp, Zea mays
  unsure (1)..(517): unsure at all n locations
agtagttnanctagggttcattaagaataggggggaaagaggaaagctctaccggtccggaattcccgggtcgacccacgcgtccgctagcaacatagaaagcacaatagtgtaccaacaatggcagccaaaatattttgcctcgttatgctccttggtctttctgcaagtgctgctaccgcgaccattttcccgcaatgctcacaagctcctatagcttcccttcttcccccgtacctctcaccagcggtgtcttcggtatgtgaaaacccaattcttcaaccctataggatccaacaggcaatcgcagctggcatcttacctttatcacccttgttcctccaacaatcatcagccctattacagcagttacctttggtgcatttattggcacaaaacatcagggcacaacaactacaacaacttgtgctagcaaaccttgctgcctactctcagcaacagcagtttcttccattcaaccaactagctgcattgaactctgctgcttatttgcaac

SEQ ID NO: 86090 - DNA, 520 bp, Zea mays
  unsure (1)..(520): unsure at all n locations
aggaggtaaaggnnnnnnnnanttgtaattagatgacactcgtatntaccccttnntntgnntaaatgtccggaggcactcgttcgcgggcgcgtgggcggacgcgtgggcggtcgcgtgggcggacgcgtgggatctcatttgctatgttgctcggtaacgtctctgatttgctatgcaaaaaaaaaaaaaaaaaaaaaaaaaaaaaaaaatataaataaaattattaccacgttcctttcaccagcggtgtcttcagtatgtagaaaacccaattcttcaaccctaatagatccaacaggcaatcgcaactggcatcttacctttaacacccttgttcctacaacaatcataagccctatcacaacagtgacctttggtgcatttattggcacaaaacatcaaggcacatcaactacgacaacttgtgctagcaaaccttgctgcctactctcagcaacagcagggaaaaccattcaaccaactagctgaattgaactgtgctgcttatttgcaacaa

SEQ ID NO: 86091 - DNA, 505 bp, Zea mays
  unsure (1)..(505): unsure at all n locations
agtagagatggtgtctgnttacggactcgacgatgtacagctatgctctaccgaattcccgggtcgacccacgcgtccgcacaattcaccacgtcctcaattctactttgactcaatcactatatttttccatagtgtgctaaaccctcctgaagtggcagaggatcattatttcatgacaccacatggtagccttggtcagggtcattgggatacagaacaagacatagagtatcggttctctcaatcacctacagggacagccaatgctactacaacagaagatgccattgcacagttgcgctctagaaggctcatgagtagaatggaggtcccatctggtgccaccaccgaagacaggactgatcgaactgagggtttcgatagtgatcttggtccctcttcatctagtgtatcaacagcaactcctcccaatggtcgcaacggaaggctgctgactccaacctctgatgatggcgagtatgtggagtactcatttgatagg

SEQ ID NO: 86092 - DNA, 500 bp, Zea mays
  unsure (1)..(500): unsure at all n locations
ntggcaggaaaagctgtctcacgacaccgccaataaagtatgctctaccggttcggaattcccgggtcgacccacgcgtccgcggacgcgtgggctgcgaaccatcctgaattttcaagcatgatacaacaggatgtcgttgaattcttccttcaccttattgacagagttgagaaggcaaaccctggagaccgtgagctaaatcctttttccggtttcaagtttgttgttgaagagagggttcagtgcccttctgggaaggtttcttacaacaaacgatctgacaacgttctttctttgagcataccactgcatgaggcaactaataaagagcagctagaagcttttaatgagaagaaagctgcaatgaacttggatggaaaagaagtgtctaatgaggatattgtcaggcctagagtcccattggaggcatgcttggcaagtttttcagggccagaggagattccagatttttatagcactgcattaaattcagagac

SEQ ID NO: 86093 - DNA, 506 bp, Zea mays
  unsure (1)..(506): unsure at all n locations
agtagggaaggtatctagtcacgcaacgcacgctcacagtatgctctaccggtctcggaattcccgggtcgacccacgcgtccggttctagatcgcgagcggccgatcgcgatctagaacaaacacttgcgccgcggctggctcacaggtaaggccgccatggtctccggttcgggcgtgtgcgcgaagcgcatcgtggtggacgcgcgccaccacatgctgggccgtctctcctcgatcatagccaaggagctgctcaatgggcagaaggtggtcgtcgtccgctgcgaggagatctgcatgtcgggcggcctcgtccgtcagaagatgaagtacctccgcttcctccgcaagcggatgaacaccaagccgtcccacgggcccatccacttccgcgcccccgccaagatcctgtggcgcaccatccgcgggatgattccgcacaagaccaaaaggggggaggcggctctggcgaggctcaagacgtacganggcgtnccggcgcc

SEQ ID NO: 86094 - DNA, 502 bp, Zea mays
  unsure (1)..(502): unsure at all n locations
agaggaggtctgtattcaccaagacaaatacgctantacttttcnggntcggaattcccggctcgacccacgcgtccgcggacgcgtgggtgcaactactcaatgtattcttacctcagatgcttgtcctgaaacgtcttcattctcaaacacagtcctctaggaaaaattatgctgatgcaaaccgtgtatctgctatcattttgggcggaggcactggatctcagctctttcctctgacaagcacaagagctacgcctgctgtacctgttggaggatgttacaggcttattgatatccctatgagtaactgcttcaacagtggtataaataagatatttgtgatgagtcagttcaattctacttcgcttaaccgccatattcatcgtacataccttgaaggcgggatcaactttgctgatggatctgtacaggtattagcggctacacaaatgcctgaagagccagctggatggttccagggtacagcagactctatcag

SEQ ID NO: 86095 - DNA, 513 bp, Zea mays
  unsure (1)..(513): unsure at all n locations
acgtgggaggacgttgtgtgtctggcaccgcagcgtgactgncatgactgtaccggttcggaattcccgggtcgacccacgcgtccgcagatgcaagattgcattttggaagattgcgaacctgatattccttttcttcctgcgcctgaagctcatactgcctttctactccttcacgctgttctgcatcatcctcccgatgactatgttcgtgccggaggccgatctccccgactgggtggtgtgctacgtcccggccctgatgtccctgctgaacatcctgccgtgccccaagtcgatccccttcatcatgccgtacctgctcttcgagaacaccatgtccgtgaccaagttcaacgcgatgatctccgggctgttccagctggggagcgcgtacgagtgggtggtgaccaagaagtcgggccgctcgtcagatggcgacctcatcgcgctggccccgaccaaggagcctgtgaaacactcgacgaggactggcttcgagccgtaccctan

SEQ ID NO: 86096 - DNA, 504 bp, Zea mays
  unsure (1)..(504): unsure at all n locations
tagtaggtgagctgtgtgatgntcgaacccgcaccttacgcctatacacttcggaattcccggctcgacccacgcgtccgcggacgcgtgggcggacgcgtggaggtttgttggcttctcctccccctccggttcgggttcgggttcatgaggttctaccgggttcgggttccttgggtaaccgaatcgagatgcaggcgtcagatgttgactaccgctgcttcgtcagcggcctcgcctgggccacggacgaccactccctgcacaacgcctttaacacctacggcgaggtccttcagtccaagatcatcctcgatcgggagacgcagaggtcccgcggcttcggcttcgtcaccttctccacggaggaggcgatgcggaacgccatcgagggcatgaacggcaaggagctggacggccgcaacatcaccgtcaacgaggcccagtcctcgcgcggccgttgaagcggtagctgtgggtacggtggtggcccttgaggccgcg

SEQ ID NO: 86097 - DNA, 489 bp, Zea mays
  unsure (1)..(489): unsure at all n locations
gagggacgttttgttccttgaacagagtacgctctacggntcggattcccggtcgacccacgcgtccggggttggcttctcctccccctccggttcgggttcgggttcgtgaggttctccggggtgcgggttcgtgggtgagcggatcgagatggcggcgtcggatgttgagtaccgctgcttcgtcggcggcctcgcctgggccacggacgaccactccctccacaacgccttcagcacctacggcgaggtcctcgagtccaagatcatcctcgatcgggagacgcagaggtcccgcggcttcggcttcgtcaccttctccacggaggaggcgatgcggaacgccatcgagggcatgaacggcaaggagctggacggccgcaacatcaccgtcaacgaggcccagtcccgcggcggccgtggaggcggcggcggtgggtacggtggtggccgtggaggcggcggctacggcggtggcgggcgccgtga

SEQ ID NO: 86098 - DNA, 502 bp, Zea mays
agtagggaatggtgtatttacgtacagcgaatatagcatgctctaccggttcggaattcccgggtcgacccacgcgtccgcggacgcgtgggcggacgcgtgggcaataggagacccagcagcagcagtatggatacggatatggatatggacaccatcaccatcagcatgaccaccacaagatccaccgattcgagcagggcgacgtggtggccatgccggccggcgcccagcactggctgtacaacgacggcgacgcgccgcttgtggcggtctacgtcttcgacgagaacaacaacatcaaccagctcgagccttccatgaggaaattcttgctggctgggggcttcagcaaggggcagccccacttcgccgagaacatcttcaaagggatcgacgcccggttcctgagcgaagccctgggcgtcagcatgcacgtcgccgagaagctgcagagccggcgtgaccagcgaggcgagatcgtccgcgtggagccggaact

SEQ ID NO: 86099 - DNA, 509 bp, Zea mays
  unsure (1)..(509): unsure at all n locations
gggggggaaaggcgttgagtgctgtcaccgcagcgtcactgcatnaccgtaccggttcggaattcccgggtcgacccacgcgtccgcccacgcgtccgcccacgcgtccgcccacgcgtccgggtgggttggcttctgctccgcctccggttcgggttcgggttcgtgaggttctccggggttcgggttcgtgggtgagcggatcgagatggcggcgtcggatgttgagtaccgctgcttcgtcggcggcctcgcctgggccacggacgaccactccctccacaacgccttcagcacctacggcgaggtcctcgagtccaagatcatcctcgatcgggagacgcagaggtcccgcggcttcggcttcgtcaccttctccacggaggaggcgatgcggaacgccatcgagggcatgaacggcaaggagctggacggccgcaacatcaccgtcaacgaggcccagtcccgcggcggccgtggaggcggcggcggtgggtacggtggtggcc

SEQ ID NO: 86100 - DNA, 506 bp, Zea mays
  unsure (1)..(506): unsure at all n locations
tggggagaaggttagtatccgtcaagcccatgacgtcanaccgtaccggttcggaattcccgggtcgacccacgcgtccgggccagtgcgtcgagtttctgaggcatcagtgcagcccgacggcgacgccctactggtcgcctcagtgccagtcgttgcggcagcagtgttgccagcagctcaggcaggtggagccgcagcaccggtaccaggcgatcttcggcttggtcctccagtccatcctgcagcagcagccgcaaagcggccaggtcgcggggctgttggcggcgcagatagcgcagcaactgacggcgatgtgcggcctgcagcagccgactccatgcccctacgctgctgccggcggtgtcccccactgaagaaactatgtgctgtagtatagccgctggctagctagctagttgagtcatttagcggcgatgattgagtaataatgtgtcacgcatcaccatgggtggcagtgtcagtgtgagcaatgacctgaatga

SEQ ID NO: 86101 - DNA, 518 bp, Zea mays
  unsure (1)..(518): unsure at all n locations
nggaggagaggagctctntgtagactgtcaccaagaactatacagtcatgcctctaccggttcggaattcccggctcgacccacgcgtccgcccactcgtccgcccacgcgttcgcccacgcgtccgcccacgcgtccgtagaaagcagaatagtgtaccaacaatggtagccaaaatattttgcctccttatgctccttggtctttctgcaagtgctgctacgacgaccattttcccgcaatgctcacaagctcctatagcttctcttcttcccccatacctctcaccagcgttgtcttcagtatgtgaaaacccaattcttcaaccctacaggatccaacaggcaatcacagcaggcatcttacctttatcacccttgttcctccaacaatcatcagccctattacatcaattacctttggtgcatttattggcacanaacatcagggcacaacaactacaacaactcgtgctagcaaaccttgctgcctacgctcagcaacagcagttacctttg

SEQ ID NO: 86102 - DNA, 499 bp, Zea mays
  unsure (1)..(499): unsure at all n locations
ggtggggagggtcttgacccgcggcggaggtacggcactactggtccggaattcccgggtcgacccacgcgtccggcggcggcggcggtggctgcttcaagtgtggcgagcctggccacatggccagggactgctgcagcggcggcggcggctacggcggtggcggcggcggcggtggaggcggctgctacaactgcggccaggccggccacatggccagggactgccccagcggtggcggcggtggcggagggaggttcggcggcggcggcgggggtggcggcgaccgctcctgctacaactgcggcgaggccggccacatcgcccgcgactgccccacgtgaggtgtgtccgcgtccgtccgtccagccagatcagatcggatcgctccaccacctgctggtctgatggcgccgnccccttctagatctcgcttaaaaaacacccccctctcgctgtgtgtcggagtaccgcttttagtttgccgatccgggcacgn

SEQ ID NO: 86103 - DNA, 503 bp, Zea mays
  unsure (1)..(503): unsure at all n locations
gaagcttntgtttcttgtcaggcagctctacgctctgccgtaccggtccggaattcccggctcgacccacgcgtccggagcgtgccgctgccgccagcatcagcctgtacgagccagctctgatgcagcagcaggagcagctgctggcagcccagggtctcaaccccatggccatgatgatggcgcagaacatgccggccatgggtggactctaccagtaccagctgcccagctaccgcaccaacccctgtggcgtctccgctgccattccgccctactactgattcatgatatttgggaaatctcctctatccatctctctctatctatatatgtaataatgcagtaagacgacacacattatcatgtgtggtatgaccaataatatatgcatggtcataataaagttttggttttaatgaaaaaaaaaaaaaaagggcggccgctctagaggatccaagcttacgtacgcgtgcatgcgacgtcatagctcttctatagtg

SEQ ID NO: 86104 - DNA, 509 bp, Zea mays
  unsure (1)..(509): unsure at all n locations
ngggtgggaggtgtgtgtccgtccagcccatctacgnatnactgtactcggttcggaattcccgggtcgacccactcgtccgatccaggctcatgtgcgaggtcttacatttgaggaagcattatcggaaaatagtttgggctgttggcatcgtggagaaagttatattgcgttggaggcgtataggggctggcttacgtgggtttcggtctacagaaggttcagtggagagcagcaatggcggaacgagtagcagttcaatccaagataagccttctggggatgattatgattttctgcaagaaggacgaaaacagactgaagaacggctccagaaagctcttgcgagagtgaagtccatggctcaatacccagaagcaagagatcagtaccataggattttgactgttgtgtcaaaaatgcaagagtctcaggctatggaagataagatgctggaggagtcagcagggatggacttcatgagtgaattcaaggaattgtgggatgac

SEQ ID NO: 86105 - DNA, 507 bp, Zea mays
  unsure (1)..(507): unsure at all n locations
ggtatggagaggctcnctttaagatgcgaggattatagcacgctcgtaccggtccggaattcccgggtcgacccacgcgtccggccctggtgatctgaatgactggtaccgccacacatctaaaggcgcatggccattcgcaaccgcggatcatggttggcctatatctgattgcactgctgaaggactaaaggcttcattattgttatcaaagatttctcctgaaattgttggtggaccaatagaagctaatagattttatgatgctgtcagttgtctgatgtcttatatgaatgataatggtggttttgcgacttatgaactcacaagatcctatgcctggctggagctgatcaatcctgctgagacctttggggatattgtgattgattacccgtatgttgaatgtacatcagcagcaattcaggccctgacatcattcagaaaactataccctgngcaccgcaggaaagaggtggacagctgtatcagcaaagctgcttattn

SEQ ID NO: 86106 - DNA, 497 bp, Zea mays
  unsure (1)..(497): unsure at all n locations
gaggggaggttcgtttacccgcacagaagtacgtctctactggttcggaattcccgggtcgacccacgcgtccggtccgggcccgcgcccggacgcttgctgtgccggttggcgtggggcttttggcgggggccgacgtgctgggctggggcgcgctggagggcgccgtgatgaatccggcgcgcgcgttcgggcccgccgtcgtgggctcccgtcgctggagacaccaatgggtgtactgggtggggcccatggtcggcgccggcctctccggcgtcgtctacgagcacctcgtcgccggcccggccgccgaggaggaggagcccgcgccgagctgcggcgaccgccgtcgtgcgtagaggactacatgcatgcaagagcagcaggacgtcgtcgtcgtccccgctcctcggaatcttctgaataaaaaaaacagcttgcatgcgtgctcaattgttgggtgtcgtggtcgatcatgaatagaattaatgtttcan

SEQ ID NO: 86107 - DNA, 563 bp, Zea mays
  unsure (1)..(563): unsure at all n locations
ggagataagtatctgtttcatctgaacaataagctacgctactaccggtctcggaattcaccgggctcgaacccacgccgtaccgctccacgccgtnncgggccaatatcaaagcgtgtaaactcgaatataccagtcacttcaatgccatagggtgccgcatgacagcaacataagaaggaactaacaagctggcttcccaccatacactgggcaccttcgctgcaatcggctactccttggattctaacgagttatgacatctactgaggaatcccgctttacctcgttatgccatatttcgtgaatttatctctgcttggaaaagccactttgggtgccaatcagacacattggcacgggaattcacaacatcggatttctatcctggccatcactttcacttgtcgactgaaatttcgttcccactgtcaatgaacaatcctgaagaaaggttagctgacgccgggtcaaagaactctgcagcagtcccccgagaaggcaaagagagatgtgagcttcaaccaaaatccaccaggaacggttccttatacagcaatgtn

SEQ ID NO: 86108 - DNA, 501 bp, Zea mays
  unsure (1)..(501): unsure at all n locations
gagcggtgaagtattgtttacgaccgacgatgtacgcacgctctaccggttcggaattcccgggtcgacccacgcgtccgcccacgcgtccgcggacgcgtgggcatagagacgccaagttgatgaacgtgtcaaacgagattattgaattgaaaaataaggtttgtgctggaggcgataaaaactttgtggtgatcaatcagaagggcattgaccctccatctctggatctccttgctagagcggggattattgctcttcgaagagcaaagaggagaaatatggagaggcttgtgctagcatgtggtggtgaagctgtcaattcagttgatgagttgactgaagattgtctaggctgggctggtcttgtctatgagcatgttcttggagaagaaaagtacacatttgtggagaatgtgaaaaatcctcgctcttgtactatactgattaaaggacctaatgaccataccattgcacanatcaaggatgctgtccgggatg

SEQ ID NO: 86109 - DNA, 497 bp, Zea mays
gtagaggaagctttgtgcagacacgaacgaacagtactctctaccggttcggaattcccgggtcgacccacgcgtccgggcaaacctttctccctactctcagcatcaacaatttcttccattcaaccaactgggtgcattgaaccgtgctgcttatttgcagcaacaactattaccattcagccagctagctactgcctactctcagcaacaacaacttcttccatttaaccaattggccgcactgaaccccgctgcttatttgcagcagcaaatactactaccatttagccagctagctgcagcaagccgtgcttacttcttgacacagcaacagttgctgcctttctaccagcagtttgcggctaaccccgcaaccctcttacaactacaacaattgttgccctttgtccaacttgctttgacaaacccagcagcctcctaccaacaacacatcattggtggtgccctcttttagattgcttattagttgtaat

SEQ ID NO: 86110 - DNA, 500 bp, Zea mays
  unsure (1)..(500): unsure at all n locations
atgggaagaggctctatgtccgaccagccaagacagtatactctaccggttcggaattcccgggtcgacccacgcgtccgaattgcaacagtttctgccagcgctcattcaactagccatggtgaaccctgccgccggcctacaacagcaacaactgctttcatctagccctctcgttgtgggtaatgcacctacatacctgcaacaacaattgctgcaacagattgtaccagctctgactcagctagctgtggcaaaccctgctgcctacttgcaacagctgcttccattcaaccaactgactgtgtcgaactctgctgcgtacctacaacagcgacaacagttacttaatccactagcagtgcctaacccattggtcactgccttcctacagcagcaacaattgctaccatacagccagttctctttgatgaaccctgccttgtcgtggcagcaacccatcgttggaggtgccatcttttagattacatatgagatgn

SEQ ID NO: 86111 - DNA, 505 bp, Zea mays
  unsure (1)..(505): unsure at all n locations
nagtggagagctttgtttctgacgcggggatacagctatgctctaccggttcggaattcccggctcgacccacgcgtccgcccaaccctacttgaggctttggactttatcaatgagccgaagaggccttcagacgagcccctgcgtctccccctacaggatgtgtacaagattggtggtattggaactgttcctgttgggcgtgttgagactggtatcatcaagcctggtatggttgttacctttggtcctagtggccttactactgaggtgaagtctgttgaaatgcaccatgaggctctccaggaggcccttcctggtgacaatgttggcttcaatgttaagaatgttgctgtgaaggatctgaagcgtgggtatgtggcctccaactccaaggatgaccctgccaaggaggctgctagcttcacgtcccaggtcatcatcatgaaccaccctgggcagattggcaacggctatgccccagtgctggactgccacacctcgn

SEQ ID NO: 86112 - DNA, 499 bp, Zea mays
  unsure (1)..(499): unsure at all n locations
agtggagaagggtcgtgtactagaacaacagtacgctactaccggttcggaattcccgggtcgacccacgcgtccgagcagaacaaggctcagctcgttgtcatcgctcatgatgtggatccgattgaactgggtgggtggcttccagccctgtgcaggaagatggaggtcccatactgcattgttaaaggaaaggctcgccttggatcgatcgttcacaagaagactgcatcagtcttgtgtctgaccactgtcaagaacgaggacaagcttgagttcagcaagatcttggaggctattaaggcgaacttcaatgacaagtttgatgaagtcaggaagaagtggggaggtggcatcatgggctccaagtcgcaggccaagaccaaggccagggaaaagttgctggccaaggaggccgcccagcggatgacgtagattatccactgttgagtttgcccctgtagtttgacgtggaagaaccgatgagcattgtgcactn

SEQ ID NO: 86113 - DNA, 492 bp, Zea mays
ggagtacgttttgtcaccacgaacacagtacgctataccggttcggaattcccggctcgacccacgcgtccggttaattctatgaaaatcatttgacaacctgatcaactggcgagaagagtttctaatggaggctagcccatcagatcctgataacttcccttttgttctgttgggtaacaaagttgatgtagatggtggcaacagccgcgtggtatctgagaaaaaggcaaaggcatggtgtgcttccaaagggaacatcccgtactttgagacgtctgctaaggacggaacgaacgtggaagacgccttccagtgtatcgtgaagaacgctctgaagaatgagccagaggaagaactgtatgtgccagataccgtggacgtggtgggtggcaaccgggcccagagatcatccgggtgctgttaaggcacgaggcatcacgaggcgttgtgaccatcatcgtcggttatgcagtgaccaaacaatacctt

SEQ ID NO: 86114 - DNA, 503 bp, Zea mays
  unsure (1)..(503): unsure at all n locations
ataggaggagtgctgctctacgttcagctctcactgncatgccgtaccggttcggaattcccgggtcgacccacgcgtccgtctcaatctccctagcaatctctagcagcagatcctcgtgcgaagcaaagcgctagcccccttcgtactgtcccgatggcccgcacgaagcagacggcgaggaagtccactggcggcaaggcgccaaggaagcagctggccaccaaggcggcgcgcaagtctgccccggcgaccggcggagtgaagaagccccaccgtttccgccccggcaccgtcgcgctccgggagatccgcaagtaccagaagagcacggagctgctgatccgcaagctgccgttccagcgcctggtgcgtgagatcgcccaggacttcaagaccgacctccgcttccagagctccgccgtcgccgcgctgcaggaggcgtccgaggcctacctcgtcgggctcttcgaggacaccaacctctgcgccattcacgccaa

SEQ ID NO: 86115 - DNA, 503 bp, Zea mays
  unsure (1)..(503): unsure at all n locations
ngggaggagtggagctcttattgtacgacaagccaagatagttatgctctaccggttcggaattcccgggtcgacccacgcgtccgcccacgcgtccgcccacgcgtccgcggacgcgtggggatcagcaaagcggcagtgcggagagaggatcgtcgaacagaacagcatgaagatggtcatcgttctcgtcgtgtgcctggctctgtcagctgccagcgcctctgcaatgcagatgccctgcccctgcgcggggctgcagggcttgtacggcgctggcgccggcctgacgacgatgatgggcgccggcgggctgtacccctacgcggagtacctgaggcagccgcagtgcagcccgctggcggcggcgccctactacgccgggtgtgggcagccgagcgccatgttccagccgctccggcaacagtgctgccagcagcagatgaggatgatggacgtgcagtccgtcgcgcagcagctgcagatgatgatgcagcttgagc

SEQ ID NO: 86116 - DNA, 497 bp, Zea mays
tgtagtaagctttgtctacgaccgacgtgatagtacgctctaccggttcggaattcccgggtcgacccacgcgtccgccctaacctcggccttgtcgatgtcggccgccacaaccgccccaacccctgcggtggccaccccgatggcgccgcctccgtcgtacccggcctcctccacgatctccgcctccgttgccgcgtcggtcgaggaagaggacgacctctatggccgcctcaagtcgctccagcgccacatggagttcgtcgagatccaggaggagtacgttaaagacgaacagaagaacctcaagcgcgaactcctccgtgcgcaggaggaggtcaagcggatccagtccgtaccgctcgtcatcggccagtttatggagatggtcgatggcaacaacggcatcgtgggttctactacgggcagcaactactatgtgcggatcctcagcaccatcaaccgcgagctgctcaagccgtcagcatctgtcgcgt

SEQ ID NO: 86117 - DNA, 494 bp, Zea mays
  unsure (1)..(494): unsure at all n locations
gtggaggagttttattagacaagcaagtaaagtatgctctaccggttcggaattcccgggtcgacccacgcgtccgcggacgcgtgggagcaaagaagaatggcaaacatgcacccaggccatggactgtggatggatgcaaatggcaaagccagtgatgaatttatatacagaagcaactgatggatcctacattgagagaaaagaaagtgccttggtgtggcaccatcaggatgctgacccaggctttggatcctcacaggcaaaggagctgcttgatcacctggaaagtgtactagcaaatgaaccagtctctgtcaagagtggccagttcatcgttgaagtcaagccacagggagtaagcaagggaatagttgccgagaggatacttgcatcagtgaaggagaggggaaagcaggctgatttcgtattgtgcatcggcgatgataggtctgatgaggacatgtttgaaaatattgccgatatcattaagn

SEQ ID NO: 86118 - DNA, 505 bp, Zea mays
agaggagtagtttgtttacgaagaagattaacgcatgctcgtaccggtccggaattcccgggtcgacccacgcgtccgcaactagcaacatagaaagcacaatagtgtaccaacaatggcagccaaaatattttggctccttatgctccttggtctttctgcaagtgctgctacggcgaccattttcccacaatgctcacaagctcctatagcttcccttcttcccccgtacctctcaccagcggtgtcttcggtatgtgaaaacccaattcttcaaccctataggatccaacaggcaatcgcagctggcatcttacctttatcacccttgttcctccaacaatcatcagccctattacagcagttacctttggtgcatttattggcacaaaacatcagggcacaacaactacaacaacttgtgctagcaaaccttgctgcctactctcagcaacaacagtttcttccattcaaccaactagctgcattgaactctgcttcttat

SEQ ID NO: 86119 - DNA, 496 bp, Zea mays
  unsure (1)..(496): unsure at all n locations
agggaggtaaggtgtgttcaccgaacagagtactgctatactgtctcggaattcccgggtcgacccacgcgtccggtgaaaacccaattcttcaaccctacaggatccaacaggcaatcgcagctggcatcggacctgtatcacccttgttcctccaacaatcatcagccctattacaacagttacctttggtgcatttattggcacaaaacatcagggcacaacaactacaacaacttgtgctagcaaaccttgctgcctactctcagcaacagcagtttcttccattcaaccaactaggttcattgaactctgcttcttatttgcaacaacaacaactaccattcagccagctacctgctgcctacccccagcaatttcttccattcaaccaactagcagcattgaactctcctgcttatttacagcagcaacaactactaccattcagccagctagctggtgtgagccctgctaccttcttgacacaaccacn

SEQ ID NO: 86120 - DNA, 498 bp, Zea mays
agggtgggaagggtttgttaacgcggagaagtatagctatactcgttcggaattcccgggtcgacccacgcgtccgggtgtgagccacacggttccaatctatgtaagatacacactttctcatgctattctgcgtgtggatcttgcggggcgtgacctcaccgaccacctaatgaagatcctcacagagagagggtactccctcactacgagcgctgagcgggagattgtcagggacataaaggagaagcttgcctacgttgcccttgattatgaacaggagctggagactgccaggagcagctcctctgtcgagaagagctacgagatgcctgatggtcaggtcatcaccattgggtcagaaaggtttaggtgccccgaggtgctgttccaaccatcccttgttggcatggaatcgcctggcgtacatgaggccacgtacaacttcatcatgaagtgtgatgttgatatcatgaacgatttgtatggtaacgctgt

SEQ ID NO: 86121 - DNA, 488 bp, Zea mays
gaaaggatctctcacgacgcacagatatagtatactgtctcggaattcccggtcgacccacgcgtccgcccacgcgtccggagaagacgtctctctcctctcggcgtccccgttccccaacctcgggtctgctgcctgcctgcctgcctgcctgcaaaaaggagtttgtcatggcgtctaagcgcatcctcaaggagctgaaggacctgcagaaggacccccccacatcatgcagtgcaggtcctgctggtgaggacatgtttcattggcaagcaacaattatgggaccacctgacagtccctatgctggtggtgtttttttagtgaacattcatttcccgccagattaccccttcaaacctccaaaggtttctttcaagacaaaggtcttccatcctaatatcaacagcaatggaagtatatgccttgacattctcaaagagcagtggagccctgctttgacaatttctaaggtcctgctctacatt

SEQ ID NO: 86122 - DNA, 491 bp, Zea mays
gggggaggaagtttgttacgacacgcatttcgcacgctctaccggtccggaattcccgggtcgacccacgcgtccgcccacgcgtccgcccacgcgtccggtggaatgataatctcatcgtctggcgggctcgattcttccactcactctcggtggagttcacaaagtcccagattattgcctcaatacctggatttttcttttgcttgtggtatgcgtcaaagaagcattggcttgcaaacaatgtcctgggattggctttctgtattcaggggattgagatgctgtcattgggatcatttaaaactggagccattctcttgggtggactttttgtgtatgacattttctgggtgttcttcactccagttatggtcagtgtggctaaatctttcgatgctccaataaagcttctgtttccaactgcagacgctgaacggccattctccatgcttggccttggtgacattgtaatacctggtatattcgtc

SEQ ID NO: 86123 - DNA, 499 bp, Zea mays
aggggaaggtaagctcttttacgacacgaatgatagtatgctctaccggttcggaattcccgggtcgacccacgcgtccggaggagatgctgccgggagctggcggacatcccggcgtactgccggtgcacggcgctgagcatcctcatggacggcgcgatcccgccgggcccggacgcgcagctggagggccgcctagaggacctgccgggctgcccgcgggaggtgcagaggggattcgccgccaccctcgtcacggaggccgagtgcaacctggccaccatcagcggcgtcgccgaatgcccctggattctcggcggcggaacgatgccctccaagtaactgcgaagagcatagtgcatgaggaatgagcttgtagctagctcatatgtctgaataataagcacagcaagaagatgaatgcatttctcggatcgttcatccggaacaataattaaaggggatccggatttgctcttgtgatataattaacgattcc

SEQ ID NO: 86124 - DNA, 496 bp, Zea mays
  unsure (1)..(496): unsure at all n locations
agtagtagaggctgtnctgtcatcgaccacaagttacgctataacgcaccggttcggaattcccgggtcgacccacgcgtccggatcaaccgaatggaggagggatgagtgtccctacctgaaagttttcccacagatgggggcaaaaagccagaaatagagggtatcggtataatgttctaatagtatactccatcacaaaaaatgtgcacttctatttacattgctttaagtcaaacaatcttcggttttaccaacttttttactacaaatatataaaagttatatgataccaaataagtaccattaggttcatcatagaatatagttccatcgtatacttatttgtaatattaagtgttgatattattttgacaaacttagtcaaacttaaaatagttatacttgcaccagatctagaggtgcccatctttttgaggcatgattgggacaagtggagtagtaatggcagtttgaatcttgatgtctgtgcacg

SEQ ID NO: 86125 - DNA, 494 bp, Zea mays
  unsure (1)..(494): unsure at all n locations
gtgagaaggctgngtacgggggggggggaaaagtagtctctaccggttcggaattcccgggtcgacccacgcgtccggcataccattggctatcattgcaatagctagtttgttggttgaaagatcacgtgaggagtggtcagaagtgtacgacaagattggtcatgggaatgaagacaatacaacaaagataatgtcatacagctactatgatctgcctccttatctcaagccatgtctgctgcaactaagcatatatccagaagactacctcattaatgcaaaagttgcaatatggatgtggataggtgaaggtctagtccatcttgagaaacaagatgttagcctatttgaggttggagaaagatacttcaaggagcttgtgaatagaagcatgatccagccgagagaggacaaatatgatcggtttatacaagagtttcgtattcacgacattgtgtttgatctcatctgtaagttgtccaaggatgaag

SEQ ID NO: 86126 - DNA, 499 bp, Zea mays
  unsure (1)..(499): unsure at all n locations
gaggnggggaagtttcgacgtagggggaaagagtagtctcgtaccgtccggaattcccgggtcgacccacgcgtccgtgctgaagctatatcaccggatgatgaagaatctctgttgcaaggagaacgcgaaggtgaaatgatgattgtggaggcctatgcagctcttgtgctcgcctttctttcaacggaaaggttcatagtgccttatttcataatcttttcttaattagttataattttaatgtgagccccaccccactgccgtcagcttatgaactgatgtttgctgccacagtatgaaggttcgaggagccatttctagttgccttccggacaacaacttgaaagttcttgtaccagtgctagagaaatctgtgtcatttcatctgcagctgaacatgatgacaagggaaacgcattcagctgtgactgaagtcatcgaaagatgcacgctatcatagaagtgggaagaagcgccctgtacagattagctgacc

SEQ ID NO: 86127 - DNA, 523 bp, Zea mays
  unsure (1)..(523): unsure at all n locations
tgaggtcttgtaagtggcgggagtnatggaggtctgtgtaacaagaacaatagctacgnctatactggttcggatttgccggatcgtcccacgcgtccgcccacgcgtccgctctcttctatcactgtattttagataccatggccaagtcgaccgggagggttgtattctacctggccctgctggtggtgattgccaccactgagcacatgcggttgcaggccggtagcggcgtgcgatcccatgcccgtggtggtgtgcgatacggcgttcatgtacggagcgaaaccctccgtatgatgctgctccaccctgcgtgcgcaggaggcatgcttgtgcgtgtacgccaaagaccccaagtttgcaaaatacatcaacaaccccagcaccggcaaaacctttaccttgcgcggcatatccatacccaaatgctaagcaagcgctctgcgtcgtcgattcgattgctcttgctcttgtgggtaacatatccagcttatgaatatattatgtggatcagttaatt

SEQ ID NO: 86128 - DNA, 501 bp, Zea mays
  unsure (1)..(501): unsure at all n locations
ggtgagtagtgnntnnnnttcgaattcgtacgttatcagtagtcttctaccggttcggaatataccgtcccaagcgtccggtgacgcgtgtgcggacgcgtgggtttgagctttcagaaccacacctagcgaagcgcactagcaacgacctaacaacaatggctaccaagatattatccctctttgcgcttcttgccctttttgtgagcgcaacaaatgcgttcattattccacaatgctcacttgctcctagtgccattattccacagttcctccctccagttacttcaatgggcttcgaacacccagctgtgcaagcctacaggctacaacaagcgcttgcggcgagcgtcttacaacaaccaattgcccaattacaacaacaatccttggcacatctaaccatacataccatcgcaacgcaacagcaacaacaatttctaccagcactgagccaactagctgtggtgaaccctgtcgcctacttgcaacagcagttgn

SEQ ID NO: 86129 - DNA, 520 bp, Zea mays
  unsure (1)..(520): unsure at all n locations
agtttntaggcggggnnnnactgggatttcgataccnctcgcaantccacttngngttcgggtaaanngggtcgacccacgcgtccgcgcacgcgtccgtccacgcgttcgcttagacgccgccgtcgcccaaagaaggacggggactccggaaaccaggatgggagaactgaagagaaggatgggctttgagaagcagatcctgagatccggcaccggtcccaagccgataaagggccagaaggtcaccgttcactgcaccggctacgggaaggatcgtgatctgttcaagaaattttggagcaccaaggaccctgggcagcagccattcagtttcagcattggtcaaggttcagtgatcaaaggatgggacgagggagttatgaccatgcaagtgggtgaagttgctcgtatacagtgcacgcctgattatgcttatggagccggcgggttcccagactggggaattcaaccaaactcaatgcttgtgttcgagattgaaagtcctaattgccagtac

SEQ ID NO: 86130 - DNA, 509 bp, Zea mays
  unsure (1)..(509): unsure at all n locations
gtatacgttttancccatagaattcgtttagcactagctagacccgcccggtctcggattaccgtgctcgacccactcgtccgctctggtccgtggccatggcgatgtccatgctctccgctaccaccgtgccactgcagcgggggggttgaaagtccgagttctccgggctcaggagctccgcgtcgctgcccatgcgccggaatgccacctccgacgacttcatgtccgccgtctccttcaggacccacgcggtcggcacgagcggcgggtcgcggcgggcgccgacggaagcgaagctgaangtggccatcaacaggttcagctcgatcgggcgcaacttcctgctgtgctggcacggtctcgtctacatctggaccctcgacatcatcaccatcaacgacacctgcagtgtctacaggaattccacctgctaaagtacgattacaacgctattctaaatgacatctacattatatcattctgataaaatagacataaacatatag

SEQ ID NO: 86131 - DNA, 500 bp, Zea mays
  unsure (1)..(500): unsure at all n locations
agctantgtactgcagtcgatagcattgcgacgacgttccggctaaggtcaccgggccgacccactcgtccgcgagtcccagcgccatgccaccttagactccggcgtcatctccggcctcaacggcgtggggttcatctacaagcccaccggcgcggccatcgcatacgggctcgacaagaagtcgagcagcgacggcgagaagaacgtcctcatcttcgacctcggcggcggtacctttgacgtctcgctcctcaccatcgaggagggcatctttgaggtcaaggccaccgccggcgacacccacctgggaggcgaggacttcgacaaccggctcgtgaaccacttcgtccaggagttcaagaggaagaacaagaaggacatcactggcaaccccagggcgctccggcgactgaggaccgcctgcgaaagggctaagaggacgctctcctccaccgcccaaaccaccatcgagatcgactcgctctatgagggcatct

SEQ ID NO: 86132 - DNA, 493 bp, Zea mays
  unsure (1)..(493): unsure at all n locations
cgatgcacgctggagctangcatgactaccgtctcgattaccgggcagacccactcgtccgcccacgcgtccgttctgatgttgatagcttcgtttgaaggaaaggtgagagcagaatcgtggggagaatctggtattgtgtcctggctgttgttttcgcgatcaaaacgatgtcgtcgccggacattgtctcgatattggataactcgaaggagctcgatcgggttaggaaagaacaggaggatattctgtcggagatcaacaagcttcacaagaagcttcaagcaactcctgaagtggttgagaagcctggggataactcattggcaaggctgaaatttttgtatactcaagcaaaagaactttcagaaagtgaagcaagtatttccaacttactgataaaccaaattgatgccctactgcctacgggtccacaagggcaaacacgaagaagaataggaaaaggtaatgagcagaaaaggaaacgagtgag

SEQ ID NO: 86133 - DNA, 540 bp, Zea mays
  unsure (1)..(540): unsure at all n locations
agtagaaagtggtggatcatgatcatagagcacgtcgtaccggcccggaattcccgggtcgacccacgcgtccgtaacaattgtactaaatatagtaaagaaatcaaaataatctttagatcaatctaagatgtcgattgccagtaaaaaaaaaagaaatataatagaaaaatatgggacaaaaaataaatccactcggtttcagacttggtacaacccaaaatcaccattccttttggttcgcacaaccaaaaaattattctgaaggtctacaggaagataaaaaaatacggaattgtatcaagaactatatacaaaagaataggaaaaaaggctcgaatagaaaaatggaatcagactcaagttctgaagtaattacacatatagaaattcaaaaagaaatcgatacaatccacgtcataatccatatgggattccccaacttattaaaganaaagggagcaatcgaagaatagaggaagatcttcaaaaggaagtaattctgtaaccagagacttaatattgctatcgaaaaggtaa

SEQ ID NO: 86134 - DNA, 525 bp, Zea mays
  unsure (1)..(525): unsure at all n locations
agtggagggtcttcncccatcgaacatcgagctcatcgtatgactgtccggtccggaattcccgggtcgacccacgcgtccgccgtacacaaacaaggccgtagcccgcagcttcgtctgttacgctacgtccggttcccgaccgcgccgtgtgaaaaaaatggctgtgccggaggtggtggtggacggcgtcgtcttcccgccggcggcccgcccgccgggctccgcgggctcgcatttcctcggcggcgcaggcgtgcgtggcctcgagatcgaaggcaacttcgttaagttcacggccatcggcgtgtacctggaggacgcggccgtgccggcgctggcgaggaagtgggccggcaagacggccggcgagctcgcgtccgacgccgncttcttccgcgacgtcgtcacgggcggcttcgagaagttcgcgccggtgacgatgatccgnccgctcacggncgagcagtacgccgngaaagtggcngagaaactgcgtgcgtactggaaggcggnncgcctgtc

SEQ ID NO: 86135 - DNA, 547 bp, Zea mays
  unsure (1)..(547): unsure at all n locations
aggtagtnnagaggttgatgatcgaanattgagacataccggcatgctgtaccggtccggaattcccgggtcgacccacgcgtccggaattcttaattcatgagttgtagggagggacttatgtcaccacaaacagagactaaagcaagtgttggatttaaagctggtgttaaggattataaattgacttactacaccccggagtacgaaaccaaggatactgatatcttggcagcattccgagtaactcctcagctcggggttccgcctgaagaagcaggagctgcagtagctgcggaatcttctactggtacatggacaactgtttggactgatggacttaccagtcttgatcgttacaaaggacgatgctatcacatcgagcccgttcctggggacccagatcaatatatctgttatgtagcttatccattagacctatttgaagagggttctgttactaacatgtttacttncattgtgggtaacgtatttggtttcaaagccctacgcgctctacgtttggaggatctacgaattccccctg

SEQ ID NO: 86136 - DNA, 547 bp, Zea mays
  unsure (1)..(547): unsure at all n locations
ggtagtntagagggttgtgatcgaactcgtatctcgtcggcactgccgtaccggtccggaattcccgggtcgacccacgcgtccgccggcagctgagccggctgcacccggtgtaccgcctgctgcacccgcactgccgctacaccatggagatcaacgcgctggccagggaggcgctcatcaacgccgacggcatcatcgaggagtccttctggccgggcaagtacgccgtcgagcttagctccgtggcgtacggcgcgacgtggcagttcgacacggaggcgctgcccaacgacctcgtcaagcgcgggctggccgtgcgcggggaggacggggagctggagctcaccatcaaggactacccctacgcccacgacgggctcctggtctgggactgcatcaagcagtgggcgtccgagtacggtaacgtctactacaagtccgacgaggctcgtgtcggcggaccccgaactgaaggcgttctgggccgaagtgcccaccgtgggggccggctaccagaaaggccaaccccctggggcccgtccta

SEQ ID NO: 86137 - DNA, 537 bp, Zea mays
  unsure (1)..(537): unsure at all n locations
agtaaggttntagcggtgtccnacccatcggatactgttggcacgccgtaccggtccggaattcccgggtcgacccacgcgtccgctctggtccgtggccatggcgtcgtccatgctctccgctaccaccgtgccactccagcaggggggcggcctgtccgagttctccgggctcaggagctccgcgtcgctgcccatgcgccggaatgccacctccgacgacttcatgtccgccgtctccttcaggacccacgcggtcggcacgagcggcgggtcgcggcgggcgccgacggaggcgaagctgaaggtggccatcaacgggttcggccgcatcgggcgcaacttcctgcggtgctggcacgggcgcggcgacgcctcgcccctcgacgtcatcgccatcaacgacaccggcggtgtcaagcaggcgtcccacctgctcaagtacgactccacgctcggcatcttcgacgccgacgtcaagcccgtcggcgacaacgccatctncgtcgacggcaaggtcatcaaagtcgtgtccca

SEQ ID NO: 86138 - DNA, 532 bp, Zea mays
  unsure (1)..(532): unsure at all n locations
agtatagttntncagtggtctgatcatcgagcatgcacgctcgtcgtaccgctccggaattcccgggtcgacccacgcgtccggttggattgggttcaaagttgggcttttggacagctgtggtgtgcacggcagctctgtgacttgtgaggaggaagggaggaagaaagcggatccatggcgtcgaagcggatcctcaaggagctcaaggacctgcagaaggatcctcccacctcttgcagcgcaggccctgttgccgaagatatgttctactggcaggcgacgattatggggccatcagatagcccatacgctggtggcgtatttttggtcactattcactttccaccggactacccattcaaaccaccgaaggttgcattcaagacgaaggtttaccatccgaatatcaacagcaacgggagcatctgtcttgatatcttgaatgagcaatggagccctgcactgaccggtttttaaggtcctcctatcaattggttcccttctgacggacccaaaccctgacgatccg

SEQ ID NO: 86139 - DNA, 530 bp, Zea mays
  unsure (1)..(530): unsure at all n locations
ngggagagtgggtgtgtatagtagattggtggcatgctcgtaccggcccggaattcccgggtcgacccacgcgtccgccccaatgaagtcagcgagatctccatggctaactcccgccagaacatccggaagttggttaaggatgggtttatcatcaggaagcctcagaaggttcactctaggtcccgtgcaagaagggcacatgaggccaagcagaagggaaggcactctggatacggcaagcgcaggggtaccagggaggctaggctccccaccaagattctgtggatgaggaggatgcgtgttctgaggcgcctgctccgcaagtaccgtgaggccaagaagatcgacaagcacatgtatcatgacatgtacatgaaggtcaagggtaatatgtttaagaacaagagggtgcttatggagagtatccacaagtccaaggctgagaaggccagagagaagacactttctgatcagtttgaggccaagcgtgcaaagagcaaggcangccgttagaggaagattgctag

SEQ ID NO: 86140 - DNA, 548 bp, Zea mays
  unsure (1)..(548): unsure at all n locations
aggtaggaanctgttcntgtatgaatcactcaggacgtccgtaccggcccggaattcccgggtcgacccacgcgtccgcgaccgggattccctccgccaagcgcggatctgaacgctgcgctccgtgtcgccgctcgaatccgccatgaagggggccaaatccaagggcgccgccaaggccgatgccaagctggcggtgaagagcaagggggcggagaagcccgccaagggcaggaaagggaaggccggcaaggaccccaacaagcctaagagggctcccagcgctttcttcgtgttcatggaggaatttcgcaaggagttcaaggagaagaaccctaagaacaagtctgtcgctgcggtggggaaagctgctggcgacaggtggaaatccctgagcgagtcggacaaggctccctatgtagccaaagctaacaagctcaagctcgagtacaacaaggccatcgctgcctacaacaggggcnagagcacttgaactaagaaagggctctgccaggaagaagaggaggaagatgaagaggagtctgacc

SEQ ID NO: 86141 - DNA, 532 bp, Zea mays
  unsure (1)..(532): unsure at all n locations
aggtggtagtaggttgtgtattgagatatggtagcatcgtcgtaccggcccggaattcccgggtcgacccacgcgtccgataaccttcttggtgaaggaggatatgggtcagtttataagggtaaattagctgatgggagggtggtggctgtaaaacagttatctgaaacatctcatcagggaaaacagcaatttgcagccgaaatagaaactatttctcgagtgcaacaccgtaatcttgtgaagttgtatggttgctgtcttgaaggaaataaaccactgttagtttatgagtacctagagaatggaagccttgataaagcattgtttggaaacgggaaactgaacctagactggccaacacgctttgagatatgcttaggcattgcaagaggcctcgcttatctccatgaagagtctagcatccgtgttgtgcatagggacataaaggctagcaatgtcttgcttgatgcanatctcaaccctaagatctcggatttcgggctcgccaaactttacgatgacaagaagn

SEQ ID NO: 86142 - DNA, 546 bp, Zea mays
agtagtttgaggttgagatgaaccctcgcactgcgtactgctgtaccggtccggaattcccgggtcgacccacgcgtccgaagcggctttggaagttggaatccatggcgtccacctcgtgcttcctccaccagtccagcgcccgcgtggccgcgccgtcgccgcgcctcgccgccccgccgcgcagcgcgcaactgttcgtctgcaaggcccagaagcagcaggccgccgcggcggagagcgacgtgtcgcgccgcgccgcgctcgcgctcctcgccggcgtcgcggccgtcggcgccaaggcgagccccgccgccgccgcctacggggaagcagccaacgtgttcggcaagaccaagaagaacacggacttcatctcctacgtcggcgacggcttcaagctgctgatcccgtccaagtggaaccccagcaaggaacgggagttccccgggcaggtgctccgctacgaggacaactttgaccgccaacagcaacgtgttccgaatcattcagcccaacttcaagaagaacctttacgagttcggg

SEQ ID NO: 86143 - DNA, 534 bp, Zea mays
agttaggcggggtgtgaccatgatctatcgtagcactccggcactgccgtaccggtccggaattcccgggtcgacccacgcgtccggcccaatggagccgcagtgcaacgtcggtatgttcacgcgcgccgagctgctggaggccagcgtggagcttcgtcatcacgccctcggctacgtcaagtccacggccctccggtgcgctgtcaagctcggcgtcgccaacgccatccagcgccgtggcggcagggcctccgtcgaggacctgctcaccgagctctctctggacgcaagcagactccgctgcctgcacagcgtcatgcgcgcgctcgccgcgttgggcgtcttcaaggaggggagcgacggcgagtacggcctcactgccgtttcctctctgctcgtggacgacgacagcagcgtccgagattgggcccttgctggtgtcgatggtagcgacgacgacaacaactgcagtgctcgaagaacggcgttcaagatgacgcacgggcaggacgtctgggatgtcctcgcgcc

SEQ ID NO: 86144 - DNA, 529 bp, Zea mays
  unsure (1)..(529): unsure at all n locations
tggtagggtncaggttttggaatagatcatacggcacgtctctaccggtccggaattcccgggtcgacccacgcgtccggctacatgtcgtctcttttcgtttctcacttcctctcttcgttcccaatttgaaggctgcccaacccttgcgccggtaggcggtggcggtgaggatagagggttacctgaggaggcagtgatggcggccacgattcagtacaaccggagcaacccggcggtgaagcggatcctgcaggaggtcaaggagatgcagtccaacccctcacccgacttcatgtccctccccctcgaggaggacatcttcgagtggcaatttgctatccttggtccgagagacagcgagtttgaaggtggaatttatcatggcaggatccagctaccttcggattatccattcaagccaccgtccttcatgctacttacgccaagtggacgctttgagattcagaagaagatttgcttgagcatatccaattaccaccctgagcactggcagnctttatggagt

SEQ ID NO: 86145 - DNA, 529 bp, Zea mays
  unsure (1)..(529): unsure at all n locations
aggagggttttaggggttgtgtcaagtagtacgataagctgatcgaccggcgcggaattcccgggtcgacccacgcgtccggcaaccggtccagcactttcacgctcagctccagcaatggctgcctccaccatggcgatctcctccacggcgatggccggcacccccatcaaggtgggctccttcggcgagggccgcatcaccatgcgcaagaccgtgggcaagcccaaggtggcggcgtccggcagcccctggtacggccccgaccgcgtcaagtacctcggccccttctccggcgagcccccgagctacctcaccggcgagttccccggcgactacggctgngacaccgncgggctgtccgncgaccccgagaccttcgccaagaaccgcgagctggaggggatccactcccgctgggccatgctcggcgcgctcggctgcgtcttccccgagctgctctcccgcaacggcgtcaagttcggcgaggccgtctggttcaaggccggctcccagatcttcagcgagg

SEQ ID NO: 86146 - DNA, 520 bp, Zea mays
agtagagtggtttgatatagagcatatgcatgctctaccggccggaatcccgggtcgcccacgcgtccgttgctctgatagcttgctccagacgtacgtacgtacgtagatcgatccatcgatcgctagctagctgacgaccatggcgtccctctcctctgccgccatcaccgccccttccttcacggccgcgcccgctcgcgcagtggtcagcaggaggtccttcaccgtgcgtgcctctctccgcaaggccactgccaccgccgccgtggccgttgccgccagcgtcctgcttgccggcggcggcgccatggcccaggaggtgctgctgggcgcaggcgacggcgggctcgtcttcgagcccagccagttcaccgtcaaggccggcgacaccatcaccttcaagaacaacgccggcttcccgcacaacgtcgtgttcgacgaagacgaggtgccgagcggcgtcgacgcctccaagatctcgcaggaggagtccttaacgcgcccagcgagacctact

SEQ ID NO: 86147 - DNA, 545 bp, Zea mays
  unsure (1)..(545): unsure at all n locations
ggtaggatgctggtttgtcatgatcatgagcatctcgtaccgctccggaattcccgggtcgacccacgcgtccggaggccacaaaacagaggtacccaaacgatcgatctgtgcatctccccaccgtccgtgccgcaaccatctgattcagaagcagacatcaatggctagcaacggctgcaacggcaacggcaacggcaaggcggcgccggcgggtgtggtggtgccggagatcaagttcaccaagctcttcatcaacggcgagttcgtcgacgccgcctccggcaagacattcgataccagggacccacggaccggcgacgtgctggcccacgtagcagaggcagacaaagctgatgtggacctggcggtgaagtccgcccgggacgccttcgagcacggcaagtggccccgcatgtcaggctacgagcgcgggcggatcatgaacaagctggcngaccctgtggagcaacacacggaggagctggcggcgctggacggtgccgacgccgggaagctggctgtgctgggcaagatcatcgact

SEQ ID NO: 86148 - DNA, 548 bp, Zea mays
  unsure (1)..(548): unsure at all n locations
agtaggacgggtgttgatcatgcatgcatcagcatntctgtaccgctccggaattcccgggtcgacccacgcgtccgcaaccctcgcttccccaaaccctagccaagggacacggtggccggcgatggacggcgacggaggaggcgctggtgcgctgcaccaccacacgcgctcacccgaggacgtcttccgcgatttccgcgcgcgccgagccggcatcgtcaaggcgctcaccacggatgtggagaagttctatcagcagtgcgatccagagaaagagaacttgtgcctttatggtttgccaaatgagacttgggaggtcactcttccagctgaggaagtacctcctgagcttccagaaccagcactggggataaactntgcccgtgatggaatggtcgaaaaagactggttgtctctagtttgcagtcatagtgatgcatggctcctggctgtggcattctattttggagctcggtttggaattgaccaagattgccaggagagggctctttaccattgataacaaccttgccactgtgtatgaa

SEQ ID NO: 86149 - DNA, 534 bp, Zea mays
  unsure (1)..(534): unsure at all n locations
nagttaggagagggtgtcgcgatcgaaccattatcactccggcatgccgtaccggtccggaattcccgggtcgacccacgcgtccggctagctgatgaacgagatgacgggggagagcgagctagctagcacagcacggagcgagcacacgcacatcttcctccgtgtgacgcggtcgaggtagccgagggcgtcgccgtcgccggggaaccagctgtggatggtggaggagacgttgacgatgcggccctggacgcccgtggcccgcgccgtgtccgccatcttgtccagcagcagcctggtgagcaggaagtggcccaggtagttggtggcgaaggtcatctccacgccgtcctccgacacggcgaaacggtcggcgtacttgccggcgttgttgctgcacgtacgtacgcacgcacgtgaaccatgtgtcagtccatgtaagttagccgcagttgttgctgctgctgccttggcaggtggactgctcactgatggatgcagcagcagcaagatgaagaaagaaagcatgag

SEQ ID NO: 86150 - DNA, 529 bp, Zea mays
  unsure (1)..(529): unsure at all n locations
agtgggagaggtgtgatatcgaacatagaacatgtcggcactgccgtaccggtccggaattcccgggtcgacccacgcgtccgggcagcagcaatgacacttccctgcgccggcggctgcgagatccaagccagcggcattaactaccgcatcgccgtctccacccgacctctcaaggtctggagcagatcagacgacgacgtccattcccaagaccaccacagcgtcgtccgccaggtgctccgggacgtctcctgccgcgcgcgccccggcgagctgctcgccatcgtcggccccagcggcgccggcaagtccaccctgctcgagatcctcgcggggcgcctctccccgtccccgccgccccacctgctacgcatcgacggcgccgncgnccacagcgccgacctncgccgcgtctccgnctacgtcacccagcaggacgtnctcttcccgctgctcaccgtgcgcgagacgctggttttaacgcgcgcctccgctagcgcccgccctgcctcaaggacatgacccc

SEQ ID NO: 86151 - DNA, 551 bp, Zea mays
  unsure (1)..(551): unsure at all n locations
aggtagtttntaggggtgtgccgatcgaaactcgatcctatcggcactgctgtaccggtccggaattcccgggtcgacccacgcgtccggttggcttctcctccccctccggttcgggttcgggttcgtgaggttctccggggttcggtttcgtgggtgggcggatcgagatggcggcgtcggatgttgagtaccgctgcttcgtcggcggcctcgcctgggccacggacgaccactccctccacaacgccttcagcacctacggcgaggtcctcgagtccaagatcatcctcgatcgggagacgcagaggtcccgcggcttcggcttcgtcaccttctccacggaggaggcgatgcggaacgccatcgagggcatgaacggcaaggagctggacggccgcaacatcaccgtcaacgaggcccaggtcccgcgcggccgntgaggcggcngcngccggttccggtgggtggccgtgaaggcggcggtttacggcgtggcggcccccgaatggcggnggcggttacggcgtggccgggggggttacgggcgg

SEQ ID NO: 86152 - DNA, 531 bp, Zea mays
  unsure (1)..(531): unsure at all n locations
agggaggggnnaaggggttgtgtattgagagctaggagcatgtctgtaccggcccggaattcccgggtcgacccacgcgtccgagctcccatatccgctcccctacctctccagcatcctcccgtctccgtcgtctcgtctccgctcctgacctcgccagccatgggcaagatcaagatcggaatcaacggtttcggaaggatcggcaggctcgtggccagggtcgccctgcagagcgaggatgtcgagctcgtcgccgtcaacgaccccttcatcaccacggattacatgacgtacatgttcaagtacgacaccgtgcacggccaatggaagcacagcgacatcgccctcaaggactccaagacgcttctcttcggcgagaagccggtcaccgtctttggcatcaggaaccccgaagagatcccgtggggtgaggctggtgctgagtatgtcgtggagtccaaccgtgtcttcactgacaaggaccaggctgctgcacatctggagggtggtgccaagaagggttgtatc

SEQ ID NO: 86153 - DNA, 528 bp, Zea mays
  unsure (1)..(528): unsure at all n locations
agttagggatcgcgggtgtgtcccagcccccaaagnctanctaccgctctcgaattccgggtcgacccacgcgtgcgagctcccatatacgctcccctacctctccagcattctcccgtctccgtcgactagacggggctccgtacctctccagccatgggcaagatcaagatcggaatcaacggtttcggaaggatcggcaggctcgtggccagggtcgccctgcagagcgaggatgtcgagctcgtcgccgtcaacgaccccttcatcaccacggattacatgacgtacatgttcaagtacgacaccgtgcacggccaatggaagcacagcgacatcgccctcaaggactgcaagacgcttctcttcggctagaagccggtcaccgtctttggcatcaagaaccccgaagagaatcccatgtgtgaggctggagctgagtatgtcgtggagtccaccggtgtcttcactgacaatgacaatgctgctgcacatctgatgggtggtgccaagaaagtttttatttag

SEQ ID NO: 86154 - DNA, 530 bp, Zea mays
  unsure (1)..(530): unsure at all n locations
agttgtgagtgtgtgtatcctactgcatgcagcangctctaccgcttcggaattcccgggtcgacccacgcgtccggttggcttctcctccccctccggttcgggttcgggttcgtgaggttctccggggttcggtttcgtgggtgggcggatcgagatggcggcgtcggatgttgagtaccgctgcttcgtcggcggcctcgcctgggccacggacgaccactccctccacaacgccttcagcacctacggcgaggtcctcgagtccaagatcatcctcgatcgggagacgcagaggtcccgcggcttcggcttcgtcaccttctccacggaggaggcgatgcggaacgccatcgagggcatgaacggcaaggagctggacggccgcaacatcaccgtcaacgaggcccagtcccgcggcggccgtggaggcggcggcggcggctaccgtggtggccgtggaggcngcggctaccgcggtggcgggcgccgtgatggcggcngccgctacggcggttgcggcggcggtc

SEQ ID NO: 86155 - DNA, 548 bp, Zea mays
  unsure (1)..(548): unsure at all n locations
aagtagggtcgggtgtgntgtctcgatgcatgcagcacgtccgtaccgctccggaattcccgggtcgacccacgcgtccgctgctccggtcgctgctgaacgccgatctgattggcttccacacttttgattatgccagacacttcttgtcgtgctgcagcaggatgctcgggctcaagtatgagtcgcagaggggctacattgctctggagtactatggccggacagttactatcaagatcttgcctgtgggagtacacttggagcagctacggtcagtcctcaacctcccggagcttggggtcaaggtggccgagcttctgaaacagttctgtcatcggaaccgtctgctgttgcttggtgttgatgacatggatatcttcaaaggaattagcttgaagcttttggcgtttgagcagctcctaatgcagcattcggagtggccgngaaggggntgtgctggtcagaacggcaattcaacaggggggccgggaaagggatttagggaagttcacggaaagagcgattccatggttaggcgcattaac

SEQ ID NO: 86156 - DNA, 537 bp, Zea mays
  unsure (1)..(537): unsure at all n locations
gggtagtagtgtgttgatcatgatcatcganctcgtccgcactgccgtaccggtccggaattcccgggctttagaggaactgcacaaattcttgagaaaaagggttacactcagtttactcctcattatatcacatggtattgtccagaagcttttgttgatagcaagcaatgcaaatcacagtgcatcaatcatgggagatattgtgcaccagacccagatcaggattttagccaagggtatgatggaagaaatgttgtggttcaaaacctacatcagatttgtgtattcaagattgctaatgagactggaaagccatggctgtggtgggattatgtgcatgatttcgcacttaggtgtccaatgaaggataagaaatacaataatgactgtgcccatgatgttatcaaatcacttggatgggacatcgagaatttaaacaagtgtgttggagacccttgagcccatgtggaaaatgaaattctaaaggcagaacangatgcccaaatgggtcatggtaaaaggggagatgtcacc

SEQ ID NO: 86157 - DNA, 547 bp, Zea mays
  unsure (1)..(547): unsure at all n locations
ggtgtnnnagggctgngatggaaatagaactcataggcacgccgtaccggtccggaattcccgggtcgacccacgcgtccgctcgtcgagcgtggtatggtccccctcaagaacgaggagcagctcacggacgggtacgtagacaccatcgtcgactggatcccgggcgcgcccaaggacctgcggctccgggacttcccgagcttcgtgcgcaccacggatccgaacgacgtcatgctcaacttcttcatccacgagacggagggcatgtcgcaggcgtcggcggtggtcatcaacaccttcgacgagctcgacgcgacgctgctcgctgccatggcgaagctcctgccgcccatctacaccgtgggcccgctccagctgacggtgcggaacaacgtgcaggcgaacagtcctgtcgctgctatggggtccaacctgtggaaggagcangaggcgccgntncngtggctcaacggccgtgcgccgngctccgttgtgtatgtcaacttncggagcatcacggtgatgtccaacgagcagctggtcc

SEQ ID NO: 86158 - DNA, 535 bp, Zea mays
  unsure (1)..(535): unsure at all n locations
agtttaggtttttcaggtgtcttactgatgactgcatgagcacgntcggacacggccggaattcccgggtcgacccacgcgtccggccagagtgctaccagaacggcgtgtttggcctgccccgggggaagatggatgtggtggagaagatgcggccaggtgctaagctgttcttgtatgattttgacctcaagctaatgtatggggtatacaaggcagatacaaggggaggattggatcttgtgcgacatgcctttgatgggaaattccctgcacaggttaaatttagtgttgacaaggattgtcttcctattcctgagagtagtttcaagcatgccattaaggagaactacagctcaaaaggcaggttcacccaagagctgaactctaaacaagttcaaagactattggcaatgttcaagcctatcgaccttcctcaatcagctccacaacatatcgaggaagtgcgacaatcacatatcattgaagatattagaaacccgagtgactatgaagatagaagacgattgcaacn

SEQ ID NO: 86159 - DNA, 535 bp, Zea mays
  unsure (1)..(535): unsure at all n locations
agttgagggttncgaggctgtgaccatcgagcatgcagctcgtcgtaccggcccggaattcccgggtcgacccacgcgtccggtgcgtggccggacctgaaaagccggttcctcccccgaccccggcgccccaccgcagccgccggggcccaccgcccggcgcaccccgtcacctctccaccaaccggatacccggacggatccgctcccacctggatcctgatccggggaagtcaaaggggagatcgaagcttgaacagagggagccaaaatggtgaaggacacgcggtactacgacgtgctgggcgtggacccgtccgccaccgagtccgagatcaagaaggcgtactacgtcaaggcgaggctggtccaccccgataagaacccgaatgatccgcaggccgcggagaagttccaggaactaggagaagcataccaagttctcagtgaccctacacagcgccaagcttatgactcacatgggaaagacggcatctcaacggaggggattattgatcctgcaacaatttttggg

SEQ ID NO: 86160 - DNA, 531 bp, Zea mays
  unsure (1)..(531): unsure at all n locations
agtaagggttcgagggttgctcatgatctagtagcactccgtaccgctccgnaattcccgggtcgacccaagcctcccggcggccttgggcccggccccggccgccgggggcaagccggaggccccgattggggtgaacgcgcgcggcgggcgtcgagcccgaagctgccgaacgggcggcggctgcnggtggctgtggtgggaggcggccccgccggtggcgccgcggcggaggcgctggccaagggcggcgtggagacggtgctaatcgagcggaagatggacaactgcaagccctgcggcggcgccatcccgctgtgcatggtgtcggagttcgacctgccgctcgaccttgtggaccgcaaggtgaggaagatgaagatgatttcgccgtccaacgtcgccgtcgacatcggccgcacgctcgcgccccacgagtacatcgggatggtcaagcccgaggtgctcgacgcctaccttcgctcacgggcacagtcccttggctcggaagtcgtcaaccggcttttttta

SEQ ID NO: 86161 - DNA, 541 bp, Zea mays
  unsure (1)..(541): unsure at all n locations
agtaagggagtgtgtcntgtaatagaagcagtcaggcacgtccgtaccggcccggaattcccgggtcgacccacgcgtccgaaaatattgccagtcccgccgtcgagatggccccacgccgcctgctcgtcctcgccgtgctcgccctcgcggccaccgccgccgcggccaactccggcttcgcggactccaacccgatccgccctgtcaccgaccgcgcggcctccgcgctcgagtccacggtcttcgccgcgctcggccgcacccgcgacgcgcttcgcttcgcacgcttcgccgtcaggtacggcaagagctacgagagcgcggcggaggtccataagcggttcaggatcttctncgagagcctncagctggtccgctccaccaaccgcanaggcctctcctaccggctcggcatcaaccgcttcgcggacatgagctgggagggagtccgtgcgacccggctcggcgcagcccagaactgctccgncacgcttaccgggcaccaccggatgcgcgccgccgnncgtgcgctggcgga

SEQ ID NO: 86162 - DNA, 533 bp, Zea mays
ggtggtagggttgcgatgaactagtaactctcgcgatgccgtaccggtccggaattcccgggtcgacccacgcgtccgggaaaagttgactgaaaagcttaatacaatgcaaaaggaaagtgatgagcagaaacgcaaaatcaagaagacagaacgtgctcttaaagtcgctgaggaggaattgatgaggttgcagttagaagcaactgctaaatcaaaacagctgactgaggttcatggagcatggttaccaccttggttagcgacacactatgctcgttacatggaggttgtctcaggtcactggaattatcatggaaaacctgctgtgcagaatgttttgcataaggcatcagaaaaatcagcacatgcaaagaaatgggctgaaccacatattgagactgctaagatgaaatggattcctgttaaggagaaattggttgtcctcaagaaaaatacagaaccttatgtacagaaggtatcgacaagatcagtggagttttatgagtcatccaaggatgctgtgacaccta

SEQ ID NO: 86163 - DNA, 531 bp, Zea mays
  unsure (1)..(531): unsure at all n locations
ggtaggttnttcagaggtgtcgtcatggaactacgtanctcatcgtaccggcccggaattcccgggtcgacccacgcgtccggtacgtacgtagatcgatccatcgatcgctagctagctgacgaccatggcgtccctctgctctgccgccatcaccgccccttccttcacggccgcgcccgctcgcgcagtggtcagcaggaggtccttcaccgtgcgtgcctctctccgcaaggccactgccaccgccgccgtggccgttgccgccagcgtcctgcttgccggcggcggcgccatggcccaggaggtgctgctgggcgcaggcgacggcgggctcgtcttcgagcccagccagttcaccgtcaaggccggcgacaccatcaccttcaagaacaacgccggcttcccgcacaacgtcgtgttcgacgaagacgaggtgccgagcggcgtcgacgcctccaagatctcgcaggaggagtacctcaacgcgccaggcgagacctactncgtcacccttaccgtgccgggcac

SEQ ID NO: 86164 - DNA, 536 bp, Zea mays
  unsure (1)..(536): unsure at all n locations
ggtagttntnctagggttgcccacgtacaagacagaatancggnactcttccggaattcccgggatttgagaaggagagggaaaatgatgccctcgtggcttctgggccgccggggcccctccggcttctcctggagtgccagggccgaccaagtcacgcagggcatctccgccgccggcctcaccgccatcgtcactggggcgtccagcggcatcggcgcggagacggcgcgaacgctggcgctgcgcggggcccacgtcatcatggccgtcaggagccttcccgctgcccaggccgtcaaggacgccgtcctcgcccaggcgccgggggccaagctcgacgtcatggagctcgacctctcgtccatggcctctgtccgcgctttcgcgtcccaattcatcgacaggggtctccccctcaacatccttatcaacaatgcaggagtaatggcaataccttttgcgctttcaaaggatggaattgagatgcagtttgcaactaatcatgttgggcatttnctgctcacacacctttt

SEQ ID NO: 86165 - DNA, 536 bp, Zea mays
  unsure (1)..(536): unsure at all n locations
gggagggagcgggtggatgacgaggactganactatcgtatgccgtaccggtccggaatgcccgggtcgacccacgcgtccgcggacgcgtgggccaaggcgcacgtgctgacccacgacacggggtaccacggtctggggagccactggctgcgcacgcactgctgcgtggagccctacatcatcgccgccaaccggcagctgagccggctgcacccggtgtaccgcctgctgcacccgcacttccgctacaccatggagatcaacgcgctggccagggaggcgctcatcaacgccgacggcatcatcgaggagtccttctggccgggcaagtacgccgtcgagcttagctccgtggcgtacggcgcgacgtggcagttcgacacggaggcgctgcccaacgacctcgtcaaacgcgggctggccgtgcgcggtgaggaccgggagctggaacttaccaataaagactacccctacggccaccacgggctctgggcttggacttcataaacagtgggcggtcgagtacgttaacc

SEQ ID NO: 86166 - DNA, 544 bp, Zea mays
  unsure (1)..(544): unsure at all n locations
ggagattctgggtgtgatctagtagcactacagcacgtctcgtaccggtccggaattcccgggctccactccagcactgaacacttgattgattcagtaggtagctagctagctgaatcacaatggatcctaccaaggtccgtccgtccagtagccacgacacgacggtgacgacgacgaacgctggcgctcctgtgtggaacgacaacgaggcgctgactgtggggcctcgcggtcccatcctgctggaggactaccacctgatcgagaaggtggcgcacttcgcgcgggagcgcatcccggagcgcgtggtgcacgcgcgcggggccttcgccaagggcttcttcgagtgcacccacgacgtgacgtcgctgacgtgcgccgacttcctgcgcgcgcccggcgtgcggacgcncgtgatcgtgcgcttctcgacggtgatccacgagcggngggtcccgagacgatccgggaccgggcggtttcgcgtgaggtctacacccgcgagggcaactgggactgctgggcacaacttcccgtctcc

SEQ ID NO: 86167 - DNA, 530 bp, Zea mays
  unsure (1)..(530): unsure at all n locations
ggtagtattatgaggttcntgtcatgatgcatgagcctgtcgtaccggctcggaattcccgggtcgacccacgcgtccgggacaacgaaaacatcaaacaagagaaccaaaggaaacagagcaagagcatcgctctcgaagcaaggcgcgcaccacgccgtcgccggccggccacttcgcacgtacgtaggacgcgcacgcaccggtgcatatatggggctcctgaaccagctgtgggacgacacggtggccgggccgcgcccggactccggcctcggcaagctccgcaagtacgcctccttctccccctcgtcgtcgtcgtcggcggcggtggcggcggcggcggcggcgggctccgcgccgnctccgggcgccgtgacgcggagcttgaccatgctgcggcggccggcggcgctgtccgtcgtcacgtcgccccgcagcgagtccagctccgcgccgtcgtccccgtcgcccgcaagcggcgctccggattcgcccttcggcgcagctgcagcgacgacgccccaggg

SEQ ID NO: 86168 - DNA, 532 bp, Zea mays
  unsure (1)..(532): unsure at all n locations
ggtagggttnngagggtgcgaacaagtattaggtacgctcgtccgtaccggcccggaattcccgggtcgacccacgcgtccggtgtggtaaaagaggaggttacatggagattactggcttcagtgctccggtaagagagcagatctacaaggtagcttcagtgaacctgtgctccaatatcactggtcaaatccttgcgagcctcgtcatgaatccaccaaaggtctgctattatggcattatgccctgattagaattaggaaacgccaaactgtccagttaaaacccattgcctcattcttcaggttggggacgaatcatatgcttcctacaaggcagagaaagatggaatccttcagtctttagctcgccgtgcaaaggttcgcctggttgcatttctactatagatttgagtaacttcctaaacatattcaaggtcttttttttggtcgttttacaggcactggaagatgcattcaacacgcttgagggattttcatgtaacaaggcttgaaggaacaatgtaccttt

SEQ ID NO: 86169 - DNA, 540 bp, Zea mays
  unsure (1)..(540): unsure at all n locations
aggtaggcgggtttgatcatgagtaagagcactacgcactgccgtaccggtccggaattcccgggtcgacccacgcgtgcgcagcgagcgagagcagcacacacgcagctagctaggagcagcagcagagcagcggcgatggcggcctccatgatctcctcgtcagctctggcggtggcgcctcagggcctgccgcccctcggccgccgcgcctactccttcgccgtcgtctgctccaagaagaagatcaagaccgacaagccctacgggattgggggtggcctgaccgtcgacgtcgacgccaacgggagaaagggcaagggcaagggcgtgtaccagttcgtcgacaagtacggcgcgaacgtcgacggatacagcccaatctacaacgaggatgactggtctcccaccggcgacgtctacgtcggtggaaccactgggcttctgatctgggccgtcaccctcgctgggatcctcggcggcggcgcccctctcgtctacaacaccagcgcccttctccggctaaggatatncaatgca

SEQ ID NO: 86170 - DNA, 539 bp, Zea mays
  unsure (1)..(539): unsure at all n locations
tagaggatgtgggttgtcatgatctctgatattacggatgctgtaccggtccggattcccgggtcgacnacgcgtccgcccacgcgtccggtcgcgtttgcagctaggcagatctgagttagccggcggatccgatccgtgcgcgtgcgcagtgtgtgtgtgtgtgtgtgtgtgtgtttgtgtcggtggagagatggccacagcttacgctcccatggcgagccaggtgatgaagagcagcctcgtcgtgcactcaaggccaaggggcctgtcaggcgctgttgcgctaacaaggcggcccggccggttcaccgtcaaggccatccagcccgagaaggcaacgtaccaggtggtgcagcccatcaacggcgacccttttatcggcagcctgaagacgccggtcacttagagcccgttcgtggcgtggtacctttcaaacttttgggtttacgggaacggcgtgagccctttctgtcgggtttaaagttggctttgggcaaggtttccttcttggggggcctttttgtgttacgggccct

SEQ ID NO: 86171 - DNA, 541 bp, Zea mays
  unsure (1)..(541): unsure at all n locations
agtaagtttatcttagggtgtgctgacgaatgctcagtncacttcgtaccgcctcggaattcccgggtcgacccacgcgtgcgcctaccccgtgctccggttcatgtcctgctgctccccatgtcgcccccactcgacctcggctacagaggcctctcgccggcggcggctgccgccgctgcccacgacgacctgaagggtaccgagctccgccttggtctgccggggtccggttcgccggaccgccgtgttgtggctgccaccgcaaccaccctggacctgctcccggctaagggcgccaagcgcgggttttctgacgaggcgccgacgccatcgcccggtgcagcttccgggaagggaaagaaggtagcggaagaggaggacgacaagaaggttgcagcgacgccgcagccggtcgcaaaagctcaggtggtgggatggccaccaatccgaagctaccgcaagaacacgatgtctaccacccagctgaaaggcagcaaggatgatgctgangccaagcaagaccaanggttcctgtacc

SEQ ID NO: 86172 - DNA, 537 bp, Zea mays
aggagactgttctgtatgaatcataagcacgttcgtaccggtccggaattcccgggtcgacccacgcgtccgcaggaagctgacatggatttattccttgggaacctgcaacatcaatgctaagtttgatgctaaacctattgaacttattgttacaacatatcaggctgcattgctactactgtttaatggatctgacaggcttagttattctgagattgtaacacaattaaacctgtcagatgatgatgtagtgcgtttgctccattctctttcttgtgcgaagtacaagatccttaacaaggaaccggctagtagatccatctctcccaatgatgtttttgagttcaattcaaagtttactgacagaatgagaagaatcaaggttccactccctcctgttgatgagaagaaaaaggttgttgaagatgttgacaaagacaggaagtatgcaattgatgcatcaaatgtgcccattattaaaagcccgcaaattatgggtcatccacagctggttgctggatgttgtgagcaact

SEQ ID NO: 86173 - DNA, 550 bp, Zea mays
  unsure (1)..(550): unsure at all n locations
tagagtataagggtcgtgttactgaaatcttgtnacgtctgtacgccctttcannttcggtggtacccacgcgtccgcaggaagctgacatggatttattccttgggaacctgcaacatcaatgctaagtttgagtctaaacctattgaacttattgttacaacatatcaggctgcattgctactactgtttaatggatctgacaggcttagttattctgagattgtaacacaattaaacctgtcagatgatgatgtagtgcgtttgctccattctctttcttgtgcgaagtacaagatccttaacaaggaaccggctagtagatccatctctcccaatgatgtttttgagttcaattcaaagtttactgacagaatgagaagaatcaaggttccactccctcctgttgatgagaagaaaaaggtttgtgaataagttgacaaaaacaggaagttttccattgattgcataatttgtcgcctttattaaaaccacaaaatttttgggtcatcaacaacttgttgcttaatgtgttgaccatttaacccct

SEQ ID NO: 86174 - DNA, 544 bp, Zea mays
  unsure (1)..(544): unsure at all n locations
agtagttagtggtctgattcatgaaactgtagncntttcgtacgccttcggaattcccggctggacccacgcgtccgcaggaagctgacatggatttattcctttggaacctgcaacatcaatgctaagtttgaggctaaagctattgaacttattgttacaacatatcaggctgcattgctactactgtttaatggatctgacaggcttagttattctgagattgtaacacaattaaacctgtcagatgatgatgtaatgcgtttgctccattctctttcttgtgcgaagtacaatatccttaacaaggaaccggctagtagatccatctctcccaatgatgtttttgagttcaattcaaagtttactgacagaatgagaagaatcatagttccactccctcctgttgatgatatgaaaaaggttgttgaacatgtttaccaaaacaggaggttttcaattgatacatcaattttacgcctttttgaaaagccccaaagttattggtcattaacagctggttgctgaattgtgttagcaattg

SEQ ID NO: 86175 - DNA, 538 bp, Zea mays
  unsure (1)..(538): unsure at all n locations
ggtagggtcgaggctcgtgccatgatcaccactcacttcgtacgccgcggaattcccgggtcgacccacgcgtccgagcatctcgccgtgaagcacttctctgttgagggtcagcttgagttcaaggctgtcctgtttgtgccgaagagggccccctttgacctctttgacaccaggaagaagccgaacaacatcaagctctatgtgcgccgtgtcttcatcatggacaactgtgaggagctgatcccagagtggctgagctttgtcaagggcattgttgactctgaggaccttcccctcaacatctcccgtgagaccctccagcagaacaagatcctcaaggtcatccggaagaacctggtgaagaagtgcattgagctgttctttgagattgctgagaacaaggaggactacaacaagttctacgagtccttctcgaagaacctgaagcttggcatccatgaggactccacgaacaggaacaagattgcggagctgctgaggtaccactncaccaagaagcggagatttgcttaca

SEQ ID NO: 86176 - DNA, 550 bp, Zea mays
  unsure (1)..(550): unsure at all n locations
tgttgtagttgttggaaagtatgtagggaggtgcgttangtaaatagtagagtagattggtatgcccgtaccggtccggaattcccgggcgcgccatttccacctnccactgtcctttcgtccagtccccagccctgcagcccaaccgtggaggttctggaaggcggtgtatcccttctagaaccttctcgagatgcagagcgccgcggctttccggccgtgccccactcggctgctgccagcctcgcccgatcgggatggcaagtgccgccagcgacaggtgtcatgcagcgcggccggggatgctgtggcggccccgaaggcggaagaaggaggcgggctcatgaagacgctgtggctcggctcgctcttcggcctctggtacctgttcaacatctacttcaacatctataacaagcaggtactcaaggttttcccataccctataaacattaccaaaagtcaatttgcttgccgaacctgaacaactttggtcatggtggacaactggtattaataaagagcccaaaaattcttgagcaccactttg

SEQ ID NO: 86177 - DNA, 523 bp, Zea mays
  unsure (1)..(523): unsure at all n locations
ataggtganttgaaccctcgtactgtagtctgtcgccactgccgtaccggactcggaagtttcgacccacgcgtccgcagaggtgggctggcttctcctccccctcttaccaagtcctccttgggttagggttccgttagggttttgtggagggcgatggcggcggctgatgtggagtaccgttgcttcctcggcgggcttgcctgggccaccagcaacgagtcgctggagaatgccttcgccttctacggcgagatcctcgactccaaggtcatcaccgaccgggagacgggaggtctcgcggcttcggcttcgttaccttctcctccgagaactccatgctcgacgctatcgagaacatgaacggcaaggagctcgacggccgtaacatcaccgttaaccaggcccaatcccgtggcggtggcggtggccgcggtggctacggcggcngtcgcggcggccgccgctatggtggccggccgccgtgaacgggggtattggcgcgcggtgcggctaccgccgt

SEQ ID NO: 86178 - DNA, 524 bp, Zea mays
  unsure (1)..(524): unsure at all n locations
ggggggtncttgtgttcatgtaagtagtcgctacgtcatgccgtaccggtccggaattcccgggtcgacccacgcgtccgcgaccaccaccgccggccgggaagcaagctcaaaccctaatcgccgtccgccggcgacgccagcacgatggcccgctacgaccgcgccatcaccgttttctcccccgacggccacctcttccaggtggagtacgctctcgaggccgtccgcaagggcaacgccgccgtgggcgtccgcggcacggacaccgtcgtcctcggcgtcgagaagaagtccacacccaagctccaggactccaggtccgtgcgcaagatcgcgtgcctagacactcacatagctctggcgtgcgcggtgctgaaggcggacgcgcgcgtgctcatcaaccgngcgcgggtcgagtgccagagccaccgactcaccgtcgaggaccccgtcaccgtcgagtacatcacccgctacatcgctgggctgcaccagaggtttccccagaagtggtgagtcct

SEQ ID NO: 86179 - DNA, 531 bp, Zea mays
tgtttgtgtttaaaaggggggggctttagtcttcgtaagaagctgtcggcacgccgtaccggtccggaattcccgggccaaattaagaagttcatgaacaccctgcggcagtaccagacccctttgcagcggtatatagctatgatgaaccgtcaggaaacggacgagaggcttttctacaagcttttaattgataatgtggtggagctgcttccttttgtttacacaccaactgtaggtgaggcctgccagaagtatgggtccatctttggacgaccacagggtctgtatgtcagcctgaaggacaaggggaaggtcctagaagttctaaggaactggccacataggaacattcaagttatctgtgttactgatggtgagcgaatcttgggacttggaaacctgggttggcaaggaatgggaaatcctggtagccaacttggtctatacaacggtttttggaggatggaccaatcaattggctggctctatccaattggagtgggtccattaacgggaaatgggttaagg

SEQ ID NO: 86180 - DNA, 534 bp, Zea mays
  unsure (1)..(534): unsure at all n locations
aggtagtnancaggggtcgtgccatcganctatagtagctcatcgntatgnctgtaccggtccggaattcccgggtcgacccacgcgtccgatttcggctggaaaggacgcggagagcgcttactgggaactcgttataaaggatatccaggatgcgtgcaaactttttgagcccatctacgatgagactgatggggctgatgggtatgtctccgtagaggtgtctcctaggttggcaaatgacactcaaggaactgttgaagcggcaaagtggttacacaaagtggtcaaccgccccaatgtctacataaagatcccagctactgcagaatgtgttccttccatccaggaagttatcgctaatggcattagcgtcaacgtcacgcttattttctcaattgcaagatatgaggctgtgattgatgcttacctcgatgggctagaggcttctggcttgagtgacttatcccgagttactagcgttgcatccttctttgtcagccgagtggacacccttattgacaaaatgcttga

SEQ ID NO: 86181 - DNA, 533 bp, Zea mays
  unsure (1)..(533): unsure at all n locations
agttaggtntnnaggggtgtgctatcgaactactagcattacgcgatgccgtaccggtccggaattcccgggtcgacccacgcgtncgagggactgtgccattatttgaccttgctcttctcgtgcaggtttccgcaaggaagaccgaaatatacatggtgcttgagtacgtcaatggaggagagctgtttgacaagatcgcgttgaagggtaagctgacggagaaggaagggaggaaactgttccagcagctcatagatgccgtgggatactgccacgagaagggggtttatcacagggacctcaagccagagaatgtccttgttgatgcaaaaggaaacataaaagtttctgatttcggattaagtgcccttccacagaaccaacaaaaagatggtttgttgcataccacatgtggcagccctaactacatagcccctgaggtccttctgaacaaaggttatgacggctcgatatctgacgtattgtcctgtggtgtaattctataatgtatggctaccgggaatcttccc

SEQ ID NO: 86182 - DNA, 530 bp, Zea mays
  unsure (1)..(530): unsure at all n locations
ggttgggatttgtaggaggggttnataaatgtaagtattcttggcatgccgtaccggtccggaattcccgggtcgacccacgcgtccggcggcataacaatgtggttccaaccatggccttgggagtgcagcagctgaagaaggagctgggccgctcaaggaaggttccattcgagttcgatgagatcgacgagttccttgaccggttctacatgtcaaggattggcatccgcatgctgatagggcagcatgtggctttgcatgaccctaaaccggagcctggtgtcataggcctcatcaatacaagattatccccaatccaggtggctcaagctgcctgtgaagatgctcgttctgtctgtttaagggaatatggatcagctcctgatattaacatttatggcgatccaaattttacatttccatacgtcacattacacctacacctgatgttatttgaattggtgaagaactctttccgcgcggtgcaagaacggtatatgaactctgataaagatgttcccccagtt

SEQ ID NO: 86183 - DNA, 536 bp, Zea mays
  unsure (1)..(536): unsure at all n locations
tggttgagaagtaaaggtggagtgttcngtctatgaaagaactcataggcactgccgtaccggtccggaattcccgggtcgacccacgcgtccgattttcttttttatttaatagtctctgactatcattaaataaagggtagagcaattcgtttttctagagattctagagaaagtgagacaaagtgaagcgaaagagttttctttgtataagaattaggtctatatcatatctaaatagaagggaaatcaaaaagaagggaagtggggattacattggatgaatccttaaggaagacatatcacaaaagaaataaaggctaaagtaagcgctccttgcctttggtttgagcaaaacagattcttgtttcaccgaggaaaagagagaagttctggataaattgacaatgtcaacttgaattgactaattcagttccgcctattccacattaatgggagtccattaatgtttctgctttacgaatatgatattttttggacatttctaataatagcaggccttattcctatttggg

SEQ ID NO: 86184 - DNA, 539 bp, Zea mays
  unsure (1)..(539): unsure at all n locations
aggggggtnatccagaggtcgtacaattgganncactgtaactcatcgnnatgnccgtaccggtccggaattcccggggcaaccggtccaacactttcacgctcaggcgctcagctctagcaatggctgcctccaccatggcgatctcctccacggcgatggccggtacccccatcaaggtgggctccttcggcgagggccgcatcaccatgcgcaagaccgtgggcaagcccaaggtggcggcgtccggcagcccctggtacggccccgaccgcgtcaagtacctcggccccttctccggcgagcccccgagctacctcaccggcgagttccccggcgactacggctgggacaccgccgggctgtccgccgaccccgagaccttcgccaagaaccgcgagctggaggtgatccactcccgctgggccatgctcggcgcgctcggctgcgtcttccccgagctgctctcccgcaacggcgtcaagttcggcgaggccgtctggttcaaggccggcttccagatcttcagcgagggcggg

SEQ ID NO: 86185 - DNA, 544 bp, Zea mays
  unsure (1)..(544): unsure at all n locations
aggggagttntccgagaggtcntnccgatcgaancatgaagggctttactgtcatgcctctaccggtccggaattcccgggtcgacccacgcgtccgggctccctcctcctccctgcaaatcctgcagacaccaccgctcgtttttctctccgggacaggagaaaaggggagagagaggtgaggcgcggtgtccgcccgatctgctctgccccgacgcagctgttacgacctcctcagtctcagtcaggagcaagatgggtgccggcggcaggatgaccgagaaggagcgggagaagcaggagcagctcgcccgagctaccggtggcgccgcgatgcagcggtcgccggtggagaagcctncgttcactctgggtcagatcaagaaggccatcccgccacactgcttcgagcgctcggtgctcaagtccttctcgtacgtggtccacgaacctggggatcgccggggcgcttctttacttcgggcttggccataataccggcgctcccaagcccgcttcggtacgccgnctgggcggtgtactg

SEQ ID NO: 86186 - DNA, 540 bp, Zea mays
  unsure (1)..(540): unsure at all n locations
tggtttgtgttgattgaggggaaggngttntgttcatgtacgtagtctcttggcacgccgtaccggtccggaattcccgggtcgacccacgcgtccgcgccgtcgtctaatctaccgcgcgcaagccttccctcggggctagatctccgggctccgcttgcccaacttccaccactgaggcgatgcaggaggccaagcacctcaccacctcaaagcttccgccgcaatcccaatcctcatccccatccccttcggctcccgccgcgaaccctcccccataccatcacgactatggtacctttcaccggccgtttcagccgacgctgcccgtcgtaggccccgcctaccatgactaccatgcctctcctatcgggttcggcagccaggggttcgttgcctacccgggcgccgtccagcagcaggtcttcgtggagggcatccccgtccgagagccggccttaccgttctgcggcgtcggcgtcggctggtttttgttctaattggggttcttcttggcggcaatcccctggtatgctgggn

SEQ ID NO: 86187 - DNA, 536 bp, Zea mays
  unsure (1)..(536): unsure at all n locations
tgtttgattaataataatggngtagggttaagtcgtcgtacgtagttgtcggcacgccgtaccggtccggaattcccgggtcgacccacgcgtccggtcgcagggccgccctttttttttttttttttttttttttttttttttttttttgttggggcgaattagtgacccacaatttccattttatctctattggagcagtaggggatacttgttcacttgccagaactcctgatgcaagatagaagcagtatatgtacatcaaatcaaataattcacaacaagtacattagcatttttatttgacatttgagttcaaatggacatagtatcatctgtttgcgccatgacagaggtttgaacttgccaacttggacatgcatatcttttggtcagaataaaactgcagacctttgtttgatggtattgctttcatctaatcacacttttggccactgtgggctgactacctctaatgtgctgaaaactaactgcatgcgactagcaactactgatggtttctctgaacttcctgg

SEQ ID NO: 86188 - DNA, 533 bp, Zea mays
  unsure (1)..(533): unsure at all n locations
agggagttntncaggggtgtgctatcggantatggaggatgatggcatgtctgtaccggtccggaattcccgggtcgacccacgcgtccggtttcgctgccccgattcgccacgaagccgcactgtgagagagggacgcggcccgttgtcctcggcttgtacgcaatccttccgtcgctgcgaagctgatccctcgtgttcgccatggcccccagcgtcgccgtggaaaacctcaaccccaaggtcttgaaatgtgagtatgcagtccgtggcgagattgtcatccatgctcagcgcttgcagcaacaactacaaacacaaccagggtctcttccttttgatgagatcctgttctgcaacattgggaatcctcaatcccttggtcagcaacctgtgacgttcttcagggaggttcttgctctttgtgatcatccatgcctcttggaaaaagaggaaaccaaatcattgttcagtgctgatgctatttctcgagctaagcagattcttgcaactattcctggacggggcacaag

SEQ ID NO: 86189 - DNA, 538 bp, Zea mays
  unsure (1)..(538): unsure at all n locations
aggggggtnnnnnntagggtgtgncgatgannatgaggactctatgcgactgctcgtaccggtccggaattcccgggtcgacccacgcgtccgcccacgcgtccgttttctttatccaagcaaagacttacttccagatgataaggagatgagtatatttgatcatctagaggagcttcgtgacaggattttcatctcagttttggctgttggggctgcgatattaggctgttttgctttttcaaaagatttggttatttttcttgaggcaccagtgactgctcagggtgttcggtttttgcagctctcgcctggggaatttttctttacaacattaaaggtttcaggttattgtggccttttacttggaagtcctatcattttgtatgagatcattgcatttgttatcccaggtttaacaagggacgagcggaaatttcttgggcccaatggggtggggtcctctggtctattctatctaggcattttctttctctacaccggtctcagncctggtgtcgtgaaccctttttggaaa

SEQ ID NO: 86190 - DNA, 542 bp, Zea mays
  unsure (1)..(542): unsure at all n locations
tgtatgattaattattatggtngaaggggtantattacgtatgtagttggtacgccgtaccggtccggaattcccgggtcgacccacgcgtccgatccggctgcacgtttacgaagtattggtaggtattgactttgataaatgagataaggtgcaggagctcgacgaattacttctgaataacttcagaaatcatatggaagaaccatagcatttcgcgattcattggtaaatttactttgattctctatagaccaataatgtgagaccattaacacggttaaagctaaactgcttgaagtccgggcaaaaaggggtactctttctacaactacattagtattactctcgaaatgctttaaacgggaaatagctagtgtagaatgtatctgatatacaacactcatatcgatgaaatagtttgaactatttactagaaaggcaacccatcctttttcccatggccaatcgaccacctaatgattaaaaaaagggaaattttttggaattggaggacaaattaaagggattccatccaattc

SEQ ID NO: 86191 - DNA, 540 bp, Zea mays
  unsure (1)..(540): unsure at all n locations
tgtttggtagtatgttagagtgggagtgntgtgtgtaccatgtatgtatcgcttgtcgtaccggtccggaattcccgggtcgacccacgcgtccgcgtccatctgcgcgctggacttccgcatggacgagtggggcgtggacgtggcgctcacggggtcgcagaaggcgctgtcgatgccgacggggatgggcatcgtgtgcgccagccccagggcgctggaggccagcaagacggccaggtccgtgcgcgtcttcttcgactggaaggactacctcaggttctacgacatgggcacgtactggccctacacgccctccatccagctcctctacggcctccgcaccgcgctcgacctcatcttcgaggaagggctggacaacgtcgtgaggaggcacaaccgccttgggacagccaccaggctcgccgtcgaggcgtgggggctcagcaactgctggcagaaggaggagtggttcagcgacaccgtcaccggcgtcgtcgtgccggccaacatcgacagcgccgaggtcgtcaggcacgc

SEQ ID NO: 86192 - DNA, 535 bp, Zea mays
atgatattgttgaattaggtttaaggttattatatgaaggaactggtagcacgtaccggtccggaattcccgggtcgacccacgcgtccgtggtgctcgaggcaacgatgatctgcatagacaattcggaatggatgcggaacggcgactacgctccgtcgcggttccaggcgcaggccgatgccgtcaacctcatctgcggcgccaagacccagtcgaacccggagaacacggtaggcgtgatgacaatggccgggaagggtgttcgcgtgcttgtcactcccaccagcgacctcgggaagattctcgcctgtatgcacgggttagaagttggcgctgaggcaaacttggctgcggcaatccaggttgcccagcttgctctaaagcatcggcagaacaagaggcagcagccagaggattatagctttcaatggaaggtccggtaaagtccaccaggaaggtttggagaccattgggaagaagcctgaaaaggaccatggtgctcttggcattggtgactttggtgaaatccaac

SEQ ID NO: 86193 - DNA, 534 bp, Zea mays
tggtggtttttaaagagggggggctgtgtaaatgatagaatctgttggcatgccgtaccggtccggaattcccgggtcgacccacgcgtccgcacaaacagtacttcgtctcttcggatgtcggtgccggtaaaatgcaatggtatgcttttcacaaggaagaggctggtggcactgaccctgagaacggcaaaaagaaaagattgcttgagatatttgatgggtggtgtgataatgtcatcgatttggtaaacgcaaccgacgaagaagcgattcttcgccgagatatatacgaccgcccacctactataaattgggggaaaggtcgtgtcaccttgctcggcgattctgtccatgctatgcagccaaatctgggtcaaggtggctgcatggctatggaggatggttaccagctggccgtaaaactagagaatgcctgccaagagagtgtcaagactggaactcctatggacaatagttcctccttgagacgttatgagaaagaagagaagggtgcgtgttgctgttatacat

SEQ ID NO: 86194 - DNA, 540 bp, Zea mays
  unsure (1)..(540): unsure at all n locations
gggtnggttnntnntagagggtgangatcgaaaatgaggagatgacagcgatgctgtaccggtccggaattcccgggtcgacccacgcgtccgccctgtcgttgtgagaattcttaattcatgagttgtagggagggacttatgtcaccacgaacagaaactaaagcaagtgttggatttaaagctggtgttaaggattataaattgacttactacaccccggagtacgaaaccaaggatactgatatcttggcagcattccgagtaactcctcagctcggggttccgcctgaagaagcaggagctgcagtagctgcggaatcttctactggtacatggacaactgtttggactgatggacttaccagtcttgatcgttacaaaggacgatgctatcacatcgagcccgttcctggggacccagatcaatatatctgttatgtagcttatccattagacctatttgaagagggttctgttactaacatgtttacttccattgtgggtaacgtatttggtttcaaagccttacgcgctcta

SEQ ID NO: 86195 - DNA, 536 bp, Zea mays
  unsure (1)..(536): unsure at all n locations
aggttagtngtactaaggttgatgttgagcccacccactacgtacgccgtaccggtccggaattcccgggtcgacccacgcgtccgcccacgcgttccgagaattcttaagccatcacaatatatgaggctcttatgcgcacaaggctcacagactccaccttgagattctacccaagatgagcgagaagaattcatcaggactaaatacgagctgcaggaatttctgaagcctaccttgcacattgcttctcatcagcctactgactctgtaaaacatgccgcaaatgcttctcattctgatggttccaacagtcaagtctacatgatcgagtacattggaatatcgaatgtcaaggcgattgcaggcaccaacctagccatcaaggatatgtcaagcagtgacccttatgtacgcctgacactatgtcaacataaagcacaaacttcagtaatcaatggcaacctgaatcctgactggcatgaagaactgaagctctctgttccccagcaatatggaactcttaaagctgcaat

SEQ ID NO: 86196 - DNA, 535 bp, Zea mays
  unsure (1)..(535): unsure at all n locations
tgataattatttatttgttataaggtgttgtacctacttgtagtgntatgccgtaccggtccggtattcccgggtcgacccacgcgttcggctgcaaggaggtgtccatattgctaaggctgaagaagctgaaagcattgcacgtagggtgttaggccagattctggtaacgaaacaaactggtccggagggaaagattgtgagcaaggtctacttgtgtgagaaactgtctctcactaatgagatgtattttgccatcacccttgataggaaaactgctggtccgctcattattgcttgcagcaagggaggaaccagtattgaagatcttgcggagaagtatcctgatatgattatcaaggttcctgtggatgtatttatagttattatcatacgaggttgcaattgaagttgatgatggtctaactctaaagttagcgaataggtagtagttctataagcatatttggactcctgtagattttttgtagaagacttaatgccctttgctagagtttatttcctctgtcgcatc

SEQ ID NO: 86197 - DNA, 536 bp, Zea mays
tggttgtagtagttagtggggaagggctaagtatatgtatgtagtctcgtatgccgtaccggtccggaattcccgggtcgacccacgcgtccgcgagaagaaggagaagaggaggaagaagagcaggtgctgagaagcctgccggcgcgcgttacgacaagcatatatgggggagatcaccaatgtcatggagtaccaggccatcgcgaagcagaagcttccgaagatggcctacgactactacgcgtccggcgccgaggacgagtggacgctgcaggagaacagggaggccttctccaggatcttgttccgtccgcgcatactgatcgacgtgtccaagatcgacatgaccaccaccgtgctggggttcaagatctccatgcccatcatggtcgcccccactgctatgcagaagatggctcacccagatggggagaacgccactgcgcgcgcggcggctgcggcaggcaccataatgacactgtcgtcctgggcaacttcaagcgtcgaggaaggtgccttgaccgggccaaggg

SEQ ID NO: 86198 - DNA, 537 bp, Zea mays
  unsure (1)..(537): unsure at all n locations
ggtttttgtgtaaggggggagtgcttnagtcaatgtattgtatctctcgccatgncgtaccggtccggaattcccgggtcgacccacgcgtgcgggcaaaagccaaaaggcatcaccggcgcgacgacgatggcagcctcgctccaagccggggccaccctgatgcagccggccaagatcggcggccgggcgccctttgcctcgctgccgtcccgcccgtcgtcgcaactcgcctgcagggcgttcggcgtcgacgccggcgccgccaggatcacgtgctccctgcaggacgtcgccagcaggtgcgtcgacgccgcgaagctcgccggcttcgcgctcgccacctcggcgctcctcgtctcgggcgcgagcgcggaaggcacgcccaagaggctgacctacgacnagatccagagcaaaacggacatggaggtgaagggcacgggcacggggaaccagtgcccgaccattgacgggggcgtggaatcgttccccggtcaaaggccgcaagtcccagattaaaaacctgggcctggg

SEQ ID NO: 86199 - DNA, 531 bp, Zea mays
  unsure (1)..(531): unsure at all n locations
agttagttancatgggtctcgtaatgatnctcagctcagttcgcacgtcgtaccggtccggattcccgggtcgacccacgcgtccgcccaacaagcccgcacgacacgacaccaagtcgaggagctcgagagggcaccaataatggccggcgtgaactccagcgtcgtcgggctcaagcccgccgcggcagtgccgcaggccgccgccgcctcatcgccggcgaagcgggtgcagctggccgcgcccgagggccgccgcgccgctctgctcggcctggcggccgtcttcgccgtcacggccaccaccgggtcggccaaggccacgatcttcgatgagtacctcgagaagagcaaggccaacaaggagctgaacgacaagaagaggctggccaccagtggagccaactttgcgcgcgcctacacccgggaagtcggcaggttgcaagttccctaccacctttattggtgcccagaacttggccaggcgaaggaaaggccctttaataaggaacaacttcagaatttgaggcc

SEQ ID NO: 86200 - DNA, 538 bp, Zea mays
  unsure (1)..(538): unsure at all n locations
agggtagtnnntctggggtgtgtcatcgganttggggggtttatggcatgctgtaccggtccggaattcccgggtcgacccacgcgtccgcaagtttcgtgggtagaggaggcactagatactgtgccagatcggggtctggtagtggcagttgggtgattacgacggagtgggatgggcctcctcgacaagctgtgggacgacaccgtcgcgggcccgcgcccggacaccggcctcggccgnctccgcaagcagcccgcgcgccccgccgccgttaagatcagtgatccggccggggacgctgcagcgctcgtgccgccctcgccggcttcgggtagcgaggagacgccggtgaaggtgacgcgcagcatcatgatcaagcgccccgcggggtacccgtcttcgccgaggagcgcggcaagcacgccgncggcctctccacttgggactatccccgccatctcgccgttgccggccctggtggtcgcttcagaagggaatcatcatccgacgcatatgagagggcacccccttcagg

SEQ ID NO: 86201 - DNA, 540 bp, Zea mays
agttaggttttacggggtctccgatgaaacatcgagctcatcggactgccgtaccggtccggaattcccgggtcgacccacgcgtccgcccacgcgtccggggaattctcaggcaaacgcaatatatgaggcttttataccagagggctgccagaagccacattcagattctacccaggaagagcgagaaaaattcatcaggtctaaatatgagctgcaggaatttctgaagccaagcttgcgcattgtttctcatcagcctagtgactctggaaaacatgccggaaatgcttctcattctgatggttccaagagtcaagtcggcatgatcgagttcattggaatattgaatgtcaaggtgattggaggcaccaacctagccatcagggatatgtcaagcagtgacccttatggcgtcctgacacttgggcaacagaaagccccaacttcaagtatcaatgggcaccttgaatcctgctggaatgaagaactgaaactctctgttccccagcaatatggacctctgaagcttgcagtggt

SEQ ID NO: 86202 - DNA, 535 bp, Zea mays
tgttttttaattaggattgggggtgtgtgtacatgcttgtactcggatgccgtaccggtccggaattcccgggtcgacccacgcgtccgctagaagagcggcggcgcgggcggacaaggatcaggcggaggaggagctgtgccaagggacagtgggtatctcacgcgactcgatgcacaagcgccgtgccaccggtggaaagcataaggcctggaggaagaagcgaaagtatgagcttggtcgtcagccggccaacaccaagttgtcaagcaataagacagtgaggagggtccgtgttcgtggaggtaacgtgaagtggaaggctcttcggcttgatactggtaactactcatggggaagtgaagctgttacccgcaagacccgtatcctcgactaggtctacattgcattaaacattgagcttgtgaggacacatacccttgtgaagagtgccattgtgcaagttgatgctgtcacattcaagcagtggtacctcactcactatggagttgacattgtttgtaagacgaaaccc

SEQ ID NO: 86203 - DNA, 535 bp, Zea mays
tggttgtgttagatgagggggaagggtttagtgacgtcagtagctcatcgtcgtaccggtccggaattcccgggatgagcaagcctgtcgacgccagtgagtgaacaccagccgtcttggcccgcttctcccctgctgcggccatggcgacctgcgcggcgctctcgaccgccgtcaaccccacccagctctgccggtcccgcgctgcgctgggcaagccagtgaaggggcttggcctggggatggggcgggagcgcgcaagccagcggagcatcacgtgccaggcggcgagcagcatcccggccgaccgcgttaccgacatggagaagcggaagctgatgaacctcctgctcctgggcgccatatcgctgcccaccgtcagcatggtcgtcccctacggcgccttcttcgtccccgccggctccgggaacggcggcggcgggacctacgccaaggacaagctgggcaacgacatcacggtggaggagtggctcaacacgcacggtcccaacgaccgtacgctcgcgcaggggct

SEQ ID NO: 86204 - DNA, 539 bp, Zea mays
  unsure (1)..(539): unsure at all n locations
tgattggtgtttatgagtgaagggggctgnagtcttagtacgtagctcattggcacgccgtaccggtccggaattcccgggtcgacccacgcgtccgaaggaaagtacgtggcggagcaggcatggcttcatcggtggccgacgctgcgagcagagtcctgggcgcccgtctggcgcaccaggcgccacagaacggtctcatcgtcgcccgcttagggtccgacttgagcggcaaggcgaagcctgctcctaagaaggtggcgaagacatcgacctgctttgaccggccgctgtggatccacggcgccgtgacacccgactacctggacggctcgctggtcggcgactacggtgtcgacccgttcagcctaggcaagcccgcagagtaccttgcagatcgagtacgactcgatggaccagaacctgtgcatgaatgacgccggctgcatgaccagcacccggttcaagtccttcgacgtcaagtcgagccggttgcagccctacaccgagaggtccggcttcaaaaggttcctgcagag

SEQ ID NO: 86205 - DNA, 528 bp, Zea mays
gtttttgtgagtgtggggggttagtaatgtaagagctcttgtcacgccgtaccggtccggaattcccgggtcgacccacgcgtccgggtggagtcttctgacaccattgacaatgtcaaggctaagatccaggacaaggagggcatccctcctgaccagcagcggcttatcttcgccggcaagcagcttgaggacggccgcacacttgctgactacaacatccagaaggagtcaacccttcatttggtgctgcgccttaggggaggcatgcagatctttgtcaagaccttgactggcaagacaatcacccttgaggtggagtcttcagacaccattgataatgtcaaggctaagatccaggacaaggagggcatccctcctgaccagcagcggcttatcttcgccggcaagcagcttgaggacggacgcacacttgctgactacaacatccagaaggagtcaaccctccacttggtgctgcgccttaggggaggcatgcagatctttgtcaagaccttgactggcaag

SEQ ID NO: 86206 - DNA, 538 bp, Zea mays
tgtttttgtttttagggtgtgggggggtttagtaatcgatagtagctctcgcgcacgccgtaccggtccggaattcccgggtcgacccacgcgtccgcggcatcatgtttctcgccggttccgtcatcaacgccggggccgtcaacgttgccatgctcatcgtcggccggatcctgctcggcttcggtgtggggttcacagcgcaggcggctccgctgtatctggccgagatatcacccaccagatggcgcggcggcttcaccacggcctaccatttcttcctcgtcgccggcacgctcgccgccaacgtcgccaactacgtcacgaaccggattcccgactggggctggcgcgtctccctcggcctcgccgccgtgccgtccgccgtcatcgtcatgggcgcgctcctcgtctcggacacgcccagcagcctcgtgctgcgcggcgagccgtacgcagcccgcgcgtcgctgcagcgcgtccgcggggcgggcgccgacgtggaggccgagctcaaggacatcatctgcgccgtgga

SEQ ID NO: 86207 - DNA, 543 bp, Zea mays
  unsure (1)..(543): unsure at all n locations
agggagtntncctagagttcnttattgganttgaggagtttatggcactgctcgtaccggtccggaattcccgggtcgacccacgcgtccggagcagcacacacgcagctagctaggagcagcagcagagcagcggcgatggcggcctcgatgatctcctcgtcagctctggcggtggcgcctcagggcctgccgcccctcggccgccgcgcctcctccttcgccgtcgtctgctccaagaagaagatcaagaccgacaagccctacgggattggggtggcctgaccgtcgacgtcgacgccaacgggagaaagggcaagggcaagggcgtgtaccagttcgtcgacaagtacggcgcgaacgtcgacggatacagcccaatctacaacgaggatgactggtctcccaccggcgacgtctacgtcggtggaaccactgggcttctgatctgggccgtcaccctcgctgggatcctcggcggcggcgccctcctcgtctacaacaccagcgccctctccggctaaggatatccaatgcatgcgc

SEQ ID NO: 86208 - DNA, 542 bp, Zea mays
  unsure (1)..(542): unsure at all n locations
ggggnggttnnnnaagggggcgtcgncgtcgganntatgggcgactctgtgcgcatgcctcgtaccggtccggaattcccgggttcaagtctcgctacgtagcagtgcaataaaaaaagcagccgcaatggcgagcagcaccatggccctctcctccacggccttcgccggcaaggccgtgaacgtgccgtcgtcgtccgccttcggcgaggcccgcgtgacgatgcgcaagacggcggggaaggccaagccggcggcggcgtccgggagcccgtggtacggccccgaccgcgtgctgtacctgggcccactgtccggcgagccgccgagctacctgacgggcgagttcccgggcgactacggctgggacaccgcggggctgtcggcggacccggagacgttcgccaagaaccgggagctggaagtgatccactcccgctgggccatgctgggcgcgctcggctgcgtcttcccggagctgctcgcccgcaacggcgtaaagttcgcgaggccgtgtggttcaagggccgctccagaacttc

SEQ ID NO: 86209 - DNA, 529 bp, Zea mays
tgttgtttataggatagaggtcgtagtatagtatgtactgctagccgtaccggtccggaattcccgggtcgacccacgcgtccgcgacttattgaggtaataaagcaagcagcataggaaggggcactggttctctacacccgtgccgatccttcaatggccgaggcgactaagaaggcctgcgatttctggggtgttccatgcaccgatgttcttcggcctactgtcgaagccattgcctctcacatcggtgttgctccatctggaattccacgaagctctccgagtcgaaatggtcggctatcagaggattacttccaacggatcgatgctatcgatttcaccatcaaacaagacgacggtgctctgccacagaacctctaccgcgcagacatcgtgcttgccggcgtttcgcgtacagggaagaccccactgtcgatatacctagctcaaaaggggatacaagggggcaatggtccaatcgtgatgggagtggacccttcaaaaggcccttttgagaaccaacccg

SEQ ID NO: 86210 - DNA, 537 bp, Zea mays
  unsure (1)..(537): unsure at all n locations
tgtttgttttttttgtggtggggggggtgagtttacgcacgtagctcatcgcagtaccggtccggaattcccgggtcgacccacgcgtccgtaggcagttcaaagctactgccatggaactaatttctgttctagaacagaagcatagggcggttggtaggacaaaggtgcttcttgatacagatcctgttcacaggctagctgatattgctgttgctagctttgagataagttgtgaggagcagctttcgatgctggattcagttcacttgaatgttatactctgaaaggcaactgaacttgtagacagacacctgcagtcgattcttgtagctgataaaataacgcacaaagttgaggggcaactatcaaagtcgcagaaagaatttctactgctccagcagatgatggccataaaagaagaacttggtgatcacgatgacgactatnatgatgttgctgctgttgaaagaaagatgcagaatgcatgaatgcctgctaatatttggaagcatgctcaaagggaaacgaggccct

SEQ ID NO: 86211 - DNA, 550 bp, Zea mays
  unsure (1)..(550): unsure at all n locations
tgttatacgggaataaggataggggagggacttatgtacactacgcatgtctctccgnagctcnggaccggtaatcccgggtcgacccacgcgttcgtggccatgcttcgacagccttcgctgccaccggccactccagcaaggcggcgggcggtccgagttctccgggctcacgagctccccgtcgctgcccatgcgccggaatgccacctccgacgacttgatgtccggcgtcttcttcaggacccacgcggccggacgaacggcggaccgcggcgggcgccgacggaggcgaagctgaaggtggccatcaatgggttcggccgcatcgggcgcaacttcctgcggtgctggcacgagcgccgcgacgcctcgccccctgacaggcttgtgcatcaacgacacctgaagcgtcaaagcaggcggtccaaacttgctcaagtaccgacttcacgcctcggcattttccgatgcccgccgttcaagccccgtcgggcgacaaacgccattttccgtcgagacgcaaaggtcttaaatgggccttgtccac

SEQ ID NO: 86212 - DNA, 536 bp, Zea mays
  unsure (1)..(536): unsure at all n locations
tgttagtgttaaggtggggggggctctgtancttcacgaatctcttggcacgccgtaccggtccggaattcccgggtcgacccacgcgtccgccataaacaagaaaaagaaaagaaaacccccgctgccagcgacagaagaagaaggggtgccttctccttggttgcgttgcgcctccctcctgtctgcgtgcgtgcaatcgacgcagaggcgcgggcgctcgcaccaccacgaccacgacccgatggctttcatgcgctcccgctcaaatgcatcttctggcatgggagttgctcctaacattagggagacattcgtcgagcttcaaatgaagaaggcattccgatatgttatcttcaaaatcgaagagaagcaaaagcaggtggttgtggagaagacaggggctactactgaaagctatgatgactntntggcctctctcccaaagatggactgccgatatgcgctggattgatttgaatttggtactggggaaaaatgtgccaaaaagccagaatttccttaattgccggtcc

SEQ ID NO: 86213 - DNA, 532 bp, Zea mays
  unsure (1)..(532): unsure at all n locations
gttggtgttttgtggaggggcgttatatatgacgtatctctcgccacgccgtaccggtccggaattcccgggtcgacccacgcgtccgaaacaaccggagcttttaccccacccgctttcccctccccgccaggaacaacagggcgcctcgcaataattcgtccatccatggcgaagctcgtcaacaagctggtcgattcgttcgaccaccacgaggcgccggcgccggacgtcggctgcgtgcgcgccgtgctggccgagctcgtcctcaccttcctcttcgtcttcaccggcgtctccgcctccatggccgccggggccggcgggaagcccggggaggctatgccgatggcgacgctggcggcggtggctatcgcgcacgcgctggccgctggcgtcctggtgacggccggcttccacgtctccggcggccacctcaaccccgcggtgacggtggtgatcttggttcgcggccacatcaccaagctccgggcgctgctgtacgtcgccgnccagctgctggcgttctccc

SEQ ID NO: 86214 - DNA, 534 bp, Zea mays
  unsure (1)..(534): unsure at all n locations
aggggagtttnttaggggtgtgatcttgaantatggagacagtaaggcacgctctaccggtccggaattcccgggtcgacccacgcgtccggacgggtaaaactttgcttgccaaggcaattgcaggaaaagcttgcctgccatttttctgaatttcaaggtctgaatttggggagaatgttggtggtggtggaacttccaaaattcgggaccctttcaagaaaggccaagggaatggctcttgcatagtggttggtggatgaaattgatgctgttggaaaggcaagaggtacaggtattggtggtggaaatgatgaaagggagcagactctcaatcaactactaactgagatggatggtttcgagggcaacactggaattattgttattgctgccactaaccgggctgacatattggattccgctttacttagaccctggcgttttgatagacaggtgtctggtcacgttcctgatgtacgtggaaggacagagattctaaaagtgcatggtagcaacaagaaattggtttct

SEQ ID NO: 86215 - DNA, 542 bp, Zea mays
  unsure (1)..(542): unsure at all n locations
tgttattgttatgaaggatgggagggtgngtaanaacatgaatctcttgcgtatgccgtaccggtccggaattcccgggtcgacccacgcgtccgagcagcagaggcagcgacacgatcgcgagcgcacgcacgtaagcacgttgtcggaagctcaagttagaagaagcaccagtgcctgatcgatggcggcccaggctctcctctccggccggcagctgctgggccgccccgtgcagtcggccgtctctaggtcgtcggcgaggaaagcgcccttcgtcgtcagggccagctccagcccttcaggccagccagggggccacaggcaactgggggtcgcgttcaagcaggcccttttctaacttgatggcacgcttgccggcgactattgcttcgaaccggttggccttttaggacccggaaggcaccgggggctttattgagcccaagtggctgggcctacggcaggtgatcaacgggcggttcgcattcctggccccgtggggcgcccaatggcccggaaaactttggcaaaaagggctc

SEQ ID NO: 86216 - DNA, 531 bp, Zea mays
  unsure (1)..(531): unsure at all n locations
ggattatgataaggtggaggggctctgtanatgtttgcatctctaggcacgccgtaccggtccggaattcccgggggaaagggaagctagcggcttcgctctcgcggggagatggcgcaggcggtggaggagtggtaccggcagatgcgcatcatcacgcgctcctacctcaccgccgctgtcgtcaccaccgtcggctgcaccctcgaaatcatttcgccgtatcacctgtaccttaacccgaagctcgtggtgcagcactacgagatttggcgcctcgtcaccaacttcctctacttccgcaagatggatttggattttctattccacatgttctttcttgcacgatactgcaagcttctggaggaaaactcatttagaggaagaactgctgactttttttacatgctcttgtttggtgctactgtcctaactggcattgttctgatcggagggatgataccttacatttctgagacatttgccagaattctgttcttgagcaattcattgacatttatgatggtttat

SEQ ID NO: 86217 - DNA, 534 bp, Zea mays
  unsure (1)..(534): unsure at all n locations
ggggngtnntnaagaggctgtcgtcgaatatgtagcttgtacgcatgcccgtaccggtccggaattcccgggtcgacccacgcgtccggattgtcgttaatatggtgaaggaacgccttcggcaaccagacgctcaagaaaatggttggcttttggacgggtacccaagaagctattcacaggccatggccttggaaactcttgaaatccggcctgatactttcattctgttagatgttccagatgaactccttgttgaaagggtggttggaaggcggcttgatcctgtaacagggaaaatatatcatttgaagtattctccgccagagaatgaagaaatcgcttcaaggcttacacaaagatttgacgatacagaagaaaaggttaagttgaagctggagacttattaccaaaatatcgagtccttgctatcaacatatgagaacattattgttaaagtgcaaggagatgccacagtggatgctgtctttgctaagatcgacgagctgctgggttctatcctggagaagaaaa

SEQ ID NO: 86218 - DNA, 535 bp, Zea mays
  unsure (1)..(535): unsure at all n locations
aggggnggggnnaagaggtgtgnctttgaaaaggaggctgtatgcgaatgcctctaccggtccggaattcccgggtcgacccacgcgtccgggctccctcctcctccctgcaaatcctgcagacaccaccgctcgtttttctctccgggacaggagaaaaggggagagagaggtgaggcgcggtgtccgcccgatctgctctgccccgacgcagctgttacgacctcctcagtctcagtcaggagcaagatgggtgccggcggcaggatgaccgagaaggagcgggagaagcaggagcagctcgcccgagctaccggtggcgccgcgatgcagcggtcgccggtggagaagcctccgttcactctgggtcagatcaagaaggccatcccgccacactgcttcgagcgctcggtgctcaagtccttctcgtacgtggtccacgaccttgtgatcgccgcggcgctcctctacttcgcgctggccatcataccggcgctcccaagcccgctccgctacgccggcttggcggtgtctt

SEQ ID NO: 86219 - DNA, 536 bp, Zea mays
  unsure (1)..(536): unsure at all n locations
agtgagggancaggtgttttccatgagactcngaccgatcgcagtctcgagttccgaatttaccatgcatccaagcgttcggctcctaatacttccttctatgcttcaaacaccaccggtcgtttttctggttcgcgcacgatataaagggagagagaggttatgcgcgctgtccgtccgatctgctctgtcccgactcagctggtacgacctcctcagtctcaaacatgagcaagatgcgtgccgacaacatgatgaccgacaaagaacggcagaagcatgagcacctcgcccgagctaccggtggctccacgatgcagcggtcgccggtggagaagcctccgctcactctgggtcagatcaagaaggccattccgacacactgcttccagcgctaggtgctcaaatccttctcgtacctggtacacgacctgatgatcgtcgctgcgctcctctacttaccgctagccatcataccggcgcttccaaacctcgatccgtacgccgtctggcctctttaatgtatatttcccaga

SEQ ID NO: 86220 - DNA, 524 bp, Zea mays
  unsure (1)..(524): unsure at all n locations
cggggccctgtttcccngctagctncatacgngacagagctaccggttctgaattcccgggtcgacccacgcgtccggcgaggccgcctactaccagcagggcgcgcggttcgccaagtggcgcaccgtcgtcaggatccctaacggcccctccgagctcgccgtcaaggaggccgcgtgggggctcgcacgctacgccgccatctcacaggacaacgggcttgtgccgatcgtggagccggagatcctgctggacggcgagcacggcatcgagcgcacgttcgaggtggcgcagaaggtgtgggccgaaaccttctacgccatggcggagaacaacgtcatgttcgagggcatcctgctgaagccgtccatggtgacgcccggcgcggaggccaaagacaaggccaccccggagcatgtggccgcgtacaccctcaagctcctncaccgncggatccccccctccgtgcccgggatcatgttcctcttcggcgggcaatcggaggtggaggcgacgcagaact

SEQ ID NO: 86221 - DNA, 521 bp, Zea mays
  unsure (1)..(521): unsure at all n locations
aggggctcatgtcngccctaactcccttcgcactgccgtaccggtccggaattcccgggtcgacccacgcgtccgatgcagtaaggttactcttatgggcattcttgctttcttcctcaactgcagcccaaagttcaagtccctctctctgtccaagtgcatcgagatcaaggacatatgctctgcacctgcacagcttccagaatgcaaatcgcttcagtccctggccatcaaggattgctcaggcttcaccgacaccagcctccctatgttggcatgttctgccctcagctggagaacatcaatatgagtggccttagtgtagtcaccgacaatggcttccttccactaatgaagagctcgaaaagtgggctggtcgacattgatttgaacagctgcgagaatctcacagacatggttgtttctgccttggttaaggccatgacgcttcccttgccacctcagtttcgagggatgcatcangatcactgatgcanacctgttcgccatctgtgagagct

SEQ ID NO: 86222 - DNA, 524 bp, Zea mays
agaggctcatgtcagctcctaaatttctattagtatcacgtaccggttcggaattcccgggtcgacaccacgcgtccggactagttctagatcggccaagttgcaatcgggggaccgggtggaaaccctttcttggggcaacagatgtcaagccagaaggactactctatggcaacagcggatgttgtggacgccgatgtgagggaactcgtggagaaggcctactctagagcaaggcagataatcaccacgcacatcgacatcctccacaagctcgcccagctcctgatcgagaaggagaccgtggacggggaggagttcatgagcttgttcattgacggccaggccgagctgattgtcgcttgagatgtcacaaggcttgcggtgcgtatgcttttcagtgttttgtgtcagagcgagcaatcacaaagcaatggaaagcccagcttgtaggaaccacatcgatgtatagtagttgatacgcatgtactgacttaattgagcaagtaaaatgttattgctcg

SEQ ID NO: 86223 - DNA, 535 bp, Zea mays
  unsure (1)..(535): unsure at all n locations
ggagaaggcaaggannnaagatgctcatcttttatgaaacgccaggagtatagctagacttctatcgaattgccttacgttgctgatcattcaactctccgtcttccttttgaccataatatgtatggccagaaccttactgttcagaatttcttgaacgcatcagttcctgtttctgtgcaagcaaccttcccttataaattcgttgtgagcaagttcttgcagcctggagcttatgatctggttggttacatagtgtatgagatcgaccagcacccttaccagaatgtattctacaatggcactattgaggtcgttgaggctggaggcttactcagtgttgagtctgtgttcctcatcacccttggaatcgctcttcttggtctctttggattatgggcatatggccaggttcagcagctctcgaagaaaacgaagaaggcccccaaggtggagctcggaactggaacaactgatgccaacatcgatgagtggctggagggcacttcgtttgtgcagaagagcaaattcaaga

SEQ ID NO: 86224 - DNA, 518 bp, Zea mays
  unsure (1)..(518): unsure at all n locations
gaggtgtgttgacgctgagctcctgcgatgcacgcaccggttcggaattcccgggtcgacccacgcgtccgccggcggtggcatcgcaacgccggggtacgctccggcggtcccgtacgggatgtcgcaggtgaacatcgagggcaacgggtgcgggcgggcgctgccgccgcagccgaccgtgaaggtgtactgccgcgccaaccccaactacgccatgagcgtccgcgacgggaaggtggtgctggcgccggcgaaccccaaggacgagtaccagcactggatcaaggacatgcggtggagcacgagcatcaaggacgaggaaagttacccggcgttcgcgctggtgaacaaggcgaccggggaggccatcaagcacttgctggggcagtcccacccggtgcgcctggtgccctacaacccggactttttggacgagtcggtgctgtggacggagagccgcgacgtcggcaacggtttcccgtgcgtccggatggtcaacaacatttaccttaatn

SEQ ID NO: 86225 - DNA, 520 bp, Zea mays
  unsure (1)..(520): unsure at all n locations
cggaggtcgtngtctacccatgggagctcgctcgcactgccgtaccggtccggaattcccgggtcgacccacgcgtccgctgacctcaaagagctcgtgggtcagtacaaggaggtctacctctcagccaagggagagccattcccctcagaccccaagaagcagctggagctagcagtgctggctgtgttcaactcgtgggagagccccagggccaagaagtacaggagcatcaaccagatcactggcctcaggggcaccgccgtgaacgtgcagtgcatggtgttcggcaacatggggaacacttctggcaccggcgtgctcttcaccaggaaccccaacaccggagagaagaagctgtatggcgagttcctggtgaacgctcagggtgaggatgtggttgccggaataagaaccccagaggaccttgacgccatgaagaacctcatgccacaggcctacgacgagcttgttgagaactgcaacatcctggagagccactacaaggaaatgcangatn

SEQ ID NO: 86226 - DNA, 521 bp, Zea mays
agatggctggtgtcccaactgattcatgaggcatgccgtaccggtctcggaattcccgggtcgacccacgcgtccgcggacgcgtgggttccatttcttttcttcttggaaatggttcaaacagtggttacatgtctcctgaatatgctatggaaggctcattctctgtcaagtctgacacctatagctttggtgttctactactggagattgtaagcggcttaaagattggctcaccccatctgataatggactatccaaatctcattgcttatgcatggagcttatgggaaggttgaaatgcatgggaataggtggactcgtcggttctggtgagttgtccacttcaggaagctgtacgatgcatccacttgggtcttatatgtgtccaagacagtccaaatgcgaggccgctcatgtcatccattgtgttcatgctagaaaatgaaacagccccggttcctaccccaaaaagacctgtatattttactactaggaattatgaacctaatcagtcagat

SEQ ID NO: 86227 - DNA, 507 bp, Zea mays
atgtgtattcgggtctagcccatactagcatgactgttcggaattggcggacctgtctccatctccctgctcctgcgcctgcttcttgatccagccaagtctgggatcgccatgtcggactctgaggaggagcactttgaatcgaaggccgacgccggagcgtgcaagacctatcctgaacatgctgacaccgtccgtaagaacggcttcatcgtcattaagaacctgccctgcaaggatgtggaggtttctacctctaagactggtaagcatggacttgcgacatgctactttggcgccatatacatattgaacggcaaaaagctggaagatattgaatcttcatcacacaactgagatattcctcatgtgaaccgtactgagtactagctgattgatatatcataggatggatttgtgagcctacttactgcacatggcaacactaaaggatgatcttagacttctaactgattagactcttgtggccatatcaaggaaggggtt

SEQ ID NO: 86228 - DNA, 517 bp, Zea mays
  unsure (1)..(517): unsure at all n locations
gagtgctcgggtgtgaccgcctacngtcgttgngatgacgtcccggtctcgaattcccgggtcgacccacgcgtccgggaatcagagaaacgtgggataacatttgacaagttactaactgttcctgagaacgatagctgggtctatgaagatggtcagtcagcatcttgtgtggctttcgtccttatgatgtacaaggaggctggactctttgaccctattaccagctctattgaagttactgaattcacaataaaagatgcttatatcctcaactcttttgaggacaactcgacccgacttccggagtggggcaacaaggatgacgatgtgaaactttccttttgccagatcaaggggcagtacccgatggagctgtctgtatacaacaccctgaaaccctatgcgcacatgaacgcgagatgtgcatacctgtctccagatacaccaggacttaaggctgttatagctaacccgatatgcgcgtgcgcattatatacaccctcgcttgtaccag

SEQ ID NO: 86229 - DNA, 521 bp, Zea mays
  unsure (1)..(521): unsure at all n locations
ggggcctgtgttcaccgactgagtcgntgcgatgccgcaccggtccggaattcccgggtcgacccacgcgtccggccagcacggtaaacagcaacacggttttctacgctcggatgtgccccgacgcctatacctacgccactgataatggtcccgttacatattcgtgtccgtcaggaacagattaccagatcattttctgtccccccgtcgatcttgtgtcattgtctccacctccaacttcaccattgtctccgcctccaacttcacctactgcaacaaatggaacaagcagcatcacatcctcatcaaaatccaagaggccaagaatatttggttatgttctaggtggttcaataggtggcttcactttgatcgcatccttggtctttttcttcgtcctgcatagacgacgattgcatcgacgccaagagatgcaagaagaggaagaagcagagtttgtgaggctaccaaggatgcccagacggttcacatttgagcagctacaggaagcaactgat

SEQ ID NO: 86230 - DNA, 516 bp, Zea mays
  unsure (1)..(516): unsure at all n locations
gggggtctcgtgtcngccttaggaacatgagcatgccgtaccggttcggaattcccgggtcgacccacgcgtccgcatcgatctacacacatacatagtttcttctactacacgacgacaaacatggggaagcctgcgaagatcggagagtggggtggatacgccggcgatcgtcgggatctgagggctactccggaccggctgatcgaggtgaaggtcacggcggacaacagcagctgcatccgctccatctccttcatctacatcggagccgatggcaaaccgtacgaggaggggccatggggtttcggccatgctggcacggagtacaagattgatctgtgcaggttcgacgagagcttgacggagatctccgggaccacgggcccagcctacaacattgacaatctggtcaagtctctcaaattcgtcaccaacaaacgcgcttacggaccgtacggcagggacgagggcaccccgttccgtgtcaaggtgatgaacaacggccacgtcgtt

SEQ ID NO: 86231 - DNA, 524 bp, Zea mays
  unsure (1)..(524): unsure at all n locations
cggaggctgntgtctgcncctaatgctctcncgtatgacgtaccggttcggaattcccgggcgccgcaccagcgccagcccgcgccgtggtcagaaggaggtccttcaccgtgcgcgcctctctccgcaaggccaccggcaccgccgccgtggcaatggctgccagcgccctgcttgccggcggtgccatggcccaggaggtgctgctgggcgcaggcgacggcgggctcgtcttcgagcccagccagttcaccgtcaaggccggcgacaccatcacattcaagaacaacgccggcttcccgcacaacgtcgtcttcgacgaagacgaggtgccgagcggcgtcgacgccaccaagatctcgcaggaagagtaccttaacgcgccaggcgagacctactccgtcaccctcaccgtgccgggaacctacggcttctactgcgagccgcatcaaggaaccggaatggtcggcaagatcaccgtcaactaattaaagctagctatcgatcgatatccattcatgtat

SEQ ID NO: 86232 - DNA, 529 bp, Zea mays
  unsure (1)..(529): unsure at all n locations
agataagatatataggagggtcnctcgtcggtacgtagcgtacngtagtaccggtccggaattcccgggtcgacccacgcgtccgctctggtccgtggccatggcgtcgtccatgctctccgctaccaccgtgccactccagcaggggggcggcctgtccgagttctccgggctcaggagctccgcgtcgctgcccatgcgccggaatgccacctccgacgacttcatgtccgccgtctccttcaggacccacgcggtcggcacgagcggcgggtcgcggcgggcgccgacggaggcgaagctgaaggtggccatcaacgggttcggccgcatcgggcgcaacttcctgcggtgctggcacgggcgcggcgacgcctcgcccctcgacgtcatcgccatcaacgacaccggcggtgtcaagcaggcgtcccacctgctcaagtacgactccacgctcggcatcttcgacgccgacgtcaagcccgtcggcgacaacgccatcttcgtcgacggcaaggtcatcaagggg

SEQ ID NO: 86233 - DNA, 537 bp, Zea mays
  unsure (1)..(537): unsure at all n locations
cggagtagatcagtgttattngataaggtgtatgtaagtctcagcccagtacgtcatgacggttcggatttcccgggtcgacccacgcgttcggtagaatgcatctctgttttgctaacaattgttagcgaaatagctgagaagaagctaataagccaatcagtgataaagcattgcattgatttattttttcagtacccttataataactttttgcatcatcatgttgagaacattattgtttcttgccttgaggttaaaagaaatcaattgattgaccatattcttaatgactgtggtcttgttggtaaagtccttgccgctgaaaaaagttcttctctggcagtggagtctaatgggccaacattaccatcagaagggaaagaacctncaagaattgggaatattgggcacataactcgaatagcgaataagctcattcaatttggaaatagtaacagcatgatccagagtcacttgcangagaacagtgagtgggctgtatggcaaatagatgttctgatcaaacgcaatgag

SEQ ID NO: 86234 - DNA, 534 bp, Zea mays
  unsure (1)..(534): unsure at all n locations
gagaagataggtgtnacttaggtcnatggctgaaccgtatcgcatngtcagtaccggttcggaattcccgggtcgacccacgcgtccgcccacgcgtccgccactccagcactgaacacttgattgattcagtaggtagctagctagctgaatcacaatggatcctaccaagttccgtccgtccagtagccacgacacgacggtgacgacgacgaacgctggcgctcctgtgtggaacgacaacgaggcgctgactgtggggcctcgcggtcccatcctgctggaggactaccacctgatcgagaaggtggcgcacttcgcgcgggagcgcatcccggagcgcgtggtgcacgcgcgcggggcctncgtcaagggcttcttcgagtgcacccacgacgtgacgtcgctgacgtgcgccgacttcctgcgcgcgcccggcgtgcggacgcccgtgatcgtgcgcttctcgacggtgatccacgagncggggtccccggagacgatccgcgacccgcgcgggttcgccgtgaaatt

SEQ ID NO: 86235 - DNA, 533 bp, Zea mays
  unsure (1)..(533): unsure at all n locations
ggttagatntgtttttaaaagggtcnatcgattgtacgtagccgtacngncatgactggaccggatttgccgggtcgacccaagcgtccgctggtctgtcgcacagacttagagcaagatttgcctagctggttacaagccatgatcatgtggagcggtcgagggaaaatatatctggagagggaaacaatgtctggctaggacggtcttaaggtcctcggcctgcaggtgatccctgtcgtgctctgtagtggcttggcgctgaacatgaaaggagtgagttacgagtacgtgaaggacgacatatccaacgagagtgagcttctgctcaagttcaacccggagcacaagatggtgcccgtgctcatacacaacggtaagcccatctgcgagtcactcgacatcatgcagtacgtctacgagctgttcgccggtcggccgatcctagcaactgatcactacgagcgcacaagtggtcgattacgagctgcctacgcagtacacaatttggaaccagattattccctctggtt

SEQ ID NO: 86236 - DNA, 528 bp, Zea mays
  unsure (1)..(528): unsure at all n locations
gagaagtagtttattcggagtgnctgtgcatgtactcctcagcagnacggttcggaattcccgggctgtcgtgcatgcatgcagttccttgagccacttgagctgtgctacatatcactgtgtgactgcggcgacaaggccatcgcggacgggagcctcctggacctcctgcgccaggtgttcacgttcgggctctccctggtgaagctggacatccggcaggagtcggagcggcacaccgacgtgatcgacgccatcaccacgcacctcggcatcgggtcgtaccgcgagtggcccgaggacaagaggcaggagtggctgctgtcggagctgcgaggcaagcgcccgctgctgcccccggaccttccccagaccgacgagatcgccgacgtcatcggcgcgttccacgtcctcgcggagctcccgcccgacagcttcggcccctacatcatctccatggcgacggccccctcggacgtgctcgccgtggagcttctgcagcgcgagtgccgcgtgcgccaaacgctn

SEQ ID NO: 86237 - DNA, 513 bp, Zea mays
  unsure (1)..(513): unsure at all n locations
cggagggctggtgtcngcnctacctccctgagtatcccgacctttgattcccggtcgaccagcgttcggcgccgcattcccaccagtgccccggaaaccaggattgccgtgtcaccggctgcaacaaagggatcgggctagaggtgtgccggcagctggccggcgccggcgccaccgtcgtcgtcttaacagccagggacgagacgaggggtgcagccgctgcacaagagctcagagaatctgggctctccgatgtcatcttccatcagctggacattaacgaacgctgcgagcgtcagtcggctggctgagttcctcaaggctcgttttggaaagctagatatcctggtaaataatgccgcagttggtgctgttgagtacgtccaagatcctgctgacagttcaacgagcgaggaagagctgagtggcatggatatggtccaaaggcttcagtgcatgcttaagagagtccgggagacctacgacgctgcgacagaaggcataaagccaaat

SEQ ID NO: 86238 - DNA, 530 bp, Zea mays
  unsure (1)..(530): unsure at all n locations
tgagagtatagtttnanaaaagggtccgtgcatgcacgtagcgctacgncataccggtccggatttcccgggtcgacccacgcgtccgccccatcgcccagatccaattcgcgagttctttctcctctgccgccatggcgctctctgtggagaagacctcgtctggacgggagtacaaggtcaaggatctctcgcaggcggacttcggccgcctcgagattgagctggccgaggtcgaaatgcccggcctcatggcgtgccgcgccgagttcggcccgtccaagcccttcgccggcgctaggatctcggggtctctccacatgaccatccagaccgccgtcctcatcgagaccctcaccgcgctcggcgccgaggtccgctggtgctcctgcaacatcttctccacgcaggaccacgccgccgccgccatcgcgcgcgactcggccgccgtgttcgcctggaagggggagaccctcgaggagtactggtggtgcaccgagcgctgnctcgactggggcgaggcgggcngc

SEQ ID NO: 86239 - DNA, 541 bp, Zea mays
  unsure (1)..(541): unsure at all n locations
agatgaagtagttattcataactaatgtcggtattcnngnntaacgttcactancgcagtactgtaccgattttgcggatcgacccacacgtatccataagctgacatctgatcgtcatggccgccgttaccatggctctcacctcccgcgcgctcggcggcaagccggcgaccagcaccagggacgtttacggcgaggggcgcatcaccatgcgcaagactgctggcaagcccaagccagcggcgtccggcagaccctggtacggggccgaccgcgtactgtacctgggcccggctgtctgccagacatcaagctacctgaccggcgaggacccacgagactacgggttggacaccgcagggctgtgcgccgacccggagactttcgtcaagaaccgcgagctggaagtgatccactgacgatgggccatgctgggcgcgctcggatgcgtgttcccggagctgctcgcccgcaacggcgtcaagttcggcgaggccgagtggttcaaggcctggtcccagaacttaagcgagggccggt

SEQ ID NO: 86240 - DNA, 526 bp, Zea mays
  unsure (1)..(526): unsure at all n locations
agatagataggtttttgagtgtcnttgatgaacgtagncgtacgncagtnacggttcggaattcccgggatcaaatccacggtttaataacgaaccgtgttaacttaccataacaacttctcaattcctatcgaattccttcctatcgaattcctatagtaaaattcctataggatagaacgtacacagggtgtacacattatatatgaatgaaacatattcattaacttaagcatactcctttttttatttaatgagttgatattaattaaatatctttttttttagatttttgcaaaggtttcatttacgcctaatccatatcgagtagaccctgtcgttgtgagaattcttaattcatgagttgtagggagggacttatgtcaccacaaacagaaactaaagcaagtgttggatttaaagctggtgttaaggattataaattgacttactacaccccggagtacgaaaccaaggatactgatatcttggcagcattccgagtaactcctcagctcggggttcc

SEQ ID NO: 86241 - DNA, 519 bp, Zea mays
taagcacttgaattgggtgggaatcgcgcacgttcggaattcccgggtcgacccacgcgtccggctagctgacctccaatccacgataaggtcatgataagctagctaggaaggcaagggatccgatggacaagtacgagcccgttcgcgagatcggagcgggcaacttcggggtggccaagctgatgaggaacaaggacacgagggagctggtggccatgaagttcatagagcgaggaaacaggatcgacgagaacgtgttccgcgagatcgtgaaccaccgctccctccgccaccccaacatcatccggttcaaggaggtggtgctgactcccacgcaccttgcgatcgtgatggagtacgctgcgggcggggagctgttcgagcgcatctgcgacgccgggcggtttcacgaggacgaagcgcgctacttttttcagcagctggtttgcggcgtcagcttctgccaacgtattgaacatctgccaaccgggacctcaagctggaagaacacgcttg

SEQ ID NO: 86242 - DNA, 527 bp, Zea mays
  unsure (1)..(527): unsure at all n locations
gtgagatagttttaggtggtcattgctggactgcatncctngncataccggttcggaattcccgggtcgacccacgcgtccggtgagctatatgcacctccaagtgcttatgttttcctgtttggcctaactgttcagcagacatttctcagaggtgtccttgagaaagttggaattgaaccggaaattcaacgaattggtaaatacaaaagtgccggagatcaacttgcacgcaagagcatgtcaaatgaagttagggagatgctggcagcactgcttgacaatatttatggaaactggctggaaacaatatcttctacacatgggaagaaaaaagaagaaattgagggatttattaattcaggggtgtaccaggttgccagactcaaggaagaaggttgggtaacagatttactgtatgatgatgaggtaatgacattactaaaggagagagtagggcagaaagacaagaaaagtctgcgtatggttgactacagttaatactcgcgtgttatgtaaaagacttg

SEQ ID NO: 86243 - DNA, 529 bp, Zea mays
  unsure (1)..(529): unsure at all n locations
agtgagttagttatttcgaggtccttgctggactgatagcatngncagtaccggttcggaattcccgggtcgacccacgcgtccgtctctcgctccgtccatccccgtcgccagcatttcttccacttcggtctcagcgacggtcgccaccaccgctcccctccctctccccctcctcgcccagcggcaattaccacagcctccccagcaagccgggatggctgcactcaaggcatcgttccggggtgagctcagcgccgcttccttcctcgactccagcaggggacctctcgtccagcacaaagtggattttacgtttcaaaggaagggcaaacgagctatttcactgagaaggacatgctgttctatgcaacaggctccaccaccagcatggcctgngcgagctgttgctgagcctggccggaggtcatgggatggcccaaagcctatctcgattgttggttcaactggttccataggaacacagacattggacattgttgcggagaatcctggaaaggtcagagtt

SEQ ID NO: 86244 - DNA, 535 bp, Zea mays
  unsure (1)..(535): unsure at all n locations
tgtatgatggtgtnttnncncactgtaaactgaatgcntgcacgtaccggtccggaattcccggtgtagacattgatggctcactagtcgctgcacaaaccgctggagctgaggacataatgatgctaaataacggctgcctttgctgcactgtgcgtggtgatttagtccgtatgattggtgaattggtaaacaagaagaaggggaggtttgatcatattgttattgaaaccacaggtctagcgaatccagcacccattatacaaacattctatgcagaggatgtagtttttaatgatgtcaagctggactgtgttgttactttagttgacgcaaagcatgctagacagcatttggatgaagtaaagcccaagggtatagtcaatgaagcagttcagcaaattgcctatgctgacagaattatagttaacaagattgatcttgtcaaataacctgaagtgttgtccctggttgaacgtataaggaggttcaaccacatgggtaatttgaagcgagcttagtttgggtaaagttg

SEQ ID NO: 86245 - DNA, 531 bp, Zea mays
ggtattagggtaggtggtgtacgtattactcagctgtgcgactgccgtaccgtctcggaattcccgggtcgactcacgcgttcgccgcacgtctgagacatttgatcgcccatgccctgaagaagcttacgtgaagctgacttcctactatgatgctcttgatgtggccaacaaaatcggaataatctaagtgctgcattaggcatctgtagtttcctagtacaatctgttgagtgctagatctatttgatacccgagtttagtgactatggatctcagagcattacattaccgatgagtgttgctcacttctgaatatgatatcattgaagttgccggttgaactaaaaatgttgtgttgtaggcggtggatctgtataattgttgcggacatactcttttttgagaagtgatattgtttagtttgtgacggttgattgttgtgtaatggcggtgaattgattttagttttctgatttaactgtttaatgctctagttttttttcgtgtgagacattcaatcttgtttaa

SEQ ID NO: 86246 - DNA, 538 bp, Zea mays
  unsure (1)..(538): unsure at all n locations
agagatgtgggntctcaaacttactgaggctgnangncgctagtcatgtccgtaccggtttcggaattcccgggtcgacccacgcgtacgctggtttcaggctgtacaagagcggagtttacactaacgaccattgtggaactacaccggtggatgtgaaccacgctgttctggctgatggctacggtgtcgaatatggtagaccgtactggctcatgaagaactgatggggcgcttactggcgtgatgagggttacttaaagatggaaatgggcaagaacatgtgcggtgttgctacgtgtgcattctaccctattgtcgcatgaggcccttacgaagtgttacatggtctgtttggcatgagtgatgcatgtttaacctgatgtaggcgaagggttatacagaacagaaattgtgttagtgaatagaaatatatgaatggaaggagttggagcgacccttgcttgtacgtatgcacgaatgggtaaggggattgtcaagagtggttccgaaatactattctaatacgggtgtatag

SEQ ID NO: 86247 - DNA, 536 bp, Zea mays
agggggtgggagggaggtctcgtgatagatgacttcagcgtagcactgccgtccggtctcggattcccgggtcgacccacgcgtccgggtttcgctgccccgattcgccacgaagccgcactgtgagagagggacgcggcccgttgtcctcggcttgtacgcaatccttccgtcgctgcgaagctgatccctcgtgttcgccatggcccccagcgtcgccgtggaaaacctcaaccccaaggtcttgaaatgtgagtatgcagtccgaggcgagattgtcatccatgctcagcgcttgcagcgacaacgtcgaacacaaccagggtctcttacttttgatgagatcctgttctggcacattgggaatgctcaatcccttaggtcatcaacctgtgacgttcttcaaggaaggttcttgctactttgggaacattcatgccttttggaaaaagaggaaaccaaatcgtttgtcaatgctggagctatttgtcgagcagagcagattcttgcgactattgctggacgggcaacaagtg

SEQ ID NO: 86248 - DNA, 541 bp, Zea mays
  unsure (1)..(541): unsure at all n locations
aggaggaggctgatgtgtgcctacagtagtnactgacntcgttcgtactggctgtacgcgtttcggaattcccgggtcgacccacgcgtccggaaggatatgcccttcctcatgccattcttcgtttggatcttgctggtcgggacctcacagactccctcatgaaaattctcactgagaggggttactccttcacaacctcagccgagcgagaaattgtaagggacatcaaggagaagctagcatatatagcccttgactatgagcaagagttggaaactgccaagaacagctcttcagttgaaaagagctatgagctacctgatggacaagtaatcaccattggtgcagagagattcaggtgccctgaggtcctctttcagccgtcgatgattggtatggaggctgctggaatccatgagacaacattacaattcaatcatgaagtgtgacgtggatttcatgaaggacctctatggtaacaatgggcttcatggttgttctactaatgttcccgggtatcgtttatcctatgaacaag

SEQ ID NO: 86249 - DNA, 545 bp, Zea mays
  unsure (1)..(545): unsure at all n locations
gggggtagtagctcgggtcgtagtactgaggacttacgntcgtacgtacggcgttggaattcccgggtcgacccacgcgtccgggctgcgaaggccaagctcagcggcggggttcgggagcccgtggtacggccccgaccgcgtgctgtacctgtgcccactgtgcggcgagccaccgagctacctgacgggcgagttcccgggcgactacggctgggacaccgtgaggctgtcgggggacccggagacgttcgccaagaaccgggagctggaggtgatccactcgtcgtgggccatgctgggcgcgctcgggtgtatattgcccgatcgtttcacccgcaacggcgtcaagttcggtgtagatcgagagggtcatgggcggtgtgaatgattttctggagggcaagagagtagtacgttctgggcttcatgcctcattcaggcgcataatagtggtgcgtatctgggaactcgctggtgttggtcatagtcggtgcttgatggctaagattttggtttgagggcattataggccgatggaaatt

SEQ ID NO: 86250 - DNA, 527 bp, Zea mays
  unsure (1)..(527): unsure at all n locations
ggagtagggtggtcaatgatagaggcttangcgtagcactgcccgtaccggttcggattcccgggtcgacccacgcgtccggccatcgacacgatcgcgagcgcaagctcgttcgttgtcggaagctcaagttagaagaagcaccagtgcctgatcgatggcggcccaggctctcctctccggccggcagctgctgggccgccccgtgcagtcggacgtctctaggtcgtcggcgaggaaggcgcccttcgtcgtcagggccagctgcagcccttcagccaagcaaggtgccgacaggcagctgtggttcgcgtccaagcagtacctctcctacctcgatggcacgctggccgacgactatggcttcgacccgctgggcctctcggacccggagggcaccgggggcttcatcgagcccaagtggctggcctatggcgaggtgatcaacggtcgctacgccatgctgggcgcggttggcgccattggccctgaaatttatgggaaaagggcatgattgcccccgggat

SEQ ID NO: 86251 - DNA, 539 bp, Zea mays
  unsure (1)..(539): unsure at all n locations
aggagtaggctgtatctcgtcgactgaatgtcagtngactancgtcactgnctgtaccggttcggaattcccgggggctcattcatcgaaacgcaaatcagagagacaggataagaaaaaagaattttgatcaaatcaatagaaggaaggatcccttacctgatttgaatttcatcctcctttaaataggatatgctctaagtcttcccatactttcctataatgactgcaacgattttctccattttgcgaattcctattttatttgaagtatattactatcatatacattatctaaatcgatccactttaaataaaatagaaaaaatcgaaagaaaaaaaaaaaagaaagagtaaataataaaacaagatattctgtttcataattctgaaatagagttcttntttttagtattactcctcattaggatgtattatattaatcatcctattttaatatatattaatcatcctattttaataggttctaatccaattagtaataagtaatttctttgttatttaatagtctctgactg

SEQ ID NO: 86252 - DNA, 532 bp, Zea mays
  unsure (1)..(532): unsure at all n locations
aggaggagctgtatctgtctcttgatgactacnttcgntgtactgnctgtaccggtctcggaattccgggtcgacccacgcgtccgaaatcccgtccccttcacccgcactccattggcgccgttcccctcccctcgccgccggcggagatctgatccgatccgatccgatccgtttgtgcttgtgctgcagcaggagtgagaagtaaaaaaatatggctgccctgccactggccaccgccgaagtatgcgacgctaaccctcacctgatcatgaacggcgagctccgcgcgctccagccaatcttccagatctacggacggcgccaggtcttcgccggccccatcgtcacgctcaaggtctacgaggacaacgtcctggtccgcgagttcctcgaggagaaaggccacggtagggtcctcgtggtcgactgcggctgcagcatgcgctgggccatccttgggggcaacctcgttcaagaagggcagaacaacgggtgggcttggaatcctggtcaagggttgattaagtac

SEQ ID NO: 86253 - DNA, 531 bp, Zea mays
cgttgtaggtagtatgtgtctccgtattctcagtcgtacgcactgcagtaccgtccggattcccgggtcgacccacgcgtccgttctaataatagcaagccttattcctattttggtattttggatttcaggacttttagccccggttagtgaaggaccagagaagctttctagttatgaatcgggtatagaacccatggggggggcttggttacaattccgaatacgctattacatgtttgcgctagtttttgttgtttttgatgtggaaacagtctttctttacccttgggcaatgagtttttgacgtattgtggtgttttcgttttaattgatacttttatttttgtgcttatcctatttgtatttttagtttatgcttgtctttttgtattttttgtattggttttatttgtatttttgtttattatttatatttagtattggttgtttttcttttttacttttatttattttgatagttttttttattttattatttttattttttttttttattttttttttttt

SEQ ID NO: 86254 - DNA, 537 bp, Zea mays
agaggggctggacttgtagatagatgctgcagcgtagcactgacgtaccggttcggaatcccgggtcgacccacgcgtccgctctcctcttgcgattcgctcgctcgatcctagcttcccttccaagaagcgcagcgcccatggccatgtacacgcaagccttcgccgccacgcgccacctgctggccgccgtctgggcgccggcggcgaagccgaggcagctgagctcgcagctcgcgctgacggcgtcgtactcccgcgggccggccccgctccgcgcgtccaccgaggaggcggtggaggcgcccaaggggttcgtgggcacgcagctggaccccagcacgccgtaccggatcttcggcgggagcacgggcaggctgttgcgcaaggctgcagtggaggaagggtacgttatgacggtggacgttccccaaagagcaatgttgtcgagatgcccaccaggcggagccaacatcatgcgggaaagcacccagagtttgtgaatactggcgcgcaaggatgcatgtgcctggcgca

SEQ ID NO: 86255 - DNA, 538 bp, Zea mays
  unsure (1)..(538): unsure at all n locations
gttgatgataggagggctcatgttctgacgacttaggtcgtacgcatgtcgtaccggtttggaattcccgggtcgacccacgcgttcgcgtcatttaccagtatcgaagagttccttgagccacttgagctgtgctacaaatcactgtgtgactgcggcgacaaggccatcgcggacgggagcctcctggaccttctgcgccaggtgttcacgttcggtctctccctggtgaagctggacatactgcatgagtctgagcggtacaccgacgtgatcgacgccatcatcacgcacctcggcatggggtcgtaccgcgagtggcccgagggcgagatgcaggagtggctgctgtcggagcatctatgcaagcgcccgctgctgtccacgaaccttcctaataccgacgagatgcgttgacgtatcagtgcggtccacgtactcgcggagctcccgtgcgacagcttaggtctttactgatcttcatgggtacggacctttggtcgtactcgtcttgatcttctgcaactcgagtgcggan

SEQ ID NO: 86256 - DNA, 537 bp, Zea mays
agttttaggggcggtctcgtgtcctgctagctcaagcgctgcgaactgctttcgaattcccgggtcgacccacgcgtccgcgttcctggggacccatatcaatatatctgttatgtagcttatccattagacctatttgaagagggttctattactaacatatttactttcattgtgggtaacgtatttagttgcaaagccttacacgctctacttttggaggatctacgaattccccctggtgattcaaaaacttttcaaggtccttcttacggtatccaattttatagggataagttgtacaagttctgtctgtctttattgatatgtgctattaaaccaaaattgggatttttcgtgttatatttctagttagctttttatagatgtgttcttggtggaaatgagttattccaaatataattaaatccttatcttatttacattgtttcgcttgttaatctcagtttagttttagttctttagtttttttaaatgatgtgccgttatcttgtgtaattcaagtgcctttatttg

SEQ ID NO: 86257 - DNA, 528 bp, Zea mays
  unsure (1)..(528): unsure at all n locations
aggcggaggagtatctgtctactgangcttactcgtncgcactgccgtaccggttcggaattcccgggtcgacccacgcgtccgcgctgaatgggtcgactggtgaggtgatccttggaaagcagccgctttccccaccagcccttagtggcgatctgggaactttcatggcctgggtggatgatgttagaaagctcaaggtcctggctaacgccgatacccctgatgatgcattgactgcgcgaaacaatggggcacaaggaattggattatgccggacagagcacatgttctttgcttcagacgagaggattaaggctgtcaggcagatgattatggctcccacgcttgagctgaggcagcaggcgctcgaccgtctcttgccgtatcagaggtctgacttcgaaggcattttccgtgctatggatggactcccggtgaccatccgactcctggacccatccctccacgagttccttcccaaaaggaacatcgaggacattgtaaagtgaatatgtgcttagacgg

SEQ ID NO: 86258 - DNA, 529 bp, Zea mays
gtagagggtagtatgtgacctccgtaggactccagtcgtaggcactgccgtaccggttcggaattcccgggtcgacccacgcgtccgatgagagtgagcctggaacttgcaaagatagagaaatcatgcgccatgacccccacaagcttctggaaggatgccttattgctggagttggaatgagggcatcagctgcttacatctacattagaggtgaatacgtgaatgagcgtctcaaccttgagaaagctcggcaggaagcgtatgcagctggacttctgggtaagaatgcttgtggctctggttatgattttgatgtgcatattcattttggtgctggtgcgtacatctgtggtgaagagaccgccctactagagagccttgaagggaagcagggcaaacctaggctgaagccacctttcccagccaatgctgggctctactgctgcctcacaactgtgactaatgtataaactgtggctgtatccccaacaattcttaagcgcggtccagaatggtttgcaagccg

SEQ ID NO: 86259 - DNA, 531 bp, Zea mays
  unsure (1)..(531): unsure at all n locations
aggggtagggagtatctgtcgactgatgacttgagnctcagtactgccgtaccggttcggaattcccgggcatcgaaacgcaaatcagagagacaggaaaagaaaaaagaattttgatcaaatcaatagaaggaaggatcccttacctgatttgaatttcatcctcctttaaataggatatgctctaagtcttcccatactttcctataatgactgcaacgattttctccattttgcgaattcctattttatttgaagtatattactatcatatacattatctaaatcgatccactttaaataaaatagaaaaaatcgaaagaaaaaaaaaaagaaagagtaaataataaaacaggatattctgtttcataattctgaaatagagttcttttttttagtattactcctcattaggatgtatatattaatcatcctattttaatatatattaatcatcctattttaattaggttctaatccaattagtagtaagtattttcttttttatttaataagctctgactatcatta

SEQ ID NO: 86260 - DNA, 533 bp, Zea mays
  unsure (1)..(533): unsure at all n locations
agaggtggtggggtttcagtctactgagttcgtagtcngtacgtaccgcttcggaattcccgggtcgacccacgcgtccgggcagcttgaggcacttgctcgggtcatgcaccagaatgtgttgtcgttgaaggcatacgttcgcgaggcggaccgcctctcgctcgagtacgacttcgtccatgggggcagcctcgttgatctgatgaagagggtgaggtgctagcaagtcagcctcggttgggatgcgaggagcaggattgctgttgggattgccaagggactgaggcacttgcattttgagtgcgatccgatgatagtccactgcaacctcaagccgtccaatgtgatgctagacgaaagtttggagccattattggcggattgtggtgttgcaaggcttgttgctgctagttcaggtgatccagaattgtgcactggcctttacgctggttcagaatgctttcttggcagcatggtcccgtggtagagtgaggtgtacgcccttggcatgatcctggggctgctgctag

SEQ ID NO: 86261 - DNA, 539 bp, Zea mays
agtaggggggtggacttgtattactgatgctggaggtcgtagtcatgtcgtaccggtttcggaattcccgggtcgacccacgcgtgcggaagaactcttggggcagcagctggggcgagtccggctacgtcaggatggagcgcaacatcaaggtatccagcggcaagtgtggtatcgacgttgagccgtcgttccctctgaagaagggcgccaaccccccgaaccctgggccgaccctgtctatctatagccgggcgactaccgtgtgtgacaactactactagtgccctgacagcaccatctgatgctagatctacgagtacggcaaggactgcttctgctggagcttgtggccggtggagggcgtcatctggtgctgatatcacgtacagctggtggctccatgactactgtggtgtgcatacgtctgcagggaacctgcctcatggtcaaggacagcccactggcactgatagcggatggctgctaagcgcactctggccaagccgtactgggctttctcttgcaacacagttgag

SEQ ID NO: 86262 - DNA, 524 bp, Zea mays
agggaaggaggattgtggctgacaattagactaactatgccgtaccggtctcggaattcccgggtcgacccacgcgtccgggacatcatcatcaactcactctacagcaacaaggatatcttcctgagggagctcatatctaatgcctctgatgctggataagattaggttcctttcccttactgataaggaagttctgggtgaaggggacactgcaaagcttgagattcagattaagttggacaaagagaagaaaatcctctccattcgggataggggtattggtatgaccaaggaagatcttattaagaaccttggaacgattgctaaatctggcacttcaggaacaggagctgctcgagtctcttgtcgaagctgatacgagaaggcaggaaagagctaaaaagatggaagaaaagaaagtgtatctgcaactatacgaagcaatggaagcgttggtcaagatcaatctggagaccaacaagatcatggacttcatcaagtttgacgtctgcaacctggtg

SEQ ID NO: 86263 - DNA, 537 bp, Zea mays
  unsure (1)..(537): unsure at all n locations
tgggaggctcgtgtctgccttcaatgatactggcnacggtctgtacgacgtaccggttcggaattgccgggatcgacccacgcgtccggtcaaggtcatctcctggtactacaactagtggggctactcgcagagggtcgtcgacctcgctgacatctgcgccaaccagtggaagtgaagcgttgcattgtaatagcactttgtaactcctcacccttcacagggctttgggattcaccccgaaatgactcactttcggtgaaattcacccgttatcggcgagggcgttttatttttcttgtcaaatgatttcattggatactttttataagttatctatagttgttattttaatcattctagttttgtattcaataatcttttatttatagttataatctttttttttatttatattattctatattaatttgtttttttttaattattttcttttatatttattcatttggttttttttatttttttattataagtgtatttttatttgtttcattttttttttttttatatttg

SEQ ID NO: 86264 - DNA, 523 bp, Zea mays
  unsure (1)..(523): unsure at all n locations
tgggtgtgggtgggtccatgtctgangctccagcgtagtatgtcgttcgcggtttcggttcccgggtcgaccagcgttcggtcctgcgtctgccttgccagtatccatcgtctcgctcgggccgtccctcccgcgtccccgttcgaaggtgcggtggccggcaggcgatcgatttgattcgacatgaattccgagtaccactaccttttcaaactgctgcttattggtgattctgatgttgggaaatcatgcttgcttagcagatttgcagacgatgcttatttggacagctatttcagcgcacttggggttgattgcgtaaatcgcacagtggagctagatgggggggccgtttgactttaaatttgggatactgttgggcaagagcgctttaagacaatacttgcaggtacttgcggggagcttaatggattatgattggatatgacgtggcagaccgggatgggtttattattgtaagcaatggtggaacaatatagatcgttatgccagtgataatgtg

SEQ ID NO: 86265 - DNA, 526 bp, Zea mays
ggttgaggctgtattcgccgactgaggtaccgaccccttcgtatgacgtaccggttcggaattccgggtcgactcacgcgtccgaaaaaaactgcagcttgctttcacttctctagtgtacccttcactgatcctgggttacatgggccaagctgcttatctgtcccagcaccataaccttgacgcaagctaccagatcgggttctacattgcagttcctgagtgtgtacggtggcctgtgctggtgctggccatcttggcgtccgtggtgggcagccaggccatcatcagcgggaccttctccatcatcaaccagagccagtctctgagctgcttccctagggtgaaagtcgtgcacacgtctgacaaagttcatggccagatatacatccctgaggtcaactggatcctcatgatcctctgcgttgcttgcactggtggtttccgtaacaccaagcacatggggaacgcgtctggcttggccgtgatcacggtgatgctggtgaccacgtgccttatgccctgg

SEQ ID NO: 86266 - DNA, 535 bp, Zea mays
  unsure (1)..(535): unsure at all n locations
cgggagagcggtgtcgacgactgagactgagtcactncgtaccgcttcggaattcccgggtcgacccacgcgtccgagccaccatcgaccttcaagtctcgctacgtagcagtgcaataaaaaaagcagccgcaatggcgagcagcaccatggccctctcctccacggccttcgccggcaaggccgtgaacgtgccgtcgtcgtccgccttcggcgaggcccgcgtgacgatgcgcaagacggcggcgaaggccaagccagcgggtgcgtccgggagcccagggtacggccccgaccgcgtgctgtacctgggcccactgtgcggcgagccaccgagctacctgacgggcgagttcccgggcgactactgctgggacaccgcagggctgtcggctgacccgtggacgtgcggcaagaaccgggagctggaggtgatccactcccgctgggccatgctgggcgcgctcagctgcgtagttccctgactggttgaccgcaacggcgttaaatttcggcgaagtcgtgtgggtcaaan

SEQ ID NO: 86267 - DNA, 528 bp, Zea mays
gtagaggccggatctgtctctgatgactgcagctatgtactgacgtaccggtctcggaattcccgggtcgactcacgcgtccgggcgaccttgcgtacgtacgtcgtagctgatcgtccagctcgctcgccaccgccatggacccgtacaagcatcgcccgtcgagcgccttcaacgccccgtactggaccaccaactccggcgcccccgtgtggaacaacgacagctccctcaccgtcggcgcacgaggtcccatcctgctggaggactaccacctggtggagaagctagccaacttcgaccgcgagcgcatcccggagcgcgtggtgcacgcgcgtggcgccagcgccaagggcttcttcgaggtgacccacgacatcacccacctgacgtgcgccgacttcctgcgcgcgcccggggtgcagacgcccgtcatcgtccgcttctccacggtgatccacgagcgcgggagccccgagacgctgcgcgacccgcgcggggttcgcccgtcaagttctacaaccgggg

SEQ ID NO: 86268 - DNA, 547 bp, Zea mays
gggaagatagacgtggtattcagtctactggactacagtagtcagtacgtaccggcttcgaattcccgggtcgacccacgcgtccggtgggattaggtattggtgccacaccttttattagcatactgaaagacctgctcaataacatcatcaaaatgggggaagaggaagaagcttcaagcatacgaaacaaccaataaagcgttaccaaaacttttgattgacggaccatatggttcttctgcacaagactacagcgagtatgacgttttactacttgtgggattaggtattggtgccacaccttttattagcatactgaaagacctgctcaataacatcatcaaaatggaggaagaggaagaagctttatgcgatctttacccaccaattggtcgcagcaaggcacatgttaatcatgacacccttatgaggattacctctaaaaccaagagggtactgaagacgacaaaggcttacttttattaggtgacatgttgacaaaagagctattgattgagtttaaagggtcatgaatgaaatccag

SEQ ID NO: 86269 - DNA, 538 bp, Zea mays
  unsure (1)..(538): unsure at all n locations
tggattggggagggtaggtctcgtgatagaaaaactgaagtcgtagcgcactgccgtaccggtccggaattcccgggtcgacccacgcgtccgagccataccaacaagtcctatattattgttcgctaatactggaggaccaaacatggccatgggatgaggaattttctgcactttctcaccttgaagctagtgatctgggaatttttttgccccatttgctatcaaaaaccttcatcgagtgttattttgcaggtaatattgaacccaatgaatcaaacaatatcgttcaacatgttgaagatgtcttattcaatgcaccaattagtgcttgcaagccactatccccatcgcagcatcttgccaagaggattgtaaagcttgagaagggtttgagatactattatccagcaatgtgctcaaatcaccaagatgaaaattctgctcttctgcactatattcagactcatcaagataatgttaatcaaaatgatctacttcaactacttgctcttggtggcaagcatccagctttttn

SEQ ID NO: 86270 - DNA, 528 bp, Zea mays
aggtaggtagcgcgtgtcagactgcgcaggcctgaggcactgcacgtaccggttcggaattcccgggtcgacccacgcgtccgctgcagtccatttgctactactccgcgcccaaaaccaagcccaagctcaatagcctcgacgaggtcgacccggagctgctcaagaccttcgaccgcctcggcatcccgctcaccgagcagaagcgcctctccaacgtcgccgttgacgccgtcatcgactccacctccatcgccaccacccaccgcgaagcgctcatggccaagggcgtcatcttctgctccatctccgaggccatccgcgagtacccggaccttatcaggcgttacctgggcagcgtcgtaccgccaggcgacaactactatgccgctctcaactcagcggtgttcagcgacgggtccttctgcttcgtgcccaaagacacagtctgccccatggaaatctcgacctacttcaggatcaacgacaaggagaccgggcaggttgagaggactctgaatgtgggcg

SEQ ID NO: 86271 - DNA, 528 bp, Zea mays
agagagctgtgtcgaccgctgacactgaggcgtgcgaacggcttcggattcccggtcgacccacgcgtccgggtacatggacaactgtttggactgatggacttaccagtcttgatcgttacaaaggacgatgctatcacatcgagcccgttcctggggacccagatcaatatatctgttatgtagcttatccattagacctatttgaaaaaggtttctggtactaacatgtttaacttcattgtgggttaacgtatttggtttcaaagcctttacgcgctctaacttttgaaggatctaccaatttcctcctggcttattcaaaaacctttccaaggcccgcctaacgtattcaaattcgaaaggcataagttgaacaaggacggggtcgaccttaatgggatgtactaataaacccaaaattgggaatattccgaaaaaatttacgggagaacgtggtatgaatgtctacccggttgacttgaatttacccaaagatgattaaaaacctaaatttacaaacctttt

SEQ ID NO: 86272 - DNA, 523 bp, Zea mays
gggtgaagagtgctcgtgtttgaaccgacatcctctgtcactgccgtaccggttcggaattcccgggtcgacccacgcgtccgctcagctccgccgcttgcccgcttttgctctctccctcccggctctcggcttcttctagacgctaccgtctcacagccgtaaacgcccctcccggatcccgctagttcgccaccgccgcccgcccgcccgccgttcgcctcatcatggccgcctcgtcgaccgccacctccgtccacgacttcatcgtcaaggatgcgagcggcaaagacgttgacctcagcacctacaaggggaaggttcttctcattgttaacgtcgcatcccagtgtggcttaactaactccaactacactgagctggcccagctctacgagaagtacaaggaccaaggctttgaaatcctggctttcccatgcaaccagttcggtgggcaggagcctggtaccaatgaggagattggccagtttggctgcacaactttaaggttgagacccccatc

SEQ ID NO: 86273 - DNA, 511 bp, Zea mays
  unsure (1)..(511): unsure at all n locations
aggagtgtctcgtattccgaggctggaggactangtcactgcgtactgcttcggaattcccggctcgacccacgcgtccggtaggcgcgcagatgatgggcgccgaggtatttctccttctacgcggagaagtttgcaggggcgttcttcatgatcggagtccgcaacaagagcatggaggaggcaatgcatcctctccactccccgtacttcgtgatagatgaggacgttctgcctgtaggagctgccttccactctgcagtagcgatggagtacctgaacaaatactcaacgacccggcaaactgagctgctgcgcattgagctgtgatagattattgcttgtaataagggttaccatgccgaggtcatgttgcacaaaagaaagtctgcattgtgcccatggaataaatacagtttctccaaaaaaaaaaacataaaaaaaagaatatataatataaaaaaaagggcggccgctctagaggatccaagcttacgtacgcgtgcatgca

SEQ ID NO: 86274 - DNA, 530 bp, Zea mays
  unsure (1)..(530): unsure at all n locations
agataggtagcgggnnttcntcgcccgtagcctggangcctcngcgactgccagtaccggttcggaattcccgggtcgacccacgcgtccgggccaagaataacagaccaagagctgcaacaaatatctggagattcaaattccacaatcgttccattgttcgagaaggtcctgagtgcgagtgatgcatgccgcatagggcgccttgttcttccaaaagcttgtgccgaggcatattttcccccaatttctcaaccagaaggacgccccttgacaattcaagatgcaagaggaaaagaatggcattttcagtttaggttttggccaaataataacagcagaatgtatgtcttggagggtgttacaccatgcatacaatcattgcaattacaagctggcgatacagtgacctttagtcgtatagatcctggagggaaacttgttatgggctttcggaaggccacaaatactgtcaatctggcagacttacaaatatcagcttttgcaaatgggtcctttttaatgagacc

SEQ ID NO: 86275 - DNA, 557 bp, Zea mays
  unsure (1)..(557): unsure at all n locations
agaatgagaggagggactcgtggatagatttacgaaagactanagnactgtcngtaccggtttcggaattcccgggctcgacccacgcgtctcgatgcacctcgcgccgaattgggaaaagctttctagaagtcaaacgccgatagcttggctttccgatgggtgccaggctatggtattgatcgtaccctgaattgacangagatgcaagncccggtgccattctttgaagctgctatagcaatngaccaaccagggntgttcaagctgttcccangagataatggcttcctcttgttggaacaccacaggaactggggcatcaagtgactcttatccgccaagttgctgagaaagtgttcgccaatgtgggcaagactatcgggtacaaagttggaacaatgattgagatccccagggcagctctggtggctgatgagatagcggagcaggctgaattcttctccttcggaacgaacgacctgacgcagatgacctttgggtacaacagggattatgtggggaaattcaatccccgctatcttgctcagggaatc

SEQ ID NO: 86276 - DNA, 501 bp, Zea mays
  unsure (1)..(501): unsure at all n locations
agtagagctgtagtcgaattcgacggccgtagcatgcgtacgctttcggattcccgggtcgacccacgcgttcgcagctgccccgcagcaacgaacacgaaccttggcagaacgaagctgaagtagttcggtgtgaacccagtatggcaaacgcgccgaggatcctggccctcggcctgctgctagcgctcctgtgcgctgccgccggcccggccgccgcgcagaactgcggctgccagcctaacttctgctgcagcaagttcggctactgcggcacgaccgacgactactgcggcgacgggtgccagtcgggcccgtgccgctcgggcggcggcggcggcggcggcggaggcggaggcagtggcggtgcgaacgtggctaacgtggtcagcgacgcgttcttcaacggcatcaagaaccaggccgggagcgggtgcgagggcaagaacttctacacccggagcgcgttcctgagcgccgtcaacgcgtacccgggcttcn

SEQ ID NO: 86277 - DNA, 535 bp, Zea mays
  unsure (1)..(535): unsure at all n locations
gaggagggtagccggactcgtaggacgttcgatcgtagnctatgcgaactgcgtcggaattcccgggccctcttgccggtcccgaataaagagcagcagcgcaagaggtctgtagagcgagaagaaggcaatggcggccgagagctgccttttcacctcggagtccgtgaacgaggggcaccccgacaagctgtgcgaccaggtgtcggacgccgtgcttggacgcatgcctcgcgcaggaccccgacagcaaggtggcctgcgagacctgcaccaagaccaacatggtgatggtgttctgggagaacacgaccaaaggcaaccggggactacgagaagatcgtccgcgaaacctgccgcaagattcggttaacctccaacaactggggcctttaaatccaaccgttgcaagggctctggtaaacaatgggcaaaagtccccccgaatatcgccaggggggtgcacgggcactttaagaaacgggcccgagggaaaacgggtccgggcaaaccaggggccaaatttttcgggtcg

SEQ ID NO: 86278 - DNA, 526 bp, Zea mays
  unsure (1)..(526): unsure at all n locations
agggaggttagctcntattcnnatagccgacnnccanagctatgcccaacccggttcggattcccgggtcgaaccacgccttccgcaagaacttgggagggcttcttaaacttttctaaactcaccttgggcccgctttcagcgctgcccagttcaaaggcttctatctcaagatgaagggtgctactacaaataccttgcttgagtcaagactggagctgagagaaaggacgctgttgaaaacaccatggtggcatacaaggctgcccaggacattgctttggctgagcttgctccaactcaccctattaggcttggactggcactcaacttctcaatgttctactatgagattctcaacttacccgatcgcgcctgcaatcttgcaaagcatgcttttgacgaggccatcttggaactggacaccctgagcgaggagtcctacaaggacagcactttgatcatgcagctcctttctgttaccttgacctatggacttttgaatatttggaggaccttcggaaag

SEQ ID NO: 86279 - DNA, 530 bp, Zea mays
  unsure (1)..(530): unsure at all n locations
gggagagagagggcgtcgtgattgagtcatcggactanagcactgccgtaccggttctcggaatcccgggtcgacccacgcgtccgggaagaagggcctcctgtatcctctcacttccctcagtcctcgtccgtctgctccctgctctctctacctagctctagctagccttcctgtagcgcggcagagatggctgcccctgcctccaccacggcggcggcggcggcagcgctgctgctgctgctcctcctgtcgctcgccgcggcggcggacatgtcgatcgtgtcctacggggagcgcagcgacgaggaggcgcggcggatgtacgcggagtggatggcggcgcacggccggacctacaacgccgtcggcgaggaggagcggcggtaccaggtgttccgggacaacctccgctacatcgacgcgcacaacgccgncgtcgacgcgggcgtncactccttccgnctnggccctaaccgcttcgccgaccttaccaacgaccagtacccgggccaactaacttgggggcc

SEQ ID NO: 86280 - DNA, 517 bp, Zea mays
  unsure (1)..(517): unsure at all n locations
agaggaattcgtggactgtttacttgtgactanagtactgctgtaccggttcggaattcccgggtcgacccacgcgtccgaggagacgtacgctctctgctagcacccatcttgcagcaggcggagccgcccgacccgatccgtgcgtgtgtgttggtagagatggctacagcagcttacgctcccatggcgagccaggtgatgaagagcagcccggtgcactcgaggccgaggggcctgtcaggcgctgcgctcacgcggccccggccccggttcagcgtcgtcaaggccgccatccagcccgagaaggcaacgtaccaggtggtgcagcccatcaacggcgacccgttcatcggcagcctggagacgcccgtcacctccagcccggtcatcgcgtggaccctttccaacctgccggcctaccgcacccgcctgagcccctttttgcggggctttaggggttggtcttgcccagggttactttctttggggccttttgctctaaagggcccttttc

SEQ ID NO: 86281 - DNA, 520 bp, Zea mays
  unsure (1)..(520): unsure at all n locations
ggtagatagagtgcgtgtcgattgattcagctactgngtcatgctgtaccggttcggattcccgggtcgacccacgcgtccgctggtttcaggctgttcaagagcggagtttacactagcgaccattgtggaactacaccgatggatgtgaaccacgctgttctggctgttggctacggtgtcgaagatggtgtaccctactggctcatcaagaactcatggagcgctgactgaggcgatgagggttacttcaagatggaaatgggcaagaacatgtgcggtgttgttacgtgtgcatcctaccttatggtcgaatgaggccttaacaaagggtaacatgggtggtttggaataaatatggcaggttaaacctgacttgggcaatgggttttccaaaagggaaatttggttgtggattggaaaatattaaagggaaggattttaccggacccttgttggactgtttcccacatggggtagtaaaatgtcaaataggggttcctaaaagtttaacattaag

SEQ ID NO: 86282 - DNA, 501 bp, Zea mays
gtaaggagcactgtgttactgagcagtatcatgtgcatgtcgtttcggttcggattccgggtcgacccacgcgtccgcggcgcgtgggttctagtccttttcattgcaccgtgcgaagaaggacccggcgaacgcgcagaggctcaagatcgaggccggcgtggcaacggcggcggcgctgggcgccggcggctacgcgtaccacgagcaccgcgagcagaaggaggcccactacgagagcaggcagcaggagcacagggtgccgcacgggcacgggcacggctactcctactactgcgactgaaacgactgatcatcccatcgatcgagatatgcatgcagaactcgatatatatacggtccctagcgccgtacacgtgcgtgcgtggtagtaaataagagcaaacgttgtcacgtgttgtgttgctcgatcactacttcatcgatctacttattatcgtatgcaaataactactaaatgcatgctttttgcacgtgtag

SEQ ID NO: 86283 - DNA, 519 bp, Zea mays
  unsure (1)..(519): unsure at all n locations
gagtgctcgtgtagagtcagctgactnagcactgcctgtaccggtcggaattcccgggtcgacccacgcgtccgcccacgcgtccgacaagaagctgacatatgcacaacgttctggtctcaatcaaatccccaatcgaagatttaccctgtggtggtcaccaaccatcaatcgtgcaaacgtgtatgttggtttccaggtccagctagatcttacggggatattcatgcatgggaaaatcccgacgttgaagatttctctgatccagatcttccgtgcacatctgtggcaaaagatccatgaaagtgttgttatggatctttgccaagttttggaccaggagttggatgcacttgagattgagactgtgcagaaggagacaatacatcccaggaagagttacaagatgaacagctcctgtgctgatatccttctctttgctgcacacagatggacgatgtccaaaccaagcttagtttctgagtcccaagatggcttttgatcagatagcaaggtact

SEQ ID NO: 86284 - DNA, 528 bp, Zea mays
  unsure (1)..(528): unsure at all n locations
agttagaaggtgtttcgatgctggtagctgaacgcntggcgaacccgttcggaattcccgggtcgacccacgcgtccgtcgacatgaccgtcggcggcgccccggtgggccggatcgtgatggagctgtacgccaacgaggtgcccaagaccgcggagaactttcgcgcgctgtgcacgggcgagaagggcgtgggcaagtccgggaagccgctccactacaagggctccaccttccaccgcgtcatccccgagttcatgtgccaaggcggcgacttcacccgcggcaacggcaccggcggcgagtccatctacggcgagaagtttcccgacgaggagtttgtgcgcaagcacaccggccccggtgtgctcttcatgggccacggcgggcccaacacccacgggttccaagtctttattttgaaccggngcgacccctttgctttgctgggaggaactttgttttttggccagtcctttaggggaatggacatttttcaaggcctttttaaaaggtggggccccccca

SEQ ID NO: 86285 - DNA, 524 bp, Zea mays
  unsure (1)..(524): unsure at all n locations
aggtagtgagcggggtcgtgtgcggcaacccangctatgcgaactcgttcggaattcccgggtcgacccacgcgtccgctttccccaccccgcatcgttggacactctcctaagtccaaaccctctccccgccgcatcggcgccgccggaagcgcctccctcgatccagatccaggagatatgcctcgcaatgatgatcgctatgggaatacacgcttgtatgttggaagattgtctccccgcacccgttctcgtgacctagaataccttttcagcaaatatgggagaattcgagaagtggagttgaagcgtgactatgcattcattgaattcagtgacccccgtgatgctgatgatgcacagtacaacctaaatggcagggacgtcgatggaagccggattattggtgaaattgctaaagggggttctcgtggttctggggggtcaccgggatacaacgggagaggaccttcatcaggaacaggcccggtgtttaaccggggagttgatgggcacttgggaag

SEQ ID NO: 86286 - DNA, 534 bp, Zea mays
  unsure (1)..(534): unsure at all n locations
ggtgagtggagagtgactcgtcgctccgatttacgttngactangcgactgtcggtaccggtccggaattcccgggtcgacccacgcgtccgacaagtttgggttcattgttatggatggtaatggtactctttttggcacactaagtggcaatacccgtgaagtgcttcacaaattcactgttgacctcccaaagaagcatggtagaggagggcagtctgctctgcgttttgctcggcttcggatggagaaacgccataactatgtccgcaaaacagctgaacttgctacccagtttttcatcaatccagctactagtcagcctaatgttgcaggattgattcttgccggttctgcagattttaagactgagctgagccaatctgacatgtttgatcagcgactccaagccaagatacttaatgtggttgatgtttcgtatggtggcgagaacggtttcaaccaagctattgaattatctgctgagattctagcaaatgtgaaattcattcaagaaaagaagtttattggcaa

SEQ ID NO: 86287 - DNA, 526 bp, Zea mays
  unsure (1)..(526): unsure at all n locations
agtagtgagagtgactcgtgnatagacgctagcnttctgtgctatgccgtaccggttcggaattcccggctcgacccacgcgtccgacatggttgagatgattgttatggattgtaatggtactctttttggcacactaagtggcaatacccgtgaagtgcttcacaaattcactgttgacctcccaaagaagcatggtagaggagggcagtctgctctgcgttttgctcggcttcggatggagaaacgccataactatgtccgcaaaacagctgaacttgctacccagtttttcatcaatccagctactagtcagcctaatgttgcaggattgattcttgccggttctgcagattttaagactgagctgagccaatctgacatgtttgatcagcgactccaagccaagatacttaatgtggttgatgtttcgtatggaggcgagaacggtttcaaccaagcttttgaattattctgctgagaatttagcaatgtgaaattcattcaagaaaagaaatttattggc

SEQ ID NO: 86288 - DNA, 527 bp, Zea mays
  unsure (1)..(527): unsure at all n locations
gagagcgagaggtgtcnncggttgagtcagctgactnagcatgccgtaccggtttcggattcccgggtcgacccacgcgtccggcgccagctgcggtggcagatctaacgagccgcgtcgaagtggcgaagcaagtctctgcctgcagctacgagacgggcacgagctggggtcaggaggttggctgggtgtacgggtccatgaccgaggacgtcctgacggggcagcgcatccacgccgccggctggaggtcggcgctcctgagcccggacccaccggcgttcctcggcggcgcgcccaccggcgggcccgccagcctcacccagtacaagagatgggcgacgggcctgctggagatcgtcctcagccgtcacaacccgttcctcctatccgcgtccaagcgcctccgtttccggcagtgcctcgcctaccttgtcatcgacgtgtggcccgtcagggcgcccttcgagctctgctacgcgctgctcggaccctactggctcattggcaaccggttcttcctggcg

SEQ ID NO: 86289 - DNA, 523 bp, Zea mays
  unsure (1)..(523): unsure at all n locations
agttagctagcggtngtcngctaactgagactgaacgcctgccgtaccggtccggaattcccgggtcgacccacgcgtccggggcattcttatatcaaagccaggaggaactcatatttcctgaagaagtttgctattgatgttggttactctttcctccggaagaactgcagaggcccatcagtcacgctgcacattccacacattagtctgatagaagtcggcatgatctactatgtttagcttaaggcccattgccgaagctcacatgtggatacccggtcggggcaatgcttgtgctgtctgcggattgtggtgtggaaggagttcaggcttgttcgttctgggccaagtttcagcttgtagagaagaaggcagacttctttgttaatattatttttagcctaaataaaccagcacaatgttagacggtgatggttctcatttggcatatttgcatgcatgctctgtaatttttcttgcagctatgtgatggaaatatatccattatctttaaaaaaaa

SEQ ID NO: 86290 - DNA, 526 bp, Zea mays
  unsure (1)..(526): unsure at all n locations
aggtaggaggaggtctgtggtagaagacgtaagcgcngcgcactgccgtaccggttcggaattcccgggtcgacccacgcgtccgggcagcacactcagctatccagcaaaagagatcgagaggcaggagtcatggccaccgtcagcgccgccgtggtgaccaccatcgttgcccgcgccgcgatcgccaggcccaatgctctagggctgcctgcgctgagggcgaggagcgagagggtgcggtgcagctacgccaaggacgcggccccagtcagcaccaagggcgcaggcgcgtcgctgctcgccgcagcgggcgcggtgaccgcgtcggcggggcccgcgctggcgctcgtggacgagcgcatgtccacggagggcaccgggctgagcctcgggctcagcaacaacctgctggggtggatcctcctgggggtcttcggcctcatctggtccctctacaccatctacacctttgaccttgacgaggacgaggagttccgggggccttttgttttaaatcccactn

SEQ ID NO: 86291 - DNA, 526 bp, Zea mays
  unsure (1)..(526): unsure at all n locations
agtaggagaggnccgtagctagagtcggtagctgtagcgatgcggtaccggtccggaattcccgggtcgacccacgcgtccggttacctacaggctacagctcccgtctctccgccgcttgcttggaaaacgaagaaaccctcctccaccaacccaatccagctacatccgtctgggtgaactccagggccaggagcagttcgccgccttcgttcgcatcacctacgcggttcgatccaactggcaggaaggaacgtgatggccaagacgagctcgttcaagctggagcacccccttgagaagaggcagtctgaggctaatcggatcagagagaagtaccctgacagaattccagtgattgttgagaaggctgagaggagtgacattcctgacatcgacaagaaaaagtacctcgtccctgctgatcttacggttggacaattcgtgtatgttgttaggaagagaatcaagctcagtgctgagaaagctatcttcatctttgggaagaacaaccttccacaacagg

SEQ ID NO: 86292 - DNA, 504 bp, Zea mays
  unsure (1)..(504): unsure at all n locations
gagagaggactctgctcgactctatnggcttagtcatgtcgctccggttcggaattcccggctcgacccacgcgtccggagaaggagatgaatgagctcaagctctaggagatcaagaacggcaggctcgccatgctcgccatcctcggttacttcatccaggggctcgtcaccggcgttggcccgttccagaacctgctcgaccacctcgccgaccccgtcaacaacaacgtgctcaccagcctcaagttccactagaacgttggtgcatcagcatacctgctgccgtcgccgccagttgtttgctgtggaaagctagatgcatgcgtgttgtaaaggaacctgaagcgttgcatcggtcatgattcatgcatggccagcctgctgcctgtaacaacaaactagtattgatcttattgagaccggaaactgtattgcacatggtaaatcaaataaaaaaacatagggcggccgctctagaggatccaagcttacgtacccgcg

SEQ ID NO: 86293 - DNA, 526 bp, Zea mays
  unsure (1)..(526): unsure at all n locations
agtagtagctggttgttaggctggtatcgtcagctgtngcgaacncgttcggaattcccgggtcgacccacgcgtccgccgagctccaggtctccacacctgacgtctataaataataaattaggcgcccgcggtgcccatcaattcgtgtcaccgtgtcccgagagcgcaaatcattccgcgcgacgcaaaaaccctagcccagccaccgatccctctcatggcaaccaccaccacccaggcgagccttctactccagaagcagctaagagatctcgcgaagcacccggtggatgggttctctgctgggctggtcgacgacagcaatgtcttcgagtggcaggtcaccatcatcggaccggctgacactctatatgatggaggttacttcaatgcaataatgagctttccacaaaattacccaaacagcccggcattagtcagatttacctctgaaatgtggcattcaaatgtctatcctgatgggcgggtttgcatctctattcttcatccagcttgtggaaga

SEQ ID NO: 86294 - DNA, 527 bp, Zea mays
agtaggaggagggctgcgtggttgctcacttagagcgtggcgaactcgttcggaattcccgggcgtgaacccgccgccgacgcagcagcaggagacgcgccaaggagagcccgcaaggaggcgactatgagggccaagtggaagaagaagcgcatgaggaggctgaagaggaagcgccgaaagatgaggcagagatccaagtaggctgatggggattgtggatggtggtgtcggcatagttgtgttacgtttcttcgatgcgtgagttcatggagagatgtcacatcctagttcgtcgtcaccgtttgccatgggtccaatggctcgtcttggaaacctgcacttcagtaggccatctatcgtggtttctagctatatccagagttttgtgctaagacaaatcagtcagtcgttttgtgaacctattatgatggagctttatttgctgctaaatatgaacctacctggtaagtaatggcaacgttcgtctaaaaaaaaaaaaaaagggcgggcgttctagaggatct

SEQ ID NO: 86295 - DNA, 531 bp, Zea mays
  unsure (1)..(531): unsure at all n locations
aggagtaggagggtaggtgaaagattacgtangcactagcgactgccgtaccggtctcggaattcccgggtcgacccacgcgtccgactctctcttcgtttactcttcttcccacccccagcgttcgcttccatccaagctcatatcatcatagatcgacggactaggccacgcgccccaatactcagaactagtcttgagtaaagcatggcgtcgtcttctccgtcctgccgtggcagcggcggcaagtcggacgtggaccggatcaagggcccctggagccccgaggaggacgaggccctgcagcgcctggtggcccgccacggcgcccgcaactggtccctcatcagccggtccatcccgggccgctccggcaagtcgtgccgcctccggtggtgcaaccagctgtcgccgcaggtggagcaccggcccttcacggccgaggaggacgacaccatcctccgcgcgcacgccaggttcggcaacaagtgggccaccatcgcgcgccttctcttccggccgaacgacaat

SEQ ID NO: 86296 - DNA, 527 bp, Zea mays
  unsure (1)..(527): unsure at all n locations
agggagtagcgtgtgtgaactgactganactgaagtcactgccgtaccgcgtttcggaattcccgggtcgacccacgcgtccgggcgtccatctccccttccctccatcacccttgcaattctagaactggcttccttggaaagacacacgggactcgtcctcgtcttttctctgctggaagagttggatttgtcagaacactagtggagtgcaaggaatctagaattggaaagcagcccattgaagtcccaccgaatgttactctcacattagaagagcagtttgtcaaagctaagggcccactaggggaattatctctcagcttcccaggtgatgtgaagattgtgaaagaagaatccggtaacctgagagtttataagactgcagagaccaagcgggcgaaccagatgcacggtcttttcagaacattgacagacaacatcatcgttggtgtgtcgaaagggttcgattagaagctttagctagtgggcgttcggtattgtgccgccgttgaagggcacaattt

SEQ ID NO: 86297 - DNA, 529 bp, Zea mays
  unsure (1)..(529): unsure at all n locations
agttagtaggagtgctcgtgcgtagctacttantcattggatgccgtaccggtcggaattcccgggagcgacagagtatggaaatggataaggtagcggcgagacgagccgattaaataggtgtcaagtggaagtgcagtgatgtatgcatctgaggcatcctaacgaacgaacgatttgaaccttgttcctacacgacctgatcaaatcgatcaggcacttgccatctatcttcattgctcaactctttgatgaaaaaaaaaaatgatatagaaaaaaaaaaaaaaaaaaaaaaaaaaaaaaaaaaaaaaaaaaaataaaaaaaaaaaaaaaaaaaataaaaataataaaaaaaataaaaaaaaaataaaaaaggggcgccctttttaaaggacccaagtttacttcccctgacatgcaactttataccttttttttggtgttacttattttaattcacctggccttttttttaaaaactttttatttgtgtaaaaacctgtgcttttccatatttatttttcttttc

SEQ ID NO: 86298 - DNA, 506 bp, Zea mays
actcgaaaactgaaccgtactcatgtcgtaccggtctcggaattcccgggtcgacccacgcgtccgctcgggtcaaaccctaagcagggagttgatttatccgctgcagccatgagtaagttgcagtctgagtctgtcaaggatgccatctcccagattgttggggatgccaaggagaagaataggaagttcactgagactgtggaacttcagattggtctgaagaattatgatccacagaaggacaagcgtttcagtggctctgttaagttgccccatatccctcgtcccaagatgaaggtgtgcatgcttggtgatgcccagcatgttgaggaggccgagaagatgggacttgactacatggatgttgaggctctcaagaaaatgaacaagaacaagaagcttgttaagaggcttgccaagaagtaccatgctttcttggcatcagaggccatcatcaagcagattccccgtctccttggtcctggtctcaacaggcaagcaag

SEQ ID NO: 86299 - DNA, 533 bp, Zea mays
  unsure (1)..(533): unsure at all n locations
aggagggactgtagtacgnaagataggaagactcacgtctctnacttactgtcggttaccggtttcggaattcccgggtcgacccacgcgtccgatcgctcatcaatcgccagaggtagtagttgatcgaggtgagtgaagttgaaaagcacaccatcgccatggacggcggatactacggcggtcgcgatcagcgctacagcggcgggtactacggcggcggtggcatcgcaacgccggggtacgctccggcggtcccggacgggatgtcgcaggtgaacatcgaaggcaacgggtgcaggcggtcgctgcctccgcagccgaccgtgaaggtgtactgccgcgccaaccccaactactccatgagcgtccgctacaggaaggtcgtgctgtgcccggagaaccccatggacgagtactatttactggatcaaggccaatgccgtcgaagcatcgatgcatcatgggactcaggatgggttactcggcgttctgctctggttaactagtcataacctatgagggccatccaa

SEQ ID NO: 86300 - DNA, 523 bp, Zea mays
  unsure (1)..(523): unsure at all n locations
gtgtgatagccgtgtgcgatgctggatgactgnagtcngtacgtaccggcttcggaattcccgggcttacagagaggggtggcatgacttcccacgctgctgtggtcgcacgtgggtgggggaaatgctgcgtctcgggatgctcaggcattcgcgtaaacgatgcggagaagctcgtgacgatcggaggccatgtgctgcgcgaaggtgagtggctgtcgctgaatgggtcgactggtgaggtgatccttgggaagcagccgctttccccaccagcccttagtggtgatctgggaactttcatggcctgggtggatgatgttagaaagctcaaggtcctggctaacgccgatacccctgatgatgcattgactgcgcgaaacaatggggcacaaggaattggattatgccggacagagcacatgttctttgcttcagacgagaggattaaggctgtcaggcagatgattatggctcccacgcttgagctgaggcagcaagcgctcgaccgtctcttgccgta

SEQ ID NO: 86301 - DNA, 517 bp, Zea mays
  unsure (1)..(517): unsure at all n locations
cagggagaggtctcgtagtacagaaagctaggctaacttangtcactgacgtactgctttcggaattcccgggccgacccacgcgtccgaagataaggagtgtctctcctttgccattctcctctctttcagctaagtccctgccccgtgtctttttcttacattcaggtcctcgcagctcctctcttttttcttgtttctttcgatctgcgagccgtacaagtccagtactcttctttccctcaaggaactcttgcagccggcccctctggtttcctcgaattcttgttccccggtccctacttctgtccccgcgtagatccgtccgtccgaggagcacaccgtgcccacccccatgtttacccaccagttcctctgacggacgccgtgctccgatgaagctgagcgtgctccgtatccgccgttcccactccttctccgtcgccttactttactgggtctacgtcttctcatgaacgcattggccctcttcaactgctgatccttcgtcgtctcn

SEQ ID NO: 86302 - DNA, 347 bp, Zea mays
ggaggggtgctagatctggactagcatgcattcgtcgattcggtggacagcgtcgctgctattctttcgttcctgttaaacaccaccaacaccaagctagagagtacagcaactagggagccgcgcagcaccacaggacacgcagcagagcagctggggaggtcggcggaaggacacacgacaagccctgacaagagagacagcctgtcgctcatagggcacggagggagtggcctcgtgcgaggcgtgaccctcgtgcgcagagtgaagtcctggagaacactcgcggaccaaccggaactacgggacacacactatataactcagcctgtgcacaaggcgtatgg

SEQ ID NO: 86303 - DNA, 528 bp, Zea mays
agggatagggctcgtgtcagaagctggatgactgacgtcatgcgtactgcttcggaattcccggctcgacccacgcgttcggcaatggctgccagcgccctgcttgcctgcggtgtcatggtccatgatgtgctgctgggcgcaggtgatggcgggctggtcttcgaggccagccagttaaccgtcaaggtcggtgacaccatcacattcaagaacaacgccggcttcccgcacaacggggtgttagacgaagacgacgtgccgagcggcgttgacgtcaccaagatctcacaggaggagtaccttaacgcgccaggcgagacctactaagtgacccttaccgagtccggaacctacggcttctactgcgagccgtatcaaggagccggaatggtccgcaagatcaccgtcaactaattaagctagctatcgatcgatatccattcatgtattaactgttgcttcctgctttgtactccgcccaatctgtccatctctacaaggtttgcgattttacacaacaacctg

SEQ ID NO: 86304 - DNA, 529 bp, Zea mays
  unsure (1)..(529): unsure at all n locations
gtttagttagctcgtgtccgatacatgaagacttcancatcctgctatgtcgtaccggttcggaattaccggctcgacccacgcgtccggaaaagaattctatatagaatgggttgggaattatgcctagatcccgtataaatggaaatttcattgataagaccttctcgattgtagccaatattttattgcaaataattccgacaacctccggggaaaaaagggcatttacttattatagagatggtgcgatttgactctttttttttttagccctacctatatctcattcttacgagaaagagagagggttcgcatagagagaacaaaattagtaaaggaaacccgcgcttggggaaggtgaggtgaactaacaattccttctgtagtgtatcctcgattgatgtggcctaagatgcttcaattgtagatttgagtattgagcgaatggtttcacctacaagatagggtctgtattacagggtattcacgattttactagtaccaattggcagcattagggtataag

SEQ ID NO: 86305 - DNA, 506 bp, Zea mays
  unsure (1)..(506): unsure at all n locations
agtgagaggctcgtagtcgagacatgcagcctagncagtactacttcgtcggaattcccggctcgacccacgcgtccggtcaaggttttgcatatggacagaaacttctactatggaagagattccacctagatcgagcttaatcagctctggaagaggtgtagaggggaagacaagccctcatgacatctagatgcaagcagagactacaatgtggacatggtgccaaagtttatgatggcacatgggacattggttcgagaccctcattcacactgatgtgacaaagtacttgtcattcaaagctgatgatgggagctatgttttcagcaaagggaagatttacaagggtcctgccactgatatggaggcgtctgaaatcccctttgatgggtctattcctgaagcgcatagcaaggaacttcttcatttatgtccaagattacaatgaagctgatccaaggacacatcaacgtatagaccttactagggggacaactaaagag

SEQ ID NO: 86306 - DNA, 515 bp, Zea mays
  unsure (1)..(515): unsure at all n locations
agggaggaggctcgtagtacggaggtcgatcggcccangncactngcgtactgctttcgaattcccgggtcgacccacgcgtccgggctgggactttttggtcaccaagaagtccaacccggcctccatcaaagcccacaaccgtcgtaatcgctacttcccctccgatcgtcgtcgacgacgcattcaccccaacccttctccgcgaaatagccgtcgccgcagctccggctatgtcaatcttcgagtacaacgggtccgccgtggtggcgatggtggggaagaactgcttcgcgattgccagcgaccggcggctcggcgtgcagcttcagaccatcgcaacagacttccagcgggtgttcaagatccacgacaagctctacatcggcctctcagggctcgccaccgacgcccagacgctgtaccagcggttggtcttcaggcacaagctgtatcagctgcgcgaggagagggacatgaagcccgagacatttgccagccttgtctctgcgctc

SEQ ID NO: 86307 - DNA, 671 bp, Zea mays
  unsure (1)..(671): unsure at all n locations
agtttaggtaggagggtctcntagaccgtacttctatcggagctnncgtactgcccgtaccggttctcggaattcccgggctcgacccacgcgtctcgcagtcgactcagtcgagtcgagagccagcactactactgcacgtcagctaangctaggagcccagcagtcagtncggcgggcgaatgggcggctctcccaatgatccctcctcgtnncagctcttggnncggtggcngcnnctcaggnnngcctgctcgccnnncctcggctnnngccgtcgcctccnnntccttcgctcgnntcgtctggctccccaagaagaaagaatcaagtacccgtnacaagccctaccgggnnattgggggggtggcctgactcgtcngtnacgtcgactgccaacctgggagaaaggggcaanggggcatagggggcgtgtacccagtnnntcgtcgaccaaagtacgntngcgctaacccgtcgaccgggatacccagctccaatcttaccaaccgagtgatgaaactggggtctccctaaccggcgaaacgtctaccgtnncggtgganacccactnnngggcttctgggatccctgggcccccgtcacccttncgcttgggaatcccctcggcgggccgggcgcccctttcctcggtcttaccaacaacccag

SEQ ID NO: 86308 - DNA, 522 bp, Zea mays
agtttagtagagttctcgtgtcgactctatggacttagctatgtcgtaccggttcggaattcccggctcgacccacgcgtccgttttttttgacacgaggaactcatcattaatccactaattgctgctgcttccgttattgctgctggattggccgtagggcttgcttctattgggcccggagttggtcaaggtactgctgcaggacaagctgtagaaggtattgcgagacagccagaagcagaaggtaaaataagaggtactttattgcttagtctagcttttatggaagctttaacaatttatggactggttgtggcactagcgcttttatttgcgaacccttttgtttaatcctaaaaaagaaaatgagtcctttagattagatacttttttctttttttagtacattggcatttgcttatgtaattctaagtatatcaatactttactttactactatttattatattatttcttttttatattattccggaaattttgtatctatcgggacagaca

SEQ ID NO: 86309 - DNA, 505 bp, Zea mays
  unsure (1)..(505): unsure at all n locations
aggagaggctgtgtcgaagactgagacgtagncactggcgaactgcgtttcgaattcccgggtcgacccacgcgttcgatttgcttggctgctgctcccttctcctaccgaccaactcgatcccgcgccatggatcgcgccgaccccgcgcggggccgccttgccgtgctctcctcccacctccgtggtgcaggggccgaggaggcggcggggctggagaggtcgccggtatccgcgccggcgcccgggccccgcgccggcgcgcttgccgtggtggacgggaggaccgggaagcggcacgaggtcaaggtctccgaagacggcaccgtgcgcgccaccgacttcaagaagattaccactggaaaggacgacaagggtcttaagatttatgatcctggttaccttaacactgcccctgttcgctcgtccatctgctacatcgatggagatgagggaatccttcgctataggggttatccaatcgaagaattggctgaaagcagct

SEQ ID NO: 86310 - DNA, 529 bp, Zea mays
  unsure (1)..(529): unsure at all n locations
aggttagatagccgtagttccgacggctggaagacttacgncngtacttactgccttcgnaattcccgggtcgacccacgcgttcgcacgccacccgtacacggtttccagcatagcattccggaaggagggggcgcgatgtggcacgaggcgcggcggtcggagcggaaggtccacgacctcatggacgcggcccgtcgtcgggcgcaacgccgagccgtctaccttgcccgccggcgcggcgacccgcagcaggcgcttcaggtctccggcacgccgtgcccccgttcaccgggacgacaccctgttccaagccaccgaggaccacgcaggattgatacaatggaatggaaaaccagatatttttaatgacacattttattggcccgcatttcgtggatttaatcgagacacgagctcttttccctttttaggtccaaggaaaactttaaaaaaaggaaaattttagggaaatggtaaatttaaacctcccgggatttgattaaacattttcccaaaggtttttttt

SEQ ID NO: 86311 - DNA, 529 bp, Zea mays
gaggttattgttaggagtgccgtagtcagaattcagtctacttagtactgtctgtccggtttcggattcccggctcgacccacgcgtccgcggacgcgtgggcggacgcgtgggcagttaccctatgaaggtggagttttcaagcttgagctattcttgcctgaggaatatccaatggctgccccgaaagttaggtttctcaccaaaatttaccatccgaacattgacaagcttggtaggatatgcctcgacattcttaaggacaaatggagtcccgctcttcagatacgtacagttctgctcagcattcaggcacttctgagtgccccaaatccagatgatcctctctcagacaacattgcgaaacactggaaatcaaatgaagctgaagcttttgagacagcgaaggagtggactcgcctgtatgcaagtggggcattgtaaccaagtgttgtttcagatgtgatgttataacatttccatagtttggggccgactgaatacccctcttgcttgatgagagcaaatt

SEQ ID NO: 86312 - DNA, 526 bp, Zea mays
  unsure (1)..(526): unsure at all n locations
aggtagtagtagggctcgtagtcagactccagctgacttagtactgccgtaccggttcggaattcccggctcgacccacgcgtccgatcctgctctgctagtgccaggattcctccctatccatcccatcaacctcagctaaggtccccagcggcggcgaggcgatggcggcgcctgtgacggtgtacggaccgatgctctcaccagctgtggcccgcgtggcggcctgcctcctggagaaggacgtgccgttccagatcgagccggtggacatgtccaagggcgagcacaagtcgccgtccttcctcaagctccagcccttcggacaggtccctgccttcaaggaccacctcacaaccgtctttgagtcaagggctatttgccgttacatatgcgaccagtatgcggactctggtaatcaagccctcttcgggaagaaagaatactgtccggttggggcgtctgccatttgacaagggatagagtttgaaggccagagttttaacccacgacctggttttaatcn

SEQ ID NO: 86313 - DNA, 519 bp, Zea mays
  unsure (1)..(519): unsure at all n locations
gttagtttcagatagtagtgctcgtgactgatcagctagctgagtactgccgtccggtttcggattccgggccgaccacgcgtccgcccgcgtccgcgccggggccgttcgcgttccggcgcccgtggaacacgccacagccggaagcgctgcgcctgcgcctcgcctgcgcgcgcggggcgtccggcgtgaggacggcggcggcgtgtcacggaggagcaggagcagcagcaccgcggacgttctcgacctgctcgggatctcagcggatgggagccccgatgatgttcgggcgtcctacaggcggctggcgctaaagtaccacccagacgtgtcccctccgggcgccgcggccgagaacacgcgccgcttcatcgaggtgcaggaagcctacgagacgctctccgacccaagccgccgggccagctacgaccgtgcactcgcccgcggcgtctgccgnctcgccttctccgggcgccgtttccaatcccaccacgcctactaccattaccaggaacg

SEQ ID NO: 86314 - DNA, 507 bp, Zea mays
  unsure (1)..(507): unsure at all n locations
agttagaggctgtataagaagactganacgtagtcatgcgtactgcgtttcggaattccgggtcgacccacgcgttcgaggcccttccctcatcgccccgcggccatgaatctggaggtcatgcccaagcccaaacagcgggtgctggaggcgcagcagagggaggaggccatggagatgagcgacctggacctgtggaagcacgagaagccgccaaggatctgccccttgcccccgtcgctcccgccgccgacgccagcgttcgacgaagcggcgctcgtgccgccgctcaacttcgccgtggtcgacgacggcatcttccgctccggattcccagggaccgccaacttccggttcctcaagtccctcaacctccgctccatcgtgtacctgtgcccggagccgtacctggggacgaacacggagttcctagaaaagaatgggatcaggctgcaccagttcggaatcgatgggcgcaaggaaccatttgtcaacatacccgacgag

SEQ ID NO: 86315 - DNA, 502 bp, Zea mays
  unsure (1)..(502): unsure at all n locations
aggagaggctcntttcgaagatggtagcctangcactgcgatcgcgttcggaattccggtcgacccacgcgttcgggactgtctacattatgagctatcctgagtctgcacgggttgttccgtgtaagagggttcacacaggatgatgcccacatattttgtctggaggaccagataaaagatgaaatcagaggtgttcttgatctaactgagcaaatacttggacaatttggttttcggtattatgagataaacctttcaaccagaccagaaaaatctgttggcactgatgacatatgggaaaaagcaacaattgctttgaagaatgcattagatgataagggttgggaatacaaggttgatgaaggtggaagtgctttttatggtccaaaaatcgatctaaaaattgaggatgctcttggaaggaaatggcaatgttccactgtgcaggtggatttcaatttgcctgaacggtttgacattacctatgtcgattcaaacg

SEQ ID NO: 86316 - DNA, 532 bp, Zea mays
  unsure (1)..(532): unsure at all n locations
cgttttaggtggaggcgtggtactgacggctggaagacttagntcatacgtactgtcttcggaatttccgggtcgacccacgcgttcgcgcgtgaaccctcacaggaacaggtgacatggtgacgtgctccaaggagaaggacgccgacctcttcgacgccgtgctgggagggctggggcagttcggcatcataacgcgcgcgcggatcccgctggcgccggcgccggcgagggcgcgctggctgcggctcctctacaccggcgccgtcgacctcacgggcgaccaggagcggctcatcgtcgacgacgagcgccgcggcggcgcgctggccgggctcatggactacgtcgagggctccgtcgtcaccgaccttcagcagggcctcatcggcagctggcgctcgcagccgccgacgttcttcttcgtcttgtactcggagtcggtgaccgacgcccggcgcatcggcgagctagccgaagaagccggctgcgtcctctactttcttcagggcgcggtgtcctaccgtggccg

SEQ ID NO: 86317 - DNA, 523 bp, Zea mays
  unsure (1)..(523): unsure at all n locations
agttgtggtatgtcngtctctggagtcattgcactgccgtaccgttcggattcccggtcgacnacgcgtccggaccaacccagtgcaccacacaaggcattgtcagcggtggcggcggcggcgggccggcggagactcccaggccaggagcagtctgccgattggaaggggagatgaaggccacgctcaagggccgctacgagggcgacaaggccacggccgccaccaccctcgccgcccccgccggcgacctccgcctcaaggcctccgccaccgaggccgccttcaccaacggtccttccctgcgaggcctcaccctcaccctcgagaagcccggcgccttcctcgttgacctcaagccccacaaccaggatgtgcgctttcagttcatgaactccgcgctcgtgctcgacaagcgcgtcagccttacctacacttacttcactagcctcgacgggggccccgtggcccccgacgtccggccgtccttccgcaacgggcttgactggaccggtacttttta

SEQ ID NO: 86318 - DNA, 518 bp, Zea mays
  unsure (1)..(518): unsure at all n locations
agtaggtgcttagtcgctgtagcagccctcagcactgacgtaccggtccggaattcccgggtcgacccacgcgtccgagaggatttagcaccctccccagagattaatggggaaaaggagaaagaaactgaagttgcagagaagagatggaaagtacttgtgtggaagactgctgtttatcttatcactctcggtatgctcattgcacttctaatgggactgaacatgtcctggactgcaatcactgcagctcttgttcttctggcactcgattttacggacgcacaagcttgtcttgagaaggtgtcatattcactgctgatctttttctgcgggatgtttatcactgttgatggcttcaacaaaacgggcataccgaacacactatgggagttagtggaaccatattcacgaatcgatagtgcgaaaggtgttgcacttcttgccgtggtgattcttatcctttcaaacgtggcctctaatgttcctacaggtaattnttcttacgcatatgacca

SEQ ID NO: 86319 - DNA, 509 bp, Zea mays
  unsure (1)..(509): unsure at all n locations
agttagtagtgtgtcntggtgcaagcatagcatgccgtaccggtctcggaattcccgggtcgacccacgcgtccgcaacctcctactgcccgccccctcgctcgccggcggatcccgcgccgggctgcgaccgtggtttccccgcgcgcgttcagccgcgcggacttcgatggcttcgtgcggcgcgcgtggcagggcgccaacgcgggggccgagcgcttcgccttcgaggcacggcaggccgcgcagcggctggacagcaggttctcgatctcccggaggctcgcagacgcttcccgtgccgcccgcgcccgcgcagttgagatcgacgccgagttcgggattcggcggcgngggcgctccttctctgtcgacttctcccgcaactggcccaggtatcggagggacatcaatgacttcatgggaactcccatcgggagagcattagctacaatatttttcctgtggttagcactgtcaaggtggttgttcagaattntcatttttgg

SEQ ID NO: 86320 - DNA, 523 bp, Zea mays
  unsure (1)..(523): unsure at all n locations
gggaggggctnttttcngtcngcaggcacgcagtcgcctagcacgtaccggtccggaattcccgggtcgacccacgcgtccgcccacgcgtccgagcccgccagagagacaagcagccaaatcaggcctttatttacgatccggccggccggaatctagaccacctctctctctctctcctcgtacgtagtcgttgagtctttgaggtcgaatggcgcccgtctacgctgccgcggaccacggcaccaacggcggctccggcctgaccctgaacccggtggcggcgcgccgggcgctcagcctcgtcggcgcgcccacgccgtcgtcgtccacgccgccggcgtacgggagcatcgtcaccgtgctcagcatcgacggcggtggcgtgcgcgggatcatcccgggcaccatcctcgccttcctcgaggagaagctgcaggagtacgacgagcggccggacgcgcggctcgccgactacttcgacgtgatcgccgggaccagcaccggcgggctggtcaccgcc

SEQ ID NO: 86321 - DNA, 512 bp, Zea mays
agggtagtactgtatacgacgctggatccataccatgccgtaccggtctcggaattcccgggtcgacccacgcgtccggcaaacctctgcaatttagttgacatttagcttctctcgacccctctcaacttcttgtttatgcaggtggaagtcaagaggacagttccgagggaagagatgaataccaaagatggccctaagacaagaaagatcttcatcggtgggctacctgcatctcttactgaaggttggtgtttgctatcaacaaacaaatgttgaattcattttgtttatgatactgagaaggcacaaaatttcagatgagttgaaggatcacttttcattgtatggtaaggtgctcgaacatcagataatgcttgatcatagcactgggcgttctagagggtttggttttgtcacttttgaaagtgaagattctgttgaaagagtcatatcagaggggagaatgcgtgatcttggtgggaaacaggttagattgttaatttttttgg

SEQ ID NO: 86322 - DNA, 517 bp, Zea mays
agaaaggtgcttcgtcgcgaacgtcatgcgtcgtctgacgtaccggttcggaattcccgggtcgacccacgcgtccgccactcaccagcttcatggggtatttgaggctgccagtttcggtgggtctaatatcgatcccactgcatgggaggataagaagtgtaaaggtgaatctagattcccagcgcaggtgaggatccgcgttaggaagctctgcaagccgttggaagaggattccttcaggccagttttgcaccactatgatggtccaaagtttcgcctcgagctctccatcgcggagaccctgtccctgctagacctatgcgagaaggaaggcatctgagctgttggctgcctcgtgaggttctagtaaatatcaatcatccttgtatgttctgtggatggtggttggcaatgttgtttatttttcaagcgcaagctgctgccggtctcgttttccctgtcctggatggaagcaaagggacctggtactttgaaggccccccctcaaacataa

SEQ ID NO: 86323 - DNA, 511 bp, Zea mays
  unsure (1)..(511): unsure at all n locations
agagagtctcctgngtggctggaagtacaccatgacgtaccgtctcggattcccggtcgacccacgcgtccggtgcaggggtgagaaatgcagcccagcgcaaactatttgatgagctgggaatagtggctgacgaattacctgtcgaccagttcattccgcttgggaggatgctttacaaggctccttcagatggaaaatggggcgaacacgagttggattacctcttgttcatggttcgtgacgtgaagctcgacccgaatcctgaagaggtggccgatgtcaagtacatgaaccggcatcagctgaaggagctgctcaggaaagccgatgccggggaagatggcgttaagctctccccttggttcaggctggtggtggacaactttctcatgggctggtgggatcatgtccagcaagggactctgcaaggggcaacagacatgaaaaccatccattaattggtaatcttctagatcgcttaagcacgagtctttgccctgttgaggat

SEQ ID NO: 86324 - DNA, 522 bp, Zea mays
  unsure (1)..(522): unsure at all n locations
agaaggtgtatcngtgcccactcgcacagcatgccgtaccggttcggaattcccgggtcgacccacgcgtccgcagatattctgcagatgaaggcccttcgttgactgaactgagtggatacaatgcaaagagacacgagtttgacccagagtatgataatgatgccgaacaagcgcttgctgagatggaatttaaagaaactgattcagaaactgatcgtgaactgaaactccgtgtgctgcgtatttatctgtccaggcttgatgaaagaaaaaggagaaaagagttcatattggaaaggaatttattgtttcctaatcccttggagaaggatcttacaaatgaagacagggaagtttaccatcggtataaggtcttcatgcgttttctttccaaggaggaacattgaacccttgttaggagtgtcattgaaaaacgaaaaattcggaagagaaattaagaactcccaggaatggtcgtctggttgatgccggacaatttggtgaagcaaagatcaccag

SEQ ID NO: 86325 - DNA, 523 bp, Zea mays
agagtgctcgtttccactgaatgcagccgtacgcactgccgtaccggtccggaattcccgggtcgacccacgcgtccgccgtcgccgcctcctctccccagcacccggagctcgaccgaacgccgctcaccatgatcatccccaagaagaaccgcaatgagatctgcaagtacctcttcaaggagggcgtgctgtatgccaagaaggactacaacctggcgaagcacccgcagatcgatgtgcccaacctccaggtgatcaagctcatgcagagctttaagtccaaggagtatgttagggagaccttctcctggcagtactactactggtatctcaccaacgatggcattgagcacctacgcaactacctgaacctcccgtctgagatcgtgcctgccacgctcaagaagtctgccaagccacctggccgcccatttggctctggccctcctggtgaccgtccaaggggcccaggccgttttgacggcgacaggccaaggtttggtgacagggattggtaccc

SEQ ID NO: 86326 - DNA, 530 bp, Zea mays
  unsure (1)..(530): unsure at all n locations
aggaatagagtacgtgnagtcaattgcatcgcaggctcgtacgcctgccgtaccggtccggaattcccgggtcgacccacgcgtccgagcacgagcagcacgccgtgccgctccaaccgtctcgcttccctgcttagcttcccgccgcgccatggcgtcgaccaaggcacccggccccggcgagaagcaccactccatcgacgcgcagctccgtcagctggtcccaggcaaggtctccgaggacgacaagctcatcgagtacgatgcgctgctcgtcgaccgcttcctcaacatcctccaggacctccacgggcccagccttcgcgaatttgtccaggagtgctacgaggtctcggccgactacgagggcaaaggagacacgacgaagctgggcgagctcggcgccaagctcacggggctggcccccgccgacgccatcctcgtggcgagctccatcctgcacatgctcaacctcgccaacctggccgaggaggtgcagatcgcgcaccgncgncgcaacagcaagctcn

SEQ ID NO: 86327 - DNA, 513 bp, Zea mays
  unsure (1)..(513): unsure at all n locations
agaagggtgtgtgcgtggaatgcatcgcttcntatgccgtaccggttcggaattcccgggtcgacccacgcgtccggctccagaacaggaaccggaacaagagcctgagccagaacccgaaccagtgaaagaggaagcaccagaagccgagccggacttgctgggtctgaacgaaccgagccctgctgcgaccgcgatagaagagcagaatgctttggcgctagcaattgtcccgatagatgatgttccgggagctgctcctacttttgagaacggagtcacaggctgggaactggccctggtgacagcaccgagttcgaccgagaccgccgttgccccaagcaagaaactggccggtggtctggacttgctgacccttgatagcctgtacgacgaggcgaaccggagagcgagccagccggcgagctacaacccctgggatgcaaccgcgtctgccccgatgatgaccaccatggcgccggcgatgcacgatccgttctacgcctcgaacgg

SEQ ID NO: 86328 - DNA, 507 bp, Zea mays
  unsure (1)..(507): unsure at all n locations
agataggggctgtatacntcgctggatgctatccatgcacgtaccggtccggattcccgggcacgctcaaacccggcacgacgcggccatggtgtccgtcctgctgaaacactcggaagccaaggtcttcctcgtggagtcgcagttccacgccgtggcccgcgacgcgctcaggctcctcgccgacgccaaagacaggcttcctctcgtcatcacggtctctgaccccagcagcagcagcagcaccggcgacggccgcggcagcaacgacggcagcgtcgcggtcgcggagtacgaagcgcttctgcggagcgcgccgcgcgacttcgaaatccggtggccggcagacgagcgcgacccgatatcgctgaactacacgtcgggcaccacgtcgaggcccaagggcgtcatctacagccaccgcggcgcgttcctcaacacgctggccacggtgctcgtcaacgagatggcgaccatgcccgtgtacctctggaccgtgcctatgtn

SEQ ID NO: 86329 - DNA, 521 bp, Zea mays
  unsure (1)..(521): unsure at all n locations
agtaggctcgtgtcngtccccaaacgccttcgtaagaccgtccggttcggaattcccgggtcgacccacgcgttcggaaccaaatacccagcaattacaaaatcattttcccattgagaacacacaacataatggctgattataggtttcttggtcaagaaactctaatagcattgtgccttctcctctcttttccaccgggcatagcctccatccattcatccacactgaacatgagttgcatcttagaggagaaggctgcgcttctatcaatcaaggcaagcctcctggatcctaacaactacttctacttgtcatcatggcaaggtcaagactgttgcagctggaaaggaatcaggtgcagcaaaaaaactggcaacgtcgtcaagctcgatcttaagcgcataaatccaggaaactttgtaagtgagataagctactctttagttaatttacgacggctgagatatctaaacttgagttacaacaactttctggggtacaaattcccggggttcttg

SEQ ID NO: 86330 - DNA, 526 bp, Zea mays
tggttaagagtgcgtgaagtctctgactgctatctgtaggcactgccgtaccggtccggaattcccgggtcgacccacgcgttcggctggcttctccttcccctcttaccaagtccttctcgggttagggttccttagggttttgtggaggggcgatggcggcggctgatgttgagtaccgttgcttcgtcggcgggcttgcctgggccaccagcaacgagtcgctggagaatgccttcgcctcctactgcgagatcctggactccaaggtcatcaccgaccggcagacggggaggtctcgcggcttcggctttgaatccttatcctgctagaacttgatgctcgacactatctagaacatgaacggcaagtacctcgacggccgtaacatcactggtaaccaggctcaatcccgttgctgtcgctgtggccgctgtggctacggcagctgtggctgctgttgcggctatggtggcagtcgccgtcacggtggttatggccgctgtggcgtgtaacggtttcttct

SEQ ID NO: 86331 - DNA, 520 bp, Zea mays
  unsure (1)..(520): unsure at all n locations
atgggagggaggtgcncttccgtcggactggatngcatacgtatgacgtaccggttcggaattcccgggtcgacccacgcgtccgggcatgcaaaatgggcagaagatcacattccctggtgaagctgatgaagcgcctgacactgtcactggagatatcatctttgatctccagcagacggagcatcccaagttcaagagaaagggtgatgacctgttctacgagcacaccctgaccttgactgaatctctgtgtggcttccagattgttgtgactcacttggataacaggcagctgctgatcaaatcaaatccggtcgaagttgagaagcctgattctttcaaggcgatcaacgacgaatgcatgcccatgtaccagaagccgttcatgaaaggcaagctgtacattcacttgtcggtggagttaccagactcgctaaacccggagcagtgcaaggccctggaggctgtggctcacgccaaaccggtgtcgcagtacaacgacatggagctggacgag

SEQ ID NO: 86332 - DNA, 504 bp, Zea mays
  unsure (1)..(504): unsure at all n locations
aggataaggagtgcgtcntcgctgatgcatgcatcgccgtaccggtccggaattcccgggtcgacccacgcgtccggccacgggaccttcaggatgaacgcgctggcgtacttcacgctcctgtcggggttctacatggcgtggaacatcggggcgaacgatgtcgcgaacgccatggggacgtcggttgggtccggagctctgacgctccggcaggcggtgctgaccgccgcggtgctcgagttctccggcgcattcctcatggggacccatgtcaccagcaccatgcagaagggaatcctggttgcgtctgcgttccaagggaaggactctctgctcttcgctggactcatatcctcccttgctgctgccggtacatggctgcaggttgcttcgtcatatggctggcctgtctcaactacacattgtatcgttggggccatggttggtttcgggctggtgtatggaagggtggatgcagttttctggagttctttggctaan

SEQ ID NO: 86333 - DNA, 522 bp, Zea mays
  unsure (1)..(522): unsure at all n locations
aggctgtctcagtcgactgatgcagtctgttgacgtaccggttcggaattcccgggtcgacccacgcgtccgccgncttccctcccctcctctcctgtgttcctccataccccactccccccgcaggagcggcgcggcggcggcaaaggcaaaggcaaaggcaagatgttcgggcgcgcgccgaagaagagcgacaacaccaagtactatgagatcctcggggtgcccaagtcggcgtcccaggacgacctcaagaaggcctaccgcaaggccgctatcaagaaccaccccgacaagggcggtgaccccgagaagttcaaggagctcgcacaagcctatgaggttttgagtgatccagagaaacgtgagatttatgatcagtatggtgaagatgcccttaaggaaggaatgggtggtggtggatcccatgctgatccatttgacattntctcatcattctttggaccctcttttggaggaagtggtggaagcagctagggaaagaaagcaaaagatgggaat

SEQ ID NO: 86334 - DNA, 518 bp, Zea mays
  unsure (1)..(518): unsure at all n locations
aggtagagtcggtcgtcacggaagcggtcgtatgccgtaccggtccggaattcccgggtcgacccacgcgtccgcgcagcagcacgagcagcacgtcgtgccgctccaaccatctcgcttccgtgcttagcttcccgccgcgccatggcgtcgaccaaggctcccggccccggcgagaagcaccactccatcgacgcgcagctccgtcagctggtcccaggcaaggtctccgaggacgacaagctcatcgagtacgatgcgctgctcgtcgaccgcttcctcaacatccttcaggacctccacgggcctagccttcgcgaatttgtccaggagtgctacgaggtatcggccgactacgagggcaaaggagacacgacgaagctgggcgagctcggcgccaagctcacggggctggcccctgccgacgccatcctcgtggcgagctccatcctgcacatgctcaacctcgccaacctggccgaggaggtgcagatcgcgcaccggcgncgaacagcaaa

SEQ ID NO: 86335 - DNA, 520 bp, Zea mays
tagtaggctgtgtcgtcgctggatgcgtcgtatgacgtaccggtccggaattcccgggctgaaggagagcagcccggaggagggggagcaagcagcagccgtccgtggaagaagatgtcgtacctgctgccgcatctgcactcggggtgggcggtggaccaggccatcctcgccgaggaggagcgcctcgtcatcatccgcttcggccatgactgggacgagacctgcatgcagatggatgaagtgctggcagcagtagctgagaccataaagaactttgcggtcatctaccttgttgacatcacagaggtccctgatttcaacaccatgtatgagctgtacgacccttcgacagtgatgttcttcttccggaacaagcacatcatgattgatctcgggactggaaacaacaacaagatcaactgggccctgaaggacaagcaagagttcatcgacattgtggagaccgtatacaggggcgcccggaaaggccgtggtctggtgattgcttcaaaagact

SEQ ID NO: 86336 - DNA, 521 bp, Zea mays
  unsure (1)..(521): unsure at all n locations
agaaagggtgtgtcngtcgctggatgcaatagcatgccgtaccggtctcggaattcccgggtcgacccacgcgtccgagcatgttgttctctgcgacgatgcctagctgggtgaagaaactgtccagacggtacttgaacaaccctttgacgattgacttggttggcgatcaagatgaaaagcttgctgaaggaatcaaactctatgctatcccactcacaacaacatcaaagcgtaccggtcttagtgatctaatcacgggttatgcaaagggtgggaaaaccatagttttcactcgtacaaagaaagatgcagatgaagtatcattggcactgacaaacagtattgcttctgaggcacttcatggtgatatttcacaggatcagcgtgagaggacactaaatggattccgtcaagggaaatttactgttctagtagcaacagatgttgctgcccgtggtcttgatataccaaatgtgatctgattatccattatgaattgccaaatgattcagaaactt

SEQ ID NO: 86337 - DNA, 526 bp, Zea mays
tgttagagtgctcgggtcgctgatgcatgctgtaggcactgccgtaccggtccggaattcccgggtcgacccacgcgtccgagacgacttgtttcattgattcttgaagagatcgagcttcttttgcaccacaaggtcgaggatgtcttgcaactgcggatcaagctgcggctgcggctcaagctgcaagtgcggcaagaagtaccctgacctggaggagacgagcaccgccgcgcaggccaccgtcgtcctcggcgtggccccggagaagaaggccgcgcccgagttcgtcgaggccgcggcggagtccggcgaggccgcccacgcctgcggctgcggtagcagctgcaagtgcgacccctgcaactgctgatcacatcgatcgacgaccatggatatgattattatctatctagcttgtggtggtggttgaacaataataagcgaggccgagctggctgccatacataggtattgtgtggtgtgtgagagagagagagaaacagagttttttaatttgctatct

SEQ ID NO: 86338 - DNA, 521 bp, Zea mays
  unsure (1)..(521): unsure at all n locations
agagtccnttangtcatgaatcgcatctcgtacgcactgccgtaccggtccggaattcccggggttcaagggcacctatgaggctatcacaaaaggcaacccaatgtggaaccagctaactgtcccagaagcgtcactctactcatgggattccaaatccacttacattcatgagcccccttactttaaggacatgaccatgtccccacctggcccctctacagtgaaagatgcctactgcttgctgaacttcggggacagcatcactacagatcacatttcacctgcaggaagcatacacaaagacagtcctgctgctaagtatttgatggagcgtggtgtggaccggaaggacttcaactcatatggtagccgtcgtggtaatgatgaagtaatggcaaggggaacgtttgcaaacattaggatcgtgaacaagtttttgaacggagaagttggacccaagaccattcatgttcctactggggagaagctntctgtttttgatgcggccatgagataca

SEQ ID NO: 86339 - DNA, 514 bp, Zea mays
  unsure (1)..(514): unsure at all n locations
tgagggagctcgtgtcngtcgatggactgcatacgctcgccgtaccggtccggaattcccgggtcgacccacgcgtccgattacaccgtgcgatgcaggtacctggcgccggagtacttcatgtacgggaaggtgaccgacagggtggacgtgtacgcgttgggcgtcgtcctgctggagctcctgtccggccggaagtccatcagcagcgacgggtcgtcacccaagggccaggagagtctcgtcatgtgggcaactccggtgcttagcagcggcaacatctgtgacctgctggacccgaggctggacgtgaagcacgacgaggtggaggtcaggcggatggcctctgccgcgtcgctctgcctccggaggtcggctcgactcatgccgccgatatcgcagatactgagcatactacgaggagaaagcgcggcgagcatcgccgaccagggcgcgacggagccggactgcgtggacgacgaggcctaccccgccgcgaacgtgaggtcgcacc

SEQ ID NO: 86340 - DNA, 517 bp, Zea mays
  unsure (1)..(517): unsure at all n locations
gagtatggtgcttgngtggacgaatcagncgctggacgtaccggttcggaattcccgggtcgacccacgcgtccgtaacctccttgcagaccaacgtaagagtatcctgaattttaatcaacgtatagtgattgcccttgatgttgctattgcattgacttatctccatttgtgttctggggacgctttaatctgttacaacttgaggacgtcaaacatcctactgacagagagctaccgagccaaagtgtgctgttctgaactgtcaaaaagtggtaatatcgtgctattaaagggaacagggggctacattgatccagagtacttggagacctcagagctcactgccaaatctgatgtctactcttttggaataatacttctagaaatcatatctttttaatggccacaagacttggatgtattgatgaaaccaccggaaaacagtgtgtacaatgggctcttgaaaattctatgacgacctcatgaatgagatattggattaccgtatggaggg

SEQ ID NO: 86341 - DNA, 508 bp, Zea mays
aggagtactgtgtctaggtgatgactcagcatgccgtaccggttcggaattcccgggtcgacccacgcgtccggtgctctcatctgcgtacacggtctccctcttcctgtcagtaatagagtgagagtgaggcagcgagtaggagacaaggggaaatggggaagggagcgcaagggagcgatgcggcggcggcgggcggcgaggtggaggagaacatggcggcgtggctggttgccaagaacaccctcaagatcatgcccttcaagctcccgcccgtcggcccttatgatgtccgcgtgcgcatgaaagcagtggggatttgcggcagcgatgtgcactacctcagggagatgcgcatcgcgcacttcgtggtgaaggagccgatggtgatcgggcacgagtgcgcgggcgtggtcgaggaagtgggcgccggcgtgacgcacctgtccgtgggcgaccgcgtggcgctggagccgggcgtcagctgctggcgctgccggcactgcaa

SEQ ID NO: 86342 - DNA, 506 bp, Zea mays
  unsure (1)..(506): unsure at all n locations
gtatagagccgtgttcaacgcgactngcgntgcatgacgtaccggttcggaattcccgggtcgacccacgcgtccgcccacgcgtccgggatgtgtatgtaggcctgttgatcaaggactatcttaactagccacatgccctggaaatgggacagagtaagcttgaacccggctattccatacatgaaaagacaatcacgcactgggagtggagagatggcgagagtgtcacgtaccctcctggcaaaggaccgcctaaaaagggtggtgtgctctcgggtggcgcggacctgttcttgcagtggaggatccgtgggaatggtagacatgcaaggtttacgagaaacatatgtcgtgtggttagagatcctcagctgagtaaatcgattcggatcgctgttatatccccggagagtggagacttgatctccgacctacaacctaagtcaggatgtaaacattatgaataacaatgatgttgtattgatgagatggtgaaattagac

SEQ ID NO: 86343 - DNA, 526 bp, Zea mays
  unsure (1)..(526): unsure at all n locations
nagtataggctcgcgtgcngtggattggacgctgacgctngncataccggttcggaattcccgggtcgacccacgcgtccgccatcatccagacgctgctccccatgtcgcccaagggcgagatctgcgacgtcaacggcgtctgcgtggacgccaccgaggacgagctcttccgcctcaccaccaaggaggggaagctcaccgtggagcgcgagaaggtgaagatcgagacgcagcccttctcccccgtggtgcagttcgagcaggaccccgtgcagatcctggacgcgctgctcccgctctacctcaacagccagatcctccgtgccctgcaggagtcgctcgccagcgagctcgccgcccggatgagcgccatgagcagcgccaccgacaacgccatcgagctccgcaagaacctcttcatcgcctacaaccgacagcgccaggccaagatcaccggggagatcctcgagatcgtcgccggtgccgacgccctcgctggctgagcctgagtccccttggtggg

SEQ ID NO: 86344 - DNA, 520 bp, Zea mays
  unsure (1)..(520): unsure at all n locations
ggtgctgtatctttgccaaacnccctcagtcactgacgtaccggttcggaattcccgggtcgacccacgcgtccggccgcccagaccgcctccccttccccgtctccggtgcccaaggccaggccaacagttttgaggtggtaatggcggaccaggctaaccaacccactgtccttcataagctaggtggccagttccacctgagctccagcttctctgaaggtgtacgggcccgtaacatctgcccttctttctcaccttatgaaaggagatttgccacgaggaactacatgacccagagcctttggggcccttcaatgtctgttagcggtggcatcaatgttccagtgatgccgactccgctttttgccaatgctccagccgagaaaggtggcaaaaacttcatgattgatttcatgatgggcggtgtttcagctgctgtttcgaagactgcagctgctcccattgaacgagtgaagctgcttattcagaatcaggatgagatgatcaagtctggtag

SEQ ID NO: 86345 - DNA, 514 bp, Zea mays
  unsure (1)..(514): unsure at all n locations
nggggtagctgtgttcngtggcctagcccctcncgcatgcacgtaccggtctcggattcccgggtcgacccacgcgtccggcgtctcggttcgcatagcagagctgctcttgcaacaagccaaacaacccagtggctgctagccgagacaggggatagattgagagagaggcgcgcagatggcgacgccgtcgtcgtcgctttgctccagcttcgcctccctgcggaccgcctccatcggccacccccgtggcatcgccttctccacgcccaggaaggcattccatgtgagggcatcagctcgggttgacaaattctcaaagagtgacatcatcgtgtccccttcgattctgtctgcaaactntgcgaagcttggtgatcaggtaaaagctgtggaggtggcaggatgcgactggattcatgtcgatgtcatggaccgggcgccttgtgccaaacatcacaattggacccttggttgttgatgctctgcgtncagtgactgatccttcgttggn

SEQ ID NO: 86346 - DNA, 520 bp, Zea mays
  unsure (1)..(520): unsure at all n locations
ggaggggccgtgtctttgttgcaagcgcncgcacgctcgtaccggttcggaattcccgggtcgacccacgcgtccggatctaattatcccaagcacgcttcctcgacttcctatctcgactctcccaagtcacaaccctcgacctcccccctactctaactactggaagcgccgatccatcaggttctgatcgattcttctgccccgatccgcagcggcaagcggagatgaactgcgagacctgtcagctgaaagaactggagctggaactgacggagatcagggatgttctgcgctgtattttgcacaccatattcttccatagaaccctcagcctggttcgccccaaagatgttgactgtgatttcctcgatattacttatgtacaatgtggtctaccggaactagaaaaggaagttgacgaaaagatagaccagttcagtgcatgggtggagaaacacccaaaccgcagaagccagatctgcctctcctttttcgacgagaaacacagacaccctgg

SEQ ID NO: 86347 - DNA, 507 bp, Zea mays
  unsure (1)..(507): unsure at all n locations
nagaggagccgtgtcgtgaacgaacctccgcatgccgtaccggttcggaattcccgggtcgacccacgcgtccgcccaaaaggccaaaacccgcgcacaccggcgacggcaggagaacctcccgccggccgccgccatgccgccgcctctacaggcccaccgcctactcatctcccaccgccgcctacccactccagctcgccgccggttcaccgccgcctcttccgtccaatccgctcccgccacaaccttggccccgggccccgccacatcctccatcctctccatccgcgagtcgctcctctcaggcgagaggaccgcggcggacatcacctccgagtacctctcccgcctccgccgtaccgagccgaccttgcgcagcttcatccacgtcgcggacgccgccgccgagcgggaggcggaggaactcgaccggaggattgcctccggggagaaggatgcggtgggtccgctcgctggagtgctggtgggagtgaaggacaatct

SEQ ID NO: 86348 - DNA, 508 bp, Zea mays
agtcaggaagtgccttcgtggctggagcagtcgtagccgtaccggtccggaattcccgggattcctccctgtctccgccctcttctcactcccgtaggccgtggtgccgccgccgactgctgggactgccctacaccaagtgcccaggtcatcttcggtccattcgccggcgacgagcaccaccaggtgtgccaggttgaccgagctatggacagcctgtggcatcttggggacgagctccgcgggcagcccaaggtggtggaggaccgccagtggtctctcatgacgtccaagctggcggagatcaccaggtccaagggcgagaggatgaacaccgtccctgacgccaagcagtgggacaagacgtcctaccagcttcacgacgacagcaggatgggccacatcaatctcggcctcatgaaccttgatctcaagatgaacgaggctgccgccatgaagctccccttccgtggcatgccctataacatgaaccagatgtacctcaagg

SEQ ID NO: 86349 - DNA, 532 bp, Zea mays
  unsure (1)..(532): unsure at all n locations
agtgtgaggagtggctcgtgatagagcccacngacttagctactgccgtaccggttcggaattcccgggtcgacccacgcgtccgagataatcgaaatcgaaaagaactgtcttttctgtatactttccccgttctattgctgccgcgggtcttatgcaatcgatcggatcatatagatatcccttcaacacaacataggtcatcgaaaggatctcggacgactcaccaaagcacgaaagccagttagaaaatggattcctatttgaagagtgcctaaccgcatggataagctcacattaacccgtcaattttggatccaattcgggatttttcttgggaagtttcgggaagaaattggaataatatcgattcatacagaggaaaaagttctctattgatgcaaacgctgtacctagaggatagggatagaggaagagggaaaaatcgaaatgaaataaattaagaataaagccaaaaaaataagtcgaagattgaagaacccaaattcaaaatgaagaaatgggaacctgn

SEQ ID NO: 86350 - DNA, 538 bp, Zea mays
  unsure (1)..(538): unsure at all n locations
aggagggcgtgtcgtcnaacctactgaagactgaggtcctacgaatgccgtaccggtctcggaattcccgggtgaacaaggggctgtctgacttcaacttggcgctggacctggggttcctgaccaaggctaggaagtacaccttcttcaagcccaagttcatcttctacgccacctacctgtccgagaagatcgggtactggaggtacatcaccatcttcaggcacctcaaggcgaacccggagtaccaggtgtaccccatcttcaagtacttcgagaactggtgccaggacgagaacaggcacggcgactttttctttgacctgctcaaggctcaaccgcagttcctcaatgactggaaaggccagcttttggcaacggtccttttgcctcttgggggatgtgacccatgtaccctgaatgactgccaaacgcactgcatttctatgaagggaattgggtctgggacaccaaaagaatttgacatgcatgtgaacatcgagaccaaaccgtacaaacggcgaggaatcttccctgc

SEQ ID NO: 86351 - DNA, 531 bp, Zea mays
  unsure (1)..(531): unsure at all n locations
aggtagaggagggcttgtgtactgagactgaagcgtacgactgccgtaccggtctcggaattcccgggtcgacccacgcgtccgcttttttttttttttttgcgaatatgaatcttgggattcaccctaaaatatcattacaaggtaataaaaaacacaattacaatacaacataaattacccccctcccgctcgccggttctactgcaacacgtgattcacccacatcacgttagcgaatgctatactgctgaggtcactaccaactccagcccaaccacgttgtcaaacttgcacattaggcttagtttgggtactctggtattgacctcaatccacttgcattgaggaggattgaggtgtaacttagactaatatacaccgcaatccaacttaacacatgaagataggggtcaatgctagagtacccaaacaaagtcttaagtggccattcaagtcacccaaaatacttttacttttttgctacaaattgaaggagaatgtccttgaatctaataaaagtttatggan

SEQ ID NO: 86352 - DNA, 523 bp, Zea mays
  unsure (1)..(523): unsure at all n locations
agtagagcggtgtcactgctgatactgaggcatgcgaaccgcttcggaattcccgggtcgacccacgcgtccggtggagaggtctcacaattctacagtgacctcttcctattcaaccttgatggtaaagaagtgatgagaaagactatcaaagtgaacgatcccctgagatacggaggggtcaccatctatcagacagactggggattttcagcattgcaagtgaagaaaaatggtgaaggccctttcaatttggcgatggcccccttgaaactgaatggggataagaagctctttggaacattcttgccacttgaagattcagactcgtcgaatccaaatgtcaaaggaatatcaatgcttgctcgagatttgcagtctattgtgttgtatgatcaagatggtaagtttgtaggggtccgtcggccaagctcaaaactgcctattgagatcaatggcaatgaaatactcaatgaagatgctattggtagtactggactggatcctaagactgatccagagn

SEQ ID NO: 86353 - DNA, 527 bp, Zea mays
aggtagactggtgttcgacggactcacgactgcagcgtgtgcgtatcggcgtcggaattcccgggtcgacccacgcgtccgctagccgccgccgccgccgccgccgccatggtcgccgtcaaccgccccctcgtctccgtgaaggccctagagggcgacatggtaaccgacgcccccggcatcgccttaccgcccgtcttcggggcgccgatccgtcccgacgtggtcaggttcacccacaagctgctgtcctgcaacaagcgccagccctacgcagtctcccgccgcgccggccaccagacgtcggccgagtcctggggtaccggccgcgccgagtctcgtatccaccgcgtccccggcgggcggacccaccgcgcccggccagggagcgtttggcaacatgtgccgcggcgggcgcatgttcgcgctcaccaagatctgtcgcaagtggcaccgtcgcgtttacatcaaaccttcgtcgcgttggccgtcgctacgcgctcggcgccaccgtcgtcccggccttg

SEQ ID NO: 86354 - DNA, 533 bp, Zea mays
  unsure (1)..(533): unsure at all n locations
agagtagctatgtcanactcggtaacctgtgtgatgccgtaccggtccggaattcccgggtcgacccacgcgtccgctcatctgcgtacacggtctccctctttctgtcagtaatagagtgagagtgaggcagcgagtaggagacaaggggaaatggggaagggagcgcaagggagcgatgcggcggcggcgggcggcgaggtggaggagaacatggcggcgtggctggttgccaagaacaccctcaagatcatgcccttcaagctcccgcccgtcggcccttatgatgtccgcgtgcgcatgaaagcagtggggatttgcggcagcgatgtgcactacctcagggagatgcgcatcgcgcacttcgtggtgaaggagccgatggtgatcgggcacgagtgcgcgggcgtggtcgaagaggtgggcgccggcgtgacgcacctgtccgtgggcgaccgcgtggcgctggagcccggcgtcagctgctggcgctggcggcactgcaagggctggtcgtacaaacctgtcgaagt

SEQ ID NO: 86355 - DNA, 526 bp, Zea mays
  unsure (1)..(526): unsure at all n locations
ggagagactgtgtcgacctaagtataccgtgagaactgtcgtaccggtccggaattcccgggtcgacccacgcgtccgagacgacttgtttcattgattcttgaagagatcgagcttcttttgcaccacaaggtcgaggatgtcttgcaactgcggatcaagctgcggctgcggctcaagctgcaagtgcggcaagaagtaccctgacctggaggagacgagcaccgccgcgcaggccaccgtcgtcctcggcgtggccccggagaagaaagccgcgcccgagttcgtcgaggccgcggcggagtccggcgaaggccgccacgcctgcagctgcggtagcagctgcaagtgcgacccctgcaactgctgatcacattgatcgacgaccatggatatgattattatctatctagcttgtggtggtggttgaacaataataagcgaggccgagctggctggcatacataggtattgtgtggtgtgtgagagagagagagaaacagagttctttaatttgctttttccn

SEQ ID NO: 86356 - DNA, 529 bp, Zea mays
  unsure (1)..(529): unsure at all n locations
ggttgaggagggattgtcgtactgagacttangctgtagcgatgccgtaccggtccggaattcccgggtcgacccacgcgtccgcggacgcgtgggcggacgcgtggggtgaacctgaaacttgcggtgtcactggctggtagcctgagtgtgagtgagtgatcgagctagctgagctccgatcctcgctagctaggataccgccataccacaagtcttcttcacaagtttaggagtgacagcaacaagagatcgatggcctctgccaccgtgctcaagtcctccttccttcccaagaagtccgaatggggcgccaccaggcaggccgccgcgcccaggccgcccaccgtctccatggtcgtccgcgcctccgcctacgccgatgagctcgtgaagaccgcgaaaacgatcgcgtcgccggggcggggcatcctggcgatggacgagtcgaacgcgacgtgcgggaaagcggtggcgttcaatcggctgggagacacgggaggcaaaccggaaggcgtaccgaaggttg

SEQ ID NO: 86357 - DNA, 529 bp, Zea mays
  unsure (1)..(529): unsure at all n locations
aggagaggctgtgtcngattctgatatcgtatgcatgacgtaccgcgttcggaattcccgggtcgacccacgcgtccggtcccggcgagcccgtcggagcggcggtagtggaaggtccggccgtactcgcgccggaccatggtgggcgtcgacagggtcaccgtgacgcggctggggtccccggatgacccggcggcgccgtgcgcggtggcgcacagcgtgccgggcgtgctgttcgcgctcggcgggctcacgggcaactactggcacgacttcagcgacgtgctgatgccgctgtacgccgcgtcgcggcggtacggcggggaggtcctgttcctggtcagcaacatgcagccgtggtggctgggcaagtacgaggccgtggtgcggcggctgttcaggtacgacgccgtggacctggaccgggacgcgcgggtgcgctgcttccgacgtcttaccgtgggcctgcgcctgcacaaggagcttcgcgttccgcccggagcttacgggtgtcggtaccggttgacct

SEQ ID NO: 86358 - DNA, 530 bp, Zea mays
  unsure (1)..(530): unsure at all n locations
gagttgaggagggnctcncatggaaggctgctagcgtaggcactgccgtaccggtccggaattcccgggtcgacccacgcgtccggggaggcagctcagcatacccgcctcggtcttctccgctgggacggtcatggactcgggcacggtcatcacgcggctgccgccgaccgcctactcggcgctgtcgtcggcgttcaaggccgggatgaagcagtacccgccggcgcagccgagcggcatcctcgacacctgctttgacttcagcggccagtccagcgtcagcataccgtccgtcgcgctagtcttctccgggggcgccgttgtcagcctcgacgccagcggcatcatcctcagcaactgcctcgccttcgcgggcaacagcgacgacagctccttgggcatcatcggcaacgtgcagcagcggacgttcgaggtgctgtacgacgttggccggggcgtcgtggggttcaaggctggggcgtgctgatcgatcgtgatcggtgccaggacctttgccattaccggcg

SEQ ID NO: 86359 - DNA, 530 bp, Zea mays
cgtagttagcgtgtgttccaccactggaagccgtgacgcctgtcgtaccggtccggaattcccgggtcgacccacgcgtccggcctcgcctcgcctcgcgtcgtctcacctcacctcacctcgccgactagggttttgtaccgccgtggatctcgccgtccccgccatggacgtctcgcacgcgggatcctccgtcgccggcgaggctccgaccaccggggagcaccggatggggactaccatcgtcggggtctgctacgagggcggcgtcgtcctgggcgccgattccaggaccagcactggaatgtatgtagccaaccgtgcttcagacaagattactcaactgacagacaatgtgtatgtctgtcgctctggatctgctgctgatacacaagtcatttcggattatgtacgctatttcctccaccaacacacaatccagcttggacaaccagctaccgttaaagttgcagccaacttgattaggttgctagcttatcagaacaagaacatgttgcaagcttgcatgg

SEQ ID NO: 86360 - DNA, 526 bp, Zea mays
aggagaggctgtgtctgtttcagtaatctgtaggcctgccgtaccggtccggaattcccgggtcgacccacgcgtccgctctcgcgcgccggctccacgcagatctaggagatatgcctcgctatgatgaccgctatggaggcacgcgcttgtatgttggcagattggccactcgtactcgttcccgcgatttagaacatctgtttggcagatatggaagaatacgagaagtggagttgaagcgtgactatgcatttattgagttcagtgatcatcgcgatgctgatgaggctcgataccagctagatggcagggatgttgatgggagtcgtattgttgttgagtttgctaaaggggtcccacgtggttcatgtggctcacgtgaatatattgggagaggcccttcaccaggttcaaggtcgtgttttaactgttgagttgttggtccttgggcatgatacttgaaagctggtgactggtaaatctaatgttaccgttttggaaaaggggccttttttaaagaatg

SEQ ID NO: 86361 - DNA, 527 bp, Zea mays
  unsure (1)..(527): unsure at all n locations
agtaggagctgtgtgcgatacctgaagcctangncgtgacgtaccggtcggattcccgggtcgacccacgcgtccgctagctctatagctcgagtattgcttgctctccacaagaaacaaagcagagcaccaacaatggccgccgcctcctcgtcctcggtcctcctgctgctcctggccgccgccttggctggcatgagcgccaacgccgccaccttcaccatcaccaacaactgcgggttcaccgtgtggcccgcggccaccccggtgggcgggggcacgcagctgaacccgggcgggacgtggaccgtcaacgtgccggccggcaccagctccggccgcgtgtggggccgcaccggctgcttcttcaacggcaacagcgggagctgtcagacgggcgactgttgcagttccctggcctgcacgctgtctgggcaatccgcgatgacgcttgtcgagtttaccattggtggtagtcaagtatttttacacatttttggcattatagggtataaactctaggaggg

SEQ ID NO: 86362 - DNA, 535 bp, Zea mays
  unsure (1)..(535): unsure at all n locations
gagtaagctagtgtcgtgctcctgagnntcatgcangcagtcgcgactgctgtaccggtccggaattcccgggtcgacccacgcgtccgcggacgcgtgggtggatgttctacgcaaaaatgctagtgttgcattgccagttattctaactaggctcaaacagaagcaggaggagtggtcaaggtgtcgatcagatttcaacaaagtttgggccgaaatatatgccaaaaattatcacaagtcacttgaccatcgtagtttctatttcaagcagcaagatacgaagaacctgagcacaaagtctctcctgacagagataaaagaaattaatgagaagaaaaggaaggaagatgatgtgctccttgccattgctgctggaaataggcggcctatagttcccaatatgtcattcgagtatatagactcggaaatccatgaagatctacataaaatcattaagtactcctgtgctgaagtctgcaactcttcagatcaattagattaagtgatgagagtatggacaactttactggag

SEQ ID NO: 86363 - DNA, 523 bp, Zea mays
  unsure (1)..(523): unsure at all n locations
gggtgagagggctgtgtacgagcctacngacttagctactgccgtaccggtccggaattcccgggtcgacccacgcgtccgaatttgcagaccttatcctttttacagctaggtttagaaggttatgctagacctttaggtgatcgaatagatgttcacaatagattcagacttcgtctctatcgcccatcaactgttaccacggaatacagagaacatgtgaaagatctttcttgcgtgtcaaaagatttcggcaggattgtcattgtcgacaacaatccgttcagtttcattcttcagcctttgaatggaataccttgtgttccattttcagctggacaacattctgatgaccagctcatgatggttatatttccactcctgaagcatctttctctccagaaagatgtcagacctgtattgcatgaaaggtttcatatgccagaatggttccaaaagcatgggatcccccaaactaattaatctgtgtaaggtttgctggccctgttttgatgaaggctgg

SEQ ID NO: 86364 - DNA, 529 bp, Zea mays
  unsure (1)..(529): unsure at all n locations
gtggagagggctcgtcgtctgcgaacccgcttgagccactgccgtaccggttcggaattcccgggtcgacccacgcgtccggcgccgcgacgtccctcgccttcgccttcgaatccgagactccgatctcgggttcaccgcagcgcacagagcagccccgactcccggcccgatccgcgctctcctctccgtcgcttcagtcatggcaggaatggcacctgagggttctcagttcgatgctaagcactatgattctaagatgcaggagctgctgagcaccggtgagactgaggagttcttcacttcatatgatgaagtttttgagagttttgatgatatgggcctccaagagaatcttctgagaggcatttatgcttatggttttgagaagccatctgcaattcatcagagaggaattgttcccttctgcaagggtcttgatgtcattcagcaagcacaagtctggtacaggaaagacagctaccttctggtatgggatcttgcagcagctggacctttggctgggtgn

SEQ ID NO: 86365 - DNA, 509 bp, Zea mays
  unsure (1)..(509): unsure at all n locations
agtgtagcggtgtcngattcgtcnatcgagncgtncnacccgtcggattcccggtcgaccacgcgtccggtgccgcgtcgttcgccttcggcgatgcccgttgacgatgcgcagaggcggcggagcgatgcagcggggggccgggagcccgtggtacggaccggaccgcttgctgacctggggccagtgtgcggaaagcgatcgagctacctgacgggcgagttactggtcgactactgctgggacaccggggggttgtgtttggagcctgagacgggtgacaagaaccgtgagctgtaggtgatacaagtccgctgggccatgctgtgtgcgctcggatggtatttgctgagctgattatacatggcggtgttaagtttgtagaggacgtgtgggctatgggcgtattccggatttttatcgagggttgtcaggtattcgttgggatctcaatttttgggctcacactagttatgctttgtatctgggcttatatgtgtgtgttatat

SEQ ID NO: 86366 - DNA, 518 bp, Zea mays
  unsure (1)..(518): unsure at all n locations
aggtaggctgtgtcgattctatgtatcgagncgtncgtacggcgtcggaattcccgggtcgacccacgcgtccgcagattttggtggggaggttgagcgtgttctgatcatggtggaaggagttcttctaggggttgattctgtagaggggcctatgccacagacaaggtttgttctgaagaaagctctagaatttggacatgctgttgttgtagttgtaaacaagatcgacagacctactgctcgtcctgagtttgtggtgaattcaacatttgaactatttattgaattaaatgcaactgatgaacagtgtgatttccaaacagtctatgcaagtggaattaaaggaaaggccagtctatcttctgacaatttagctgatgacctaggacccctttttgaggcaattcttagatgcataccagagccacgccttgagaaagatggtgccctgctaatgcttgtatctaatactgaatatgatgagcccaaaggataattgcaattggacgggtgcg

SEQ ID NO: 86367 - DNA, 541 bp, Zea mays
  unsure (1)..(541): unsure at all n locations
gatgtgaggctagtagtcgtgctaccgcatgtcattgaagctgtcagnactgcctgtaccggttcggaattcccgggtcgacccacgcgtccgaaaaatatccccaaaccctagctcccgatctcgatggcgaaccctcgcgtcgtcttcgacatgaccgtcggcggcgccccggcgggccggatcgtgatggagctgtacgccaacgaggtgcccaagaccgcggagaacttccgcgcgctgtgcacgggcgagaagggcgtgggcaagtccgggaagccgctccactacaagggctccaccttccaccgcgtcattcccgagttcatgtgccagggcggcgacttcacccgcggcaacggcaccggcggcgagtccatctacggcgagaagttccccgacgagaagttcgtgcgcaagcacaccgaccccggtgtgctctccatggccaacgccgggcccaacaccaacggcttccaattcttttatctgcaccgtcgcgaaccccttggttttatcgcaagctcagtgagttttgggc

SEQ ID NO: 86368 - DNA, 520 bp, Zea mays
ggagtgctgtgtcgtctctgatatcgcgacacgtcgtaccggttcggaattcccgggcggagaagctcgtgacgatcggaggccatgtgctgcgcgaaggtgagtggctgtcgctgaatgggtcgactggtgaggtgatccttggaaagcagccgctttccccaccagcccttagtggcgatctgggaactttcatggcctgggtggatgatgttagaaagctcaaggtcctggctaacgccgatacccctgatgatgcattgactgcgcgaaacaatggggcacaaggaattggattatgccggacagagcacatgttctttgcttcagacgagaggattaaagctggcatgcagatgattatggctcccacgcttgagctgaggcagcaggcgctcgaccggctcttgccgtatcagaagtctgacttcgaaggcattttacgcgctatggatggactcccggtgaccatctcactcctggacccttcccttcacgagttcctttccaaatggaacct

SEQ ID NO: 86369 - DNA, 530 bp, Zea mays
  unsure (1)..(530): unsure at all n locations
gggagtagactcgtgttctgccgactgaagtacatgatactgtcgtaccggctcggaattcccgggtcgacccacgcgtncgcatgcacctgctccatagtatcagccttcttctactgcctctgcttcaccaatgaatggaaccagagtttcagttggtggtggagacaacaacgttggttacaaaagccaagaccttttgaacactatggttggccaagggtttctggttaggcaaagacgcggttggcaaggccaaagcattcgatgagaaacatggcttcacattcacagccggtgctacagtggcctcaattgacaagaagattgggctgactgataagatcacgacaggcactttcttggttagcgggaaggtgaaagagatggaccagaagttccaggtcttcgacaagaccaagtctgcactcgctgccgccgagcagaaagtgagcagtgccgggtctgccatcatgaagaacaggtacgtcttcaccggcgcgtcatgggtcaccaacgcgttaaaaaag

SEQ ID NO: 86370 - DNA, 533 bp, Zea mays
  unsure (1)..(533): unsure at all n locations
ggcgtagagggctcggtggttggtaactgnanccctcngctcatgccgtaccggtttcggaattcccgggtcgacccacgcgtccgggacggcatgaagattgctcatgaggagatatttgggcctgtgcagtcgatcctcaagttcaaagacctcaatgaggttatcaagagggcaaacgcgagccagtatggattggccgccggcgtgttcaccaacagcctggacacggccaacaccctgacgcgcgcgctcagggccgggaccgtctgggtgaactgcttcgacgtcttcgatgctgcgattccgtttggcgggtacaagatgagcggcatggggagggagaagggcgttgacagcctgaagaactacctgcaggtgaaggcggtcgtcaccccaatcaagaacgccgcgtggttgtagacgctgcaagtgtggccttgtgcacgagaaccacgtatattcatttcctgggcacattcccgaacaatgtgaagcgtttatcagattgatgacgatgaaagaagaaccac

SEQ ID NO: 86371 - DNA, 531 bp, Zea mays
tgtgtaggagggctcgtctcctgagactgcagcgtagcactgccgtaccgtctcggaattcccgggtcgactcaccgtccgcattgagaatgccaatgtcatcatggcaacatatgaagataagctccttggtgatgtccaagtatacccagagaaggggacagttgctttttctgctggtctgcacggatgggccttcaccctcactaacttcgcaaagatgtatgcatctaagtttggagttgatgaaactaagatgatggagaggctatggggtgagaacttctttgaccctgccacaaagaagtggaccaccaagaacacaggttctcctacctgcaagagaggatttgttcagttctgctatgagccaatcaagcaaatcatcaagacctgcatgaatgaccagaaggagaaattgtggcccatgctgcaaaagctcaatgttaccatgaaggctgatgagaaggagttgattggcaaaacttttatgaagccggttatgcatacgtggctttccatgtaccactt

SEQ ID NO: 86372 - DNA, 525 bp, Zea mays
agggagggctgtgtctcccgactcagacttgtcacgtcgtaccggttcggaattcccggggaagaaacctcatggaaccttctgataataatacttccaatgatgctgctgcttccagtagtgcaactgcttctcggacaatcacagtggacgattctttgccatcaacctccctccaaatcaggttcgcagatggcagtcgcttggttgcccgtttcaacacaagccacaggattagtgacgtgcgggcatttatcgacgcgacaaggccaggagccagtgattacacgctgcaggccgggttccccccaaagccgcttgaagacacggccaagaccatcgaggaagccggcgtggccaactcggtaatcattcagtcagtctagcttggcagaacaggtgccgcaaccctattccatggaacacgctaggcatctgaagctaccaccttccttgatcttccttcattttgtttctcaaacctggcttttaaccttttatcttcatccagtagctacttttggg

SEQ ID NO: 86373 - DNA, 551 bp, Zea mays
  unsure (1)..(551): unsure at all n locations
ggcagggtgctcgtgtcgtgcctcagtggactacntgtatccatcgtaacggcctcgccggttcggacttaccgacgcgacccacgcgttcgggcctcgctaacgcgcccttgctagctccagcggtggcacccacgcacacggttatgggccactagtccggaccccggaggagccaagccatggcgtccacctcctgctgcctcctccaccagtcaaccgcccgcctcggcgcgtcgccgcgcctggccgacgccccgccgcgcagcgcccagctgctcgtctgcaaggcccggaagcatgaagccgtcgcggaccatatcgacgtttcgcgccgctccgcgctcgctctcctcgccggtgtatctgccggtgccgactccaatatggattctgccgaggcgtcattctgttaattcaaacgactgttatatcatgatccaagtcgatcactgctggtacatcgtggatcagttgtcctcgggcttcaattctggtggaacctgagtcagatgttacttatacgaggatcgtgctaattattccgttcc

SEQ ID NO: 86374 - DNA, 527 bp, Zea mays
  unsure (1)..(527): unsure at all n locations
agggagtgcgtatggagtcagtgaccgnatgcgtagcgactgcagtaccgtccggattcccggtcgacccacgcgtccgcgtggccatggcgtcgtccatgctctttgctaccaccgtgccactccagcaggggggcggcctgtccgagttctacgggctcatgagctccgcgtcgctacgtatgcgccagaatgccagttttgacgacttgatgttctacgttgcattatgacctactcggatagttcgattttttcgcatacttcaactcgacttatttctctggttggatacatctactgatttctttacttatccagttatgttacgacgttttttacttttgtcttttttactgtgtttattttatatgttttttattcgttgtagttattttgtttagtttgttttatcttttattactagtgtttattaacatttttgatttctttcatagtgttattcttatatttttcttgattttatattaatgttatttttttatattttctatgattttatatgg

SEQ ID NO: 86375 - DNA, 535 bp, Zea mays
  unsure (1)..(535): unsure at all n locations
tgtagtaggaggggttcntcgcatagatgacttcanccctcagtactgccgtaccggttcggaattcccgggtcgacccacgcgtccgggaaggcttgctgatggctcattggtatcagtgaaaagactaaaagaggagcgtacacctggtggtgagcttcagttccaaacagaggttgagatgattagcatggcggtgcacaagaaccttcttcgacttcgtggtttctgcatgacacctactgaaaggttgttagtctacccatacatggctaacgggagtgtggcatcacgtttacgagagcggcagccatctgagccacctcttagctgggaaccaagaagacggattgcactgggatctgcaagaggactttcttacttgcatgatcactgcgatcccaaaatcatccatcgggatgtcaaagctgcaaatattcttttggatgaagacttcgaggcagttgtgggtgatttcgggcttgccaagcttatgggctacaaagatacccatggtacaacagctggtcgtgga

SEQ ID NO: 86376 - DNA, 535 bp, Zea mays
  unsure (1)..(535): unsure at all n locations
agggagtgctggtttcggattctgctattcgcacgctatngcgactgcggtaccggttcggaattcccgggtcgacccacgcgtccgggcacgttcatcgggtacgtgtgccgtgtccaccgacgaggagacggcgcggctcggccgccgggacatcgccgtggcgtggcgcggcaccatcacccgcctcgagtgggtggccgatctgacggccaaccagatccccctgcgcgagacgggcgtcccctgcccggaccccgacgtgaaggtggagcgagggttcgcggcgctgtacacggacaagggcaccagctgccgcttctgccggtactcggcgcgggagcaggtgctggccgaggtgcgcaagctggtggatctgtaccacgggcggtgcgagcaggtgagcgtgacggtcacgggccacagcctgggcagcgcgctggcgatgctgtgcgccttcgacgtcgcggatacgcgcgcgaacgtgtcgcctggcgacaggttggcgcctgtgtgcgtggtcttctttgccggc

SEQ ID NO: 86377 - DNA, 524 bp, Zea mays
  unsure (1)..(524): unsure at all n locations
agggaggctgtgtcgatacttgatcgatgncntgacgtaccgcttcggaattcccgggtcgacccacgcgtccgctctgactaagactatagaatgttcctgcgtggcatagggacctgtgcagggtctgtgaaaacatccccattgtcctctgcggtaataaggttgatgtgaagaacaggcaggtcaaagccaagcaggttactttccacaggaagaagaatctgcagtactatgaaatttctgccaagagcaactacaactttgagaaacctttcctgtaccttgcaaggaagctggctggtgatccgaaccttcactttgttgaagctgttgctcttaagcctccggaagttaccatcgacatggctatgcagcagcagcatgaagctgagcttgctgcatcagctgcacaacctcttcctgatgacgatgatgatctgattgaatagaaaggatcatgagtcttggactggaacagaattgtgccttgcacgatttaaatttggtctagggtgggcctt

SEQ ID NO: 86378 - DNA, 531 bp, Zea mays
  unsure (1)..(531): unsure at all n locations
aggtgaggagggattcntgttcagtagacttantcttntgtactgccgtaccggttcggaattcccgggtcgacccacgcgtccgaggcagcacactcagctatccagcaaatgagatcgagaggcaggagtcatggccaccgtcagcgccgccgtggtgaccaccatcgttgcccgcgccgcgatcgccaggcccaatgctctagggctgcctgcgctgagggcgaggagcgagagggtgcggtgcagctacgccaaggacgcggccccagtcagcaccaagggcgcaggcgcgtcgctgctcgccgcagcgggcgcggtgaccgcgtcggcggggcccgcgctggcgctcgtggacgagcgcatgtccacggagggcaccgggctgagcctcgggctcagcaacaacctgctggggtggatcctcctgggggtcttcggcctcatctggtccctctacaccatctacacctctgacctcgacgaggacgaggagtccggtggccttttgctttaaattcaccttctttt

SEQ ID NO: 86379 - DNA, 531 bp, Zea mays
aggggaggctcatgtcagattctggtattcgactgcactgccgtaccggttcggaattcccgggtcgacccacgcgtccggccagtgagtgaacaccagccgtcttggcccgcttctcccctgctgcggccatggcgacctccgcggcgctctcgaccgccgccaaccccacccagctctgccggtcccgcgctgcgctgggcaagccagtgaaggggcttggcctggggatggggcgggagcgcgcaagccagcggagcatcacgtgccaggcggcgagcagcatccccgccgaccgcgtacccgacatggagaagcggaagctgatgaaccttctcctcctgggcgccatatcgctgcccaccgtcggcatggtcgtcccctacggcgccttcttcggccccgccggcttcgggaacggcggcggcgggacctacgccaaggacaagctgggcaaacacatcacgggggaagaatggctcaacacgcacggtcccaacgaccggacggctgtcgcaggggcttaaaggg

SEQ ID NO: 86380 - DNA, 525 bp, Zea mays
  unsure (1)..(525): unsure at all n locations
ggtggggcgggtcgagactgagacgtangcaatacgaacccgttcggaattcccgggtcgacccacgcgtccggtccgtccatgccgtggcgaccatggttcaacaaccaggtaccgggccttcgacgagcaccggggcatggaggtggcgtggaaccaggtgcagctgcacgacttcctgcgcggcccggcggagctggagcgcctctacggcgagatccacctgctcaagtccctccgccaccgcgccgtcatgcggctccacgcgtcctgggccgacgccgccgcgccccgcctcgccgtcaacttcgtcaccgagctcttcacctccggcacgctgcgccagtaccgcctccggcacccgcgggccggcgccgtcgcggtccggcactggtgccggcagatcctcgacgggctcgcctacctacacgcgcgcggcgtcatccaccgggacctcaagtgcgacaacatttttgtcaaccggagccagggccaagtcaagaatcggggacttcggcctcgccc

SEQ ID NO: 86381 - DNA, 529 bp, Zea mays
ggaggagcgctgtgtctgcgctgcagggctgcagtctgctgcactgtcgtaccggttcggaattcccgggtcgacccacgcgtccgcccaaagccggaaggggcgccatggcctcgtcggatctggagagcaaggccaaggaggccttcgtcgacgacgacttcgagctggccaccgagctctacagccaggccatcgacgccgggcccgccaccgtcgacctctatgccgaccgcgcccaggcgcacatcaagctcggcaactacactgaggctgtggcggatgctaacaaagcaattgagcttgatcctatgatgcataaagcttactaccggaaaggtgctgcatgcattaagcttgaagaataccaaactgcaaaggctgctcttgagttgggttcttcttatgcatcaagcgattcaaggtttgctcgtctattgaaggaatgtgatgagcgcatcgctgaggaatctagccaggcaccagtaaagaatgttgaagctactgtggctgctactattgaggacag

SEQ ID NO: 86382 - DNA, 525 bp, Zea mays
  unsure (1)..(525): unsure at all n locations
aggggtgctgtctcagcctactcagtctntgtacgacgtaccgtctcggattcccggtcgacccacgcgtccggttcggagcgcacacacacacaaccagatctcccccaaatccacccgtcggcacctccgcttcaagatgcagatctttgtgaaaaccctgactggcaagactatcaccctcgaggtggagtcgtctgacaccattgacaacgttaaggccaagatccaggacaaggagggcatccccccagaccagcagcggctcatctttgctggcaaacagcttgaggacgggcgcacgcttgctgactacaacatccagaaggagagcaccctccaccttgtgctccgtctcaggggaggcatgcagatctttgtgaaaaccctgaccggcaagactatcaccctcgaggtggagtcctctgacaccattgacaacgtcaaggccaagatccaggacaaggagggcattccttcagaccagcagcggctcatctttgctggggagcaacttgaagaccg

SEQ ID NO: 86383 - DNA, 531 bp, Zea mays
  unsure (1)..(531): unsure at all n locations
aggggaggtgggtcgtcgacagtgaactggccctcagcactgccgtaccgntccgnaattcccgggtcgacccacgcgtccgaacaagggcctcctgtctgctctcacttcctcagtcctcgtccgtctctgctccgatgcctcctctctctacctagctagctagccagccttcctgtagcgcggcagatatggctgcctccaccacggcggcggcggcggcgtcgctgctgctgctgctgctcgtgtcgctcgccgcggcggcggacatgtcgatcgtgtcctacggggagcgcagcgacgaggaggcgcggcggatgtacgcggagtggatggcggcgcacggccggacctacaacgccgtcggcgaggaggagcggcggtaccaggtgttccgggacaacctacgctacatcgacgcgcacaacgccgtcggcgacgcgggcgtccactccttccgactcggccttaaccgctttgtcgaccttaccaacgacgagtacccagccaactaacttggcggcaaggact

SEQ ID NO: 86384 - DNA, 529 bp, Zea mays
ggttgagggggactgtgttctgagaatgaagccttagcactgccgtaccggttcggattcccgggtcgacccacgcgtccgcttttttttttttttttggagcgaaagtattaacaaacattggtacccaagattgttcgctttcacaacgttacaacatatatatcatatatgcatggacaggtacaatgcctctccagcagcaccagcaacaagggtggttagcagcagggactataaacaacagagtaccatccgcgttgatagatctttattactgcaaaattgatccccgcagcactaccggtagttgcggtagacgggagtgtacatgcagttctctgcatatttcaccaggtcgctggggggaggcagacgggtcgccagaccgagctcgtaggcttttgcagccacggctgcagcgatgtgcgcagagatctttatgatgctggtgaagggtgggaagatggaacccttctcgaagttgtcctgggtggcctgatcaactagcgcttttgaggctgagata

SEQ ID NO: 86385 - DNA, 532 bp, Zea mays
  unsure (1)..(532): unsure at all n locations
agtttaggctgntgtcngatgatgcaggcctgaaggcactgacgtaccggtccggaattcccgggtcgacccacgcgtccgggtcatggcaatagtggaggaattcatgtcgttacagaatagcgacagtggcaaggagaaatttcaagatgatgaagagatcgtggagactgagaacgtggcatcggtttccagcacgtcaaagctggcagttgcaaagctgatcgatggatatcttgctgaggttgccaaggatcccaaccttcctcttccgaagctgaccgcgcttgctgaaatggtgtcttccctaccccggccaacgcatgacggcctctaccgtgccattgacatgtatctgaaggagcaccccagcctgtcgaagagcgagaagaagaaactatgcgggctgatggactgcaagcagctgtcgcaggatgcgtgtatgcacgccgtgcagaacgagcgtctccccttgcgtgtggtcgtgcaagttctctttttcgagcaggtccgggcgtctgtcgcctttgca

SEQ ID NO: 86386 - DNA, 523 bp, Zea mays
agttagtgcggggtcatatactgtagctgaggcatggcgaacccgttcggaatcccgggtcgactcacgcgtccggaattttctgcagattggggagaagattgcatctggatcttccggggacttgcatcgaggaacttatcaaggtatggatgttgcagtaaagttcctcagaaccgaacatgttaatgactcgtcaaaggtggagtttttacaagaaataattattctaaagagtgttaatcatgataatgttgttcgattctacggggcatgcacaaagcagagaaaatatgtcatcgtgacagagtatatgcctggaggcaatctgtatgattttcttcacacgctaaaaaatactttggatctcccaacggttctcaggattgctatcggcatctccaaggggatggattatttgcaccaaaataacatcatccatcgggacttgaagactgccaatttgcttatgggctctgattatgttgtgaaattgcagactttggagtctaaggaatccatt

SEQ ID NO: 86387 - DNA, 528 bp, Zea mays
  unsure (1)..(528): unsure at all n locations
agaggagctgtgtcgtaggatggtaacgtagncactncgaactgcttcggaattcccgggtcgacccacgcgtccgcatgatgtcgccatggattactatggctagcgcctagctacatcctcctctgataatacaatagagatcattggcgtaagtggaacctcacaccagcagcttgcaactttgagtggacaccagggcccagtatggcaagtcgcatgggctcattccaagtttggttccatgcttgcatcctgcagctacgacggccgagtgatcatctggaaggaaggaagcaagcctgatgaatgggcactggtacacacctttgctgagcacaaattctccgtgaattccatcgtgtgggcgcctcatgagctgggtctatgcttggcttgtggttcatcagatgggaacatttcaggcttcactgatcgttctgatggaggttgggataccacgcgtattgatcaggcgcattccgatggtgggaccctcaattttgggcttcctgcaatggccccgag

SEQ ID NO: 86388 - DNA, 544 bp, Zea mays
  unsure (1)..(544): unsure at all n locations
gtaagaggctgtgtcgnattactgagtcagtagtcatacgtaccgctctcggaattcccgggtcgacccacgcgtccgaaagcattaccataggctcattcatcgaaacgcaaatcagagagacaggaaaagaataaagaattttgatcaaatcaatagaaggaaggatcccttacctgatttgaatttcatgctcctttaaataggatatgctctaagtcttcccatactttcctataatgactgcaacgattttctccattttgcgaattcctattttatgtgaagtatattactatcatatacatgatctaaatcgatccactttaaataaaatagaaaaaatcgaaagaatcaaaataagaaagagtaaataatagcacaaggtattctgcttcataattctgaaatagagttcttgttttagtattacttctcattaagatgtatatattaatcatcctattttaatatatattaatcatcctatttttattaggttctaattcaattagtagttaagtatattctgttttaattaaaa

SEQ ID NO: 86389 - DNA, 529 bp, Zea mays
  unsure (1)..(529): unsure at all n locations
agagatgagggggttctgccactgatgccatgcacacnctcgtccggcccggaattcccgggtcgacccacgcgtccgcgctcgtctcttgcgcccgccgcctcccgtccttaccctctccgctcaccctctcgaggccccgcgccggcgccgtctcatttctggctgcccaaccgtcgccggcgacggcaccgagatccggcaggaatcttgctctcttctgttctttatcaccgacgtcgccatcgctaactgaggccgccgtagcactgccgccaccgaaggctgcggtggaagagacgaagccccctgtgccgaccggggacgagaagggggaaccgaccgtggaggagctagcgggcctgctggacgtccgggtgggccgagtggtgaaggcgtggaggcacccggaggcggacaccctctacgttgaagaagtggacgtaagtgaagcggagccccggaccatctgcagcggcctcgtcaactttcttcccatcgaagagctncaggacagaaacctttttgg

SEQ ID NO: 86390 - DNA, 527 bp, Zea mays
  unsure (1)..(527): unsure at all n locations
ggggaagtctagtgtctcgncttgaaaggctggaggtcgtgcgacgccgtaccggtccggaattcccgggtcgacccacgcgtccggatcgcgagcgcacgcacgtaagcacgttgtcggaagctcaagttagaagaagcaccagtgcctgatcgatggcggcccaggctctcctctccggccggcagctgctgggccgccccgtgcagtcggccgtctctaggtcgtcggcgaggaaggcgcccttcgtcgtcagggccagctccagccctccagccaagcaaggtgccgacaggcagctgtggttcgcgtccaagcagtccctctcctacctcgatggcacgctgcccggcgactatggcttcgacccgctgggcctctcggacccggagggcaccgggggcttcatcgagcccaagtggctggcctacggcgaggtgatcaacggccgctacgccatgctgggcgcggtgggcgccatcgccccggagatcttcggcaagatgggcattatcccgccggaaacc

SEQ ID NO: 86391 - DNA, 540 bp, Zea mays
  unsure (1)..(540): unsure at all n locations
aggtagggtgtaattaanaattggatgctggatgctgtacgcacgccgtaccggtccggaattcccgggtcgacccacgcgtccgcgactacttctggttccagagccaggactagttcttccggaagcgcgcggcggcacaccgtagcaccgtgttccgcaccaacatcccgcccaccttccccttcttcgtgggcgtggacccgcgcgtggtcgccatcgtggacgcctgcgccttcaccgcgctcttcgacccggacctcgtggacaagcgcgacatcctcatcgggccctataacccgggcgccggctttaccggcgggacgcgcgtcggcgtgtacctcgacacgcaggaggaggagcacgcgcgcgtcaagaccttcggcatggaccttcttcaccggtccggccgcacctggttcggcgacttccgcgcgagcgtcggcgccatgctggacgcctgggacgcggagtttcgcaaggacgacggcagcgacatgaagcgctccgtcaggttcctcgtccgtctggagcagtgag

SEQ ID NO: 86392 - DNA, 542 bp, Zea mays
gttttgggagtatctgtgtctgacactgaagctgtagcgatgccgtaccggtctcggaattcccgggtcgacccacgcgtccgagagaaggatgggcttcgagaagcagatcctgagatccggcaccggccccaagccgataaagggccagaaggtcaccgttcactgcaccggctacggtaaggatcgtgatctgtccaagaaattttggagcaccaaggaccctgggcagcagccattcagtttcagcattggtcagggttcagtgatcaaaggatgggacgagggagttatgaccatgcaagtgggtgaagttgctcgtatccagtgcacgcctgattatgcttatggagccagcgggttcccagcctggggaattcaaccaaactcagtgcttgtgttcgagattgaagtcctcagtgcccagtaattcggatctgtcagctatggaaacgttggccatgcttctcaagtaatgaaataattccgttgtcacctcatgcttcatacatcagattggtgttacgagttaaatcctgtgg

SEQ ID NO: 86393 - DNA, 532 bp, Zea mays
  unsure (1)..(532): unsure at all n locations
agttgagaggtagggtcgtcgcactgatgcatcgatgctgtacgcactgccgtaccggtccggaattcccgggtcgacccacgcgtccgctctcgtggagacgactgggccgccgtcgttgctgccctacgcggctacacccacgtcttcttcgggcccttagccgcgacgagcgccaccagggagtagaagaggttaaccttctggttggaaacgatgtacttcgaaggctatggcttccgtggaagtactttcgagcagacatatcgctgctatcctgcgtctttcatcgacaagccacaacttgaggccggtgacaaaattataatgccaccatcagctcttgatcgtcttgcatctctgcatattgaataccctatgctatttgaagtccacaatgcagcagcagaacggacttcgcattgtggtgttctggagttcattgcagaagaaggcatgatctacatgccatattggatgatgcaaaatcttcttttgcaagagggagatatggtgttcataaaaaatgccn

SEQ ID NO: 86394 - DNA, 541 bp, Zea mays
agggtagggactgtgtcagtttctgcagtacgtagtcatccgtaccgcttcggaattcccgggtcgacccacgcgtccggccattcatgacagaaggttcttgtttacacttaatgaagatctcataccaagacggttgtgatgagccggtcattggctacattctaaaggaaactcttaaggctctggaataccttgaccggcagggtcaaatacatcatgatgttaaggctggtaatatccttattgatggtgctgaggtagtgaagcttggagactagggtgattgtgcgtggatgtttgatagaggtgacaggcatagatctaggaatacattaagtggaacaccatagtggatggcttcagaggagctgcaacctggcactgggtattactttaaagctgacatatggtcatttgggatcactggttttgaacctgcacattggcatgactcatttacagaatacccccctatgaaagttcttctcatgacactatagaatgcaccacctggtcgtggtgatgacgtgacatataa

SEQ ID NO: 86395 - DNA, 545 bp, Zea mays
  unsure (1)..(545): unsure at all n locations
cgttatggggggtaatccgtagtcagactacagtatgcgtngcgactgcggtaccggtccggaattcccgggtcgacccacgcgtccgggcatcgggtcgtaccgcgagtggtcctaggacaagaggcatgagtggctgctgtcggagctgcgaggcaagcgcccgctgctgcccccggacctttcccagaccgactagatcgccgacgtcatcggcgcgttccacgtcctttctgagctcccgcccgacagcttctgcccctacatcatctccatggcgacggtcccctcggacgtactcgccgtagagcttcctgcagcgcgagtgcggcgtgcgccagtcgttgcccgtggtagccgttgtcgagaggctggcctacctgcagtctgtgcccgcgtccgtggatcgcctattctcggtggactggtacatggaccggatcaagggcaagcagcaggtcatggtctggtactgcgacttctgcaaggacgccaggcgtctgttcagatgtggctgcttttcaggtcgcatgatgagatggctg

SEQ ID NO: 86396 - DNA, 542 bp, Zea mays
  unsure (1)..(542): unsure at all n locations
tgttaggaggggccgtgtcagattctgactctgtgtcatncgtaccgcttcggaattcccgggtcgacccacgcgtccggccgcccaagtcctctggccccaagaagcggggcaagacggagatccaggagacgctggtcacgcccctgttgtacaccagggacttcgacgagatggagcgcctgttggacggcgagatcaacaagcagctcaaccaggcggagttctacgccctgctacaggagttcaggacagactacaaccagacccactgtgtgcgcaaccccgagttcaaggccgtcggcgacaggatggagagcccgctccggcagatctttgtatagttcctggagcgctgctgcaccggcgagttctgcggctaggtgctctacggggaggctcggcggaggctcaagaaagccaacctcggtctggcggagatgcttttggtcatggtaaggggacgagcgcgccatgctgggtgtctggaccaaggggctgtgctgcgtgaaatgggggctggacctggtgttttcgaccaa

SEQ ID NO: 86397 - DNA, 536 bp, Zea mays
aggagtgagggtagtgtcgtgcctacagtaggtccctcaggccgtcgcgcactgccgtaccggtccggaattcccgggtcgacccacgcgtccgggcggcgtcagcaggcggaggcgcggtgcgcgcgctgtcccagaaggagcaggacatacagatgatgctcgcggccgacgtccacctcggcaccaagaactgcgatttccagatggagcggtatgtctttaagcgtcgcaccgacggcatctacatcatcaacctgggcaagacatgggataagctccagctcgcggcgagggttattgttgccattgagaacccgcaagacatcatcgtccagtcggcccggccctacggtcagcgtgctgtcctcaagttcgcgcagtacactggcgcccatgccatcgctgggaggcacacccctggtaccttcaccaatcagcttcagacctctttcagcgagcctcggctgctcatccttactgacccaaagactgaccatcagccaatcaaggagtctgctcttgggaacattcct

SEQ ID NO: 86398 - DNA, 530 bp, Zea mays
agggggtagcgtgtgtttcgccgctggagccattgccacgtcgtaccggttcggaattcccgggtcgacccacgcgtccgaagagatgtatgcttgctggccagaatgatggctgcaaacttgtacatcgatcagattgaagagctgatgtttgagctctctatgtggcgctgcaacgatgagcttcgtgttcgtgccgaagagctccacagttcgtctggttccaaagttaccaagtattacatagaattctggaagcaaattcctccaaacgagccctaccgggtgatactaggccatgtaagggacaagctgtacaacacacgcgagcgtgctcgccatctgctggcttctggagtttctgaaatttcagcggaatcgtcatttaccagtatcgaagagttccttgagccacttgagctgtgctacaaatcactgtgtgactgcggcgacaaggccatctcggacgggagcctcctggacctactgcgccaggtgttcacgttcgggcttttccttgtgaaactggg

SEQ ID NO: 86399 - DNA, 564 bp, Zea mays
  unsure (1)..(564): unsure at all n locations
tgtacttgaggtcgggtgcgttgtacagaantcatgctagtacngttacgtaccgcttcggaattctccgggtcgacccacgcgtccgggaggagcagccatgtcttcatcggtgttcgccgtggcgagcacatttctgtgcactcgtctggcggtcccagctccacagaacgtgcgcgtcgtggccctggtcggtgtcgtgttgttcggtgtggctaagcctgcttgtaataaggttgcttttacatgtatctcctttgactggtctgtgtggttccccggtgccgtatcgctccgactaccttgacggctctctgtgctgcgactactttttgatatttgttcggttgttgtaattcctttaagtaccttgcattttgagttttgactgtctagtttggtgacctgtttaataatgaggacttgttatgttattggctcctgtttttgagttttctatattcaatgtctccattgggtttcacctacattgaggttgtgtggctttcaacaggttttgtttgattcgatgttttgatactggtctttggatttagtgttttt

SEQ ID NO: 86400 - DNA, 543 bp, Zea mays
  unsure (1)..(543): unsure at all n locations
aggttgagggggtgttcgattgctgaaagctgcacgtcntccgtaccgctctcggaattcccgggtcgacccacgcgtccggactttcttcacaagcaaaataacttcttggacctccataaaattctaagatttgctatcgatatctcaaaaggaatggattatctgcaccagaataacattatacacagagatttgaagtctgcaaatcttgtgctaggccatgaccaagttgttaagatcgcagactttggtgtggcgcgacatggaagtcagcaggggcagatgactgctgaaactggaacctaccgatggatggcaccagagataattaatcataagccgtatgaccacaaagcggatgtattcaggtttgccattggtctttgggagctggcaacttcaatggtcccatatgacaacatgacacccttgcaaggctgcattagggagtaaacagggattgggcttggacatttcgggcaacgtgcacccaagattgaccaagctaattcgacagtgctggaaccgagattctgatcg

SEQ ID NO: 86401 - DNA, 544 bp, Zea mays
  unsure (1)..(544): unsure at all n locations
gaatagggggagggtctcgtgtactgaaactgcacgctgtagtcactgccgtaccggtctcggaattcccgggtcgacccacgcgtccgcgacttgtttcattgattcttgaagagatcgagcttcttttgcaccacaaggtcaaggatgtcttgcaactgcggatcaagctgcggctgcgggtcaagctgcaagtgcggcaagaagtaccctgacctggaggagacgagcaccggcgcgcaggccaccgtcgtcctcggcgtggccccggagaagaaggccgctcccgagttcgtcgaggccgcggcggagtccggcgaggctcgccacggatgcagctgaggtggcaactgcaagtgcgacccctgcaactgctgatcacatcgatcgacgaccatggatatgantattatctatctagcttgtggtggaggttgaacaataataagcgaggccgaacctgctgccatacataggtattgggtagtgtgtgtgaaagagatagaaacagagtagttcatatagtatgtgttttgagaggtac

SEQ ID NO: 86402 - DNA, 528 bp, Zea mays
ggtgtagggagtgtctgcctaccgaggtcctcaggcgtcgtcatgccgtaccggttcggaattcccgggtcgacccacgcgtccgagccagttccccctgtcaattgttcttgtcggggttggtgatggaccatgggacatgatgcaccagtttgatgacaatatacctgctcggtcatttgacaatttccagtttgtgaatttcacggaaattatgtcgaagagcatagcagctgacagaaaggaggcagaatttgcattgtcagcgctgatggaaatccctacacagtacaaagcaacaattgatctccaactcttaggccgtcgccaaagaataaccccaagaattgctctgccaccaccaacaaggaccgcgtattcgcggtccagtagctttagccaacagtctggtgtttattcgcgatcaagtagctttgaccaacaaacaagtggcgcctctcagcaacgttctgagagcttgaaacagcagaagaaacctgcagccacgaagagacctgacacttatgg

SEQ ID NO: 86403 - DNA, 526 bp, Zea mays
ggggggctgtgttctccacagtagtcccgatacgtcgcgactgccgtaccggtccggaatcccgggtcgacccacgcgtccgaataagacgacttgtttcattgattcttgaagagatcgagcttcttttgcaccacaaggtcgaggatgtcttgcaactgcggatcaagctgcggctgcggctcaagctgcaagtgcggcaagaagtaccctgacctggaggagacgagcaccgccgcgcaggccaccgtcgtcctcggcgtggccccggagaagaaggccgcgcccgagttcgtcgaggccgcggcggagtccggcgaggccgcccacggctgcagctgcagtggcaactgcaagtgcaatccctgcaactgctgatcacatcgatcgactaccatggatatgattattatctatctagcttgtggtggtggttgaacaataataagcgaggccgagctggctgccttacataggtattgcgtggtgtgacttcaaaaatagggaaacctagttttttaatttg

SEQ ID NO: 86404 - DNA, 548 bp, Zea mays
  unsure (1)..(548): unsure at all n locations
agtttaggaggagggagctcgtagtcctgattgctgaatgtcgtacgtactgccgtaccggttcggaattcccgggtcgacccacgcgtccgtctgactgaaggctttttttggataccttctctggctggtcctacaacaattggtgctggacaaaacggccaggggatatcatggctttttccttttactgatggcacatgcacctcttggctggtcagatactttggcatacattgtgttaccagttcttcttgtcattncacagtacatatctactcaagtaaggcaggcaccacagagcaatgatcctaaccaacaaggggctcaggctgtgacaaaggagttaccattgctaagtgattatattgctctttgcgtgccttcaggactaagtctgaactggcttacaaaatatatcctcaatactgcacaacaaagtgtgcgttagaaaggcttggaggtgccaaaaatccttgtcaagaattatttgcaagctttcaagaaaagaaacgacttctgttctgaagaaagatnctactcttcaa

SEQ ID NO: 86405 - DNA, 540 bp, Zea mays
  unsure (1)..(540): unsure at all n locations
aggttgtgcggtgtcngttgactgacgactcagttcgtacgtaccgcttcggaattcccgggtcgacccacgcgtccgcggacgactcaccaaagcacgaaagccagttagaaaatggattcctatttgaagagtgcctaaccgcatggataagctcacattaacccggcaattttggatccaattcgggatttttcttgggaagtttctggaagaaattggaataatatcggattcatacagaggaaaaagttctctattgatgcaaacgctgtacctagaggatagggatagaggaagagggaaaaatcggaatgagataaataaagaataaagccaaataaataagtcgaagatagaagagcccatattcaaaatgaggaaatggaaactcgaaaaggatccttctgattctcaaagaatgaggggcaaggtgattgataccgagaaagatttcttcttagtataagacgtgatttgatccccatatgtttgggaaaagaacaatcttctgcgttaatcataaatggaagggggtca

SEQ ID NO: 86406 - DNA, 540 bp, Zea mays
gttatgggtcggattcgtagtctgaatacgtagccgtaggatgccgtccggtccgattcccggtcgacccacgcgtccggcaaaagccaaaggcatcaccgccgcgacgacgatggcagcctcgctccgagccgcgggcaccctgatgcagccggccaagatcggcggccgggcgccctttgccttgctggcgtcccgcccgtcgtcgcaactcgcctgcagggcgttcggcgtcgacgccggcgccggcagtatcacgtgctccctgtaggacgtggccagcagggtgcgtcgactccgtgagagtctggcgctacgcgctcggcacctcggcgctcctggtctgggtcgcgagcgcttagtgcacgcccaagaagctggagctcgactagatccagagcagaacgtacatggaggtgtatggcacggtgaccatgtatccagttgccggccatttacgtgggtgtggagtcgttcccgttcaagggctggtagtaccagattgagaagctgtggcctggagccgtcttactgtatcgt

SEQ ID NO: 86407 - DNA, 529 bp, Zea mays
  unsure (1)..(529): unsure at all n locations
cgggggtggcgtcgtgttcgccgctgcagtcatagncacgtcgtaccggttcggaattcccgggtcgacccacgcgtccggcgagtgagtgaacaccagccgtattgtcccgaccccgaccgatcctcgcctgctgcagccatggcgacctccgcggcgctctccaccgccgccaatcccacccagctctaccggtcccgcgctttgctgggcaagccggtgaaggggcttggcctgagcatgggccgcgagcgcgcccagcggagcattgtgtgccaggcggcgagcagcatcttcgccgaccgcgtccccgacatggagaagcggaagctgatgaacctcctcctcctcggcgccatctcgttgcccaccgtcggcatggtcgtcccctacggcgccttcttcgtccctgccggctccgggaacgccggcggcgggacctacgcgaaggacaagctgggcaacgacatcacggtggaggcgtggctcaacacgcacggtccccaagaccggacgcttgggccagggg

SEQ ID NO: 86408 - DNA, 527 bp, Zea mays
  unsure (1)..(527): unsure at all n locations
ggtgggctgtgtctgctccgaggactgtaggcgtcgncactgccgtaccggttcggaattcccgggtcgacccacgcgtccgggcctcgctaacgcgcccgcgctagcgcgagtggtggcacccacgcacactcttctgccccacgagtccggaccccggaggagccaagccatggcgtccacctcctgctgcctcctccaccagtcaaccgcccgcctcggcgcgtcgccgcgcctggccgccgccccgccgcgcagcgcccagctgctcgtctgcaaggcccggaagcaggaagccgccgcggaccagagcgacgtctcgcgccgcgccgcgctcgcgctcctcgccggcgtcacgggcggcgccggcgccaaggtgggtcctgccgccgcgggatacggagaaacagccaacgtgttcggcaagcccaaggcgagcaccgagtacatagcgtacagcggctaccgcttcaagctggtgaatccgttccagtgggaccccaacaagggaccggaagttccccgcg

SEQ ID NO: 86409 - DNA, 527 bp, Zea mays
cgagttgactgtctcagccactgtgatctctgcacgacgtaccggtctcggattcccgggtcgacccacgcgtccgacggcggcggcggcggcagcgctgctgctgctgctcctcctgtcgctcgccgcggcggcggacatgtcgatcgtgtcctacggggagcgcagcgacgaggaggcgcggcggatgtacgcggagtggatggcggcgcacggccggacctacaacgccgtcggcgaggaggagcggcggtaccaggtgttccgggacaacctccgctacatcgacgcgcacaacgccgccgccgacgcgggcgtccactccttccgcctcggcctcaaccgcttcgccgacctcaccaacgacgagtaccgcgccacctacctcggcgccaggaccaggccgcagagggagaggaagctcggcgccaggtaccacgccgtcgacaacgaggacctgccggagtccgtcgactggagggccaagggcgcccgtcgccaagtcaagggccaagggagcttctggg

SEQ ID NO: 86410 - DNA, 544 bp, Zea mays
  unsure (1)..(544): unsure at all n locations
aggtttgtatgctcntgtcngattacatacatctgtagtcatttcgtaccgcttcggaattcccgggtcgacccacgcgtccgcccacgcgttcgagcgcatgcatgtagctttggcggtggagacgaagaagggcctggtgctgctggacttctgggtgagcccgttcgggcagcgctgccgcatcgagctggcggagattggcattggctactagtactcggagcatgatctgatgggcggcgccaagagcgacatcctacttcgctccaacccggtgctcaagaagatccccgtgcttcttcacgacggacgactcgtctgcgagttcctggtcattcgtggatacctctagtgggtctttccgaagggcttccccaagctgcttcccgactccgactacgcgcgcgcgcaagcccgcttatgggcggtctacttggacagggtctacgaagtcggtacgctgttgtggatactcaggggctacgctcgggctcatgctcgcgcctagatctgcctgattttccagaaccttgaatggaat

SEQ ID NO: 86411 - DNA, 538 bp, Zea mays
gatcgtattgagaaatagaaatcattatgctgtacgcactgccgtaccggtccggaattcccgggtcgacccacgcgtccggagggacttatgtcaccacaaacagaaactaaagcaagtgttggatttaaagctggtgttaaggattataaattgacttactacaccccggagtacgaaaccaaggatactgatatcttggcagcattccgagtaactcctcagctctgggttccgcctgaagaagcaagagctgcagtagctgcggaatcttctactggtacatggacaactgtttggactgatggacttaccagtcttgatcgttacaaaggacgatgctatcacatcgagcccgttcctgggtacccagatcaatatatgtgttatgtagcttatccattatacctatttgaagagggttctgttactaacatgtttactttcattgtgggtaacgtatttggtttcaaagccttacgcgctctacatttggaggatctaccgattccctctgcttattaaaaactttgcaaag

SEQ ID NO: 86412 - DNA, 532 bp, Zea mays
  unsure (1)..(532): unsure at all n locations
aggggtagacgcgtcgtctgtccacatgcnagtctntgtcacgccgtaccggttcggaattcccgggtcgacccacgcgtccggcgcctcgcgcgcccacccaccttcacgcgctctcccagctagatcgaccccactggcgatcgcgcaggctcccctatcccttcctgttccttcaaaaagactggactggatcttcccagagttcccgttcggagagccgccggatcttcttcgacgaggcttcgatctgctgctctccgtcggcgtgttggggacttgcaccttatccgaagatgtcttttcggagcatggttcgcgatataagggaaagttttgggaatatatcgaggcggaactttgaggtgagaattcaccacagagggaagtctcttgggtcttcaagtgacttgcaagacaggcctgctgaagttcagcaaagcaggtgggctagccttcctcctgagttgctctgcgatgtgatgaaaaagttggaggaagatgacagttgcttggccggatcgcaaggatg

SEQ ID NO: 86413 - DNA, 535 bp, Zea mays
aggggtgcgtcgtgtcggcgtccgtaagtcatgtagctgtacgcctgctgtaccggtccggaattcccgggtcgacccacgcgtccgagaacagtagttgaagtttgtagggacttcttgaagaacatgtgcaatagagaatcctgccggtttttacaccctgggacacatacagcggctgcgagcgccaatgttgaagtatgccgtgattttaaacgaggagaatgcaatcgacctgtctgtcgctttttgcatccatatacaagttgaagttttctgttagctaaacttgagtgctctgcctaacgttgcctgtactgttgtgctgattctgctgctgttgctgccgctgctttgccactaccactcattctgcttttgtcattaaagagctgttttgcttgctgattgcgtatcttaggtgttatattatcatggaattcattttatgccctatgtattcattgtataatggtttttaatttactgttgttatcctgatttatgcttgtatttgttttacttgttgctttaa

SEQ ID NO: 86414 - DNA, 524 bp, Zea mays
agggggtgcgctgtgtcgtttgactgagtcctgacacgtcgtaccggtctcgaattcccggtcgacccacgcgtccgaccaagagagtacgtggaggagcagccatggcttcatcggtggccgccgcggcgagcacattcctgggcacccgcctggcggacccggcgccacagaacgggcgcatcgtggcccggttcgggttcgggttgggcggcaaggcgaagcctgctccgaagaaggtggcgaagacatcgacctcctctgaccggccgctgtggttccccggcgccgtggcgcccgactacctggacggctcgctggtcggcgactacgggttcgacccgttcggtctcgggaagcccgtggagtacctgcagttcgagttggactcgctggaccagaacctggccaagaatgaggccggcggcatcatcggcacccggttcgagtcctccgaagtcaagtccaccccgttgcaggcctacagcgaggtgttcggccttcaacgggtccgcgagtgccag

SEQ ID NO: 86415 - DNA, 536 bp, Zea mays
  unsure (1)..(536): unsure at all n locations
agagaggcgtcgtgtcncccgacttagagctgcanagcgtcacgcctgccgtaccggtccggaattcccgggtcgacccacgcgtccggctagcgcttatagcttgtcagccatggccaccgccgccgcgtctagcctcctcaagtcctccttcgcgggctcccggctcccggccgccacgcggaccacaccggcgtccctcgtggtggccaccggcccgcgcggcgccggcgcggggcccatctgcgcgtccatgtccatgtcctcctccaacccgccctacgacctgacgtccttccggttcagccccatcaaggagtccatcgtgtcccgcgagatgacccgtcgctacatgacggacatgatcacctacgccgacaccgacgtcgtcatcgtgggcgccggctccgcggggctgtcctgcgcgtacgagctctccaaggaccccgccgtgagcatcgccatcgtggagcagtcggtgtcgccgggcggcggcgcgtggctgggcgggcagctgttctcggccatgggggtgc

SEQ ID NO: 86416 - DNA, 544 bp, Zea mays
  unsure (1)..(544): unsure at all n locations
aggtaggctggtngtacaaaatctgaagtcagtatgcgtcgcgatgtcgtaccggtccggaattcccgggtcgacccacgcgtccgggcgggcgcggtgcccagggacgcgcgctcgtcgcacaactgcctgtaccgcgccgtggacatgtacctgaagacacacccggtgctggacgagatcgagtcgggagaaggggtgcaacgttatggacccgctcaagctgtcgtaccaggcgcggatgcacgcgtcgcataacaagcggctgccgctgcatgccgtgctcagcgtgctctactacgaccagctggagatccgtagctcggacggaagcggtggctcggaggatgggtgcgagacacagtcggacgtcgggaatgcccgtgctgaggctcgggctggcgtgttgctggcaagggagaacgaggcgctgcgggtggagctggcgtcggtgcgagcgtacgtgtcagggatggcacagatgcagttgggggagcgtgtcgaggccattgttgtcatggttggtcgagggccatgtgacgtn

SEQ ID NO: 86417 - DNA, 516 bp, Zea mays
ggtagttctgcatgagcacgtaagcgtcgcgacgccgtaccggttcggaattcccgggctctcgtccgcgcttgtttgttcgcgtcttctccctgtagggaactccgttacccggccccggctgtgcgtggcgtcagcacgccccgcgggcaggagggtgaggctgctgagcgtgaggtgcgagcagggagccaagggcggtggcgggctggacgtgtggctgagccgcggggcgatgctgggcttcgtcggagcggtggccgtggagctgaccaccgggaaaggcgtgcttcagaatgtgggattgaccgcgccggtgccgacgctggcgctggcgctcaccggcgcggtcggcgttctcacggcctttctcatcttccagtccgggacgcgggactgatgggtgaattgtcaaagcttccaaaaggacatgcataaagtctggcagagtcttgtgctgggtatgactatgctggtggagttgcccttgctttacaggaaagcttaggagttaca

SEQ ID NO: 86418 - DNA, 504 bp, Zea mays
aggttaggagtgtgttcgtcgatggaatcatgcatatgccgtaccgtccggattcccggtcgacccacgcgtccgcttgctctctatttcagatggcctgcataagaaggagttccttaattatgctaaattcgtgttgtggtggatttcattaggtgtggcttcatcaattggactaggttctgggttgcatacatttgtgctgtatctaggtcctcatattgctctgttcactattaaagctgttcagtgtggccgaattgatttgaaaatggctccatatgataccatacagcttaaggttgggccatcatggctcgacaagaaatgttctgaatttggtccgcctgtgtatccagcatcagctcattctgttaggatccccgtctttgatttactacctcagatacagctggaagcagttctttggggcattgggactgcacttggcgagcttcccccttattttatatcacgagcagctcgcttatcaggaagcaagtg

SEQ ID NO: 86419 - DNA, 510 bp, Zea mays
  unsure (1)..(510): unsure at all n locations
aggtaaggggtgtagtcngtcgctagccgcctccgcatgccgtaccggttcggaattcccgggtcgacccacgcgtccgctcttgggtcangagaggctgcattcacttttattcttgatgatcctgcaggaaacagctttattgagaatccgcatgctccgttattagatcctttactatctgtgagattctacgaaagaactcgtgaacaacaagcagcacttggttttcttgctgaaccaccaaaagaacaacctggagaggctgtattgcctgcttcagcagtggaatccaattctgatgggttgcaaagcgtgccccatggctcagttggagctgttgcaggtcgtcgtgctatagctcagggaaaccctgatgaagttgctgcagcattgtgtagatattcagcaccagaagaggttgatactttaccatcaacatgtggagcctgtggaacagaatgcgtcacacgtttctttgctacaaaaatcccatatttccgggaggtg

SEQ ID NO: 86420 - DNA, 510 bp, Zea mays
  unsure (1)..(510): unsure at all n locations
agtagggctgtattcgcggactgcatttangcaatnngcatgccgtaccggttcggaattcccgggtcgacccacgcgtccgaaaaaaaaaaaaaaaggggtatggggcaattaatgactttgaaaacgcgaaatagctgatgagggaagttgttgttgagaaataggaaagtggaatgaaatccagtcttagtcaaatatttcatatctcttctcttcttgtccaaacagaaggaaaaggagacaatttgagctgagcggaaaatccatatctctcttatccatttagagcatatggatcgatttataagaatcgaatgttttgtttttatgttattttgtgatagaatgaaaaagaattctatatagaatgggttgggaattatgcctagatcccgtataaatggaaatttcattgataagaccttctcgattgtagccaatattttattgcaaataattccgacaacctccggggaaaaaagggcatttacttattatagagatggt

SEQ ID NO: 86421 - DNA, 510 bp, Zea mays
  unsure (1)..(510): unsure at all n locations
ggagaggagtactttttggctgtacgtatcctanggcactgccgtaccggtccggaattcccgggtcgacccacgcgtccgcgaaaaggaaaacttgtgcctttatggctaccccaacgaaacatgggaagtaactttgccagcagaggaagttcctccagagatccctgaaccagctttgggtataaactttgctagggatggcatgaacgagaaggattggttggcgttagttgctgtccacagcgatgcctggttactagctgttgcattctactttgcagcccggtttgggtttgacaaagaggccaggcggcgactcttcaacatgataaataacttgcccacaatatttgaagtagcgactggggttgccaagaaacaaaacanggagaaggaacccaataataccagcaaaagcaacaaaccaagttcgaaaatgacaacaagacccgagtctcatttgaaggcgacaaaagtggcgccccctaaggatgaagatgatgagan

SEQ ID NO: 86422 - DNA, 514 bp, Zea mays
gttagggagtgtcgtgggtgctcatgcctagcgtaaggcactgccgtaccggtccggaattcccgggtcgacccacgcgtccgcaattggcgttggccgaagaagaggagaagcgaagcaagcaggcttcgagaacaagggggagggggaggaccaagcgaaagggggaactagagcaagatgggcggcgaactgctgcttgcgctcctcctcgtctctgctgctgcggcccttaaggtccttgaagttggcattggaaccattaccttggaattaatccagaaggccttaatggaaccagtaaccacccatccaatgcctggttgaacagcttacacttaatcctacactttacaatataccattgcgcaatttaagcacatacttggagtgaaaccagcaccacagaatgcactaagcaatgttcctgtcaaaacttattcaagatcactggaactttcaaaagagtttgacgctagatctgcatggtcccgttgcaacacaattgggaaca

SEQ ID NO: 86423 - DNA, 508 bp, Zea mays
  unsure (1)..(508): unsure at all n locations
agtagtagtgcttcgtgatggacggagctgtcgctgccgtactcggtccggnattcccgggtcgacccacgcgtccgaagggaagggaaccctcttgaccgccggcggcgaggggagatgccgccggagaggacgaggaagtcgaggacggaggagctgtgggagcgcgaggtcggcggtctcccacccaagcgcttcgccaactccgtcatggcctccaaggagtttgtgcagtctctcaacatccaaaagcggctacggaagcacaggagttgcgtcaacacgataagcttcagcgcggacgggaggctgctcctctccgggtccgacgaccggaccctcgtgctgtgggactgggaggaggcggcgccggccttgtcgttccacactgggttcagcagcaacgtgtaccacgcgctgttcatgcctgtctccggtgacaggagcatcgtctcgtgcgcttgctgaatgggatgtgatccattctcatttacaggaaggtgggcgt

SEQ ID NO: 86424 - DNA, 516 bp, Zea mays
ggttagggagtatcgctgtgtcataggcccaacgccctccgcatgccgtaccggtctcggaattcccgggtcgacccacgcgtccgcttgaccgtggcgagaagattgaactgcttgtcgacaaaactgaaaatctgcgttctcaggcacaagatttcaggcagcagggcaccaaggtgcggcggaagatgtggctccaaaacatgaagatcaagctgatcgtgctgggcatcatcatcgcgctcatcctcatcatcatcctgtcggtgtgccatggcttcaagtgcggcagcaagtgaggagggggacttacggatggccgtgccctgccctgccctgccctggcacctgcgagaaggaggagactacatgtggagttttttttttttgcttctttagtcgtcgtgttaagtcgtcctgcgccgataattcttggtggtcaccagataaagagtcattcctggtgtcggtgttgattgctgttggttggtcgggaaatgactgggtgaaccgagg

SEQ ID NO: 86425 - DNA, 524 bp, Zea mays
  unsure (1)..(524): unsure at all n locations
nagagagctcgcgtgcngtcggccggcatgcnatccctcagtcatgtcgtaccggtccggaattcccgggtcgacccacgcgtccgcaccaagagcaccaaggggtggtggtggtggcggcggcggcagcagctttgtcgattcagggaacaaggtatacgtggggaaccttgcatggggcgttgacaactcgactctggagaacctattcagtgagcaaggacaggtgctggatgctaaggtcatctacgacagggatagcggcaggtcaagggggtttggtttcgtcacctatggctctgccgaggaggtcaacattgccttatcaaacctggatggcttaacctggattgtagaccgatcccaatcacgggtgcagaatcaaagcccaggcgtgaattttgagattttgttaaagtggtttagaggtcaatagcgtgtgttcacaaggtctaagttggaaccggtattctttctttcgtatgagttacaagaaaatgctgataatgggagactggaaatgg

SEQ ID NO: 86426 - DNA, 523 bp, Zea mays
  unsure (1)..(523): unsure at all n locations
agtgtgaggggagtgactcgtagtctttgggactgcagtctgtagncactgccgtaccggtctcggaattcccgggtcgacccacgcgtccgggcctccctctcctctgccgccgtcaccgccccttccttcgccgcaccagcgccagcccgcgccgtggtcagaaggaggtccttcaccgtgcgcgcctctctccgcaaggccaccggcaccgccgccgtggcaatggctgccagcgccctgcttgccggcggtgccatggcccaggaggtgctgctgggcgcaggcgacggcgggctcgtcttcgagcccagccagttcaccgtcaaggccggcgacaccatcacattcaagaacaacgccggcttcccgcacaacgtcgtcttcgacgaagacgaggtgccgagcggcgtcgacgccaccaagatcttgcaggaggagtacctcaacgcgccaagcgagacctactccgtcaccctcaccgtgccgggaacctactggttctactgcgaaccgcatcaag

SEQ ID NO: 86427 - DNA, 511 bp, Zea mays
tagttaggcgtgtattcgtggcctttgggacttcgtatgcacgtaccggttcggaattcccgggtcgacccacgcgtccgggcagccggattccgaagcgcaccccctcggccccagccaaaagcatcgcagtttctaatcgtttggagagcacacaagaatgtcgttcgtgcagctctctggtgctggagtcgctgcagtggccttcacgaacaagagcctagtctctcggcacgcagcgctacgggtctgctcgtcgaggcgctcgatccgtagcctggtcgttaaggctgcaactgtcgtcaccccaaagtacacttcactgaagcctctgggagatagggtgcttgtgaagcttggtgccgcagaggagaagacagttggtggcattttgcttccatctactgcccagactaaaccacaaggaggtgaggttgttgctgttggagcaggaaggaccatcggggacaagaaaatagctgtggatatagagactggagcacaagtagta

SEQ ID NO: 86428 - DNA, 509 bp, Zea mays
  unsure (1)..(509): unsure at all n locations
agttaagtaggtgcgtgtgtggctggagcgnatgcgtngccgtaccggtccggaattcccgggtcgacccacgcgtccgcgacgagcagagggccccccggagcggctcggagcaatggcggcgggataccgggcggaggacgactacgactacctcttcaaggtggtactgatcggcgactccggcgtcggcaagtccaatctgctctcacgcttcacgcgcaacgagttcagccttgagtccaagtccaccatcggcgtcgagttcgccacccgctctctccaggtcgacggcaaggttgtcaaggcccagatttgggacactgctggccaggaacgatatcgtgctattactagtgcgtattatcgaggtgctgttggggcgttgcttgtatatgacgtcactcgtcactcaacctttgagaacgttgagcgttggctgaaggagttgagggaccacacagatcccaatatagttgttatgctggttggcaacaaatctgatctcg

SEQ ID NO: 86429 - DNA, 514 bp, Zea mays
  unsure (1)..(514): unsure at all n locations
aggtaaggcgtcgtgtancgtggcctagcncgctcagntacgcacgtaccggttcggaattcccgggtcgacccacgcgtccggtcggaggtggaggacgaggcggcgacgtcgctgctcgccaacggtgcagccgacgtccgccggaggagggaccaggcgaaggcaattctgtccacgcaggccgtcaggatcgccaccaaggccgagcagcatgagcgcttcatctttaaggtcacacacttgctgggtgttcttggatttgggggattttgctatctcttgggtgccagaccacaggatgtgccatatgtgtactgcctgttctatgtcatatttgttccgctccgctggatttactaccgctacaagaaatggcattactaccttctggacttctgctactatgccaacacctttctccttgtaatgattctcttctacccagaggatgaaaaactttttatggtttgcttctcgtttgcagagggtccgcttgcttgggcattaattg

SEQ ID NO: 86430 - DNA, 522 bp, Zea mays
  unsure (1)..(522): unsure at all n locations
tagctgagtgaggtgncgctggcgtctcctganttcagntatcgatcgatctgcccgtactgaattgccgggtcgacccacgcgtacggtcggaggtggaggacgaggcggcgacgcttcttctcgccaacggtgcagccgacgtccgggggaggagggaccaggcgaaggcaattctgtccacgcaggccgtcaggatcgccaccaaggccgagcagcatgagcgcttcatctttaaggtcacacacttgctgggtgttcttggatttgggggattttgctatctcttgggtgccagaccacaggatgtgccatatgtgtactgcctgttctatgtcatatttgatccgctccgctggatttactaccgcttcaagaaatggcattactaccttctggacttctgctactatgccaacacctttctccttgtaatgattctcttctacccagaggatgaaaaactttttatggtttgcttgtcgtttgcagagggtacgtttgcttgggcattaattgagg

SEQ ID NO: 86431 - DNA, 513 bp, Zea mays
  unsure (1)..(513): unsure at all n locations
agttagggagtgcgttnagtggccggccgaagtccctcagtcacgccgtaccggttcggaattcccgggtcgacccacgcgtccgcacgcactagtacgtagtaagcgagcttagctactgatcgtcgtcaagcactcgagctcgatctctcgaagcggctagctgctagctgctagcagccaattaatggcgaagccttcgcaggtgctggtgtcggcgctcgccgcctgggcggtggtcctgctgctgctgtgcgccgccgcgccgcggggcgccgacgcagccacggcgtgcgacgccgcgcagctgaccccgtgcgcgggcgccatcatcgggagctcgccgcccaccgcggcgtgctgcagcaggctcagggagcagcagccgtgcctgtgcacgtacgcgcgcgaccccaagctgcagcgctacgtcagctcgcccaacggcaagaacgccatggccgcgtgcaaggtgcccgtgccgtcgtgctaatttaaacttctgttagcgcc

SEQ ID NO: 86432 - DNA, 482 bp, Zea mays
aggtagagtgcgtccttgtgaaccatacgatgacgtacggttcgattccggtcgaccagcctccggtcactgctgagacattgctcattgaatgtccacaaagtagttgtgttcctgaactctaaatggagatctaagaccaatttgtgaaacaacagttggttttgataccatatgcaaggtgaactcgcagttaataagcaatgcatgcatagatgccctttctgctgaaaagtattactattttattcggatgatgggacgtaaagcatctcatgtagcattggaatgtgctcttcagtcacatccaaatatggttatcctaggcgaggaggtttctgcgttaaaacttacaatatttgatattacaaagcagatatgtgatgctgtggaggcaagagctgaaaaagacaaatatcatggagttgtacttattcctgagggccttgttgagagtattcctgaactgtatgctttgctcc

SEQ ID NO: 86433 - DNA, 519 bp, Zea mays
  unsure (1)..(519): unsure at all n locations
ggttaagggagtgtcgtgncgtggctggtaccgtatacctanagncactgccgtaccggtctcggaattcccgggtcgacccacgcgtccgcaaggtctcaaactctcaaataattgatgaaatgaactaattaattaatgaactgaatctatatccaacatgatatacatagtacaccgggctcgcgtggctgttcctgggcgtcccgaccagcgacaccctgctgtacaaggaggagctggagaagatgaaggagatggcgccggacaacttccggctggacttcgcggtgagccgagagcagacgaacgcggccggggagaagatgtacatgcagacgcgcatggcggagtacaaggaggagctgtgggagctgctcaagaaggacaacacctacgtctacatgtgcgggctcaagggcatggagaagggcatcgacgacatcatgctcgacctcgcagccaaggacgggatcaactggttggactacaagaagcagctcatgaagagcgagcaat

SEQ ID NO: 86434 - DNA, 506 bp, Zea mays
  unsure (1)..(506): unsure at all n locations
gagagagtgctgtgtcatggtaccatcccttagcatgccgtaccggttcggaattcccgggtcgacccacgcgtccggatccggaagttctgtgggtagaggactagagactgcagatcgagggtctggcagcgggccgtggcagttgggtgattacgacgaagagagatgggcctcctcgacaagctgtgggacgacaccgtcgcaggcccgcgcccggacaccgggctcggccgcctccgcaagcagcctgtgcgttccgccgtcgtcaagatcagtgatccggccggggacgctgcggcgttcgtgccgacctcgccggcttcgggtagcgaggagacgccggtgaaggtgacgcgcagcatcatgatcaagcgccccgcggggtacccgtcgtcgccgaggagcgcggcaagcacgccaccggcctcgccactggggactacgccgnccatctcgccgtttgccggcgccggtggtcggttcagaaggaaatcatcgtccgn

SEQ ID NO: 86435 - DNA, 514 bp, Zea mays
  unsure (1)..(514): unsure at all n locations
aggtggagtnaggtgtgtccatctctgcatagcatactctngcacgtaccggtccggaattcccgggtcgacccacgcgtccgagaagatttggtgcttcggacctgagactaccgtgcccaaacatggttgttgatatgtgcaagggagtgcagtatctcaatgaaatcaaggattctgttgtggctggtttccagtgggcatcgaaggagggtgcactggctgaagagaacatgcgcgggatttgcttcgaggtctgtgatgtcgttcttcatgccgatgctatccacaggggtggtggccaggtcattccaactgccaggagggtcatttatgcttctcagctcacagccaatcccaggctgctggaaccagtttacctggtggagatccaggccccataaaatgcacttggtggcatatacggtgttctgaaccagaagagaggacatgtatttcaggagattcaaaggcctggtaccctgctctacaacatcaaggctttcctacctgg

SEQ ID NO: 86436 - DNA, 512 bp, Zea mays
  unsure (1)..(512): unsure at all n locations
agttaaaggagtgtcttcgtcgactggaagcagtacnatagacgtcccgtctcgaattcccgggtcggacccagcgtcccggaacccgtgccaccaatttcaccctcaggcgctcagctctagcaatggctgactccaccatggcgatctactccacggcgatggccggtacccccatcaaggtgggctccttcggcgagggccgcatcaccatgcgcaagaccgtgggcaagcccaaggtggcggcgtccggcagcccctggtactgccccgaccgcgtcaagtacctcggtccctactccggcgagcccccgagctacctcaccggcgagatccccggcgactacggctgggacaccgtcggtctgtccgtcgaccccgagaccttcgccaagaaccgccagctggaggtgatccactcccgctgggccatgctcggcgcgctcggctgcgtgttgcccgagctgctctaccgcaacggcatgaagatcagcgaggacgtctggttcaan

SEQ ID NO: 86437 - DNA, 509 bp, Zea mays
gtgggaggagtgctgtctcactgtcagctccctaagtcactgacgtaccggttcggaattcccgggtcgacccacgcgtccgagccgccaccaggtgcagagtctttcgtcatctcttctccggcgaagaacccccagtcggccaccagatcacttgttaaactttgttgaggggtgatggcggtttctttcgcaaacctcagctccgaggcagggcttaaaaagcttgatgagtaccttctcactcgcagctacatcactggctaccaagcttccaaggatgacttggctgtctacacttcgttttcgtctgctccctcgtccaagtatatcaacgtagcaaggtggtttaatcacattgatgcgctcgtgaggctgagcggaattactgcagagggccaaggtgtgaaggttgaatcgtcagcagttccttcagccccaactccagatgttgctgaagcacaggccccagttgctgaggaggacgacgacgatgatgttgacctttt

SEQ ID NO: 86438 - DNA, 520 bp, Zea mays
agtgagggagtgacgtcgtgtcattgcttagttccctacgcactgccgtaccggtctcggaattcccgggtcgacccacgcgtccgcaagcaaagagtggtgcagcttgtcaactcaacatcggatgaggacctattaagtcagggccttacgttgaatgatgatttacaacgtgttttagcaaagcacgatgcaattgctgctggcatagccattcgattacaaaaaccaaaatcagccccggcccgcgcagacagttctccaacgaagcctgagccgacaaaggaaacagaacaaaggtctgctaaagttgccagtagtgtgactccatttgagcagttagcacttcctgcaccaccatcatcaagtgcttcaaagtctcatggagaatcagctgttagcccaaatattgatttgcttagtggtgatgagttttttaaaccagaacctgttcattcccaagctcttgttcctttagtcactcaggcttcagcttcttcaagccccagtactttagacc

SEQ ID NO: 86439 - DNA, 511 bp, Zea mays
cgtatagtaaggtgctgtatcactggacgaagccgtagcactgccgtaccggtctcggaattcccgggtcgacccacgcgtccgctcatcctccgtcgagatcaaggaagaaagaaagcaaccatggcggcaaccggaatgtccccctccccctcggccgcaataactcgccacatccatgctcgtcgttcctgtgctgctgcttccttgtccctccgccgctcgggcttcctggggcgcgtcgtgctggccgcggtgccagtggccgtggacgccacccggcgccgacgcgtctccgtgtcggtgcggatggcctgggacggtccgctctcgtcggtgcgcctcatcatgcagagcaggaacgcgaagctgagcgagaagctcaaggagcacatcgaggacaaggtgggtcgggcggtgtccaagcactgccacctggtccgggaggtagacgtgcgcctcttcgagcgcggcggctagctcggccggggccccaagacgtcgcgctgcg

SEQ ID NO: 86440 - DNA, 510 bp, Zea mays
  unsure (1)..(510): unsure at all n locations
gtaagaggagatctgtgtctttggctggagactcagcactgccgtaccggttcggaattcccgggtcgacccacgcgtccgctcagcttgcaggttgcagccgatgagaatcgagcgtgatctccacatggccacaggggacggagaaactagctacacgaaaaattctaggattcaagagaaaactatgtttcagatcaagcctgtccttgaggaggccacaagagcagtatacacagctctccaccctcaaaccatggttgttgctgacttaggctgctcatctgggcctaacacactacgcttcgtatccgaggtgattggcatcatagctcgccattgcaaagaatatggccgacaacatgaccacacacagcttcagttcttcctgaatgacctgcccggaaacgacttcaacaatctcttccagctgatccagcagttcaataagtcgacggcaataaaccacaagagtgaggcagttgaggcactacctnctccgtgctatat

SEQ ID NO: 86441 - DNA, 515 bp, Zea mays
aggagttagtgcgtgtttcattggactgcagctgtacgcactgccgtaccggtccggaattcccgggtcgacccacgcgtccgcgcagtgcacacccttgctgacgggctcggtgcagctcaattcatcaatgcaatttctgagtttgcccgtggagtagttaaacctacaatagcacctatatgggcacgggagttaataccaaacccacctaaaatgcctcctgggccaccaccatccttcgagtgcttcgggttcaaacattttgttatggatgtggcagttaacaatattgcacatgtcaagagtgaatactttcaaaccaatggacactattgctctacatttgatgttgccattgccaaggtttggcaagctaggacaagggcaatcaagtacgaaccaaatttcaaggtgcatgtttgcttctttgccaacactcgccaccttctcacacatgtgctacccaaggttggtggcttctattgaaattgcttctatccagtgactgtcac

SEQ ID NO: 86442 - DNA, 511 bp, Zea mays
aggttagtatctgtataggccactgcatgcaatcgcatgccgtaccggttcggaattcccgggtcgacccacgcgtccgcgagcggagcgaggaggtagcgcggcggatgtacgccgagtggatggcggcgcacggccggacctacaacgccgtcggcgaggaggagcgcaggttcgaggtgttcagggacaacctccgctacgtcgacgcccacaacgccgccgccgacgcgggcgtccactccttccgcctcgggctcaaccgctatgccgacctcaccaacgacgagtaccgcgccacctacctcggcgtcaggagcaagccgcagagggagaggaggctcggtgacaggtacctgggcggcgacaacgaggacctggcggagtccgtcgactggcgggccaagggcgccgtcgcggagatcaaggaccagggcagctgcgggagttgctgggctttctcaacaatagcggctgtggaaagcatcaaccagattgttactggcgacag

SEQ ID NO: 86443 - DNA, 509 bp, Zea mays
gtagtgttttgtcatgaactgatactgtaggcactgccgtaccggtccggaattcccgggtcgacccacgcgtccgcttctctacggtccgggaatcggaagctcacggcagaagccatgaggcagacgcatcttttgttgctcgcttgtttctgggtcctgtcaacatgctccttgctacttgatgcttcctccgatggactgttaagaatcaacctgaacaagaagagactggacaatgaagctttgactgctgctaaattggcgaagaaggagagccaccttcgaaggtctgtgggtgctgaccagtatctcagtgcctcaactgatgacatagtccctttggacaactacctggacacccagtactttggacagatcagcatcggcacgccaccacagaacttcacagtgatattcgacactggaagctccaacttgtgggttccctcatccaagtgctacttttcgatagcgtgctacttacaccataaatacaagtcaaccat

SEQ ID NO: 86444 - DNA, 519 bp, Zea mays
tgtgaggtaggtgctgtagtgatgcactgcatgctgtgcgcactgccgtaccggtccggaattcccgggtcgacccacgcgtccgctgtggggcctcgcggtcccatcctgctggaggactaccacctgatcgagaaggtggcgcacttcgcgcgggagcgcatcccggagcgcgtggtgcacgcgcgcggggcctccgccaagggcttcttcgagtgcacccacgacgtgacgtcgctgacgtgcgccgacttcctgcgcgcgcccggcgtgcggacgcccgtgatcgtgcgcttctcgacggtgatccacgagcgggggtccccggagacgatccgcgacccgcgcgggttcgccgtgaagttctacacccgcgagggcaactgggacctgctgggcaacaacttccccgtcttcttcatccgcgacggcatcaagttccccgacgtgatccacgcgttcaagcccaacccgtggtcgcacgtgcaggagtactggcgcgtgttcgacttcctgtcg

SEQ ID NO: 86445 - DNA, 514 bp, Zea mays
  unsure (1)..(514): unsure at all n locations
aggagatggtgtcttcnntcgctggactgcatactataggcctgccgtactcggtctcggaattcccgggccggtccagcactttcacgctcagctccagcaatggctgcctcctccatggcgatctcctccacggcgatggccggcacccccatcaaggtgggctccttcggcgagggccgcatcaccatgcgcaagaccgtgggcaagcccaaggtggcggcgtccggcagcccctggtacggccccgaccgcgtcaagtacctcggccccttctccggcgagcccccgagctacctcaccggcgagttccccggcgactacggctgggacaccgtcgggctgtccgccgaccccgagaccttcgtcaagaaccgcgagctggaagtgatccactcccgctgggccatgctcggcgcgctcggctgcgtcttccccgagctgctctcccgcaacggcgtcaagttcggcgaggccgtctggttcaaggccggctcccagatcttcaacgagg

SEQ ID NO: 86446 - DNA, 517 bp, Zea mays
  unsure (1)..(517): unsure at all n locations
tgggaggaggtacgttgnngtcgttggcctgcatgctgtaggcactgccgtaccggtccggaattcccgggtcgacccacgcgtccgggctctgcagccttggtttcccttgcactatttggtgcgtttgtaagccgggctgctatctccactgttgatgttctgactcctaaagtattcatcgggcttattgtcggtgctatgctcccgtactggttctcggcaatgaccatgaagagtgtgggcagtgctgcgctcaagatggtggaggaagttcgtcggcagttcaacaacatccctgggctcatggaaggcaccacaaagcctgactacgcaacttgtgtcaagatctcaacggatgcatccatcaaggagatgatccccccaagtgctcttgttatgctcacaccactgatcgttgggattctatttggggttgagaccctctctggagtccttgctggtgcccttgtctctggtgttcagattgccatttctgcatccaacactggtggtg

SEQ ID NO: 86447 - DNA, 507 bp, Zea mays
agtagtggtgtgtcgtgcctacggcatcgcatgcacatgccgtaccggtccggaattcccgggtcgacccacgcgtccgtatgatacagtagcaaaggagatggccttttttgatccttcacgcagtcaagattttctgttcatctctggaaccaagatgcgcacttatgccaaaactggagagaatcctccagacggtttcatgtgcccgggtgggtggaaggttcttgttgactactacaacagcctgcaagctgaagaagcgactccagtccctgtatgaggcaagctactatttgactaagagattattcaatggcggggaaacatacaagcaagtgatcagatcatttgagcttttttccttattgattctttaggttagtagttgattgatatatgatcagatcttttcgattgtttgtttgtcttaaatatgagactctgaagcatggaaaaactaaagatctgcacaagttgagccaaaacagcatggccattgttctg

SEQ ID NO: 86448 - DNA, 513 bp, Zea mays
  unsure (1)..(513): unsure at all n locations
cgcttcaggagtatctcgtgtcattggactgcaagtgtacgcactgccgtaccggtccggaattcccgggtcgacccacgcgtccggctgtactcactcgccacacacaccccctctccagctccgttggagctccggacagcagcaggcgcggggcggtcacgtagtaagcagctctcggctccctctccccttgctccatatgatcgtgcaacccatcgagctacgcgcgtggactgccttccctgggtcggcgcaggaggggatcggaaggatggcggcgtcggtttccagggccatctgcgttcagaagccgggctcaaaatgcaccagggacagggaagcgacctccttcgcccgccgatcggtcgcagcgccgaggcccccgcacgccaaagccgccggcgtcatccgctccgactccggcgcgggacggngccagcattgctcgccgctgagggccgtcgttgacgccgcgccgatacagacgaccaaaaagagggtgttccactt

SEQ ID NO: 86449 - DNA, 500 bp, Zea mays
  unsure (1)..(500): unsure at all n locations
attgaatgcataccgtnggaatgccgtaccggtccggaattcccgggtcgacccacgcgtccgcacaatcctaaggatggaaatacttaaatcgagacttgggctaggaacaggtgatgctccgcccgggtcaattaaggattggatgcgtatgtaggcctgttgatcaaggactatcttatctagccacatgccctgagaatgggacagggtaagcttgaacccggctattccatacatgaaaagacaatcgcgcactgggcgtggagagatggcgagagtggcacgtaccctcctggcaacggatcgcctaaaagggttggtgtactctcgggtggcgcggacctgttcatgcagtggaggatccgtgggaatagtagacatcaaggtttacgagaaacatatgtcgtgtggttagagatccttagctgagtaaatcgattcggatcgccgttatatccccggacagtggagacttgagctccgacctacaacctaan

SEQ ID NO: 86450 - DNA, 515 bp, Zea mays
  unsure (1)..(515): unsure at all n locations
ggggagtnagtgcgtgnatcactggacgaagccgcncgcactgcacgtaccggttcggaattcccgggtcgacccacgcgtccgggacgtccgtcaaaaacctatacgatgaaatgacggagcggattgactccgctgctcggacgggcaatgttcctgaagaaactagagcgaaacacaaagggttttctgagtgggatacgggtattacctcaaaagaccaccacccgatcgttcagattctgatagatgggaaagacaaggctgtagctgacaacgaaggcaatgtgctgccgacgctggtgtacgtggcacgagagaagaggcctcagtaccaccacaacttcaaagccggggcgatgaacgctctgatccgagtatcgtccgtgataagcaacagccctatcatcctgaacgtggactgcgacatgtattccaacaacagcgacacgatcagagacgcgctgtgcttcttcctcgacgaagaaacgggccacaggatcgcgttcgtgcag

SEQ ID NO: 86451 - DNA, 492 bp, Zea mays
  unsure (1)..(492): unsure at all n locations
nctggaatcgatactgtnggcacgccgtaccggtccggaattcccgggtcgacccacgcgttcgcccacgcgtccgggggatattataaatattgatgtaaatgtgttcctgaatgtaagaaacctcttctaaaatgtggcagaatcatattggatgatgtttccgtttataactagtttggtatgttcctcaacagggataccatgggggtacctccagaacatttgcatgtggacaagttgatgattctatcaaacattttctcaatgcagctgaagaatgcttggagaaaggcatttctatctgcagggatggtgtgaactacagaaagattggcatgaaaataagcaagcttgcctatttttatggctattatgtggtggaacgctttgttggccatgggattggaactatgtatcattctgagccacttatcctacatcatgccaacgaaaactcanggcgtatggttgagggccaaacatttacaa

SEQ ID NO: 86452 - DNA, 535 bp, Zea mays
  unsure (1)..(535): unsure at all n locations
nggtaaaggtnnttcnnacgactgacactacgncngtcgtaccgctccggaattcccgggtcgacccacgcgtccgatcgagtgtggagatgctacagatgccaactttgagaaatacaatctcagtagaggctgcgtagctggcattcttacacttgatacagtggcagactatcttccgagaaggggacccctgaagcagagaaggacaggtattgcgtatatagcaaacgtcgcggtgcggaaggaggagcgacggaaagggatcgcgaagatgttggtccaagaagcagaggctcgggcaaggagctggggatgccggtcgatggcactgcactgcgacgtaaacaacgtggccgcgctacgcctgtacagaaaccaaggcttcaagtgcatacgagtgccggaaggagctaaatggcccgaacccaagatagctaaaggagcggagtacaacttcatgatgaagctagtgcccaaggcttgagtcttgaaccttataagatctgactagggaaaaaaagggaaaaggttg

SEQ ID NO: 86453 - DNA, 536 bp, Zea mays
  unsure (1)..(536): unsure at all n locations
ggtnttagggtgatctgacttagtaacgatagctantctcgaaccgctccggaattcccgggtcgacccacgcgtccggccaccatcgaccttcaagtctcgctacgtagcagtgcaataaaaaaagcagccgcaatggcgagcagcaccatggccctctcctccacggccttcgccggcaaggccgtgaacgtgccgtcgtcgtccgccttcggcgaggcccgcgtgacgatgcgcaagacggcggggaaggccaagccggcggcggcgtccgggagcccgtggtacggccccgaccgcgtgctgtacctgggcccactgtccggcgaggccgncgagctacctgacgggcgagttcccgggcgactacggctgggacaccgcggngctgtcggcggacccggagacgttcgccaagaaccgggagctggaggtgatccactcccgctgggccatgctgggcgcgctcggctgcgtcttcccggagctgctcgcccgcaacggcgtcaagttcggcgaggccgtgtgngtcaagn

SEQ ID NO: 86454 - DNA, 537 bp, Zea mays
  unsure (1)..(537): unsure at all n locations
nagtaaaggtgtgtctgatcacttagcactgagctcatncnanngctgtaccggtccggaattcccgggcgaagagttccttgagccacttgagctgtgctacaaatcactgtgtgactgcggcgacaaggccatcgcggacgggagcctcctggacctcctgcgccaggtgttcacgttcgggctctccctggtgaagctggacatccggcaggagtcggagcggcacaccgacgtgatcgacgccatcaccacgcacctcggcatcgggtcgtaccgcgagtggcccgaggacaagaggcaggagtggctgctgtcggagctgcgaagcaagcgcccgctgctgcccccggaccttccccagaccgacgagatcgccgacgtcatcggcgcgttccacgtactcgcggagctccctgccgacagcttcggcccctacatcatctgcatggcgaacggcccctcggacgtgctcgncgtggagctttctgcacgccagtgccgcttgccccagccgttgcccgaggtgccgctgtn

SEQ ID NO: 86455 - DNA, 538 bp, Zea mays
  unsure (1)..(538): unsure at all n locations
ngggtttagtagaggttgtcgcatgtaccaagacgtgatcgcacgctgtaccggtccggaattcccgggtcgacccacgcgtccgcaaagagctaccctgaccagatttggccgcttcctcctctgcctcccgctagccctaggccagccccccgagatctgctccgcgcgagcagccatggcggagacgctcgacatgaccctcgatgacatcatcaagaacaacaagaagagtaacccctcctccggcggggcccgccgcagccgcggcggatccgcccctggcggcggcagcggcggggtcgggccgaccaggcgctccttcaagagggctgggaacaggcaggcgccctaccagccgncgaaggcccctgacgctgcgtggcagcacgacatgtaccctgcggtcgccgcaggaggcggcggcggcgggagggtctcggcgctcgagacgggcaccaagctctacatctccaacctggactntggggtttcgaacgacgatatcaaggagctggtctctgagctaggtgatctg

SEQ ID NO: 86456 - DNA, 534 bp, Zea mays
  unsure (1)..(534): unsure at all n locations
gagtttagagtggttangcatggttcagctcctacagtactgctgtaccggttcggaattcccggctcgacccacgcgtccggtcgttgagccttaaccagctcaccaccatgtttgatctcagcgagcagcatgcccagagtattgttagcaaaatgatgatgcatgaagagcttcaggctagctggcaccagccaacaaagtgcaccgtgtttcacagcctggatcaaaccaggcttcaggagctactcttccaggttgcagaaaaaatatcggtcctggtggagacaaacgagagggcatacgagttaagaactggtggtactcttgaagggctaccgtccaggcgcatgggcgaggctcaggattcatccaagtggcaggagagctttgtcgcatcacaggggcggcagggtggtggcaaccggtttggatactccggtagaagtgcagcatctggtcaaagtggtggactccagaggggcaagggcaatcatgtttcccgcggtggatacggtggcaatacacgatttt

SEQ ID NO: 86457 - DNA, 535 bp, Zea mays
  unsure (1)..(535): unsure at all n locations
aggagttngaggtgtctgtcgccagcncccancgctcacagccaccggtccggaattcccgggtcgacccacgcgtccgcccgattcgccacgaagccgcactgtgagagagggacgcggcccgttgtcctcggcttgtacgcagtccttccgtcgctgcgaagctgatccctcgtgttcgccatggcccccagcgtcgccgtggaaaacctcaaccccaaggtcttgaaatgtgagtatgcagtccgcggcgagattgtcatccatgctcagcgcttgcagcaacaactacaaacacaaccagggtctctttcttttgatgagatcctgttctgcaacattgggaatcctcaatcccttggtcagcaacctgtgacgttctttagggaggttcttgctctttgtgatcatccatgcctcttggaaaaagaggaaaccaaatcatcgttcagtgctgatgctatttctcgagcacagcagattcttgcaactattcctggacgggctacacgtgcatattgtacaggctgggtat

SEQ ID NO: 86458 - DNA, 527 bp, Zea mays
  unsure (1)..(527): unsure at all n locations
aggtagtgaactcgttctttacctacntgactgnaggtcaatcactcgctcggaatttccgggtcgacccacgcgtccgggttgaggtggcttcttacacacaatgttatatttttcccgggactgataataacggggctctggtggcttataaaattgcatctcttgctgacctttatgtcaatgatgcttttggcacggcacacaaagctcatgcttcaacccaaggagttaccaagtatttgaagcctgctgttgccggcttcctcatgcataatgaacttgactaccttgttggaactgttgccaacccaaagaagccatttgccgctattgttggtggatccaaggtctcaagtaagattggtgtcattgaatccttgctggcgaaagtcgatatccttatccttggtggtggtatgatctacacattttacaaagcacaaggatattctgttggaaaatctctcttggaaaaggattaacttgagctttcaacttctcttatttagaacccgatagcaaat

SEQ ID NO: 86459 - DNA, 525 bp, Zea mays
  unsure (1)..(525): unsure at all n locations
agttagtnatcctcggttttgtccatgcctactgatactccgtacagctccggaattcccgggtcgacccacgcgtccgggcgccatacgcaaatgccctgaagaaactcgagaaagatatcaaggacaaacaagcaagcgtgaacgagaagattggcgtcaaggaatccgacacgggtctcgcgcctccccatctttgggatgttgccgccgaccggcaacgaatggccgaagaacagccgctccaagtggctcgttgcacaaagattattcaggatgagaaagattccgacaagagcaaatatgtgatcaacgtgaaacagatcgccaagttcgtagtgaacctgggagagcgcgtcagcccaacggatatcgaagaaggcatgcgagttggtgtcgaccggaacaagtaccaaattatgctaccactcccgcccaaaatcgatcccagtgttacgatgatgacggtcgaggacaagcccgatgtcacttatggtgacgtgggtggatgcaaggaacaaatca

SEQ ID NO: 86460 - DNA, 538 bp, Zea mays
  unsure (1)..(538): unsure at all n locations
ggggtttagtgggtttgatgatagtagcaccgtagtcanatcgcgancncctccggaattccggggacgacccacgcgtccgggccattcttctcgccttactccctcacagaacccagtaaaatattgccagtcccgccgtcgagatggccccacgccgcctgctcgtcctcgccgtcgtcgccctcgcggccaccgccgccgcggccaactccggcttcgcggactcgaacccgatccgccccgtcaccgaccgcgcggcctccgcgctcgagtccacggtcttcgccgcgctcggccgcacccgcgacgcgctccgcttcgcacgcttcgctgtgaggtacggcaagagctacgagagcgcggcggaggtccacaagcggttcaggatcttctccgagagtctccagctcgtccgctccaccaatcggaaaggcctctcctaccgncctcgcatcaaccgcttcgcggacatgagctgggaggagttccgtgcgacccggctcggcgcagcccagaactgctccgncacgcttac

SEQ ID NO: 86461 - DNA, 531 bp, Zea mays
  unsure (1)..(531): unsure at all n locations
tggtnttagtggttggcatagaaagatagtattctcgaacccgtccggaattcccgggtcgacccacgcgtccgggtctcaccatctcatctcatcccaccaccaccaccaccaccaccaccaccaccatcggtaggataagatagcaaatatatggccatcatactcgtacgagcagcgtcgccggggctctccgccgccgacagcatcagccaccaggggactctccagtgctccaccctgctcaagacgaagaggccggcggcgcgccggtggatgccctgctcgctccttggcctccacccgtgggaggctggccgtccctcccccgccgtctactccagcctcgccgtcaacccggcgggagaggccgtcgtctcgtccgagcagaaggtctacgacgtcgtgctcaagcaagccgcattgctcaaacgccagctgcgcacgccggtcctcgacgccaggccccaggacatggacatgccacgcaacgggctcaaggaagcctacgaccgctgcggcgagatctgt

SEQ ID NO: 86462 - DNA, 540 bp, Zea mays
  unsure (1)..(540): unsure at all n locations
aggtttgagggtgtctgaaccttgtagttatgagtcatccgctanagctcgtaccggttcggaattcccgggtcgacccacgcgtccgctccgccacccgacaaactactcaataaccctagctaaacccccacgccgccgcggcgacctcctccgccggcgggatggacagcctcaggggagccaagttgccgggcgtgccgaagggcgggagtgcgctcgtgaaggtggcgctgctcggcggcgcggggctctacgccgtcctcaacagcttctacaacgtcgagggcggacaccgcgccatcgtcttcaaccgcctcgaggggatcaaggacaaggtgtaccccgaaggaactcacctgatgatcccgtggatcgaaaggccgatcatctacgacgtccgcgcccgacccaacctcgtcgagagcacctccggaagccgcgacctccagatggtgagaattggtcttcgtgtccttactcgacccatgccagaccagctacctaaaatctacaggaacttggtnggagaacttcaan

SEQ ID NO: 86463 - DNA, 544 bp, Zea mays
  unsure (1)..(544): unsure at all n locations
tgggtnaagagaggctcgncgtatagtattcaagatagtcgattgccactgctcgtaccggtccggaattcccgggtcgacccacgcgtccgcctgagcaaaggagggaaaattactcatatgatattacttatgtcacaaacagtgagcttggttttgattatctaagagataaccttgcaatgactgtagatgaacttgtcttgaggaacttcaattactgtgtgatagatgaagttgattcaatccttattgatgaagcaagaacacctcttataatatcaggcctagctgaaaagccaagtgatcggtattacaaagcagcaaaaatagctgaagcttttgagcgagacattcattacacggtggatgaaaagcagagaaacgttttacttacagaagaaggttatgctgatgctgaagaaatactggacatagatgatctgtacgatcctcgtgaacagtgggcttcgtatattctaaatgcaatcaaggctaaggagctctttcttaaagatgtcaattacattgntcgtagcaggga

SEQ ID NO: 86464 - DNA, 531 bp, Zea mays
agtttgggaggtcgggctggcataggagcatttgtcatgctgtaccggtccggaattcccgggtcgacccacgcgtccggtgagtgaacaccagccgtcttggcccgcttctcccctgctgcggccatggcgacctccgcggcgctctcgaccgccgccaaccccacccagctctgccggtcccgcgctgcgctgggcaagccagtgaaggggcttggcctggggatggggcggtagcgcgcaagccagcggagcatcacgtgccaggcggcgagcagcatccccgccgaccgcgtccccgacatggagaagcggaagctgatgaacctactcctcctgggcgccatatcgctgcccaccgtcggcatggtcgaccactacggcgccttcttcgtccccgccggctccgggaacggcggcagcgggacctacgccaaggacaagctgggcaacgacatcacggtggaggagtggctcaacacgcacggtcccaacgaccgtacgctcgcgcaagggctcaagggtgacccc

SEQ ID NO: 86465 - DNA, 539 bp, Zea mays
  unsure (1)..(539): unsure at all n locations
agttttggggaggctgnacgtacgtagtaagcatgtcactgtcactgctcgtaccggtccggaattcccgggtcgacccacgcgtccgcttaattcatgagttgtagggagggacttatgtcaccacaaacagaaactaaagcaagtgttggatttaaagctggtgttaaggattataaattgacttactacaccccggagtacgaaaccaaggatactgatatcttggcagcattccgagtaactcctcagctcggggttccgcctgaagaagcaggagctgcagtagctgcggaatcttctactggtacatggacaactgtttggactgatggacttaccagtcttgatcgttacaaaggacgatgctatcacatcgagcccgttcctggggacccagatcaatatatctgttatgtagcttatccattagacctatttgaagagggttctgttactaacatgtttacttccattgtgggtaacgtatttggtttcaaagccttacgcgctctacgtttggaggatctacgaattcc

SEQ ID NO: 86466 - DNA, 532 bp, Zea mays
  unsure (1)..(532): unsure at all n locations
agtagganctcggtgtttnctcgaattaaagatagatcgtaccggctcggaattcccgggtcgacccacgcgtccgatccatcagctattcagctatcacaaaagaaaaaaaaagggaaagggccgcgacgagccgacgagcaacgacgaccatggcgacgatggccgcttcttcctgccacgggcaacttctcctgtttctcctcgtggccgtcgcgtcggcctgcctcggctccgcggcagcgcatcaagccggatctggagagggctacacgatcgctggccgcgtcaagatcgatggcatgagcgtgaagggctttggtcttgcaacaaagacatcaaacacaaaagtgatacttaatggcggccagagggttacatttgccaggccagacggctactttgcattccacaacgtgccagctggaactcatctgattgaggtctcctcaattggttacttcttttccccagttcgagtagatatcagtgcaaggaatcctggttatattcaaagccgcttggctggaaa

SEQ ID NO: 86467 - DNA, 534 bp, Zea mays
  unsure (1)..(534): unsure at all n locations
aggagtntnctagagtcttaccctagcttacaagaaattactgnaccgcctcggaattcccgggtcgacccacgcgtccgctcattgccattgtgtaatcctcatcctccgtcgagatcaaggaagaaagaaagcaaccatggcggcaaccggaatgtccccctccccctcggccgcaataactcgccacatccatgctcgtcgttcctgtgctgctgcttccttgtccctccgccgctcgggcttcctggggcgcgtcgtgctggccgcggtgccagtggccgtggacgccacccggcgccgccgcgtctccgtgtcggtgcggatggcctgggacggtccgctctcgtcggtgcgcctcatcatgcagagcaggaacgcgaagctgagcgagaagctcaaggagcacatcgaggacaaagtgggtcgggcggtgtccaagcactgccacctggtccgggaggtggacgtgcgcctctacgagcgcggcggcaagctcggccggggcccccaagacgttggcttccagatcac

SEQ ID NO: 86468 - DNA, 523 bp, Zea mays
  unsure (1)..(523): unsure at all n locations
agttaggannctcggttctgtgcagcnctatgactagtaccgtaccgccccggaattcccgggtcgacccacgcgtccgcaaccggtccaacactttcacgctcaggcgctcagctctagcaatggctgcctccaccatggcggtctcctccacggcgatggccggtacccccatcaaggtgggctccttcggcgagggccgcatcaccatgcgcaagaccgtgggcaagcccaaggtggcggcgtccggcagcccctggtacggccccgaccgcgtcaagtacctcggccccttctccggcgagcccccgagctacctcaccggcgagttccccggcgactacggctgggacaccggcgggctgtccgccgaccccgagaccttcgccaagaaccgcgagctggaagtgatccactcccgatgggccatgctcggcgcgctcggctgcgtcttncccgagctgctctcccgcaacggcgtcaagttctgcgaggccgtctggttcagggtcggttccagatt

SEQ ID NO: 86469 - DNA, 536 bp, Zea mays
  unsure (1)..(536): unsure at all n locations
ggttattaggaggttggtgtatggtgatagaaaggtagtcgtcatacccgtccggaattcccgggcttgccaactttctgcgacacggtggaggcgtggagctaactacccccgcgctggctcgccaccgccgccgcagcaggcgtgggaatctgggcagcgccccgcggagaagaggaggcagcgcgctctccgtccgccatggcgggctcttccgaccccgacaagctcatgagcaaagccgacaaactaacaaaattgagttttacaagatggaatgctgattggaaaagcgctacctccttgtatgagcaagctgcaattgcgtataggttcagaaaggacaatgagaaagcaaaagatgcttttgagaaggcctcaaaaggacaggaaatgatctcctcaccatgggacgctgctaagcatatggaatctgctgctgctttagcaaaggagcttgggcgctggaatgaagtatctgatttctatcacagagcttcagaattataccgtgaatgtngaaggccacaacctgc

SEQ ID NO: 86470 - DNA, 529 bp, Zea mays
  unsure (1)..(529): unsure at all n locations
tggtttaggggtcntggtggctcatcgtcacattcncactgctgtactcgtccggaattcccgggtcgacccacgcgtccgagttctttggcttggacaggacatttagttcatgttgctattcccggatccaggggggagtacgttcgatggaataatttcttagatgtattaccctatccccaggggttgggtccccttctgactggtcagtggaatctgtatgcccacaatcctgattcgagtactcatttatttggtaccactcaaggagctggtactgccattgctacctcttttggtggactccatccacttacacatagtttgtggctgaccgatattgctcatcatcatgctatctatagcgtctattaaggtcatggccatgatatatctatcgttctaaccttctaatcgtatacagtatgatagttcttttacaaacgcactttctcgctggaatgcaatatttgctttctattacagacctttaaaatataccctgaatgtgtaagacccaactttt

SEQ ID NO: 86471 - DNA, 529 bp, Zea mays
  unsure (1)..(529): unsure at all n locations
agataaggagctctagcattataaagacactcagcatgcctgtaccggtccggaattcccgggtcgacccacgcgtccgtctgcgtacacggtctccctcttcctgtcagtagtagagtgagagtgaggcagcgagtgggagacaaggggaaatggggaagggagcgcaagggagcgatgcggcggcggcgggcggcgaggtggaggagaacatggcggcgtggctggttgccaagaacaccctcaagatcatgcccttcaagctcccgcccgtcggcccttatgatgtccgcgtgcgcatgaaggcagtggggatttgcggcagcgatgtgcactacctcagggagatgcgcatcgcgcacttcgtcgtgaaggagccgatggtgatcgggcacgagtgcgcgggcgtggtcgaggaagtgggcgccggcgtgacgcacctgtccgtgggcgaccgcgtggcgctggagccgggcgtcagctgctggcgctgccgncactgcaagggcgggcggtacaacctgtgcga

SEQ ID NO: 86472 - DNA, 524 bp, Zea mays
  unsure (1)..(524): unsure at all n locations
aggttagtncttaggttctgactacgcataaagaaaaggatgtaccgccccggaattcccgggtcgacccacgcgtccggtcgtcgcagaacgaggtgctgctccgggagaagctgcccaccagggagctctacctgaacctgcgctcctccgacacctgggtcgccgagtacaggaagtggatggacagggcgggccacggcatgccctactacttcggccacagcaccctgtcgccgccgcccgtgccggccgtcgtggagcaggcgcccgcaggggccgtcgcggggatctcggcctcgttcccggccaagggcggcgtcggcatggtgcacgcgcccaacccgaccaacaggtacttccgccacgtcgtgcactgcaagggttgcagggcaaccgtcaaaaagtacacctcgttgaagaccgtgttcgcggccctcgcggcggcggccctatcggccgncatcctggcggcgaccaggcagtggaaagccgtcttggtgggccgcgtcggcctgctagcc

SEQ ID NO: 86473 - DNA, 529 bp, Zea mays
  unsure (1)..(529): unsure at all n locations
gaggttaggtggttgagtagagatagatagtagtctcgaacccgtccggaattcccgggtcgacccacgcgtccgagataacacacacacacacaaaccccaatcccctgcggcggcgatggacccgtcatcggcgggctccggcggcaactccctcccgtccgtcggccccgacgggcagaagcggcgcgtgtgctacttctacgacccggatgtgggcaactactactacgggcagggccatccgatgaagccgcaccgcatccggatgacgcactcgctgctggcgcgctacggcctcctcaaccagatgccaggtgtaccgcccaacccggcccgcgaccgcgacctctgccgcttccacgccgacgactacatcaacttcctgcgctccgtcacgccggaaacgcagcaggaccagatccgnctgctcaagcgcttcaacgtccgcgaggactgccccgtcttcgacggcctctacagcttctgccagacctatgcgggcgcctncgtcggcggggccgtcaac

SEQ ID NO: 86474 - DNA, 531 bp, Zea mays
  unsure (1)..(531): unsure at all n locations
nagtntnaggtggtttggtatagaatagtagtattctcataccgcgtccggaattcccgggtcgacccacgcgtccgcaccactgctacccaaccctcgcttccccaaaccctagccaagggacacggtggccggcgatggacggcgacggaggaggcgctggtgcgctgcaccaccacacgcgctcacccgaggacgtcttccgcgatttccgcgcgcgccgagccggcatcgtcaaggcgctcaccacggatgtggagaagttctatcagcagtgcgatccagagaaagagaacttgtgcctttatggtttgccaaatgagacttgggaggtcactcttccagctgaggaagtacctcctgagcttccagaaccagcactggggataaactttgcccgtgatggaatggtcgaaaaagactggttgtctctagttgcagttcatagtgatgcatggctcctgtctgttgcattctattttggagctcgttntggatttgacanagatgccaggagaaggctcttcacca

SEQ ID NO: 86475 - DNA, 532 bp, Zea mays
  unsure (1)..(532): unsure at all n locations
ggtttaaggaggtcnagcatgcatcaagaaggtaggcatgctcgtaccggtccggaattcccgggtcgacccacgcgtccgcggcctcaaccgcttcgccgacctcaccaacgacgagtaccgcgccacctacctcggggccaggaccaggccgcagagggagaggaagctcggcgccaggtaccacgccgccgacaacgaggacctgccggagtccgtcgactggagggccaagggcgccgtcgccgaggtcaaggaccagggcagctgcgggagctgttgggctttctcaacaatagcagctgtggaaggcatcaaccagattgttacaggcgacttgatctccttgtctgaacaagagcttgtcgactgtgacacttcgtacaatcaggggtgcaatggaggtctgatggactatgcatttgagttcatcatcaacaatgggcggaatcgacaccgagaaagattacccttacaagggcacggacggacggtgtgatgtcaacaggaaaaacgcgaagggtgtcactat

SEQ ID NO: 86476 - DNA, 534 bp, Zea mays
  unsure (1)..(534): unsure at all n locations
agcttagagatgctcgtgacatttgcatngccacgatacatcaactcttccgattcggaattcgagccacgcgtacgcgtactgggtctcaaccgcttcttctccaaactctagacaagggacacgccagccgggtagtgaccactaccaaggaggcgctggtgcgctagaccaccacacgcgctcacccgaggacgtcttccgacgatttccgcgcgcgccgagccgacatcgtcaaggcgctcaccacggatgtggacaagttctatcagcagtgctatccagataaagagaacttgtgcctttatggattgccaaatgagacttgtgaggtcactcttacagctgaggaagtaccttctgagcttccataaccagcactgtagataaactttgcccgtgatggaatggtcgaataagactggttgtctctagttgcagttcatagtgatgcatggctcctgtctgttgcattctatgttgcagctcgtactggatttgactaataatgccaggaagaagcttttcaaccat

SEQ ID NO: 86477 - DNA, 536 bp, Zea mays
tagtttaagagtaggtcggtggttggcgtcaccgcccacatcgccatgatgtaccggttcggaattcgagccacgagtcacacgtaacacgcacgcacgcacacaccaatccgctgcagcggcgacagacaccgaatcggcggggtacggcagcaactccatgacgtccgaaagccccgacgggcagaagcggtacgtgtgctacttctacaacccggatgtgggcaactactactacgggcagggccatccgatgaagccgcaccggattcggatgacgcactcgatgctggcgcgctacggcctgctcaaccagatgcaggtgtaccgccccaacccggcccgcgaccgcgacctttgccgcttccacgccgacgactacatcaacttcctgcgctccgtcacgccggaaacgcagcacgaccagatccggctgctaagcgcttcaacgtctgcgaggactgcccccgtttcgacggcctgtacagcttctgccagacctatgctggcgccttcgtcggaagggccgtcaagct

SEQ ID NO: 86478 - DNA, 523 bp, Zea mays
  unsure (1)..(523): unsure at all n locations
agttagggctaggtttgacctagctcttcagcnaccatcgtaccgccccggaattcccgggtcgacccacgcgtccgcaaagagttctagatgagattcgctggcgttactacgaggaaaccgttatgatactggatctcgtgccttatcgagcatcgtatcccatcttaaagttggtttattcggcagcagcaaatgctactcattatagggatttcgacaaaacgaatttattcatcactaaagccgaagtcagtaggagtactattatgaaaaaattcagacctcgagctcgaggacgtagttattctataaaaaaaacgatgtgtaatataacaattgtactaaatatagtaaagaaatcaaaataatctttagatcaatctaagatttcgattcccagtaaaaaaaaaagaaatataatagaaaaatatgggacaaaaaataaatccactcggtttcagacttggtacaacccanaatcaccattccttttggttcgcacaaccaaaaaattattctt

SEQ ID NO: 86479 - DNA, 522 bp, Zea mays
  unsure (1)..(522): unsure at all n locations
aggtagtttctagggttgangctgcncttagctacctccgtaccgccccggaattcccgggtcgacccacgcgtccgcgccgcctggccgccggggcaccccttcgggggttccttggcgcgccaatccgggccgtggcggcgtcggcgtcggcggcccccgcggcggcggccaagaccatcgcggtcggggaccggctccctgacgcgacgctctcctacttcgacacgtcctcccccgacggcgagctgaagacggtgacggtccgcgacctcaccgcggggaagaaggtggtgctcttcgccgtgcccggcgcgttcacgcccacctgcacccagaagcacctcccggggttcgtggccaaggccggggagctccgcgccaagggcgtcgacaccgtggcctgcgtctccgtcaacgacgccttcgtgatgcgcgcgtggaaggagagtctggggatcggggacgaggtgctgctcctgtcggacggcaacggcgagctggcgccccccatgggcgttt

SEQ ID NO: 86480 - DNA, 535 bp, Zea mays
  unsure (1)..(535): unsure at all n locations
agatatgagcgtgggtctgagccctagcccgatgctactgccgaactcgtccggaattcccgggtcgacccacgcgtccgaccccgtgcaagaccaagcccctgctcctcctcacctggcgaggctccgatccctccgtccccgccgtgctcctcaactcccacatggactccgtccccgcggagcccgagcactgggcgcaccctccattcgccgcgcaccgcgacccgaccacgggccgcatctacgcgcgcggcgcacaggacgacaagtgcctccccgtccagtacctcgaggcgatccggggcctgcaggccgcggggttcgctcccgcccgcaccatccacatctcgcttgtccccgacgaggagatcggtggcgcggatgggttcgacaagttcgcccgatcggaggagttccgcgccctcaacatcgggtttatgctcgacgaggngcaggcgtcgccgacggacgtgttcagagttttctacgcggacaggctggtgtggaggctcgtcgtgaaggcggcgggggc

SEQ ID NO: 86481 - DNA, 529 bp, Zea mays
  unsure (1)..(529): unsure at all n locations
ggtaaaagtgtttggcctagtaaagaagatacgccacgtgtaccggtccggaattcccgggtcgacccacgcgtccgatacactactgccgtgcccccctcccttctctctctcttcgccgcagcgtcggccgacggcaaaaccctagatctctctccctcttaaaccctctcaacaagtgcgggaggatgtcagagccgtccaaggtaatccacatccgcaacgtcgggcacgagattgccgagtctgatctccttcagctgctgcagccgttcggcatggtctccaagatcgtcatgttgcgtgccaagaaccaagctcttctgcagatggaagacctccatgcttccgtgagcgcgctgcaatattacacttctgttcaacctagcataaggggaaggaatgtatacatgcagttctcatctcaccaagagcttaccactgaccagagctctcatggaagggattctgatcaagggtccgaacccaaccgaatacttttagttactatccaccatatgatctatcn

SEQ ID NO: 86482 - DNA, 523 bp, Zea mays
agtagggctcggttgacctcgataaagctatggatgtaccgctccggaattcccgggtcgacccacgcgtccgcaggatgtcaagcaagacaaatcaaagtctgtcaatgaaatgtgcccatctctatgaagtaaaatgttctctggctttaagtctctgtagattataccttggcaatgtaggtattcaagtgctgtgaccacttctgcagcatagaacctgaccgcatcctccttcagaaccttcataggttgcctatcaaggagcataaagagttccccaccagcacaatagtcaacaataagacatatatgtgtctttgtctgaaatgatgcatacaatgtcggaaggaatgggtggtccaacatatcaaggatttgtcgttcagcggtagctctatggaccttgtttcggttaagcatgacacttttatccatagctttcatggcaaagtattcacctgtgccaagcaacttcaccaaatggacactgccagtatcaccagattctaaatgccttacc

SEQ ID NO: 86483 - DNA, 519 bp, Zea mays
  unsure (1)..(519): unsure at all n locations
agtagggnggagagttgtanccgggttcatncgcttcnnatagctttcccttcggcaaaccgctcgaccacgcgtacgcgctggccaagagcggctcgccaattatgggacccatgagcaaggaggggacgatggtggcctgcacgctgctgcttaccgctggtctttggatcttttgaggcatgctgaatgtggatgccgtttctgcagcaattcttggcctaacaatcctcttaatctcaagggttgtcacatggaaagaatgtttggcagaatctgtggcgtgggatacccttacatggtttgcagcacttatagcaatggctggctaccttaacaaaatcgggctgatctcttgggtcaatgagactgttgtgaaatttgttggaaggcttggcatgtcatggcaactctcattcggtgtgctggtgcttctgtacttttacttgcactatatttttgtcaatggtgccccccacattggagcaaagtttaacgcagttccttttcgtggggaag

SEQ ID NO: 86484 - DNA, 533 bp, Zea mays
  unsure (1)..(533): unsure at all n locations
nggtnttaagctgatctgagccacgcatagaagtaggtgcatcncgtccggaattcccgggtcgacccacgcgtccgccaccatccggaagaacatgccggtggaggagggcgggccgggcgaggagatggagaagttcctcaagcagccggagacgacgctgctggacatgctgcccacgcagatgcaggccatcaaggtcatgacgacgctggacatcctctcgtcgcactcgcccgacgaggagtacatgggggagttcgcggagccgtcgtggctggcggagcccatggtgaaggcggcgttcgagaagttcggcggcaggatgaatgagatcgacgggttcatcgacgagtgcaacaacaacctggacctcaagaaccgctgcggcgtcgggatcgtgccgtacgaactgctgaagcacctatctaagcctgcagtagacccgaggcgctttcctcagagaacttgcagagtctgcacacgaggcacgcgtgcatcccaccgatggtctgcccgaccatttcgactgg

SEQ ID NO: 86485 - DNA, 529 bp, Zea mays
  unsure (1)..(529): unsure at all n locations
agggttaagagtctggccctgcacgttgncatgcnactcgtccgcattcccgggtcgacccacgcgtccgatccctaatggagcgaagacaattgaaactgcttctgggcatattgctccagtgacgggccgtgcgctgtcacctgatagcaactactcttgagacaggttctagagataccacagatatactatggaggaatcataatacagatatcctaacataagacacgtgatcaagaactctgatctacttacactactgcaccagtcagtatgttctctaacatcagttatcatgattagcaggaactaagatactatgagacttgaagacgtacatgcattccttatcatgctaggatattacacttatgttcaacgtagcataatgagaaggaatgtatacatgcaattctcatcttaacaagagcttaccactgaccagagctctcatggaaggaattctgatcatgggttcgaacctaacctaatacttttagttactattcaccatatgatttatatg

SEQ ID NO: 86486 - DNA, 531 bp, Zea mays
  unsure (1)..(531): unsure at all n locations
nggtttaaggtgtttgactatgaatgaagtagtctcgaaccgctccggaattcccgggtcgacccacgcgtccgcattcataggctgcctgcctgcctgctgatctcgcacctcaaacccacacacagcagcataggttgagatagatggccagtctgtggaagaccaaggttctgcctggcctcaacaagatcttcgacaaggatggcaagaaggctgcagctgcaggcttcttcaagtccttcaacaaggaggagattggcaaggagattgaggagaagaaggcagaactggagcccaaggttgcggaggcttatgaagcatctcctcctgaggtcaaggctctgttcaaggataagaagccagtcaagatcagcaagaagaactcgactgcagttaccaagttcctcgatgagctggctaagattgacttccctggagccaaggtggtgagcgaggcggtggccaagtccggcgcctcgcccctgtctccggcgatcaccttcatcttggacaaggtcgcaccgtaca

SEQ ID NO: 86487 - DNA, 530 bp, Zea mays
  unsure (1)..(530): unsure at all n locations
ngggttcaggtggtctgacatagcatagatagtagtctcaacncgtccggattcccgggtcgacccacgcgtccgccagagctgctcttgtccggagacggagccgactgaacatggccggagacccgggggacgcgccggaggtgggaggcggcggcatacgctccgtgctcaccacggcctcgctcgtcgctccctccggggacgaggttcagtttcgggagatcgacggcaagatcatcggcctctacttcgcggcaaactggtatccgaaatgcgaggctttcaccccggtgctggccgcggcgtacgagcagctcaaggagcgcggcgccggcttcgaggtcgtgctggtgtcgtgcgacgaggaccggccgtcgttcgagcggttccacggaaccatgccgtggccagcggtgcctttcggcgacctcagctgcaagaagcgcctcagcgagaggttccaggtggagggcatcccgcgcctggtggtgctcgctccggaacggcggcgcgtggtacacccggcc

SEQ ID NO: 86488 - DNA, 528 bp, Zea mays
  unsure (1)..(528): unsure at all n locations
ggttataagagttggtatgagaagaaggtatctgcaacccctccggaattcccgggcaagaatttacttttacaatcaaaaggggagttgggactgatacgtgtgttagcgttaactatgacgactttgttaatgatgttgaagtgggcgacatgctccttgtagatggaggaatgatgtcattcttggtcaaatcaaaaactgaagattctgtgaaatgtgaagttattgacggtggtgaattgaaatctaggcgccatctgaatgttcgtggaaagagtgcaaccttgccatcaataactgacaaggactgggacgacattaagtttggtgtggataatcaagttgattactatgctgtttcctttgtgaaagatgctcaagttgtccacgaactcaaggattatctaaaaagttgcaatgctgacatacatggtatcgtaaaaatagaaagtgcagactccatccccaacttacatttcatcatcacagcatctgatggngctaatgtttgcaggggtgaccttt

SEQ ID NO: 86489 - DNA, 534 bp, Zea mays
cgttttaggaggctggcgctcgcatcaagaaagtccgcactgccgtaccggtccggaattcccgggtcgacccacgcgtccgcgcacaccccggcagccgcaaacgccttcgccgtcgcgtcccgctcctccgcccgccggacgcgacccctaggacctggagagagaggtcggcatggctgccgcagtggtcgacgacgctggtatggacgccgtccagaagcgcctcatgttcgaagacgaatgcattttggtggacgagcaggacaatgttgttggccatgagtcaaagtacaactgccatttgatggaaaagattgattctgagaatctgctacatagggcattcagtgtgttccttttcaactcaaaatatgagctgctacttcagcaaaggtccgcgacaaaggttacctttcctttagtttggaccaatacctgctgcagtcaccctctgtaccgtgagtctgagcttatccaggagaactaccttggtgtgagaaatgcaacacagaggaagctactggatgagct

SEQ ID NO: 86490 - DNA, 543 bp, Zea mays
  unsure (1)..(543): unsure at all n locations
gagatcaaatagggcttgnngctcgtagaccgacgcaaanatgcattgctcgtaccggtccggaattcccgggtcgacccacgcgtccggcagcagcacgagcagcacgtcgtgccgctccaaccatctcgcttccgtgcttagctgcccgccgcgccatggcgtcgaccaaggctcccggccccggcgagaagcaccactccatcgacgcgcagctccgtcagctggtcccaggcaaggtctccgaggacgacaagctcatcgagtacgatgcgctgctcgtcgaccgcttcctcaacatccttcaggacctccacgggcctagccttcgcgaatttgtccaggagtgctacgaggtatcggccgactacgagggcaaaggagacacgacgaagctgggcgagctcggcgccaagctcacggggctggcccctgccgacgccatcctcgtggcgagctccatcctgcacatgctcaacctcgccaacctggccgaggaggtgcagatcgcgcaccgncgncgcaacagcaaactcaagaaag

SEQ ID NO: 86491 - DNA, 509 bp, Zea mays
  unsure (1)..(509): unsure at all n locations
aggagggctcagtctgtnctttttctgcacgtgagctatgctctcccatcggctcaccacgcgtccagggatctggatacagccactcattttactttaagaactcgctgcatcacaggttcctgaatgagctggctaagattgacttccctggagccaaggtggtgagcgaggcggtggccaagtccggcacctcgcccctgcttccggcgatcaccttcatcttggacaaggtcgcaccgtttatccccaatgaggagcccaaggcggagccggcggcggaggccaccttccgggaagtcgccgtggaggagaagaaggaggaggccgagccagctgcagcgacggaggctgcaccggcgccggcagagacaccgtctgaagaagccgtggtagaagataagaaggaagaatataataacgaagatgaagataaaccggctgcccaaaaagcagttccgtcagaaccagcaacttctgcttaagagaaatgatcctgttgactgatg

SEQ ID NO: 86492 - DNA, 533 bp, Zea mays
  unsure (1)..(533): unsure at all n locations
gaggataatggtgtttctgtgcctgcaacgttgcnatcccgatctcgttcggaattcccgggcttgccaactttctgcgacacggtggaggcgtggagctaactacccccgcgctggctcgccaccgccgccgcagcaggcgtgggaatctgggcagcgccccgcggagaagaggaggcagcgcgctctccgtccgccatggcgggctcttccgaccccgacaagctcatgagcaaagccgacaaactaacaaaattgagttttacaagatggaatgctgattggaaaagcgctacctccttgtatgagcaagctgcaattgcgtataggttcagaaaggacaatgagaaagcaaaagatgcttttgagaaggcctcaaaaggacaggaaatgatctcctcaccatgggacgctgctaagcatatggaatctgctgctgctttagcaaaggagcttgggcgctggaatgaagtatctgatttctatcacagagcttcagaattataccgtgaatgtggaagccacaacctgct

SEQ ID NO: 86493 - DNA, 533 bp, Zea mays
  unsure (1)..(533): unsure at all n locations
gggttaaaagggtctaccacgtagatagggatatctcaacncttccggaattccgggtcgaccaacgcgttcgcgacttgtttcattgattcttgaagagatcgagcttcttttgcaccacaaggtcgaggatgtcttgcaactgcggatcaagctgcggctgcggctcaagctgcaagtgcggcaagaagtaccctgacctggaggagacgagcaccgccgcgcaggccaccgtcgtcctcggcgtggccccggagaagaaggccgcgcccgagttcgtcgaggccgcggcggagtccggcgaggccgcccacggctgcagctgcggtggcaactgcaagtgcgacccctgcaactgctgatcacatcgatcgacgaccatggatatgattattatctatctagcttgtggtggtggttgaacaataataagcgaggccgagctggctgccatacataggtattgtgtggtgtgtgtgagagagagagaaacagagttcttcagtttgctatctctctctgcatgtttggcn

SEQ ID NO: 86494 - DNA, 529 bp, Zea mays
  unsure (1)..(529): unsure at all n locations
tggtntagaggttttgtcctcaccttgtatgtatactgaatgcttcggaattccgggtcgacccacgcgtccggcactacagcttaagtcactgaggtatctgtgggtacaaggattcaggtcatctccagctggagctgatattatggcaatggtacgccccttctggaacattgagtatattgttccagatcaagatgaaccttgcccagagcataagagacagattctggcatactactcccttgctggcaggaggacagattgtcctccatcagtaactctgctttacccggcattttgagtgtagatacttgctttttgccagactgaatctcatggtactaagttccattggtcccactatctgtgaagtaaatggtccctgttcttccaattgatgaggacatgcagacgttccagtgcaaagaaccccaaaggtaagctttaagcaggacggccagctctgaactgaggctagctgagaacaatcatgaatacctgaaggcagcacttatgtcaacttggn

SEQ ID NO: 86495 - DNA, 535 bp, Zea mays
  unsure (1)..(535): unsure at all n locations
ggtcttaagtgttttnaccatgtagtcgagggtaggtgcaaccgctccggaattcccgggtcgacccacgcgtccgagaaagggcatatcgaggaggtttttagggtggtggtggtgttgtgaggagctgctgccgctgctctccagtctccaccgatggcgatcaagaacatgacggtggcggcgacgacgcggtcgctggacgcggacatgacggtggacgagttcaaggagtggctgcggcggttcgacacggaccaggacgggcgcatcagccgcgacgagctgcggcgcgccctgcgtgccatccgctcccggttcacggggtggaggagcaggcagggcatcagttacgccgacgctgacggcgacggctacatcgacgacagcgaggtcgatggcctcatcgagttcgcgcagaagaacctcggcctcaagatcgtcgcctactgatctcacatggggcgcggcgcgcggcgggtcgggggtgggacgcactagctcgccatgagctagctatagcgaccatgcaccn

SEQ ID NO: 86496 - DNA, 544 bp, Zea mays
  unsure (1)..(544): unsure at all n locations
tggttattatagtgnntntnccccatcgaacatgnagcaatancntatggcggtaccggtccggaattcccgggtcgacccacgcgtacgctccttcccggtctcctccgcccgttgccttcgtcccctacatctccggctgcgtcgccggcgagcccgacaccgcgaatcggatccgccgacaaggcgagagggaaaagatggggcttacgttcaccaagctgttcagccggctgttcgccaagaaggagatgcggatcctgatggtgggactcgacgccgacggaaagaccaccatcctctacaagctgaagctaggcgagatcgtcaccaccatccccaccatcggattcaatgttgaaactgtggagtacaagaacatcagcttcactgtctgggatgtcggaggccaggacaagatcaagccactgtggacgcattacttncagaacacccactgtctcatcattggtgtggacagccatgatatggaccgtgttgctgaagcaagggatgagctttacccgatgctgaatgacgatta

SEQ ID NO: 86497 - DNA, 520 bp, Zea mays
  unsure (1)..(520): unsure at all n locations
agtaggancgtcggtttgactatgaactaagatagatggtaccgcccggattcccggtcgacccacgcgtccgggcgagcgcaacgggtacctcaagggcgtcgtcaccgacgtcatccacgaccccggccgtggcgcgccgctcgccaaggtcactttccgccacccattcaggtacaagcaccagaaggagctctttgtcgcagccgagggcatgtacacgggccagttcgtctactgcggtcgccgcgccaccctctccatcggcaacgtgctgcccctccgcgggatccctgagggtgccgtcgtctgcaacgtcgagcaccacgtcggtgaccgcggtgtcttcgccagggcctctggggactacgccattgtgatcagccacaaccctgacaacggcacatcgaggattaagctgccctctggcgccaagaagattgtccccagcagctgccgtgctatgattgggcaggttgctggtggaggcaggactgagaagccgatgctcaaggctggt

SEQ ID NO: 86498 - DNA, 536 bp, Zea mays
gagtagttaggagcgatgtctgctgctggaaggcttgatactgtcggacacggctccggattacctgctcgacccacgcgtccggtcgagctcgagccccagccaccgcagccatggtcctcacgaaaccctacctctccaactcgctccttccagtcccatccccgccgccgtcgagccctactctcagctccaaccatgcaagccccgttgccgcccctacttgccgtcgcagccgcctccgcatctccgccacatccacggctgcgccggctccttcgtcggctgccgctgccaccgcgtcgctgagtcgagtggacgtgctctcggaggcgctcccttttattcagcgattcaaaggcaagacggtggtggtcaagtacggcggtgcggcgatgaagtccccggagctgcaggcgttcgtgatccgcgatctcgtggctgctctcctgcgtcggcctccgacccgtgctcgttcacggcggcgggccggggattaagtccttggtgctgcgcgtcggggttcaaccggaaag

SEQ ID NO: 86499 - DNA, 537 bp, Zea mays
  unsure (1)..(537): unsure at all n locations
gatggggtgagggagctcgggtttgtccctggccatatganatcgtcgtaccgctccggaattcccgggtcgacccacgcgtccgccgctccttcctccccctatctagctagccttcccgttcctgcatcgcggcggagatgggcgccggcaccacgccgctcgcgtcggcggcggcgctgcttctgctgctgctcgcgccgctcgccgcggcggcggacagcatgtcgatcgtctcctacggcgagcggagcgaggaggaggcgcggcggatgtacgccgagtggatggcggcgcacggccggacctacaacgccgtcggcgaggaggagcgcaggttcgaggtgttcagggacaacctccgctacgtcgacgcccacaacgccggcggcgacgcgggccttcactcctttcgacctgggctcaacccgtttcgccgaccgacccaacgacgagtaccgtgccgacctacctggggttcaggagcagcccgcatagggagaggaggctcggtgacaggaaccggccgggggacac

SEQ ID NO: 86500 - DNA, 541 bp, Zea mays
gagatgtggtagagtggactaggttctgttccctgccctttatgtcactgcgtaccgccccggaattcccgggtcgacccacgcgtccgtctttctaaagagattcgattcggaactcttatatgtccaaggttaatatggaaattggttcagaggttttcccttactttgtccgtgtcaacaaacaattcgaaatacctcgactttttcagaacaggtccgagtcaaatagcaatgattcgaagcacttctttttccattacactatttcggaaacctaaggtctcgatcgtatggatatggaaaatacacgatttccggtcctagcgtgaaaaggatggaaacggatactcaatttaaagtgagttaacagaattccatactctatctcatagatccctatagaattctgttgaaagccgtattcgatgaaagtcctatgtaccgcttggtagggagatctttcctatctttctagatccaccctataacttgggtcccttatgccttattttaagtgtttccgggtttaggccctatc

SEQ ID NO: 86501 - DNA, 530 bp, Zea mays
  unsure (1)..(530): unsure at all n locations
ggtagttaggtagattctgacatcgatcatcganatcatcgtacgacactaccggttcggaattcccgggtcgacccacgcgtccgctccgatcgacctgctccctccccaccaccgagcccatggcggaccagctgaccgacgaccagatcgccgagttcaaggaggccttcagcctcttcgacaaggacggggatggttgcatcacgaccaaggagctgggcactgtcatgcgctcgctggggcaaaatcctacagaggctgagctccaggacatgatcaacgaggtcgatgctgatggcaacggcaccatcgatttcccagagtttctcaaccttatggctcgcaagatgaaggacaccgactctgaggaagagctcaaggaggccttccgtgtgtttgacaaggaccagaacggcttcatctcggccgccgagctccgccatgtcatgacaaatcttggtgagaagctaactgatgaggaggtggacgagatgatccgtgaggctgatgtcgaatgtgatggccaa

SEQ ID NO: 86502 - DNA, 521 bp, Zea mays
ttggttagtaggtttgtatgatcttagttagtagtactgctgtaccggttccggattcccgggtcgcccacgcgtccggctgatacgggagccaaccaggagatgccctcgcgcgaattgaaaagctttcagagagtaaacccgatgcttggcttccgtgggtgcaggcttggtatatcgtaccctgaattgacagagatgcaagcccgggccatttttgaagctgctatagcaatgaccaaccagggtgttcaagtgttcccagagataatggttcctcttgttggaacaccacaggaactggggcatcaagtgactcttatccgccaagttgctgagaaagtgttcgccaatgtggtcaagactatcgggtacaaagttggaacaatgattgatatccccagggcagctctggtggctgatgagatagcggatcaggctgaattcttctccttcggaacgaacgacctgacccagatgacctttgggttcagcaggtattatgtgggaaagtttattcc

SEQ ID NO: 86503 - DNA, 541 bp, Zea mays
  unsure (1)..(541): unsure at all n locations
agtaggggctaggtttttaccgctgaatnctactgacatgtactgnattgctcgtaccggtccggaattcccgggtcgacccacgcgtccgctttatttctctagtaaacctttcaacactgttcaaaacagaatttgttactgtccttgtgtctgcattttctctactatacctctgcaacacatttcaaaaagtataatgagccaactcctctacttgtaatgtcaaggaaagcaacacaggaaatgatgtgcatggtgtgcctaaagattcaacccgttggtccgttctgccaaaccccatcttgtaacagactatcgatggcaaagtactactgcaacatctgcaaatttttcgatgactaaaggactgtgtaccacttgccgttttgtaatttgtgtcgtcttgggaaaggtcttggtgttgatttctttcattgcatgaaatgcaactgctgtcttgnaatgaaattaactgagcacaaatgttcggaaaaagggctagagacanattgtccaatatgctgtgactttccgttac

SEQ ID NO: 86504 - DNA, 528 bp, Zea mays
  unsure (1)..(528): unsure at all n locations
agtagggganttaaggctcgtatcgagaattgaatatgactgtattgctcgtaccggtccggaattcccgggtcgacccacgcgtccgggaagctcaagttagaagaagcaccagtgcctgatcgatggcggcccaggctctcctgtccggccggcagctgctgggccgccccgtgcagtcggccgtctctaggtcgtcggcgaggaaggcgcccttcgtcgtcagggccagctccagccctccagccaagcaaggtgccgacaggcagctgtggttcgcgtccaagcagtccctctcctacctcgatggcacgctgcccggcgactatggcttcgacccgctgggcctctcggacccggagggcaccgggggcttcatcgagcccaagtggctggcctatggcgaggtgatcaacggccgctacgccatgctgggcgcggtgggcgccatcngcccggagatcttcggcaagatgggcatcatcccccccgagaccgcgctgccgtggttcaagacgggcgtcatcc

SEQ ID NO: 86505 - DNA, 536 bp, Zea mays
  unsure (1)..(536): unsure at all n locations
aggagtanttgaggtctgtgactgancctcagcccctccggcactgctgtaccggtccggaattcccgggcaggcatgccgaacggtggcggcaagaggtggctgctgctgctgccgctgtcgcggtgggttctgctcctcggcgagcctccagctcccggcggccggcggccacgtcgtcacgcgcatgcgcgggttcgacgggccacttccgttctacctcgaaaccgggtacgtggaggtggacgagcagcaaggtgtgcagctcttctactacttcgtgcgctcggagcgcgacccctacgaggacccgctgctgctgtggctgtccggcggcccaggctgctccggcatctccggccttgcctacgagataggacccttaaaatttgatgcccgagggcaaggtgaatttcccactcttctctaccgaccggagacatggaccaaggtgagcaacatcatatttgtggactcgccggtggggactgggttctcgtaccccaagtccgaagaagggctctagacccggcaca

SEQ ID NO: 86506 - DNA, 530 bp, Zea mays
  unsure (1)..(530): unsure at all n locations
agttnagganactagagtctgtgactgagcaccgaacatgactgtactgccgtaccggtccggaattcccgggtcgacccacgcgtccgggataatggagcagtgggagaaaagctactacataacaacaattgctggatcatccaacgggagctcattggttgtcatgtccaaaggaactccttacacccagcaatcatacaaggttagtgagtcgtttccttacaagtggatcaataagaagtggaaagaagggttccatgtgacatccatggccaccgctgggaatcgctggggcgtagtcatgtcaaggaattcagggttctctactcaggttgtagagttggatttcctgtaccccaaccaaaggcttcaacgacgcttggaaaaccgctacaggataacttccacggcggccaccaacgaccaagccgctttcatcctgagcatgccaaagcggaagccgatggacgagacccaggaaacgctccggaccttcgncttccccagctcacacgtcaaggagaaaa

SEQ ID NO: 86507 - DNA, 529 bp, Zea mays
gatggttggataggggtggttgtctagtgtaatagtcacgtcgtaccgcttcggaattcccgggtcgacccacgcgtccgctcaaacaaaggttatgaggttgcgattgttgataatcttgtccgccgtgcttttgagaaccaggtcggtcttgattcccttacccccataacctccatccagaatcgtgtccgtagatggaagtctctcactgctaagacaatccagctctttattggtgacatatgtgattttgaattcctctcagaaaccttcaagtcttttgagccggatgccgctgtccactttggcgagcaaagatccgcgccatactctatgattgatcgttcgcgggcagtctacacacagcataacaatgtcattgggacacttaatgtcttgtttgccataaaggaatacagtgaagagtgccatcttgttaaactaggaactatgggtgagtatggaacaaccaacattgacatcgaaaagggggttatcactattactcacaatggaagacccgacc

SEQ ID NO: 86508 - DNA, 530 bp, Zea mays
agtggggttagttagggttgtctagtatacagacaatactgcaatgctcgtaccggtccggaattcccgggtcgacccacgcgtccgttccacgaacgttggcgcgcaagctcgtggtgtgagcggtcactgtctcccatcccagggctccggcgctgagcgggactctgggcgcgtcgtcggtggcggcgctgcggccctgcgcggggaggagggcgccgtccgccgcgagctcggttgcgccgcgcgggagcggtgtggtgaggtgctccagagggctcaggtgggacgcccacagaagcagggggaggttgctcagggtgaggtgcgatgcggccgtcgcggagaagcccgccgaggaggaggcggctggggagaagttcgagtaccaggcggaggtgagccgcttaatggacttgatcgtccatagtctgtacagtcataaggaggtatttctccgggagcttgttagcaatgcgagtgatgcgctggataagctgaggttcctcggcgtcactgattcttctttg

SEQ ID NO: 86509 - DNA, 529 bp, Zea mays
gaggggtagggactgggttgtgctggaacttagttcactacgtactgctgtaccggttcggaattcccgggtcgacccacgcgtccgcgccacagcttgcgcccgcattggcactcgtctccgcctcctcgtcctccggcaccagcgtcacggcgctccccaggaatgggcagcgggcgtcgtcctccttcctcggcggcaagacgctgctgagacaggccgaggcggcccggccgtcgttcgccgtgcgcgccgcggcggaccccaacaggccgatctggttccccggcagcacccctccgccgtggctcgacggcagcctttccggcgacttccgctttgatccctgctgcctccgatctgacccggaaagcctgcaggtggacgttcaagtcgaactggtgcacttcctgtgggccatgctcggcactgcggcattctgaatcccggatttactgccaagatcggcttccctaacaatcctgtttggactatttatcattttcttgtgactttagccactactaat

SEQ ID NO: 86510 - DNA, 527 bp, Zea mays
  unsure (1)..(527): unsure at all n locations
ggggagggnctcgagttgtgatcgaaactccgcatatatagtcattgctcgtaccggtccggaattcccgggtcgacccacgcgtccggaaatttcagcggaatcgtcatttaccagtatcgaagagttccttgagccacttgaggtgtgctacaaatcactgtgtgactgcggcgacaaggccatcgcggacgggagcctcctggacctcctgcgccaggtgttcacgttcgggctctccctggtgaagctggacatccggcaggagtcggagcggcacaccgacgtgatcgacgccatcaccacgcacctcggcatcgggtcgtaccgcgagtggtccgaggacaagaagcaagaatggctgctgtccgagctgcgaagcaagcgcccgctgctgcccccggaccttccccagaccgacgagatcgncgacgtcatcggcgcgttccacgtnctcgcggagcttccgcccgacagcttcggcccctacatcatctccatggcgacggccccctcggacgtgctcg

SEQ ID NO: 86511 - DNA, 532 bp, Zea mays
tatgtgtgagtagtataggtttgtctagtcgcttatgatatcgtcgtaccggcccggaattcccgggtcgacccacgcgtccggctgttccccgcaacctatcgacccaatctcgtccgacccggcgcgtcgtcccctccgagatctgcgtcgccctctccaggtagcagaaactgttctgctgcagtctgacaaagtggagggcttaggagcttctgcttcttttatgtctgaacaatctttgctttatttgggattgttgggagagtactctcgtgcaacgaggaaaaggcacaaggttccgtcccactgcatgcgtcaagagcctgtctggttttcttgttctgatttgtcatttgctggtgctcagagccggcttggtttcctcgaaggatcagcaactactcttgattgtggactttgtcacatctgatatcaacttcatagatttttatccaagatggcgctgcaaaacattggtgcttcaaacagggatgatgccttctacaggtaccagaagcccaaaaaggat

SEQ ID NO: 86512 - DNA, 775 bp, Zea mays
  unsure (1)..(775): unsure at all n locations
gaatgatgtatggatagagggtatgagtctcatgatagaagctctagttcagctcagntactgnctgtaccggttctcggaattcccgggtctgacccacgcgtctcgcacctcttaagctcaaagccaagtctgctagtggtcctcttgaaccagtcaactgtaagcgtattctgggtgctcatcatctgacgactcagtaagtcaacagtgtgcggcttaatgctcaagctgggctccatgtgtctagcgcactcgtctgtctgtcgtttgcttgtccatggcttggcactcacttagctgtccggcatacgattcgcaagtagtacctggtggctcacgtaacgagcgaaccgagagcgccagcgcgtgtgcgtgtaccgcacttggcaacgtcnctggatcgtagtcactgcgtctaacgttccatactatgtgtngttgtaccctcaactaaactcttgtcttgcctagacgtgaacaagcacccgctctgttggcctttaatctcctgagactggagtacctacttagacggtaccctctcggtggcattcttgatgccaagcctttgtgtatccaaggagttcaatgaatgccaatgcatgtacctatcagctaatgtctcttggtcctattgtcgagcgtagtgagcccattgctatatgggnagcctaatctgttgtggcattctngacagcgattgcgcattgcattggtgagtgttagctaggagttgttacactataatatctcgcacagagagtggtattag

SEQ ID NO: 86513 - DNA, 537 bp, Zea mays
tagataggttagatatagagttatcatgatcataagatcactccgtactgctgtaccggtccggaattcccgggtcgacccacgcgtccgcggacgcgtgggtgctatttctcgagcaaagcagattcttgcaactattcctggacgggcaacaggtgcatatagtcacagtcagggtatcaaaggattgcgtgatgcaattgctgctgggatcacctcacgtgacggattccctgcaaatgcagatgacattttcattacagacggagcaagtcctggggtccacatgatgatgcaattactgattaggaatgagaaagatggcattctgtgcccaattcctcagtaccccttgtactcggcctccatagctcttcatggtggagctcttgtcccctattaccttgatgaaaaaactgggtggggtttggagatctctgatcttaagaaacaactcgaagatgctcggtcaaaaggcaatgatgttaggggccttggtggttatcaatccaaggaaatccgactgggcaggttctt

SEQ ID NO: 86514 - DNA, 529 bp, Zea mays
  unsure (1)..(529): unsure at all n locations
aggaggngtaggtttatcatgatctaagaaagcataggactgctgtaccggtccggaattcccgggtcgacccacgcgtccgcggacgcgtgggcttgcattggtacacgggtgagggcatggatgagatggagttcagggaggcagagagtaacatgaatgacctggtggccgagtaccagcagtaccaagacgccacagctgaggatgaggaggagtacgaggaggaagaagaggaagatcctgctgcctaagccatcatcccaagtgcttggtaaagatatgatgtcccttgtatcgctgctagtcagcactgagtcgtttgaggtgctcgtggtgatgttaggtactagatgggtgtcattacttatgaatgcgatgttgctgtgacagaactgcatttcctattgtactatggttgtccaagttgtcattaaaaaaaaaaaaaaaaaaaaaataaaaaaataaattaaaaggaaaataataaaaaaaaaaaaaagggcggccggtctaaaggatccaagttttt

SEQ ID NO: 86515 - DNA, 534 bp, Zea mays
atggtggttaggaactcggtctcgtccatgcgcatgaggcatcgtcgtaccgctccggaattcccgggtcgacccacgcgtccgcatctaccagcgactcagcgagcgagagcagcacacactgcacgcagctagctaggagcagcagcagcggcggcgatggcggcctccatgatctcctcgtcagctctggcggtggcgcctcagggcctgccgcccctcggccgccgcgcctcctccttcgccgtcgtctgctccaagaagaagatcaagaccgacaagccctacgggattgggggtggcctgaccgtcgacgtctacgccaacgggagaaagggcaagggcaagggcgtgtaccagttcgtcgacaagtacggcgcgaacgtctacggatacagcccaatctacaacgaggatgactggtctcccaccggcgacgtctacgtcggtggaaccactgggcttctgatctgggccgtgacccttgctgggaatcccagcggtggtcccttcttggttatcacaccagggcct

SEQ ID NO: 86516 - DNA, 534 bp, Zea mays
tatgtgggttaggtagtgagttatgatgaacttagttactccgctactgctgtaccggtccggaattcccgggtcgacccacgcgtccgcccacgcgtccgaattaaccattgaatttgttgattgcacgtccagtggatttggcggaacatttatgatcacgttgcgtgagctggtcaactttccagattttcttgtggagagaacaaggtacgaagctgctatggagcggaactggacccacagagacaagtgcaaagtctggtggagggacgaagaaggacaggtaggaggaacttggtgggagggacgggtgatggcagtaacacctaaatcacctgattttcctgagagtccatgggaaaaatatgtcatacagtataaggaggatggttctgatcacgctcatagcccctgggaacttcatgagacaggcagtttatgggatccatggaaacatccacatatggatctcacggttcgagataaattgttatcataaatgggaaaattacaggaaatggtacacagggt

SEQ ID NO: 86517 - DNA, 535 bp, Zea mays
  unsure (1)..(535): unsure at all n locations
tgagggggtgagggcgagagttntcatgatcaaagaacactccgctaacgtgtaccggttcggaattcccgggtcgacccacgcgtccggggagccagcaccagccaccatgggtcgcgtccgcaccaagaccgtgaagaagacctgcaggcaggtgatcgagaagtactactcccgcatgaccctcgacttccacaccaacaagaaggtgctggaagaggtctcgatcctcccctcgaagcgcctccgcaacaaggttgccggcttcaccacccacctgatgcgccgcatccagcggggccccgtccgtggcatctcgctcaagctgcaggaggaggagcgggagcgccgcatggacttcgtcccggagaagtcagcgctcgaggtcgaagagatccgcgtcgacaaggagaccatggagatgctcgcggcacttggcatggccgatctcccgggcgtagagcgccaggctgaggtctncagcgtccccgnctacagcctgccggagtatggaagtgcccggcctggccggttt

SEQ ID NO: 86518 - DNA, 526 bp, Zea mays
  unsure (1)..(526): unsure at all n locations
agggagggctcgtttgtgctgangccagccgctcgcactgcctgtactcgtccggaattcccgggtcgacccacgcgtccgatagcaaccggtccaacactttcacgctcaggcgctcagctctagcaatggctgcctgcaccatggcgatctcctccacggcgatggccggtactctcatcaaggtgggctccttcggcgagggccgtatcactatgcgcaagaccgcgtgcaagccacaagtggcggacccattgcactttctgacactgtcccaacctgaaaggctaatgggacactctctctagcagctcattaagcgccgcatctgtggtggttacgctcagtatgaccgctactcttgccagcttcctatcggcctctacttttgctttcttttctttctttctcgccactttcgtctggtttacctctcaagctctttatttgtggtttcctttagggttcctatttaatgctttactggtccttggaccctataaattttattttggttattgttttg

SEQ ID NO: 86519 - DNA, 525 bp, Zea mays
  unsure (1)..(525): unsure at all n locations
agtaggaactcggtttcgtccttacnatacgaatatattgtactgctgtaccggtccggaattcccgggtcgacccacgcgtccgcaaattgaaagctcggcgttgccctgcctcgagctcgaaggactgtccctatacgtgggtgtccagctcctcgcatattgtggcctggtgcagattggagatccgcccggacttggatcgagtcctcctgtctttggacattcattggagtgctccattcattaggcagcatgcctaagataaagacaagccgtgtcaagtatcctgaaggatgggagcttattgaaccaacaatccgtgagttggatgccaaaatgagagaagctgaaaatgatccacatgatgggaagagaaagtgtgaagctctctggcctattttccgcatttctcatcaaaggagccgctacatatacgatctttactacagaaggaaggagatatcacaggagctntatgagttctgcctagaccagggttatgcagaccgtaacctgattgcn

SEQ ID NO: 86520 - DNA, 532 bp, Zea mays
ggagagtaggtgagggataggtctgtcttagtttatagacatcgtcctaccgctccggaattcccgggtcgacccacgcgtccggtcaagaaactttcaggcaaggcaaaacttgaagatagcagggcaacaaagcaaattggtgcacttcttagtgctcccctggaaaaatatagcaatattgttactgcattagaactttcaaactatcctcgggttatggattatcttgataatgctacaaccaaagtgatggctgtggtaataattcaaagcataatgaaaaacacaacctgcatatctacttctgacaagattgaggcactattcgatttaattaaggggctgataaaggatatggatggagctcaagatgatgagcttgatgaagaagactttaaggaggaacaaaactctgtagcgcgtctcattcacatgctgcacaatgatgatcctgaagagatgcttaagaacttatgtactgttcagaagcatatacttcagggaggccccaagcgctaactttaatggt

SEQ ID NO: 86521 - DNA, 538 bp, Zea mays
  unsure (1)..(538): unsure at all n locations
tatgtttgagttagtgagtgagttgtgtcctgccctattagtcacatagtaccgcctcggaatttccgggtcgacccacgcgtccggaccgactagcgacgaagcgcgcacaaagagaagaacctcggagctgagatggcacagagccatggcgtcgatgacaggcctctcgcagggcgtcctgcccagcaggcgcgccgacagcagaaccaggacggccgtcgtcgtcgtcagggcgtccgcggagggcgacgccgttgcgcaggcgggccgtcgcgccgtgatcgggcttgtggccactggcatcgtcggcggagccttgtcgcatgcggcgcgcgcctagaccgtcaagacgagatagattggagtcgagcagctggctttctggatcttatgtgttctttcatacttagctagtctaagaacttttgcactgtattgtaggatcttgttctagcttgatagagtgtcggtctggtgtttattattttagggtgtttatttttantgttttatgattgtattgtttaatttattt

SEQ ID NO: 86522 - DNA, 546 bp, Zea mays
  unsure (1)..(546): unsure at all n locations
tgtgttaggctaggggactcagtgtcatcatggatnatttagatagcatcagctactgccagtaccggtccggaattcccgggtcgacccacgcgtccgaagaagcttgagaaggacattgagaatgagaatggaggtgctggggtatattctgcgggtctcaagaaacattatatattggctaatgatgaatggaaggaagatattcttccagagatactggatggtcacaacgttgcagattttctggatccggatatcctagtaaggtgtgaagagttggaaagggaggaagggcttcgcctggaagaacatgctgcagaagatgctttctagattgatggccatgaactatctcatgaacagatggagattctggctcagattaggatgaataaggcattacttatccaagaacatagtgtgatgaagagtactgcttatatgctgtcctattgtccttatgaagttggtcctagatatcaaattcactgctcaataggattttgatgtatgntttctcttaggggtttaatttatatgttt

SEQ ID NO: 86523 - DNA, 552 bp, Zea mays
  unsure (1)..(552): unsure at all n locations
tatgtatggttagtatctgagttcatgactgancttagttcactccgtattgctgtaccggtctcggaattcccgcgtcgacccactcgtccggccagaagtatgggtccatctttggactaccacagggtctgtatgtcaggcgtgaaggacaaggtgaaggtcctagaagttctaaggaactggccacataggaacattcaagttatctgtgttactgatggtgagcgaatcttgttacttgtagattttttgtgtaattttagtttatttttgttttcattctttgtttattcacttttttattttttttttattttttaatttatttgttttatcattttttgttattttttttgtttattattttttttttttttttttttttttttatttattttatttttttttttttttattttattcttttttttcttattttattgtttatttatttatttatttttnttttatttgtttatttgttatttttttatgatttatttttttttttttttttctttttgttttatttttttttttatgtttttc

SEQ ID NO: 86524 - DNA, 529 bp, Zea mays
  unsure (1)..(529): unsure at all n locations
aggtagtactaggttcatcatgagtaccgccagtatagnattgctcgtaccggtccggaattcccgggtcgacccacgcgtccggctgcctccgcctctcgagtctcgtccacccgtcgtcctcctagctcctctactcgggagtcgccatgggcaagattaagatcggaatcaacggcttcggaaggatcggcaggctcgtggccagggtcgccctccagagcgaggatgtcgagctcgtcgccgtcaacgaccccttcatcaccacggactacatgacctacatgttcaagtacgacaccgtccacggccactggaagcacagcgacatcacactcaaggactccaagacccttctcttcggtgacaagccggtcaccgtctttggcatcaggaacccctgaggaaaatcccgtggggtgaggctggcgctgagtatgtcgtggagtccaccggcgtcttcactgacaaggacaaggctgctgcacatctcaagggtggtgccaagaaggtgttatctctgccccaa

SEQ ID NO: 86525 - DNA, 533 bp, Zea mays
agtagggcttagtttgtgactgagcctacgcattagatgcactactgtactcggttcggaattcccgggtcgacccacgcgtccgcggacgcgtgggcgctccgtgacgctctggcctgcgtgtacgaggcgctgggcgtgcgcatgctcgaccgagtccgcttcttacggtcccagatgcataccatcattacccgcgcctgcagcaatcttggcgtgaaggccctgcccagctggcggttcataaccctgatagctgtggctatcaaagcgcgtcgagagtttctaaagagcacaatagtcaacaatagggacatatatagtgtctttgtttgacatgatgcctacaatgtcagaaggcatgggtgagtacaacatattaaggatttgtcctttagcggaagctctattgaccttgtttcgggtaaacatgacacttttattcatagctttcatggcaaagtattcacctgtgccaagcaactttccccaatggacactttcagtattcacagattcctaaaggcttaatt

SEQ ID NO: 86526 - DNA, 536 bp, Zea mays
tggatgtgagtgagttatagagtgtcgtctacgtattaaagattatatgctaccgctccggaatttccgggtcgacccacgcgtccgcatgacaggggcttttgctcatggagctatttttttcattagggattacaatccggaacagaatgaagataatgtattggcaagaatgttagaccataaggaagctatcatatctcatttaagttgggctagcctcttcctaggattccataccttgggcctttatgttcataacgacgttatgcttgcttttggtactccagaaaagcaaatcttgattgaacctatatttgcccaatggatacaatctgctcatggtaagacgacatatgggttcgatatactcttatcttcaacgaatggccccggtttcaatggcagtcgaaacatatgggtggccggatggttgaatgctggtaatgagaatagtaattcgcttttcttaacaataggacctggggatttcttgggtcaatatgctaatggtctagggttgcttacaactactt

SEQ ID NO: 86527 - DNA, 542 bp, Zea mays
  unsure (1)..(542): unsure at all n locations
gatggatgggtaggttctggagtgtactcacttagcatatgaatacgtagctactgccngtaccggtccggaattcccgggtcgacccacgcgtccgcccacgcgtccgaattaaccattgaatttgttgattgcacgtccagtggatttggcggaacatttatgatcacgttgcgtgagctggtcaactttccagattttcttgtggagagaacaaggtacgaagctgctatggagcggaactggacccacagagacaagtgcaaagtctggtggagggacgaagaaggacaggtaggaggaacttggtgggagggacgggtgatggcagtaacacctaaatcacctgattttcctgagagtccatgggaaaaatatgtcatacagtataaggaggatggttctgatcacgctcatagcccctgggaacttcatgagacaggcagtttatgggatccatggaaacatccacatatggatctcacggttcgagataaattggtatcagaaattggaaaattaccgggaatgttcaccagggt

SEQ ID NO: 86528 - DNA, 527 bp, Zea mays
  unsure (1)..(527): unsure at all n locations
agtagtacctaatgttgtgatcgantttcgaatatattgnattgctcgtaccggtccggaattcccgggtcgacccacgcgtccggagttccttgagccacttgagctgtgctacaaatcactgtgtgactgcggcgacaaggccatcgcggacgggagcctcctggacctcctgcgccaggtgttcacgttcgggctctccctggtgaagctggacatccggcaggagtcggagcggcacaccgacgtgatcgacgccatcaccacgcacctcggcatcgggtcgtaccgcgagtggtccgaggacaagaggcaggagtggctgctgtcggagctgcgaggcaagcgcccgctgctgcccccggaccttccccagaccgacgagatcgccgacgtcatcggcgcgttccacgtcctcgcggagctcccgcccgacagcttcggcccctacatcatctccatggcgacggccccctcggacgtgctcgccgtagagctcctgcagcgcgagtgcggcgtgcgccaac

SEQ ID NO: 86529 - DNA, 529 bp, Zea mays
  unsure (1)..(529): unsure at all n locations
agagggnctcgttctnatgactgancacacganaggatcgtactgncgctaccggttcggaattcccgggtcgacccacgcgtccgggttaaatttgatgaagcttcacagaagataaaaatcttggaggaacaacttgcagagacacagagcaagttggagcatttccttatagagaaggaaagcttgactcaaacaaatagtactttgaatgaggagttggaagtacatcagaacaagttgaacgatttacaacttgcacttgctgctgcagtagcagaaaaggaggaggcatctgaagagattcattcgctgcataaaacgctcgatggaatgattgagcacaaagcagaattagaaatacaggtatcttctactatacaagagcatgaagaactgaagagcaagtaccaaaatacaatggaagagaaacatgcgttgagtgataaatatgaaaccgcaaagaaagagctcgaggatgcaatagccaagttggaggaggaaatgaatgtagacaaatcagaanaag

SEQ ID NO: 86530 - DNA, 534 bp, Zea mays
ggtgtggtagagtgagagttatcatgatcttagatcacgtcgtaccgccccggaattcccgggctcgtgtggtgctcatcaagctggcagatcgcttgcacaatatgcggacaatttatgctcttcctgtacctaaagctgaagctgttgctcaagagacattggctgtctggtgctcacttgcttctcgattgggagtctgggctttgaaagctgagctggaagatttatgctttgctgtcctccagcctcaaatcttcaagaaaatacaatctgaacttactttaatgtggaatcataccggaaaatctaaaaatatgagaagatcatcaattcgaaacgaattacttgctttcaatgaagaatgggaattgggggccatcaatggattggttaagttcatgtaacccaaaaaggcccaatttgaaaggacttaattgcaaggcagttttggcatttgacatctttttggaaccgaaaaaggcgttataccttgctaagaagcctcaataggaattctggagaatctatccc

SEQ ID NO: 86531 - DNA, 539 bp, Zea mays
gtgtgggttaggaaatagagtgtgtcaccgtatataagactatcatagctaccgctccggaatttccgggtcgacccacgcgtccgcgacatcacggtggaggcgtggctcaacacgcacggtcccaacgaccgcacgctcgcgcaggggctcaagggtgaccccacgtacctggtggtggagcaggacaagacgctggccacctacgggatcaacgccgtgtgcactcacctcggctgcgtcgtgccgtggaacggcgccgagaacaagttcatctgcccatgccacggatcccagtacaacaaccagggcaaggtggtccgtggaccggcgcctctgtcgctggccctggttcacgccgacgtcgacgacggcaaggtcctcttcgtcccgtgggtggagaccgacttcaggaccggcgaggacccgtggtggaaggcatgaggatgatccgaaaccagcggtgctcagtgcttacacatgagacctacgtatgccttccgtccttgtgatgaggaaatatggctggctttcgtctc

SEQ ID NO: 86532 - DNA, 523 bp, Zea mays
  unsure (1)..(523): unsure at all n locations
agtagtatctaagtgtgtcatganttccgccatatagtattgctctaccggtccggaattcccgggtcgacccacgcgtccgggataagaagccagtcaaggtcagcaagaagaactcggctgcagtcaccaagttcctggatgagctggctaagattgacttccctggagccaaggtggtgagcgaggcggtggccaagtccggcacctcgcccctgcttccggcgatcaccttcatcttggacaaggtcgcaccgtttatccccaaggaggagcccaaggcggagccggcggcggaggccacctcccgggaagtcgccgtggaggagaagaaggaggaggccgagccagctgcagcgacggaggcggcaccggcgccggcagagacaccgtcggaggaagcggtggtagaggagaagaaggaagaagagaagaaggaagaggaagataagccggctgccgaagaggcggcgccggcagcagcagcagctgctgctgangagaagtgatcctgttgaccgaa

SEQ ID NO: 86533 - DNA, 539 bp, Zea mays
  unsure (1)..(539): unsure at all n locations
tagattgggaggaggttggtttgtccctcgcactganatcgtcgtacacgcccggattcccggtcgacccacgcgtccggctttctcaacaatagcggctgtggaaggcatcaaccagattgttactggcgacatgatctccttgtctgagcaggagcttgttgactgtgacacttcatacaaccaggggtgcaatggaggtttgatggactatgcgtttgagttcatcatcaacaacggcggaatcgacaccgaggaggattacccttacaagggcacggacggacggtgtgatgtcaacaggaaaaacgccaaggttgttactatcgacagctatgaagatgtaccagcgaacagtgagaaaagtctgcagaaggcagttgcgaaccagcccatcagtggtgcaaattgaagctggtgggcagagcattttaagctctacaacttcgggtatctttaacagggaacctgtgggaccagcgtttgaaccatggtgttaacggccgtgggctacggcacagagaaccggcaaggactat

SEQ ID NO: 86534 - DNA, 532 bp, Zea mays
tagtgtgggaggatattcgttttgtctagctcatgtagcacgtcgtaccgctccggaattcccgggtcgacccacgcgtccgcaacagcctttctgttggatgttctgaagccaaacttgccagagcatgcttttcttcggaccaaggttttggagataaacttagtgacttacccaaatgttgctgatgccattcttgctaatggtatgttcagtcattacgaccgccctcgtattgctcagctatgtgaaaaggccggtttgtacttgcgagccctccagcattactcagagttgcctgatatcaagcgtgccattgtaaatactcatgccattgagccacaggcacttgttgagttctttggcaccttgtcaagagagtgggctttggagtgcatgaaagaccttctactggttaatcttaggggaaatcttcagattgtggtgcaagcttgcaaaggaatactgtgaacagctaggggttgacccgtgcttaaaataatttgagcaattcaaatcttatgagggtctt

SEQ ID NO: 86535 - DNA, 536 bp, Zea mays
  unsure (1)..(536): unsure at all n locations
tggagaggaagtgggtnaaacctgaancccttgaacnantcgtataacnccaccggtccggaattcccggctcgacccacgcgtccggagatatttgatgggtggtgtgataatgtcatcgatttggtaaacgcaagcgacgaggaagcgattcttcgccgagatatatacgaccgcccacctactataaattgggggaaaggtcgtgtcaccttgctcggcgattctgtccatgctatgcagccaaatctgggtcaaggtggctgcatggctattgaggatggttaccagctggccgtagaactagagaatgcctggcaagagagtgtcaagactggaactcctatggacatagtttcctccttgagacgttatgagaaagagagaagggtgcctgttgctggtatacatgggctggcaagaatggcagcattcatggcttccacctatggaccgtatttgggggtgggctaggaactttaatggtttttgcccaatttggggatacccaaccctgggaggggttggtggcaaat

SEQ ID NO: 86536 - DNA, 530 bp, Zea mays
  unsure (1)..(530): unsure at all n locations
agtnagtttttctagggttcctgctgagntcacgcacatgnctgnactgctgtaccggttcggaattcccgggtcgacccacgcgtccggttctgctcctagagaatgttagattctacaaggaggaagagaagaacgaacctgaggttgctaagaagctagcatctgttgctgacctttatgtcaatgatgcttttggcacggcacacagagctcatgcttcaaccgaaggagttaccaagtatttgaagcctgctgttgccggcttcctcatgcagaaggaacttgactaccttgttggagctgttgccaacccaaagaagccatttgccgctattgttggtggatccaaggtctcaagtaagattggtgtcattgagtccttgctggcgaaggtcgatatcctcatccttggtggtggtatgatctacacattttacaaggcacaaggatattctgttggaaaatctctcgtggaagaggataaactngagctcgcaacttctcttattgagaacgcgaatgcaaag

SEQ ID NO: 86537 - DNA, 523 bp, Zea mays
  unsure (1)..(523): unsure at all n locations
ggagagtatctganctcagttcactacgnactgctgtaccggtccggaattcccgggtcgacccacgcgtccgacaagcttgggcaaaggaggtttgacggcggctacgtgcacaatggcttgcttaagggcgccgagtgggtttttgatgctgagtgtgatgttctgaaggaccttctggagaggaatcctggctatacactcacatttgctgggcattctcttggctctggtgtggtgtcaatgctagctttgctggcagtgcacaacagggagctgctcggtggcatagacaggaagaggatacgatgttttgcaatggcaccagcccgatgtatgtcactgaatttggctgtccgttatgcagatgtcatcaatgcagttattcttcaggatgattttttgcctcgcacagacattcctttggaagacatcttcaagtcactattctgcttaccatgccttctatgtggaagatgcctaatagacacatgtatacctgaaagtgtgatggtgaaaaaat

SEQ ID NO: 86538 - DNA, 538 bp, Zea mays
  unsure (1)..(538): unsure at all n locations
ngtatgtnngtgagttagggtagaggtgtgtaaaagcgggagagggagtattgctctactcgtccggaattcccgggtcgacccacgcgtccgcaacaagccaaacaacccagtggctgctagccgagacaggggatagattgagagagaggcgcgcagatggcgacgccgtcgtcgtcgctttgctccagcttcgcctccctgcggaccgcctccatcggccacccccgtggcatcgcctcctccacgcccaggaaggcattccatgtgagggcatcagctcgggttgacaaattctcaaagagtgacatcatcgtgtccccttcgattctgtctgcaaactttgcgaagcttggtgatcaggtaaaagctgtggaagtggcaggatgcgactggattcatgtcgatgtcatggacgggcgctttgtgccaaacatcacaattggacccttgngttgtgatgctctgcgtccagtgactgatcttccgttggatgtacatctgatgattgtggaccctgancagcgaggtcccgatt

SEQ ID NO: 86539 - DNA, 521 bp, Zea mays
tgagtgtctgaaaaggggaggggggagatagctacgctcgtaccggtctcggaattcccgcgccaagcgtccggtcgtgtcgaggcttccggtcgtcgacagcggtctcagatccgtcggcgtgatcgtggggagcgaccgggcaagagcctctcatgggtccaagacgaagatatcggaagtgatgacatctccagctatcacactatcgtctgacaaaaccgtgatggatgctgctgttctcatgctcaagaagaagatccacagattaccagttgtaaaccaggacgaaaaagtaataggtatagttacccgcgctgatgttcttcgcgtgttggaaggcatgttgaagatttaggagcgcagatacccatgctcggaagccacagcctcttgtaaatatgtagatgtgcccgggcatggtgtttctgagtagcagcaaagagatctaccatgtataggagtttttccttgtaaataaaagtagcacgccaggagacttcattccaggttccggactc

SEQ ID NO: 86540 - DNA, 529 bp, Zea mays
  unsure (1)..(529): unsure at all n locations
gggggtngggagtaagaagcttgtgttaaagaagaacagtatgctctaccggtccggaattcccggctcgacccacgcgtccgggtatatcaccaaggcgatatcgagagaacgatgcactatcaagtttcttcaaaatcgtgacgacatcacctgatgaaaacggcaaggtctatgtctcaactgtacaagccaataattatccaatcacttgcacgcaatggcatcctgaggtaatttagttgtagctgtttcaggagttccacatttagtgttcttattggttcttccttttctcttgtgcactgtatttattcctaggttatattcacaacatatcaaattgtggccactcaccaaatacaagtggctttatgccacaataaaactgtcctcatttgatgcagaaagccatttttgagtggaggaaaccaatgatcccacacagcgaagatgcagtacaggttactcaacattntgccaatcattttatcagccaagcacgcaagtttcaaacaggccttctgcc

SEQ ID NO: 86541 - DNA, 523 bp, Zea mays
  unsure (1)..(523): unsure at all n locations
ttggagtatttataattgtaggggaggtgtaatgctatnactcgtaccggtccggaattcccgggtcgacccacgcgtccgcatgagttgtagggagggacttatgtcaccacaaacagaaactaaagcaagtgttggatttaaagctggtgttaaggattataaattgacttactacaccccggagtacgaaaccaaggatactgatatcttggcagcattccgagtaactcctcagctcggggttccgcctgaagaagcaggagctgcagtagctgcggaatcttctactggtacatggacaactgtttggactgatggacttaccagtcttgatcgttacaaaggacgatgctatcacatcgagcccgttcctggggacccagatcaatatatctgttatgtagcttatccattagacctatttgaaaaaggttctgttactaacatgtttacttncattgggggtaacgtatttggtttcaaaagcttaagcgctttacgttggaagatctacgatttc

SEQ ID NO: 86542 - DNA, 509 bp, Zea mays
  unsure (1)..(509): unsure at all n locations
naggaagtgnttnncaaagatgctgatgcatgctctaccggttcggaattcccgggtcgacccacgcgtccgggctgctgaaatgaacaagcggtccttcaagtacgcgtgggtgctcgacaagctcagggctgaacgtgagagaggtatcaccattgatatcgctctgtggaagtttgagaccaccaagtactactgcacggtcattgatgcccctggacaccgtgacttcatcaagaacatgatcactggtacctnccaggctgactgtgctgtccttatcattgactccaccactggtggttttgaggctggtatctccaaggatggccagacccgtgaacatgctctccttgcgttcacccttggagtgaagcagatgatttgctgctgcaacaagatggatgcaaccactcccaaatactccaaggcacgttatgaagagattgtgaaagaagtctcatcctacctcaagaaagttgggtacaaccctgataagattgcctttg

SEQ ID NO: 86543 - DNA, 507 bp, Zea mays
  unsure (1)..(507): unsure at all n locations
gaggtcaaagctttttgtggnccccnacgtttccctacagcataccccttcggaattcccggctcgacccacgcgtacggggtgctgaaatgagacaagcggtcctttaagtacgcgtgggtgctcgacaagctcaaggctgagcgtgagagaggtatcaccattgatatcgctctgtggaagtttgagaccaccaagtactactgcacggtcattgatgcccctggacaccgtgacttcatcaagaacatgatcactggtacctcccaggctgactgtgctgtccttatcattgactccaccactggtggttttgaggctggtatctccaaggatggccagacccgtgaacatgctctccttgcgttcacccttggagtgaagcagatgatttgctgctgcaacaagatggatgcaaccactcccaaatactccaaggcacgttatgaagagattgtgaaggaagtctcatcctacctcaagaaagttgggtacaaccctgataag

SEQ ID NO: 86544 - DNA, 492 bp, Zea mays
  unsure (1)..(492): unsure at all n locations
atgggtaggcttgtaccggatttcccgggtcgaccacgcgtccgcggggcgttgagggccggcttgggcccgggttaacggtgttaaaggccgcattccgggccgggaaggcaccgtcccaggtggtgcagccaatcaacggggaccggttaatcggcagcctggagacgcccgtcaccttcagcccgctcatcgcgtggtacctctccaacctgccggcctaccgcaccgncgtgagcccgctgctgcggggcgtcgaggtcggcctcgcccacggctacctcctcgtcgggcccttcgcgctcaccggcccgctccgcaacacgcccgtgcacggccaggcgggcgcgctcggcgccgncggcctcgtcgccatcctcagcgtctgcctcaccatgtacggcgtcgccttcttcaacgagggcgacccgtccacggcgcccacgctcacgcttaccggccggaaaaaggangccgacaaggttgaaaacg

SEQ ID NO: 86545 - DNA, 532 bp, Zea mays
ttagtttaagcctctgttacgagagggggggggggaagagtagtgctcgtaccggtccggaattcccgggtcgacccacgcgtccgtctatccagcagccgctctccccagccccactctctccatctagagctccctaactggaccggccgccacaccaccgtaccccgacccctcgacaacaatggccaccgtcctaggcagcccccgcgcgccggccttcttcttctcgccgtcctccctccgtgccgcgccggcgcccaccgccgtggcgctgcctgcggccaaggtgggcatcatgggccgtagcgccagcagcaggggcaggctgcgcgcgcaggccacctacaacgtgaagctgatcacgccggagggggaggtggagctgcaggtgcccgacgacgtgtacatcctggaccaggccgaggaggacggcatcgacctgccctactcctgccgcgcggggtcctgctcctcctgcgccggcaaggtcgtctccggcttcgtggaccaatccgaccagagcttactt

SEQ ID NO: 86546 - DNA, 498 bp, Zea mays
aggataggatgtgaatgggggggggtgagctatctgtaccggtccggaattcccgggtcgacccacgcgtccgcagtttggcacctccgaagcttccgtccgaatctctgctgcctccttcctcggccaggcttgcgggcgatggcggcggagcagaccgccgagcagttccggggccaggcgcggctgccccacttcgcgtccccgcggcgctacgacctgcgcctcacgcccgacctccccgcctgcgtcttcactggctcggtggcggtttccatcggcgtggccgcgcccacccgcttcctcgtactcaacgcagccgagctcgacgtcgcgaccgggggcgtcagcttcgcgcctcagggctccgaccaggtgctacaacctttggaggttaccaacgtgccagaagatgagatcctgattattcgcttcaatgaggtgctttctatcggggagggaactttgacgattgcattcaaggggactttgaatgat

SEQ ID NO: 86547 - DNA, 543 bp, Zea mays
  unsure (1)..(543): unsure at all n locations
nggtggttttggggggaggtaaaggtgntttatagagggaggggaaaaagtagtgctcgtaccggtccggaattcccgggtcgacccacgcgtccgcccacgcgtccggcttctcctccccctcttatcaagtcctcctcgggttagggttcggtatggttttgtggaggggcgatggcggcggctgatgtggagtaccgttgcttcgtcggcggacttgcctgggccaccagcaacgagtcgctggagaatgccttcgcctcctacggcgagatcctcgactgcaaggtcatcaccgaccgggagacggggaggtcccgcggcttcagcttcgttaccttctcctgcgagaactgcatgctcgacgctatcgagaacatgaacggctaggagctcgacggtcgtaacatcaccgntaacccagccccagtcccgtggcggcngcnngtggcagccggcggccggtggctaccggnggnggctgccggcgcgggggcttattggtgccgggccgcgttgacggcgggtattggccgcagtggg

SEQ ID NO: 86548 - DNA, 525 bp, Zea mays
  unsure (1)..(525): unsure at all n locations
agggagtgaaggtccgtttatgaaggagggatgtaatgctctctcggtccggaattcccgggtcgaccaaggcgtccgaaccgctgttggcaactgatttcttcgagataaaggctgtggatgaaataaagcctggtctgaagaaacagctcataatttccacaattgtgatgaccattggcattgcactaatcagttggcttggtcttccatacactttcactattttcaactttggagtccagaagacagtgcaaagctggcaattgttcttgtgtgtggcggttggtctctgggctggcctagtcattggttttgttactgagtactacacaagcaatgcctacagccctgtacaagatgttgctgattcctgcagaactggagcagctactaatgtcatttttgggcttgctttgggttacaaatcagtcattatcccaattnttgctattgcgtttagtatcttcctcagcttcagccttgctgccatgtatgngtgtgctgtggctgctcttggaatgn

SEQ ID NO: 86549 - DNA, 523 bp, Zea mays
  unsure (1)..(523): unsure at all n locations
ggagggnnggaggaggaaaaggtgttatggaggggggggagagagtatctctcccgattcgcgggttcgacccacgcgtacgagctcgatctactactactactagctggtacacatactagccagcctgccagccagcttgccgtggcgcccaccgtgatgatggcctcgtcggcaaccgccgtcgccccgttccagggtctcaagtccgccgccagcctccccgtcgcccgccgcagcaccaggagcctcggcaacgtcagcaacggcggaaggatccggtgcatgcaagtgtggccggcctacggcaacaagaagttcgagacgctgtcgtacctgccgacggtgtcgacggacgacctgctgaagcaggtggactacctgctgcgcaacggctggataccctgcctcgagttcagcaagctcgggttcgtgtaccgcgagaactccaacctcccgggctactacgacgggcgctactggaccatgtggaagcttgccatgttcggctgcaccgacgccc

SEQ ID NO: 86550 - DNA, 501 bp, Zea mays
ggggaagagctctgagaagagggggggaggagatatcgtatacccgtccggaattcccgggtcgacccacgcgtccgcgagcaagaagcaagcagcagtaacaagaaaccatcatcgatccatgtatccaccaatggcggcgctcggaggacggcggaggagggcgtcgtcagcggccctcctgctagccttgttggcggtggccctggtctccctggccggcccagccacggccgcggggaacaagaccgggcaggtgaccgtgttctggggccggaacaaggccgagggcacgctgcgcgaggcctgcgactcgggcctctacaccatggtgatcatgtccttcctcgacgtctacggcccgcagcgcggcggctaccaccagtaccacctggacctgtcggggcacccgacggccggcatcggggacgacatcaagcactgccagttcgtgggcgtgccggtgacgctctccgtcggcggcttcggctccggctactc

SEQ ID NO: 86551 - DNA, 492 bp, Zea mays
ggagaggtagtactggtccggaattcccgggtcgacccacgcgtccggagagatcacgtcgcaagaacctgaacagagtggcggacgcggacacgatggcgctggacgacatgcagcgcgacgaggtgttcaacagggacaacatcccgacgtggctgtcctacgcggggtacgccgcgctgagcctgatcgcggtgatcgccatcccgatcatgttccgggaggtgaggtggtactacgtggtggtggcgtacgcgctggcgccggcgctggggttctgcaacgcgtacgggaccgggctgacggacatgaacatggggtacaactacgggaagatcgcgctgttcgtgctggcggcgtgggcggggaaggacagcggcgtggtggccgggctggtggggtgcgggctggtgaagcagctggtgctcgtgtcggccggactgatgcacgacttcaagaccgggcaccttgacgcttacgttggccgcggtc

SEQ ID NO: 86552 - DNA, 504 bp, Zea mays
  unsure (1)..(504): unsure at all n locations
agtgaagggatctggctattgaaaggggcaagtagtcgtatacncgtttcggaattcccgggtcgacccacgcgtccggccacatcgagaacacgatcgagcacacaagcacgaagactcgtttaggagaaaccacgaaaccaccaagccgtgcaagcatcatggagtacggtcagcaggggcagcgcggccacggcgccacgggccatgtcgaccagtacggcaacccagtcggcggcgtcgagcacggcaccggcggcatgaggcacggcacgggaaccaccggcggcatgggccagctgggtgagcacggcggcgctggcatgggtggcgggcagttccagcctgcgagggaggagcacaagaccggcggcatcctgcatcgctccggcagctccagctccagctcgtcggaggacgacggcatgggcggaaggaggaagaagggaatcaaggagaagatcaaagagaagctgcccggaggccacaaggacgaccagcacg

SEQ ID NO: 86553 - DNA, 532 bp, Zea mays
  unsure (1)..(532): unsure at all n locations
ggggcgtgggagtaagaaatgtcnattaatttacaagatatatgtcatagtctttccggtccggaattaccagctcgacccacgcgtccggggacctacgaatcaaagctttcctgtgagcagccaagggccttgcgttctggcacgttgacaatgccagagttatctaccgagatttcaagacatccaacgtgctcctggattcgaactacaacgccaagctgtctgacttcggtttggcaaaggacgggccaaccggcgaccagagccacgtgtacaccaaagtcatgggcacctacggatatgctgctccggaatatctcgcaacaggtcatctcacgccgaagagcgacgtctacagcttcagcgtcgtgctgctggatatgctgtctggtcgtcgtgccatggacaagaaccgtccggactccgagcacaaccttgttcactgagcgcgcccataccctagcaaccaacccctcgtattccccattccggaacaaccggcttggccgtccattacccgttgccggcc

SEQ ID NO: 86554 - DNA, 529 bp, Zea mays
  unsure (1)..(529): unsure at all n locations
ngttggagaatgctttatccactgaaacgaaatatataagcatngctcgtaccggtccggaattcccgggtcgacccacgcgtccgggaacctacgaatcaaagttgccctgtgagcagccaagggccttgcgttcttgcacagcgacaaggccagagttatctaccgagatttcaagacatccaacgtgctcctggattcgaactacaacgccaagctgtctgacttcggtttggcaaaggacgggccaaccggcgaccagagccacgtgtccaccagagtcatgggcacctacggatatgctgctccggaatatctcgcaacaggtcatctcacgccgaagagcgacgtctacagcttcggcgtcgtgctgctggagatgctgtcgggccgccgcgccatggacaagaaccgcccggccaccgagcacaacctcgtcgactgggcgcgcccctacctcagcagcaagcgccgcgtctcccgcatcctggacgaccgcctggccggncacttacccgtgncgggcggn

SEQ ID NO: 86555 - DNA, 528 bp, Zea mays
  unsure (1)..(528): unsure at all n locations
gaagtgggggagtaggagagtgtctatagaagagggtagtattgtatnactgtccggaattcccgggtcgacccacgcgtccgcgcctcgagtcgattaccaaggctccagtgatccaccacttctccgagacggttcaaggtgtcatgaccatcaggtgcttcaggaaggaggaaagcttcttgcaggagaacctgaaccgggtgaactcaagcctgaggatggacttccacaacaatggtgccaacgagtggctcggtttccggctcgagctgattggaagctttgttctctgcttcacagccgtgctcatggtcacattgccgagcaacttcgtgaagccagagtatgttggtctgtcactatcatatggtctatctctcaaccaggtgttgntctgggccatctggatcagttgcttcattgaaaataaaatggtctcagttgaaaggataaaacaattcacaaatattccttcagaggccacatgnaggatcaaggacttgctaccagattctaaatggccaa

SEQ ID NO: 86556 - DNA, 524 bp, Zea mays
  unsure (1)..(524): unsure at all n locations
agttagaaggtcngttatagaaagacgatgtatagcatngctcgtaccggtccggaattcccgggtcgacccacgcgtccgtgatccctgagaagtacctcgacgagaagaccatcttccacctcaacccgtccgggcgcttcgtcatcggcgggccccacggtgacgccggcctcaccggccgcaagatcatcatcgacacgtacggcggctggggagcccacggcggtggcgccttctccggcaaggaccccaccaaggtggaccgcagcggcgcctacgtggccaggcaggccgccaagagcatcgtggccagcggcctcgcccgccgctgcctcgtgcaggtgtcgtacgccatcggcgtgccggagcccctgtccgtgttcgtcaactcgtacggcaccggcacgatccccgacaaggagatcctcaagatcgtgaaggagaacttcgacttcaggcccgggatgatcagcatcaacctcgacctgaaagaggggcggcaacaggttcatcaagaccgg

SEQ ID NO: 86557 - DNA, 503 bp, Zea mays
  unsure (1)..(503): unsure at all n locations
cggggagtgtttcgatgccaactcgcacgcatagcatacncgttcggaattcccgggtcgacccacgcgtccgattcttaattcatgagttgtagggagggacttatgtcaccacaaacagaaactaaagcaagtgttggatttaaagctggtgttaaggattataaattgacttactacaccccggagtacgaaaccaaggatactgatatcttggcagcattccgagtaactcctcagctcggggttccgcctgaagaagcaggagctgcagtagctgcggaatcttctactggtacatggacaactgtttggactgatggacttaccagtcttgatcgttacaaaggacgatgctatcacatcgagcccgttcctggggacccagatcaatatatctgttatgtagcttatccattagacctatttgaaaaagggttctgttactaacatgtttactttcattgtgggtaacgtatttggtttcaaagccttacgcgctn

SEQ ID NO: 86558 - DNA, 507 bp, Zea mays
  unsure (1)..(507): unsure at all n locations
acgaagaatagctcattaggnntttcaaagtctttccnatcagctattatcgttcggaattaccggctcgacccacgcgtccgatgcttaattcatgagttgtagggatttacttatgtcaccacaaacagaaactaaaggaagtgtttgatttaaagctggtgttaacgattataaattgacttactacaccccggagtacgaaaccaaggatactgatatcttggcagcattccgagtaactcctcagctcggggttccgcctgaagaagcaggagctgcagtagctgcggaatcttctactggtacatggacaactgtttggactgatggacttaccagtcttgatcgttacaaaggacgatgctatcacatcgagcccgttcctggggacccagatcaatatatctgttatgtagcttatccattagacctatttgaagagggttctgttactaacatgtttacttccattgtgggtaacgtatttggtttcaaaaccttacc

SEQ ID NO: 86559 - DNA, 519 bp, Zea mays
  unsure (1)..(519): unsure at all n locations
gaggaggacgctctatctattgcaagatagtatgctataccggtccggaattcccgggtcgacccacgcgtccggtggaacagttgcacaagattttcaagctatgtggttccccttctgaggagtactgggggaagtctaaattgccacacgcaacaatattcaaacctcaacaaccctataaacgttgcatcagggagacatttaaagattttcctacatcggctctgccattggttgaaactctgcttgcaattgatccagctgagcgacaaactgcctcagctgcattacacagtgatttttttttcaaccgagccttatgcttgtaacccttcaagtctgccaacatatccaccaagcaaggagatggatgccaagttaagagacgaggaggctagaagactacgagcggctgcaaaagccaaaggagaaccagaaaagactcgaccacgtgatcgatctcggagggctggaccaacaccagaagctaatgcanagattcaagcaaacttagac

SEQ ID NO: 86560 - DNA, 530 bp, Zea mays
  unsure (1)..(530): unsure at all n locations
cgggatttgaggtaggagcgtgtgtgcggaccccangctatagcagaccgttccgatcggaataccagcgcgacccacgcgtccgcgcccctgctccggctccggctccggttctgccatgggcctttcaacagtttgactggcggccggaccgcgcctcgtgccggcccctctcggccgctgccgctctgcccagccccgccgcccgcgccgggcccagctcgccaccgtccggtgctccgtcgacgccaccaagcaggcgcaggatggcgtggcgacggcggtcgcgacggaggcgccagcgtcgcggaaggagtgcttcggggtcttctgcaccacctacgacctcaaggcggaagacaagaccaaatcgtggaagaagctagtgaatgttgctgtgtcaggcgcggccgggatgatatcagatcacctgctgttcaaactcgcttctggtgaggttttcggaccagaccaaccaatagcacttaagctactcgggttaaaaagatcggtttaaggcctcgaaggtt

SEQ ID NO: 86561 - DNA, 523 bp, Zea mays
  unsure (1)..(523): unsure at all n locations
agtagtagatgtgttttatgacgggacttattgcaanactcgtaccggtccggaattcccgggtcgacccacgcgtccgggcccaagtcactggtcaccatctccacggaggtggacaccaaggccatcgagaagagctctaaggttgggctctccctggtcctcaagccctgaggtcaccagcttctgcttttgggatgttaggtttatttttatttttatcagcagctgaagttcagtaaacaagcttggactaaacttgtcaactttggtgcccatcccacaaactcaattcgttgcctgttaccctatcctaaactacctgagaggtttatgttacaattaanaaaaaaaaaaaaaaagggcggccgctctagaggatccaagcttacgtacgcgtgcatgcgacgtcatagctcttctatagtgtcacctaaattcaattcactggccgtccgtttacaacgtcgtgacttgggaaaaccctgcgttaccaacttaatcgccttgcagcacatcccct

SEQ ID NO: 86562 - DNA, 528 bp, Zea mays
  unsure (1)..(528): unsure at all n locations
agttaggaaggatttgttcatgtctagccctgtgactgcatngctcgtaccggtccggaattcccgggtcgacccacgcgtccgctcccctgctccggctccggctccggctctgccatgggcctttcaacagtttagtcgcgcggccggaccgcgcctcgtgccggcccctctcggccgctgccgctctgcccagccccgccgcccgcgccgggcccagctcgccaccgtccggtgctccgtcgacgccaccaagcaggcgcaggatggcgtggcgacggcggtcgcgacggaggcgccagcgtcgcggaaggagtgcttcggggtcttctgcaccacctacgacctcaaggcggaggacaagaccaagtcgtggaagaagctagtgaatgttgctgtgtcaggcgcggccgggatgatatcaaatcacctgctgttcaaactcgcttctggtgaagttttcggacaagaccaaccaatagcacttaaactactcggctcagaaagatcgtttcaggccctcgaagg

SEQ ID NO: 86563 - DNA, 530 bp, Zea mays
gaggtctagtaggaggagagctatacccgacgtccgaaatattgcatgccgtccggattcccggtcgacccacgcgtccgggagcgagccatcgacacgatcgcgagcgcatgcacgtacgttgtcggaagctcaaggtagagcaagcaccagtgcctgatcgatggcggcccacgctctcctctccggccggcagctgctgggccgccccgtgcagtcagccgtctctaggtcgtcggcgaggaaggcgcccttcgtcgtcagggccagctccagccctccagccaagcaaggtgccgacaggcagctgtggttcgcgtccaagcagtccctctcctacctcgatggcacgctgcccggcgactatggcttctacccgctgggcctctcggacccggagggcaccgggggcttcatcgagcccaagtggctggcctatggcgaagtgatcaacggccgctacgccatgctgggcgcagtgggcgccattgtccccgagatctttcgcaagatgggcattaatccccccg

SEQ ID NO: 86564 - DNA, 494 bp, Zea mays
  unsure (1)..(494): unsure at all n locations
ggttaagctgngtcnncgatcgagcctacgcatgctgtaccggccggattcccggtcgaccacgcgncgcggcgcgtggtcgctacatgacggacatgacacctacgccgacaccgacgcgcgatcggggcgccggctcgcggggctgcctgcgcgtacgagctctccaaggaccccgccgtgagcatcgccatcgtggagcagtcggtgtcgccgggcggcggcgcgtggctgggcgggcagctgttctcggccatggtggtgcgcaagccggcgcacctgttcctggacgagctgggcgtggcgtacgacgaggccgaggactacgtggtcatcaagcacgccgcgctcttcacgtccacggtcatgagcctgctcctggcgcgccccaacgtgaagctgttcaacgccgtggccgtggaggacctcatcgtcaggggagggcgcgtcggcggcgtcgtcaccaactgggcgctcgtgtccatgaaccacga

SEQ ID NO: 86565 - DNA, 512 bp, Zea mays
agtagaggggagtgatctgagctattgaacaaagactaattgtcatcactctccggaattcccggatcgacccacgcgtccgggactttgtcgcatctgatatcaacttcataaatctttatccaagatggcgctgcaaagacattggtgcttcaaacagggatgatgccttctacaggtacaagatgcccagaatgattaccaagatagaaggccgtggtaatggtatcaagacaaatgttgtgaacatggttgacatagcaaaagcacttgccaggccagcttcctacacaaccaagtactttggatgtgagcttggtgcacagtccaaatttgatgagaagacagggatttccttggttaacggggctcatgatactgcaaagctggctggtctccttgaggtattcatcaagaagtatgtccaatgttatgggtgtggaaatcctgagacagagattctcatctcaaagacccagatgatatcactgaaatgtgcagcctgtgggttc

SEQ ID NO: 86566 - DNA, 518 bp, Zea mays
  unsure (1)..(518): unsure at all n locations
agaaaagtgtattgtgagctacgtacatgattgctaatctctacnactctaccggttcggaattcccgggtcgacccacgcgtccgctggaactggaaagacactggcctttggcatacccatgatcaagcaattaagcgagcgggacgatggtcggattacaaggagaggtcgtactcctcgggttctggttctagcacctaccagagagttagccaaacaagtcgagaaggaaataaaggaatcagcacccaagctcggcacagtgtgtgtatatggcggagtctcatataatgtccagcagaatgcactctctagtggtgtcgatgatgctgatggaacacctggccggataatcgatttgatcaatggcgtaagcctccagttgggagaagtccagtattaggccctggatgatgctgaccaaatgctcgcagtggggtttgcggaagatgtaggcacaatattacaacagctttctgcacgctggcaaagcatgtcgatctctgcgacgatgc

SEQ ID NO: 86567 - DNA, 504 bp, Zea mays
gaggaaaagagctttgttacgaccccgaatatatagcatggctctaccggtccggaattcccgggggccaccattccgaccaccgattctggcctcgtcctcagttcctccgctctcctccggaggactaggagggccgcctcatccgtcaccgccaggctgccagccgtcgcccgccgtcgcccgcagctcctcgtgcgtgcctccgccaaggagatcgcctttgaccagggctccagagccgcccttcaggccggcgtcgagaagctcgccgccgcggtcggcgtcaccctcggacccagaggaaggaatgttgtcttggatgagtttggaacccccaaagtggtcaatgatggagttaccattgcccgcgctattgagcttgctgatcccatggagaatgctggtgcttccttgattcgtgaagttgctagcaagacgaatgactcggctggtgatggaaccacaactgcctctgttctcgctagggagatcatcaaattg

SEQ ID NO: 86568 - DNA, 520 bp, Zea mays
  unsure (1)..(520): unsure at all n locations
agtaaatgtgttttcgtgagctagcctcaaagatcccatagcnactactgtaccggtctcggaattcccggcaaacagtagttcttcagttaagcaggagggcacaggatgaggaagatggcgtctaagaggatccagggggagctcaaggatcttcagaaggaccctgccacctggtgcagtgcaggtcctgttggtgaagatatattccactggcaggcaacaataatgggtccatctgatagcccatattctggaggagttttcctagatacaatccattgtcctcccgattatcctttcaaaccaccaaaggtggcattccgcaccaaggtgttccatccaaacatcaacagctgcgggagcatctgccttgacatcctgaaggaccagtggagccacgcgctaaccatctgcaaggtgctgctgtccatctgctccctgctgaccgatccgaaccccgacgatcctctggtccgcgagatagcgcacatgtacaagacggaccgtaacaagtacn

SEQ ID NO: 86569 - DNA, 511 bp, Zea mays
  unsure (1)..(511): unsure at all n locations
tgtaggggggagctcgtggattgttacttgccattactcnctttttgttccggttcggaataaccggctcgagccacgcgtgcggcgccatattgcagaacctcgtcgccttcacccgcaccacaccaccggcgatgtccaggtcggcttcgcagggcggcagccacaagccggcgctccggaggcccgtcttcaccaaggtcgaccagctcaggccgggcaccaacgggcacaccctcaccgtcaaggtcgtcagcgccacccccgtgcctgggcgcgcgcgcccatgcgcacccgccgccgccccatcccgcgcgccgcgcatcgccgagtgcctcatctgggacgagaccggcgccatcgtcttcaccgcccgcaacgaccaagttgacttgctgaagcccaatgcgacagtgatcttgcgcaatgccaaaatagacatgtttaaaggatcaatgaagcttgcagtggacaagtggggtcggattgaagctgtagagccagccatttt

SEQ ID NO: 86570 - DNA, 519 bp, Zea mays
  unsure (1)..(519): unsure at all n locations
aggttagtnntagaacttgtctatcgataagggggcgaaaatagtaaggcttctaccggtccggaattcccgggtcgacccacgcgtccgcccactccctctcgtcgccgtcctctcccgttcgcaacgccacgctccccaccgccgagatggccccgaagcgaggtggcagggcaccggtgccggccaagaagaagacggataaagtgacgaaccctctgttcgagaaaaggccgaagcagttcggcatcggcggcgcgttgcctcccaagaaggacctgcaccgattcgtcaagtggcccaaggtcgtgcgcatccagcgccagcgtcgcatcctcaagcagcgcctcaaggtgcctccggcgctcaaccagttcacccgcaccctcgacaagaacctcgctaccaacctgttcaagatgcttcttaagtaccggcccgaagacaaggctgccaagaaggagaggcttctgaagagggcccaggctgagaatgaaggaaaaactgttgaatccaagn

SEQ ID NO: 86571 - DNA, 512 bp, Zea mays
  unsure (1)..(512): unsure at all n locations
naggagaggggctgatctgataattgaaaagacaagtattgtatcacgtccggaattccgggggttttaaatcgtaagcggcggccttttttccaaggccaaatggccaacctatgtttaaaaaaaggagaaatttgttgggtttgaagaaaaattaaagggaattctatcaattttaattttccattaatttagttagtttttcttaatggaaattgaaattattaactaacagagcaaacacaaataaagaaacaactttgctgaccatgatagatttttatctagttggaagagtcctcttaatattcatctagtcttatataagtttgggtatatagaaatacaaacagaaaagagaggatagaggataggctcattacataaaaaaaagatatggaaatagccataatacataacanaaaagaaaaaaaggagcgggagagccaaatgaatcgaaagattcatgtttggttcgggaagagatcataaaaattgtaaacttaatagca

SEQ ID NO: 86572 - DNA, 508 bp, Zea mays
agtaggagtgcttttaggtacgtatcacagaacataatatgcatgctctaccggtccggaattcccgggtcgacccacgcgtccggcaataggacgatcgagcaagaagcaagcagcagtaacaagaaaccatcatcgatccatgtatccaccaatggcggcgctcggaggacggcggaggagggcgtcgtcagcggccctcctgctagccttgttggcggtggccctggtctccctggccggcccagccacggccgcggggaacaagaccgggcaggtgaccgtgttctggggccggaacaaggccgagggcacgctgcgcgaggcctgcgactcgggcctctacaccatggtgatcatgtccttcctcgacgtctacggcccgcagcgcggcggctaccaccagtaccacctggacctgtcggggcacccgacggccggcatcggggacgacatcaagcactgccagttcgtgggcgtgccggtgacgctctccgtcggcggcttc

SEQ ID NO: 86573 - DNA, 504 bp, Zea mays
  unsure (1)..(504): unsure at all n locations
ggtagtnaggatcggctaccgcaaggaagctattcgtaacacgtccggaattcccgggtcgacccacgcgtacgctgaccttttcgctgtactcactcgccacacacaccccctctccagctccgttggagcgtccggacagcagcaggcgcggggcggtcacgtagtaagcagctctcggctccctctccccttgctccatatgatcgtgcaacccatcgagctacgcgcgtggactgccttccctgggtcggcgcaggaggggatcggaaggatggcggcgtcggtttccagggccatctgcgttcagaagccgggctcaaaatgcaccagggacagggaagcgacctccttcgcccgccgatcggtcgcagcgccgaggcccccgcacgccaaagccgccggcgtcatccgctccgactccggcgcgggacggggccagcattgctcgccgctganggccgtcgttgacgccgcgccgatacangacgaccaaaagagggt

SEQ ID NO: 86574 - DNA, 517 bp, Zea mays
  unsure (1)..(517): unsure at all n locations
naggtngaggggagagcttgtctttagaatcgaggggaaaaagtatgctctaccggtccggaattcccgggctgctccggctccggttcgcacacagtaagaaaagatggcgctgccatccatgagtcttgtggcaaagggtgtgcttcccttctcagcacgtacctcgagtggtgtcacacaaaggccggtgtcagtgactgcttccttggagcacaaaaccagcgatgccagaaggaagttcctaaaacttgcgcttgggaaccttggagttggactgcccaccttgttgggcgctaagaaagctctcgctgatgagcaaggcgtctcgtcctcgaggatgtcttattcgaggttccttgagtatcttgacaaggatagagtgaagaaggttgatttgtttgagaatgggacaattgctattgtggaggccatttctcctgagcttggtaaccgcgtgcaaagagtccgtgtgcagcttcctggtctaagccaggagcttcttcaaaagttgagn

SEQ ID NO: 86575 - DNA, 506 bp, Zea mays
  unsure (1)..(506): unsure at all n locations
agttaggagggtcnccgactgtacccgacctatgctatgatgtaccggtccggaattcccggctcgacccacgcgtccgctccagcattgtgttctgattcacctgctccaatggctgttctttctgctgctgatgcgttccccggtctcagctatcgggtttgagggctatgagaagcgccttgagatcacattctctgaggcacctgtctttgtggaccctcatgggcgtggtttgcgtgccctctccagggcccagattgactctgttctggatcttgcacggtgcacaattgtgtccgagctctccaacaaggatttcgactcatatgtcctctctgagtcaagcttgtttatctatcctctgaagattgtcatcaagacctgtggcactaccaagctcctgctcaccattccaagaatccttgagcttgctgaagagctgtctatgccacttgctgctgtgaagtactcccgtgggacgttcatctttcctggtgcacagn

SEQ ID NO: 86576 - DNA, 515 bp, Zea mays
  unsure (1)..(515): unsure at all n locations
gagtntaggagagcgagtggagnttcggtatcgccgcttcagctatcacacttcgaattcccggaccgacccacgcgtacgctcgccttttcactggactcactcgccatacacaccctctctccagctccgttcgagcgcctagcagcatcatgcgcggggcggtcacgtagtaagcaactctcggctccctctccccttgctccatatgatcgcgcaacccatcaagctacacgcgtggactgccttccctgcgtcggaacattacgggatcgcaaggatgcctgcgtcggtctacaaagccatctgcttacaaaaaccgcgctcaaaacgcaccaatgacagagaagcgacctccttcgcccgccgatcggactcaacgccgaggcccccacacgccaaagccgccgacagtcatccactgcgactcccactcctaacgagcccagcattccttcgcaatgagtgcccgtgcagactcccggcctatacagacgaccaattcaaaagtgacg

SEQ ID NO: 86577 - DNA, 507 bp, Zea mays
  unsure (1)..(507): unsure at all n locations
agaaaggaggtcnatgactgtaatgccactcagtattgctgtaccggtccggaattcccgggtcgacccacgcgtccggcctgggcaaccgaaagagctcctcccgaggctgttcgacgagtccttccgcagcacggcaacttcctctttctccaagtactccgtcgcggacagctccatggacctgggcagctgcccgttctccgaggtcgaggtgggcgggggaagtctgcgagaaggtgacgagtcggagaaggagaggccactggttctgcgcaacaaggcgccgaggtggcacgagcagctgcagtgctggtgcctcaactttcgcgggcgcgtcaccgtggcctcggtcaagaacttccagctgatagctcctgcaaagacgcagccgcagccgcaggcctccggccccccgccgccgccgccgccgtcgtcgtcgtcgtaccatgacccggtgatcctgcagttcggcaaggtcgggagggacatgttcaccatggacta

SEQ ID NO: 86578 - DNA, 515 bp, Zea mays
  unsure (1)..(515): unsure at all n locations
agattagggcagagctgtggtcggaaatcgaatatatagaatngctcgtaccggtccggaattcccgggtcgacccacgcgtccgagataagtaccttcaatatgcttttgtcggtgtgtgctagttcactagattttgacggagcgctccaagttatggagctcctaaaggaagctgggctaaaacctgattgtaaactttacacaacgctgatatcaacttgtgcaaagtgtggaaaagttgatgccatgtttgaggtattttatgagatggtcagtgctggtatagagccaaatgttaacacatacagtgcattaattgatggctgtgctagagctgggcaagtggctaaagcatttggtgtttatgggattatgagttcaaagaaggtgaagccagatcgagttgtcttcaattctttgatcagtgcatgcggtgaatctggagctctggctcgggcatttgatgttttatcagaaatgacagcagaatcctctgaatctaaaggatggaa

SEQ ID NO: 86579 - DNA, 496 bp, Zea mays
  unsure (1)..(496): unsure at all n locations
nagtcagtnaggattgactatgaaagggcgattatctgcacactcccggaattcccgggccaggatataactttgtgctgctgtgatggtgttaagtgccggtgggctcggccttcttataagtctaatggggtatccgatgtccttggggcaatcggacagatccggttaagttatctggtgcacatgcatagccgtccgaggtctttgagacaaggacaggtgcatgtgggcccaataacttgggaggttctgccacagcagggagcaggcgcaaggatcctctttactgcacatggaggcgagcacctcagatatgccctacagttgttatttccagcctttaacaatgcaacagaatatgaagctctgattcatggactgaacattgctatatcactgggcatcaagagactgatggtatatggagattctttggtagtcataagtcagataaacaaagaatgggattgttcaagcgattccatgggaaaat

SEQ ID NO: 86580 - DNA, 512 bp, Zea mays
  unsure (1)..(512): unsure at all n locations
ngggtnagggcagagttntgtacgaacccgcataaaaagtaggctctaccggtccggaattcccgggtcgacccacgcgtccggcagcacgtcgtgccgctccaaccatctcgcttccgtgcttagcttcccgccgcgccggggcgtcgaccaaggctcccggccccggcgagaagcaccactccatcgacgcgcagctccgtcagctggtcccaggcaaggtctccgaggacgacaagctcatcgagtacgatgcgctgctcgtcgaccgcttcctcaacatccttcaggacctccacgggcctagccttcgcgaatttgtccaggagtgctacgaggtatcggccgactacgagggcaaaggagacacgacgaagctgggcgagctcggcgccaagctcacggngctggcccctgccgacgccatcctcgtggcgagctccatcctgcacatgctcaacctcgccaacctggccgaggaggtgcagatcgcgcaccgncgncgcaacagn

SEQ ID NO: 86581 - DNA, 499 bp, Zea mays
  unsure (1)..(499): unsure at all n locations
naggaagggcgtggttnngatcgagagcggcgaaagagaggctctaccggtccggaattcccgggtcgacccacgcgtccgggggaaaacccaaaaccctagcaccccccggccccgtcgccgacggccgccagagtggatagatggcggtggacgaggtgaactcggtctacgtcggtggccttccctacgaggccaacgaggagatgcttcgcgacgccttcgggtactacggcaccatcgtctccgtcaaggtgattaatgatcatgctgtcaaaggcaagtgttatggttttgttactttcactcaccccagagctgctgagcaagcaattgcgggcatggacggcaagaaattaggcaaccgtattgttcgaggtaaatgaagtgcgtacaagaggcccccgcgaatttggcccaaaatgttttcagacgagatccaaggaggtatggtagagatccatactgggacagaagggacagggaacggagctatgat

SEQ ID NO: 86582 - DNA, 510 bp, Zea mays
  unsure (1)..(510): unsure at all n locations
agtcaaagagtctctgaggnccttacgtcttccattcnacgacgctaccggttcggaattcccggctcgacccacgcgtccgagctcgatctactactactactagctgttacacatactagccatcctgccaggcagcgtgccatggcgcccaccgtgatgatggcctcgtcggcaaccgccgtcgccccgttccagtgtctcaagtccgccgccagcctccccgtcgtccgccgcagcaccaggagcctcggcaacgtcagcaacggcggaaggatccggtgcatgcaggtgtggccggcctacggcaacaagaagttcgagacgctgtcgtacctgccgccgctgtcgacggacgacctgctgaagcatgtggactacctgctgcccaacggctggataccctgcctcgagtcagcatgctcgggttcgtgtaccgcgagaactccacctacccgtgctactacgacggcccggtacttgaccatgtggaagttgcccatgttcgct

SEQ ID NO: 86583 - DNA, 500 bp, Zea mays
  unsure (1)..(500): unsure at all n locations
gggaagtgtttagtatgtagccaagactnattgtcatgctcgtaccggtccggaattcccgggtcgacccacgcgtccgcggacgcgtggggtgctacattggtccaaacctttggacaggagaatcatgtgtgcctgaaggagggttccatcattattccaccctatgctcctccgcagaaaatgcaagctcacttgatttccccagacactccacgctcaatcttcgtttacttccggggacttttttatgacacggggaatgaccccgagggcggatactatgcaagaggtgcgcgagcttcgctatgggagaacttcaagagcaaccctctgtttgacatttccacagaccaccctgccacttactatgaagacatgcagcgcgctgtcttctgcctgtgcccattgggctgggcaccgtggagccctaggttggttgaggctgtggtctttggctgcattccagtcatcatagctgatgacatcgtgcttccatt

SEQ ID NO: 86584 - DNA, 515 bp, Zea mays
  unsure (1)..(515): unsure at all n locations
nagttaagggcagagtcgtgtacggatcccgcatatatagcatggctcgtaccggtccggaattcccgggtcgacccacgcgtccggctccgtaaaccagagagtacggccgaccagaccaatggcactgcggctacccatctgctcgacccacgggctggcctcctcgccagcgcccatctcctccacgacgacgtgccggccggccgccgccagtgggagcttgatcccgccagctgccctgatcgcagttgccatccgctgggcgtcggcgtcggcgtcccaaaagaggggcctgctgctgacgacggcgaggggcggcggagtcgcgccggtgaggtcgagcgggatcgagacgacgtcgacctcggtgggagctgaggccgtcaccgggcaggtcacggaggtcaacaaggacaccttctggcccatcgtcgaggccgccggcgacaaggtcgtcgtcctcgacatgtacaccgaatggtgcgggccttgcaaagtgatggctcccaagt

SEQ ID NO: 86585 - DNA, 517 bp, Zea mays
  unsure (1)..(517): unsure at all n locations
gtctagtnacagagatctggtttactgcaaggggggttagtttcagcactttcggaattcccggctcgaaccaagcgttccaggttattccttggcaaaagggacccttgaaagggcctaaacggatttttcgaaaaaaggaaaggaggagggaaaggattccatgggaacatttatgagttggatggagtttccgttactggaccaaccaggttccaattccgttatttcaactacacttaaacgaacttttaaaatgggtcaagactctcaagtttatgggcccttctatatgggaccaagttgtggttcattggatttggttcattaatagggtcacgattcgactttgatcggtatggattggtaccaagatcaagtcctagacaagcggaccttattttaaccacttgtacggtaacaatgaaaatggctccatctttaatgcgaatatattagccaaaggcttgacccggaatacgtcattgctattgggagcctgtactattacaggggg

SEQ ID NO: 86586 - DNA, 500 bp, Zea mays
agtcagggcgtgtcgagctagcacgcagctatctcaacacgttcggaattcccggctcgacccacgcgtccgggagagtggtcttggacttgaacgtgcacacatgggtatcttcacagaattgggaggggtatgtgctagataccgctctgagaagcttatggagcacatcaaacttttctccacccgtctgaatattcctaagcttattcgagcttgtgatgaacaacagcactggaaagaacttacctacctgtacatacagtatgatgaatttgacaatgctgccaccacaattatgaaccactctccagatgcatgggatcatatgcagttcaaggatgtctgcgttaaagttgcaaatgtcgagctatattataaggcagttcacttctatttgcaagagcatcctgatctcatcaatgatatgctaaatgtgcttgcacttcgtttagatcataccagagttgtagacataatgcgcaaggctggtcagttgc

SEQ ID NO: 86587 - DNA, 512 bp, Zea mays
  unsure (1)..(512): unsure at all n locations
nagggaaggggagaggtctnatgcctgaatnactgcatccgatcccacatcatcggaatacccggctcgacccacgcgtccgcgagcggcggcgctcaggcgatcgagatagtgttctcggcgctggctcgtccggacggcaacagcttgctcccgaggcccggctacaagctctacgaggcgcgcgccgtgttcagcgggatggaggcccggtacttcgaccttgtacccggcgaaggctgggaggtcgacaccgacggtgtccgagctctcgccgacaagaacacggttgccgtcgtcatcatcaaccccggaaacccgtgcggtaacgtctactcctacgagcacctggccaaggttgctgagactgcgcggaagctcggcgtgtttgtcgtagcggacgaggcttacgcgcacttgacgtttggagagaggaggttcgtgccgatgggcgtgtttggggccgtggctccggtcatcacgctggggtccatttcgaaaaggtggctggt

SEQ ID NO: 86588 - DNA, 515 bp, Zea mays
  unsure (1)..(515): unsure at all n locations
agagagttntcgagtttcnacgaagcaccacgaactaattgcaattgacagtaccggttcggaattcccggctcgacccacgcgtccggagaattcttaattcatgagttgtagggagggacttatgtcaccacaaacagaaactgaagcaagtgttggatttaaagctggtgttaaggattataaattgacttactacaccccggagtacgaaaccaaggatactgatatcttggcagcattccgagtaactcctcagctcggggttccgcctgaagaagcaagagctgcagtagctgcggaatcttctactggtacatggacaactgtttggactgatggacttaccagtcttgatcgttacaaaggacgatgctatcacatcgagcccgttcctggggacccagatcaatatatctgntatgtagcttatccattagacctatttgaagagggttctgttactaacatgtttacttccattgtgggtaacgtatttgttttaaagccttacc

SEQ ID NO: 86589 - DNA, 509 bp, Zea mays
  unsure (1)..(509): unsure at all n locations
gatgagggagaggttntcgctggagcccgcacatgatcggattgctctaccggttcggaattcccggctcgacccacgcgtccggcatcgtgtgcgccagccccagggcgctggaggccagcaagacggccaggtccgtgcgcgtcttcttcgactggaaggactacctcaggttctacgacatgggcacgtactggccctacacgccctccatccagctcctctacggcctccgcaccgcgctcgacctcatcttcgaggaagggctggacaacgtcgtgaggaggcacaaccgccttgggacagccaccaggctcgccgtcgaggcgtgggggctcagcaactgctgccagaaggaggagtggttcagcgacaccgtcaccgccgtcgtcgtgccgcccaacatcgacagcgccgaggtcgtcaggcacgcgtggaagcgatacaacctcagcctcggcctcggcctcaacaaggtcgccgggaaggtcttcaggatcggccatctn

SEQ ID NO: 86590 - DNA, 508 bp, Zea mays
  unsure (1)..(508): unsure at all n locations
naggagaggggcgagcttatttacgatacgcggcgaagaaagtaaggcttctaccggtccggaattcccggctcgacccacgcgtccgaataaactgcggattctttctttctcttccattcttacgtttccatattaaagtgtagtttttttacttaatttaattattataaacctattttgccaatggtggttccaaaggtacttaaccgaattccggagatgaagaagcgacttgggttgacttatacaatgttatgtatcgagaaaagacactttttttaggtcaagagattcgctgcgagatcacaaatcatatttcacgtctgatgggatatctcagtttataaaattggaatagcgatatttttttgtttataaactcccctggcgggtggctaatctcaggaatggcgatttttgatacgatgcaaacggtgacacctgatatatatacaatatgcttngaaatagccgggtccattggctccttattttgcttggagga

SEQ ID NO: 86591 - DNA, 509 bp, Zea mays
  unsure (1)..(509): unsure at all n locations
agtaaaagaggcctgtngttactgatccgaggggtatatagtcatgctctaccggtccggaattcccgggtcgacccacgcgtccgaaaagctactgacctccccaaagtttacattctgttatgatgcgctccatggtgttgctggagcttatgccaaacacatctttgtggaagagcttggtgctgatgaaagctcactgttgaattgtgtcccaaaagaggactttggaggtggtcatccggatcctaacctcacctatgcaaaagagttggttgaacggatgggtcttggaaagtcatcctcaaatgttgaacctcctgaatttggtgctgcagctgatggagatgctgaccgcaacatgattctgggtaaaagattctttgtgacaccatcggactctgttgccattatagcggccaatgctgttcaatcaattccttactttgcttctggcctgaagggagttgccaggagcatgccaacatcagctgccctttgatgttgtg

SEQ ID NO: 86592 - DNA, 509 bp, Zea mays
  unsure (1)..(509): unsure at all n locations
aggtaaagtgnnntnnnnnctttganttcgttgtctatccccgaaaaccccnnggnntggggaaaagtgcgtagacaaggcttcggggacaccttaccatgacaatctttttttcttcgatattttctttcctcctgattacccccatgaaccaccttctgttcactatcactctggtggtctccgcctgaatccaaatctgtatgagtcgggaaaagtgtgcctcagcctcctgaagacatggacaggcactggtaacgaagtgtggaatgctgaaagctcaactgttcttcagctgctgttatcgcttcaggcccttgttctcaacgaaaaaccttacttcaacgaggcgggatacgaacaatttgtgggcaaggctgatggaaagaagaacttcatcacgtacattgagattgccttcctctgtcatgcanatccatgatgtatgttttacgcaagcctncaaagcattttgagacgttggtcaaggagcatttcacctgccgtgc

SEQ ID NO: 86593 - DNA, 519 bp, Zea mays
  unsure (1)..(519): unsure at all n locations
gagagagtgntttngtcatgtagaagagcatacggcactgctcgtaccgtccggaattcccggtcgcccacgcgtccggactagttctagatcgcgagcggcatctatagcaaccggtccaacactttcacgctcaggcgctcagctctagcaatggctgcctccaccatggcgatctcctccacggcgatggccggtacccccatcaaggtgggctccttcggcgagggccgcatcaccatgcgcaagaccgtgggcaagcccaaggtggcggcgtccggcagcccctggtacggccccgaccgcgtcaagtacctcggccccttctccggcgagcccccgagctacctcaccggcgagttccccggcgactacggctgggacaccgtcgggctgtccgccgaccccgagaccttcgccaagaaccgcgagctggaggtgatccactcccgctgggccatgctcggcgcgctcggctgcgtcttccccgagctgctctcccgcaacggcgtcaagttc

SEQ ID NO: 86594 - DNA, 513 bp, Zea mays
  unsure (1)..(513): unsure at all n locations
tggtagagggctctgtgcatgccatcgatgcactctcgaacgcttcggattcccgggtcgacnacgcgtccgcgcgggcgcggagctgctgcggcggctggaggagcgcgggcccggcgggcgcagcatgatcgacatcacgcacgcggtcgtgccggacctgccggcgttcgccacgggggcggtcgcggggcccatgctgcgcctcagggagtccatggcggacgggtccgagtacaacctgtcggagctgcggatggagtgccacaccggcacgcacgtcgacgcgcctggccacatcaaccaggcccacttcgccgccggcctcgacgtcgacacgctcgacctccacgtcctcaacggacctgcattgctagttgatgtgccaagaaacacaaatataacagctgaagcgatggaattcctaaacatcccgagaggggttcgccgagttctgttcagaacactgaacactgacaggaagttgatgtggangaaaggaggtgacacttc

SEQ ID NO: 86595 - DNA, 521 bp, Zea mays
  unsure (1)..(521): unsure at all n locations
agggtnnttcnntccatagtagcttancgnantgacggtaccggtccgnatttccgggtcgacccacgcgtnccgcggtcagggttctcgacggtcctttgcctctccgccatggacgcacagcgagccctgcgtgacgagctcatgggcacagctcgcaacctaacggaggaggagaagaaggggcacaaagagctgaagtgggacgatccggacgtgtgcggcccttacatggttcggttctgtcctcacgaccttttcgtcaacaccaagagcaatatcgggccgtgctcgaggatccacgatccgaagctcaaggaaagctttgagaagtctcctaggcacgatacttatatgcaaaggtttgaggcagagcttgcacaacaatgtgagaaattggtaatggacttagatagaaagataaggcgtggtcgagaaaggctggctcacgattctgctgtgccaatgccaatccctggaaaattagctgagctgctttcagtgcgaaaagaacaggtgaa

SEQ ID NO: 86596 - DNA, 520 bp, Zea mays
  unsure (1)..(520): unsure at all n locations
agagtgtgtcntccatgatagcgatgtatgnatcgctcggacccggaattcccgggtcgacccacgcgtccgctctccttttgctcggaacgcacacaccgcccgtccccgatctccgatcccctcgtcgatcgaaagatgcagatcttcgtcaagaccctcactggaaagactatcaccctcgaggtggagtcttctgacaccattgacaacgtcaaggccaagatccaggacaaggagggcatccccccggaccagcagcggctcatctttgctggcaagcagctcgaggacgggcgcacacttgccgactacaacatccagaaggagagcaccctccaccttgttctccgcctcaggggaggcatgcagatcttcgtcaagaccctcactggaaagactatcaccctcgaggtggagtcttctgacaccatcgacaacgtcaaggccaagatccaagacaaggagggcatcccttcagaccagcagcggctcatttttgccggcaagcagcttgagg

SEQ ID NO: 86597 - DNA, 519 bp, Zea mays
agtgagtggtctgacctcgaataaagattatgtgcactgctcgtaccggtccggaattcccgggtcgacccacgcgtccggtgtgtttgtgtgtgtgtgtgtgtgcgcgcgcgcgcgcgcgtaggtggtggcgctgtgccaggctccgttcctgctcgacgatccccacgtcggcctcatgttcccggcggacgccatcgctagggccaagcactatctcgccatggcgcccggcggtctaggtgcgtacagtgactcccgcggcatcccgggaatcaggaaggaagttgccgacttcatccacaagcgtgatggatatcccagtgatccggaactcatctacctcacagactgtgccagcaaaggtgtgatgcagatcctgaacaccatcattagaaacgagatggacgggatcttggtccctgttcctcagtacccactttattccgccaccatttccctctatggtggttctctggtcccgtactacttggaagaagaggctaactggagcctcga

SEQ ID NO: 86598 - DNA, 515 bp, Zea mays
  unsure (1)..(515): unsure at all n locations
agggagtggttgttatgaggcgggggtaagtggtaccgctccggaattcccgggtcgacccacgcgtccggtgcaggtgatggacccggacacggaggagcagtacgacttcgacccgctggacgacaccaagacgtggccggaggacctgctgccgctccgccccgtggggaggctggtgctggacaggaacgtggacaacttcttcaacgagaacgagcagctggcgttcgggccggggctggtggtgccagggatctactactcggacgacaagatgctgcagtgccgggtgttcgcctacgccgacacgcagcgctacaggctgggaccaaactacctgatgctgcccgtcaacgcgccgcgctgcgcgcaccacaacaaccactacgacggcgccatgaacttcatgcaccgcgacgaggaggtggactactacccgtccaggcacgcgccgctgcggcaggcgggcgccgccacgccactgggcgcccangccggcgcggggaagaagg

SEQ ID NO: 86599 - DNA, 509 bp, Zea mays
  unsure (1)..(509): unsure at all n locations
agtgaggttttggctctgaatggaagctaatgcgaccccccggattcccgggtcgacccacgcgtccgggctagcagcacagcagcagccagagccatcccctctcctcgctacgcttcgcttccgcggcgccgattcctcctcctcctcctccaccctcgtccgtccccttccggcgcacgagctcgcccgagatggcgaacgcgagatcgggtgtcgctgtgaacgatgagtgcatgctgaagtttggcgagctgcagtcgaagaggctgcaccgcttcataactttcaagatggacgacaagttcaaggagatagttgtggaccaggtcggggatcgcgctaccagctacgatgacttcacaaacagcctccctgagaatgactgccgatacgcgatctatgatttcgactntgttactgcagaggatgtccagaagagcaggatcttctatatcctatggtccccatcctncggcaaggtgaaaagcaagatgcttacccaagcc

SEQ ID NO: 86600 - DNA, 515 bp, Zea mays
gagaaagggttgagttgagatggaagattgcgcatgctcgtaccggtccggaattcccggggttgctctagatccgttcatcctggtggttttgtgaggtcgaaagcggcgagcgaattagaagatgctggacaagctgtgggacgacgtggtggccgggcctcgcccggagacgggcctcgagaagctccgcaaggccaccaccgcccgtccgctcgtcatcaacaaagacgcggacggcggcagctacaagcgggcgcagtcgatgccgtcgaccccgacgacgccggtgacgccgtcgtcgtcgtcgtcgtcgacgacgccgcgcggcgccggcaacgtgtggcgcagcgtcttccacccggggagcaacctggccaccaagggcatgggcgccaacctcttcgaccggccgcagcccaactcccccaccgtctacgactggctctacagcgacgagaccaggagcaaccaccgctagatcgggccaaatgggttgacagtggaaaaggcct

SEQ ID NO: 86601 - DNA, 517 bp, Zea mays
  unsure (1)..(517): unsure at all n locations
ngagttaagtgtttgaggctgcactcgttcgatcgctatcacactcggaattcccgggtcgacccacgcgtccgagagattccggaaagatggcaggaaaactactctacggctggttgatatggagactgcgatattttactgtggagttcttccgcaagctcacacaggaagttgataagactggaactggaaatcccagaaatgccaatccttctgctccttcggacgatcgttacaatgatgcacatttcaggacgattgcttctaacgtgtcctcatacattggcatggtatctgaaacgctgaagaatactatccccaagtctgttgaccactgtcaggtccgcgaagctaagcggtccctgcttaacgatttctatactcaagtgggcgggaaagatgctaagcaacttgcagtactccttgacgaggatcctgccctcatggaacgcaggctgcaatgctttaagaggcttgagctgtacaagtctgctcgggacgagattgatgcccc

SEQ ID NO: 86602 - DNA, 519 bp, Zea mays
  unsure (1)..(519): unsure at all n locations
nggtaagggggttgtgtaagtataaagaaatgatgtactgctcgtaccggtccggaattcccgggtcgacnacgcgtccgcgctacgtagcagtgcaataaaaaaagcagccgcaatggcgagcagcaccatggccctctcctccacggccttcgccggcaaggccgtgaacgtgccgtcgtcgtccgccttcggcgaggcccgcgtgacgatgcgcaagacggcggcgaaggccaagccagcggcggcgtccgggagcccgtggtacggccccgaccgcgtgctgtacctgggcccactgtccggcgagccaccgagctacctgacgggcgagttcccgggcgactacggctgggacaccgcggggctgtcggcggacccggagacgttcgccaagaaccgggagctggaggtgatccactcccgctgggccatgctgggcgcgctcggctgcgtcttccccgagcttgctcgccgcaacggcgtcaagttccggcgaggccgtgtggttcaaggccc

SEQ ID NO: 86603 - DNA, 514 bp, Zea mays
  unsure (1)..(514): unsure at all n locations
agtaagggtcgagtaggagcgggggtataatgcacgctcgtaccggtccggaattcccgggtcgacccacgcgtccggcaaccggtccaacactttcacgctcaggcgctcagctctagcaatggctgcctccaccatggcgatctcctccacggcgatggccggtacccccatcaaggtgggctccttcggcgagggccgcatcaccatgcgcaagaccgtgggcaagcccaaggtggcggcgtccggcagcccctggtacggccccgaccgcgtcaagtacctcggccccttctccggcgagcccccgagctacctcaccggcgagttccccggcgactacggctgggacaccgccgggctgtccgccgaccccgagaccttcgccaagaaccgcgagctggaggtgatccactcccgctgggccatgctncgcgcgctcggctgcgtcttccccgagctgctctcccgcaacggcgtcaagttccgcgaggccgtctggttaaagccccgc

SEQ ID NO: 86604 - DNA, 512 bp, Zea mays
  unsure (1)..(512): unsure at all n locations
agtaagggtctggctatgaaagaagcacatcgcgaccgctccggaattcccgggtcgacccacgcgtccgagagattccgcgaagatggcaggaaaactactctacggctggttgatatggagtctgcatatttgactgtggagttcttccgcaagctcccacaggaagttgataagactggaactggaaatcccagaaatgccaatcctcctgctccttcggacgatcgttacaatgatgcacatttcaggaggattgcttctaacgtgtcctcatacattggcatggtatctgaaacgctgaagaatactatccccaagtctgttgtccactgtcaggtccgcgaagctaagcggtccctgcttaacgatttctatactcaagtgggcgggaaagatgctaagcaacttgcagtactccttgacgaggatcctgccctcatggaacgcangctgcaatgctttaagaggcttgagctgtacaagtctgctcgggacgagattgatgccct

SEQ ID NO: 86605 - DNA, 522 bp, Zea mays
  unsure (1)..(522): unsure at all n locations
gagttaggctgttctgagcactgccatagacgcntctctgcgaaccgctccggaattcccgggtcgacccacgcgtccggactttcttcacaagcaaaataacttcttggacctccataaaattctaagatttgctatcgatatctcaaaaggaatggattatctgcaccagaataacattatacacagagatttgaagtctgcaaatcttctgctaggccatgaccaagttgttaagatcgcagactttggtgtggcgcgacatggaagtcagcaggggcagatgactgctgaaactggaacctaccgatggatggcaccagagataattaatcataagccgtatgaccacaaagcggatgtattcagctttgccattgttctttgggagctggcaacttcaatggtcccatatgacaacatgacacccttgcaagctgcattaggagtaagacagggattgcgcttggacattccgggcagcgtgcacccaagattgaccaagctgattcgacagtgctg

SEQ ID NO: 86606 - DNA, 516 bp, Zea mays
aggttaaggtatctgataaagaggatggggagtatgtgcaacccctccggaattcccgggtcgacccacgcgtccgcctgtcgttgtgagaattcttaattcatgagttgtagggagggacttatgtcaccacaaacagaaactaaagcaagtgttggatttaaagctggtgttaaggattataaattgacttactacaccccggagtacgaaaccaaggatactgatatcttggcagcattccgagtaactcctcagctcggggttccgcctgaagaagcaggagctgcagtagctgcggaatcttctactggtacatggacaactgtttggactgatggacttaccagtcttgatcgttacaaaggacgatgctatcacatcgagcccgttcctggggacccagatcaatatatctgttatgtagcttatccattagacctatttgaagagggttctgttactaacatgtttacttccattgtgggtaacgtatttggtttcaaagccttacgc

SEQ ID NO: 86607 - DNA, 516 bp, Zea mays
  unsure (1)..(516): unsure at all n locations
aggtagaggttctggccacgtatagtgccaatcgctaccgctccggaattcccgggtcgacccacgcgtccgattctctgaagtcaggaagatgacaagacggttcagcagcagacttgggcaaggcgggtttgggagcgtgtacaaaggcgagctgccgaacggaggagtgcctgtgcctgtggcagtcaaaatgctggaggactcaacgggggaagaggagttcatcagcgaagtcgcaaccattggaaccatccaccacgccaacgtcgtccggcttctagggttctgctccgagaggtcaaggcgtgctctggtatacgagttcatgcctaacgcgtcgctggagaagtatatacgctgctcctcccaagaacagtcgttaataacaacggccagtaagatgctggaaatagcgacagggatcgcccgaggaatcgagtacctgcaccaaggctgcgaccagcgcattcttcatttcgacattaagcctttcaacantttgctagactaaac

SEQ ID NO: 86608 - DNA, 512 bp, Zea mays
  unsure (1)..(512): unsure at all n locations
aagtgtgttgtcatatgtaaaattgtaggctcgtccggtccggaattcccgggtcgacccacgcgtncgcggacgcgtgggtgattcttgaagagatcgagcttcttttgcaccacagggtcgaggatgtcttgcaactgcggatcaagctgcggctgcggctcaagctgcaagtgcggcaagaagtaccctgacctggaggagacgagcaccgccgcgcaggccaccgtcgtcctcggcgtggccccggagaagaaggccgcgcccgagttcgtcgaggccgcggcggagtccggcgaggccgcccacggctgcagctgcggtggcaactgcaagtgcgacccctgcaactgctgatcacatcgatcgacgaccatggatatgattattatctatctagcttgtggtggtggttgaacaataataagcgaggccgagctggctgccatacataggtattgtgtggtgtgtgtgagagagagagaaacagagttcttcagtttgctatctct

SEQ ID NO: 86609 - DNA, 513 bp, Zea mays
aggaaagggtttggaaggggaggggggaaatgtcatgctcgtaccggtccggaattcccgggtcgacccacgcgtccgatcaattgactctggttccctaaaaggatttcctagtgattgcaaagaagcttcaaagcttgttagtcaacatttctattttctgacttctgatgacggagaatatactatttgaaaactgctatgattcaaattatttctgcagaatcttgtgtgccgaaagaatctggtaattgataagagcatccacactgcatatgtccgagcaatcagatctgcacagcattacatttatattgagaaccagtacttccttggctcttcatatgcttggccatcctatgtgaattcacgtgctgataatctgataccattagaactggccctcataattgcaagtgaattcctatattgatggccaaaatttggcagaacaatttaaccaattgtgaggtcttctgagttctttctctctgcaaacattccatgttctgt

SEQ ID NO: 86610 - DNA, 524 bp, Zea mays
  unsure (1)..(524): unsure at all n locations
gaggtagatggttcggagccttgccactcgttcgatcagtattattatctcggaanttccgggtcgacccacgcgtccgattctctgaagtcaggaagatgacaagacggttctgcagcagacttgggcaaggcgggtttgggggcgtgtacaaaggcgagctgccgaacggaggagtgcctgtgcctgtggcagtcaaaatgctggaggactcaacgggggaagaggagttcatcagcgaagtcgcaaccattggaaccatccaccacgccaacgtcgtccggcttctagggttctgctccgagaggtcaaggcgtgctctggtatacgagttcatgcctaacgcgtcgctggagaagtatatacgctgctcctcccaagaacagtcgttaataacaacggccagtaagatgctggaaatagcgacagggatcgcccgaggaatcgagtacctgcaccagggctgcgaccagcgcatcctccatttcgacatcaagcctttcaacattttgctagactacaag

SEQ ID NO: 86611 - DNA, 516 bp, Zea mays
aggaaagggtctggtatgagtggggggtatatgcactgctcgtaccggtccggaattcccgggtcgacccacgcgtccgagtcgcagcagctagcgcccggccggccagtcgagtgagtccatccttgatcgccatgcaatggccgccaccgccctgagcatgagcatgctacgcgcgccgtcggcctgattctagtccccactcaggctcatggtctcggatgccaagccgctggcaggcccaatgcggcgacagctgctgtgcgcgcaagccacctacaacgtgaagctgatcacgccacagggggaagtggagctgcaggtgcccgactacgtgtacatgctggacttcgccgaggaggaaggcatcgacctgcccttctcctgccgtgcggagtcctgctcctcctgcgccggcaaggtcgtatctggctgcactgaccagtccgagcagagcttcctgaacgactaccaggtatgacacagttggatgctcacctgcgctgcgtaccccac

SEQ ID NO: 86612 - DNA, 514 bp, Zea mays
agtaaggggtcgggatggagtggggagtatatatcacgctcgtaccggtccggaattcccgggtcgacccacgcgtccgcccaaatcttcccagttcccccctcccgctcgacccagatcgaggcctcgatccaccggccatggcgctggagtgggtggtgctgggctacgcggcgggcgcggaggcggtcatgctgctgctgctgacgctgccggggctcgacggcctgcgccggggcatggtctccgtggtgcggagcgcgctcaagcccatgatgtccgtggtgcccttctgcctcttcctgctcatggacatctactggaagtacgagacgcggcccacctgcgacgacgagcacgcctgcaccccctccgagcacctccgccaccacaagtccgtcatgaagtcgcagcgcaacgcgctcctcatcgccgccgcgctcctcctctactggatcctcttctccgtcacccagctcgtcgtcaggctcgaccagatgcagcagcgcgtcta

SEQ ID NO: 86613 - DNA, 511 bp, Zea mays
  unsure (1)..(511): unsure at all n locations
gagttaggggtttgactacgcataagactatatcgtaccgcttcggaattcccgggtcgacccacgcgtccgggaagaagggcctgctgtatcctctcacttccctcagtcctcgtccgtctgctccctactctctgtacctagctctagctagccttcctgtagcgcggcagagatggctgcccctgcctccaccacggcggcggcggcggcagcgctgctgctgctgctcctcctgtcgctcgccgcggcggcggacatgtcgatcgtgtcctacggggagcgcagcgacgaggaggcgcggcggatgtacgcggagtggatggcggcgcacggccggacctacaacgccgtcagcgaggaggagcggcggtaccaggtgttccgggacaacctccgctacatcgacgcgcacaacgccgccgtcgacgcgggcgtccactccttccgcctcggcctcaaccgcttcgccgacctcaccaacgacgagtaccgngccacctacctcggg

SEQ ID NO: 86614 - DNA, 513 bp, Zea mays
  unsure (1)..(513): unsure at all n locations
gagttaggtgatttggtattgaatagaaagtaggtgcgnacagtttcggaattcccgggtcgacccacgcgtccgagaccttgaggctctactcgcctgctctcttcatgcaaaggaagaccctggccgacatgaccgtggggccaataaaactgcccaaaggcactgcaattgtgatacccattccgatcatgcatcgagacaagcaggcctggggcgacgacgcagacgagttcagtccgatgagatttgcgaatgggatcacgggagcagcgaaagttcctcacggcctgctggcgttctcgatggggccaaggtcttgcatcggccagaacttgtcgatgctggaagccaagtcgacgctggccctgatgctccgcaagttctccttcgctctctcccctgactacgtgcacgcgcccgtggatctcttcactctcaaacctaagtttggccttnccgtcattctgaggccactggataatgttttgatttgagttgggcatataanac

SEQ ID NO: 86615 - DNA, 522 bp, Zea mays
  unsure (1)..(522): unsure at all n locations
agggtagtggtttggactatgacatagaagctatatcggaaccgcttcggaattcccgggtcgacccacgcgtccgcaggagacctgggcacttcgctaaggagtgtccatctgcgcctatgtgcaataactgtaaccttgcaggccactttgcagcagaatgcacattacaaactgtttgctggaactgcaaagagtctgggcacattgccagtgagtgcaagaacgaggccctatgccacgcctgcaacaagacaggtcacttggcacgtgactgccctacttcaggtgctaacgtcaagctatgcaacaaatgctttaaatcaggccacatcgccgttgactgcaccaacgaacgggcctgcaacaactgccgtcagccagggcacatagctcgggagtgcaagaacgatccggtctgcaacctgtgcaatgtctccggccacgtcgcacgcgtctgcccaaagacgactctggcttcagtgatacaaggcggnccgttccgagatattctgtgccgca

SEQ ID NO: 86616 - DNA, 519 bp, Zea mays
  unsure (1)..(519): unsure at all n locations
agatgtgtttcgtancatatgaaatgatagtaaggctcgtaccggtccggaattcccgggtcgacccacgcgtccgcccacgcgtccgagaaggaccactccaagttcaaaagaaagggtgaagatctcttttatgagcacaccctgtctctgaccgaagctctatgtgggttccaatttgttcttacacatctggacaacaggcagcttctgatcaaatcaaaccccggcgaagttgttaaacctgaccaattcaaggcaataaacgacgaggggatgccgatttaccagaggcccttcatgaaggggaagctctacattcatttcacggtggagttccccgactcgctggcaccagagcagtgcaaggctctcgagtcggtacttccgccaaagccttcgtccaagctgacagacatggagatcgatgaatgcgaggagacaaccatgcatgatgtgaacaacatcgaggaagagatgcgcatgaagcangctcatgctgctcangaggcgtacgan

SEQ ID NO: 86617 - DNA, 515 bp, Zea mays
taggtaagaggttgtgctcgtagtaagaaatgatgccatgctcgtaccggtccggaattcccgggtcgacccacgcgtccgggatgagccataggattcgtgagagaactgatgctctagatgctgcaggaaataccacggctgcaattgggaagggttttgccattggctctgcagccttggtttcccttgcactatttggtgcgtttgtaagccgggctgctatctccactgttgatgttctgactcctaaagtattcatcgggcttattgtcggtgctatgctcccgtactggttctcggcaatgaccatgaagagtgtgggcagtgctgcgctcaagatggtggaggaagttcgtcggcagttcaacaacatccctgggctcatggaaggcaccacacagcctgactacgcaacttgtgtcaagatctcaacggatgcatccatcaaggagatgatcccccccagtgctcttgttatgctcacaccactgatcgttgggattctatttggg

SEQ ID NO: 86618 - DNA, 521 bp, Zea mays
aggaagtggtttgatcctgcttaagagcacttcgtactgctgtaccggtccggaattcccgggtcgacccacgcgtccggttcgagcggcccgaggagttcgtgccggaacgcttcctcggcgacgagggcgccaggctgctgcagcacctcttctggtccaacgggccggagacggcgcagcccgggcccgggaacaagcagtgcgccgccaaggaggtggtggtggacacggcgtgcatgctgctggccgagctgttccggcgctacgacgacttcgaggtggagggcaccttcttcaccaagctcgtcaagcgccaggcgtcgccgagcgtggcgcaggcagccgccgccgtcggagcgcatcagtgagtgcgctgtataggatcatcggtggcgtgcgacgtcgtcggcgccggccaagcaataaagtgaaatgagttcacatgctcgtctgtgttcgacttcgatcggtgtctcttgctctccgccggccgctagtcgccgacagccggtgtggta

SEQ ID NO: 86619 - DNA, 510 bp, Zea mays
  unsure (1)..(510): unsure at all n locations
agttaagtggtttgacctagatatgatgcacgtccaaccgcttcggaattcccgggtcgacccacgcgtccggacataattaccctcacgcgaagaacccctaccttggctagtcctcctacgtatacgtctcttctcttcgcttaatcttggtcggtgatttgattctgcacttcttgggcgcattgcagagggtgctcggtctgcagctatcttaggttaaccagtcgtgtgtggtctatcggtttcgatatagtactactgctctgttataatcagcggggaggaggaagatgacggtgacgccacggatcacggtgagcgacgggcggctgacggtgcgcggccgtacggtgctcaccggcgtgccggacaacgtgtcggcggcgcacgcggccggggcggggctcgtcgacggggccttcgtcggcgcccacgccggcgaggccaagagccaccacgtcttcaccttcggcacgctccgggaactgccgntnctgtgccttgttt

SEQ ID NO: 86620 - DNA, 516 bp, Zea mays
  unsure (1)..(516): unsure at all n locations
gggggtgttcttaaataagatatatgtacggctctcccggtccggaattcccgggtcgacccacgcgtccgccttttcgctgtactcactcgccacacacaccccctctccagctccgttggagctccggacagcagcaggcgcggggcggtcacgtagtaagcagctctcggctccctctccccttgctccatatgatcgtgcaacccatcgagctacgcgcgtggactgccttccctgggtcggcgcaggaggggatcggaaggatgacggcatcggtttccagggccatctgcgtacagaagccgggctcaaaatgcaccagggacagggaagcgacctccttcgcccgccgatcggtcgcagcgccgaggcccccgcacgccaaagccgccggcgtcatccgctccgactccggcgcgggacggngccagcattgctcgccgctgagggccgtcgttgacgccgcgccgatacagacgaccaaaaagagggtgttccacttcggcaagggcn

SEQ ID NO: 86621 - DNA, 517 bp, Zea mays
  unsure (1)..(517): unsure at all n locations
gagtagagaggtctgcgctcgtagtaagaacatactgccatgccgtaccggtccggaattcccggctcgacccacgcgtccgcgcgagtgagtgaacaccagccgtattgtcccgactcctgacccctaccgatcctcgcctgctgcagccatggcgacctccgcggcgctctccaccgccgccaatcccacccagctctaccggtcccgcgcttcgctgggcaagccggtgaaggggcttggcctgagcatgggccgcgagcgcgcccagcggagcattgtgtgccaggcggcgagcagcatctccgccgaccgcgtccccgacatggagaagcggaagctgatgaacctnctnctnctcggcgccatctcgttgcccaccgtcggcatggtcgtccactacggcgccttcttcctccctgccggctccgggaacgccggcggcgggacctacgcgaaggacaagctgggcaacgacatcacngtggaggcgtggctcaacacgcacggtcccaac

SEQ ID NO: 86622 - DNA, 533 bp, Zea mays
  unsure (1)..(533): unsure at all n locations
naggaaagctcgtgtctgaaaataagcgggtataataggatcgctcgtaccgctccggaattcccgggctccgttagccgaacactgatattgagcgcaagttactgatgggtggatttgctgaagtgcaatcttctgctgcaaactcgcaggatagcgtgcaatctgttacagttaaggcaaagaaggctagctggagcatgggctcttcttttccccttaagaaaacaacgaaagcccttcccaagattcaaattgacgacgactctgatctgattgatgaagacagtctcttgactgaggaggacctgaagaaaccacaacttccagttgttggggactgtgaggtgggggcagcaaagaaagcatgcaagaactgtacttgtggcaaggctgangccgaggagaaagttgggaagctggagctcactgcggagcagatcaataaccctcagtcagcttgtggcagttgtgggtttgggtgatgccttncgctgtggaacctgtccctacaaaagtcttncaccattcaa

SEQ ID NO: 86623 - DNA, 532 bp, Zea mays
  unsure (1)..(532): unsure at all n locations
gagatgtgttgttgatnccaggctcgncgncatgactgtaccgttcgtattcccggtcgacccacgcgtccgggacaggcagtggcaagtcaactttaatccaagctttgttcaggctcgtagaaccttcgtagggaaaaatgatcattgatggaatagacatatgcacactcggtctgcatgatctcagatctcgctttggcataattccacaggaaccagttctctttgaaggaacaattcgaagcatcattgatccaattgggcagttttcatattcttaattattgtttgtctttgatcgttttcttcttttatttttattatttttattttcttgtatttttttttttatttatctttttttttttttttatttttgttattccatttatttttttttttttttattttatttttttattatttttttatttttgttttttttatttttttatttttctttttttttttttatattttttttttttattttttcttttatttttttttttctatttgttaattattt

SEQ ID NO: 86624 - DNA, 526 bp, Zea mays
  unsure (1)..(526): unsure at all n locations
nggaggtnnnntcnntnaatatgatagggtgatggtattgcatcgctcggaccggaattcccgggtcgacccacgcgtccggcgagactcttcgcctctaccctgccacgccgatgctgctgccgcacgaggcgtccaccgactgcaagatccacgggtacgacgtcccggcggggtcgatggtcctcgtcaatgcgtacgccattcaccgggacccggcgatgtgggaggacccggaggagttcaggccggagcggttcgagctcggcagggcagaggggaagttcatgatgccgtttgggatggggaggcgcaggtgccccggcgagaacctcgcgatgcgaaccatggggctggtcctgggggcgctgctccaatgcttcgattggaccagggttggggatagagaaattgacatggcaacagccactggcaccatcatgtctaaggctgtcccactcgaagctcagtgcaagccgcgagcgaacatgtctgctggtcttcaagaaatctagagtgagattgt

SEQ ID NO: 86625 - DNA, 518 bp, Zea mays
  unsure (1)..(518): unsure at all n locations
agtttagctgtatctgcgtatgcattaccgcacactccgtacgccgtaccggtccggaattcccgggtcgacccacgcgtccgggatcccaagaagcagcctcgcgctcatggcctcaaggtctacccgctcgtcggtacgcggtcccgcacttcgtcaagaaccagcgccgcttcctccactggtccaccgacgtcctcaagcgcgacccctcgcacaccctgtcgttcaaggcgctcggcctcaccggcggcgtcatcacggctaacccggccaacgtcgagcacatcctcaagaccaacttcgccaactaccccaagggcgagctgacggtgtctatgatcgaggacttcctcgggcacggcatcttcaactccgacggggagcagtggctgtggcagcgcaaggccgccagctacgagttcagcaagcgctcgctcaggagcttcgtggtcgacgccgtccggttcgaggtcgtggagcggctgctgccgctgctcgaccgggcgcagcgcgan

SEQ ID NO: 86626 - DNA, 505 bp, Zea mays
agaagtgttctgagaaatgaatgatgcactgcgaaccgcttcggaattcccgggtcgacccacgcgtccgactgttcctctgggaaccggaaataacctgcccttttcatttggatggggaaagacgagtccttctactgaccaacaggctgtaaaatcattccttgggctagtaaagcatgcaaaagaaattaagattgatagttggcacatcattttgagaatgcgagttccagaggaaggtccatgtgatcctattgctccattagatttgcctcattcattgcatgcgttccatcgtgtctcaagtagtgattctctcaatatggaaggttaccacacattccgtgcaggattttggaattactttagtatggggatggatgcagaagtgtcttatgcatttcattctgaaaggaagaataatccagagaagttcaagagtcacctgacaaatcagggtacatacgctaagcttggacttaaacaaggatggacttgtgct

SEQ ID NO: 86627 - DNA, 510 bp, Zea mays
  unsure (1)..(510): unsure at all n locations
ngaatgtgtgtctgagatattgcaacgatagcantctctaccgcttcggaattcccgggcggacgggagcctcctggacctcctgcgccaggtgttcacgttcgggctctccctggtgaagctggacatccggcaggagtcggagcggcacaccgacgtgatcgacgccatcaccacgcacctcggcatcgggtcgtaccgcgagtggcccgaggacaagaggcaggagtggctgctgtcggagctgcgaggcaagcgcccgctgctgcccccggaccttccccagaccgacgagatcgccgacgtcatcggcgcgttccacgtcctcgcggagctcccgcccgacagcttcggcccctacatcatctccatggcgacggccccctcggacgtgctcgccgtggagctcctgcagcgcgagtgcggcgtgcgccagccgctgcccgtggtgccgctgttcgagaggctggccgacctgcagtcggcgcccgcgtccgtggagcgcctctn

SEQ ID NO: 86628 - DNA, 503 bp, Zea mays
aagttatctgaatgggggaagagagtactctctaccgcttcggaattcccgggtcgacccacgcgtccgactgttcctctgggaaccggaaataacctccccttttcatttggatggggaaagaagaatccttctactgaccaagaggctgtaaaatcattcctcgggctagtaaagcatgcaaaagaaattaagattgatagttggcacatcattttgagaatgcgagttccagaggaaggtccatgtgatcctattgctccattagatttgcctcattcattgcatgcgttccatcgtgtctcaagtagtgattctctcaatatggaaggttaccacacattccgtggaggattttggaattactttagtatggggatggatgcagaagtgtcttatgcatttcattctgaaaggaagaagaatccagagaagttcaagaatcagctgacaaatcagggtacatacgctaagcttggacttaaacaaggatggttttgtgc

SEQ ID NO: 86629 - DNA, 516 bp, Zea mays
cagagtctgtattaccctgagttgactacagtactgacgtaccggtccggaattcccgggtcgacccacgcgtccggttgagtcaaaggcaaaagaagaagctggaagggttatgattcgcatgaaggacaggtgttcaatgctgttcagccgagatgctgactctatgcccagggtgtggacaggaaaggaggacataaaagctataactaaaaccgctcgctcagcttccatgaagttgctttctacaatggctgcaattcggttggaggaggatggtgataacattgagaacactctttccgttgctcttgttgacacctcaaaacctgggactactgataggagtatccaattgaccgatccacttgcctccagttcatgggaaagggttggcgaggagaagactttaattacccctgtgcagtgcataaatttgtggaggcaattcaaggctgaaactgaatatacagtgactcaagccttagctgctcaggaagcaaataagaggaacaa

SEQ ID NO: 86630 - DNA, 512 bp, Zea mays
gagtctgtcttcctagtagacagctacagtctgccgtaccggtccggaattcccgggtcgacccacgcgtccgaactttgaggccttgtcgaaattaatggttaaggacttggtgtttcctgttaacgtgcatcttggccagcacttcactaaaccaccaccacgatattctgagggtgcattgattaaaaagctagaagaacttggaattggaaggccatctacttatgcatctataatgaaagtgttactggatcggaagtacgtgacagcaaaaagtcgagttctacaccctgagttccgtggtcgaatggtctcggcattccttttgcaccatttctctgaggtttctgattacaactttacagctaacatggagacagagctagataatgtctctgctgggtcaactgaatggaagggtcttctgaaagactactgggaacgattcagcaaatattgtgcagatgtgagtaaactggatggcagaaaggtagagagaatgcttgaag

SEQ ID NO: 86631 - DNA, 511 bp, Zea mays
gagaagttatctgagccttgctataaagatccagtcgctactaccgtacgcgtttcggaattcccgggtcgacccacgcgtccgattgaccttctttatgccagtgtctccctcttagtagtaccagctgacttggatatcgcccaaggatcagtgctttatgatgttgatgaagctactgtccgtagtcttaatgggtgcagagtagcagaccaaatcattagacttgttccaaattttgagaattttcgcacggcattaagatgtttgaagtactgggcaaaaaggagaggtgtttactctaatgttactggctttcttggtggtgtcaactgggctttactggttgcgcgtgtctgccagctctatcccaatgctgtgccaagtatgctggtctcacggttttttagagtttttacacaatggcagtggccaaacccggttatgctttgttctatagaagaggaagaacttggtttccctgtttgggatccacgcaaaaatcctcgag

SEQ ID NO: 86632 - DNA, 516 bp, Zea mays
  unsure (1)..(516): unsure at all n locations
gaggctntcgtctcatgaagatgaagtcagtactgccgtaccggtccggaattcccgggtcgacccacgcgtccgctcagcgcatttctacaggcgatgtacctgaaacaatagaagggaaaaaggtcataacgcttgacatgggacttcttgttgctggcacaaagtaccgtggagaattcgaagaaagattaaagaagctgatggaggaaataaagcaaagtgatgagataatactctttattgatgaagttcacactctgataggagcaggagcagcggaaggtgctatagatgctgctaatatcttgaagcctgcgttggccagaggtgaattacagtgcattggagccactacactagatgaatataggaagcacattgagaaagacccagcacttgaacggaggtttcaacctgtgaaagtgccagaaccaacagtagatgaaaccattgaaatcctcagaggactgacggaacgatatgagatccaccataaacttcggtacactgatg

SEQ ID NO: 86633 - DNA, 520 bp, Zea mays
  unsure (1)..(520): unsure at all n locations
ggagtctgtcgtacgccgtcagcnatcgtaggcacgacgtaccggtccggaattcccgggtcgacccacgcgtccgctctaccgtcctatgcatccggtacgcccagcatccatccactactgacatgctgggggtccggctgcggctccggcatgggcctttcaacagtttactccgcggccggaccgcgcctcgtgccggtccctctcgaccgctgccgctctgcccagccccggcgcccgcgccgagccccggtcgccaccgttcggtgctccgtcgacgccaccaagcaagcgcatgatggcgtggcagactgcggtcgcgactgaggcgccgtagtcgcggaaggagtgctctggggtctactgcaccacctacgacctcaaggccgaggacaagaccaagtcgcggaagaagctagtgaatgttgctgagtcaggcgcggccgggatgatatcaaatcacctgctgctcaaacgcgcttctggtgaggttatcagacaagacccaacaatacct

SEQ ID NO: 86634 - DNA, 506 bp, Zea mays
  unsure (1)..(506): unsure at all n locations
aggacggtttgcctacgcatactgatttatctgcacgctctaccggtccggaattcccggatcgacccacgcgtacgcacaactccacgtcacacacctcacagagctgcagcagcatcagctgccacctactggcgtatcctccttccttcctgcctgcataggttgttgctacacgtatatattctgaagaagagatcgagatgaccagcgtgtggaagaccaaggttctgcctggcctcaacaagatctttgacaaggatggcaagaaggctgcagctgcaggcttcttgaagtccttcaacaaggaggagattgacaaggagattgaggacaagaagacagagctggagcccaaggtcgtggaggcctacgaagcatctcctcctgaggtcaaggctctgttcaaggataagaagccagtcaaggtcagcaagaagaactcggctgcagtcaccaagttcctcgatgagctggctaagattgacttncctggagccaaggtg

SEQ ID NO: 86635 - DNA, 511 bp, Zea mays
  unsure (1)..(511): unsure at all n locations
tagtaaggtgttttgagtaacgaaatatgattagatcgtaccgcttcggaattcccgggtcgacccacgcgtccgaacacacacagagagaggacaactcctcacaactctcccttccctcctgtaggggccaaaagggttagagagtaagagaagtagttcattcccttgcccaacacaagaaaacaagctctcctcatcaccctaatccaagcaactgcttgtgtgttgggaaattcttgtgacccctgttatattattatccgtgtagctactagcttcattcccccctttgtacccatcaaatggctggcatgtctctgcaacacccctgggcgtttgctttcggtctactaggtaacgtcatctcattcatgaccttcctggccccgataccgacgttctaccgcatctacaagagcaagtcgacggaaggcttccagtcggttccctacgtggttgcgctgttcagcgccatgctgtggatcttctacgcactgatcaaatncaa

SEQ ID NO: 86636 - DNA, 512 bp, Zea mays
  unsure (1)..(512): unsure at all n locations
taggtgaggtgtgtctgatcatcgcattacgtgncatcgtcgtaccggcccggaattcccgggtcgacccacgcgtccgctctggagacccgcacccggccggctcagctagtcagcatggcgggggagacggtgctggtcaccggcgccagcggcttcatcggctcgaccctcgtccgcctcctcctcggccgcggctacaacgtccacgccggcgtcctcaaccccgatgacggggcggagacggagcacctgctcgccatggccgctggcgctggcgctggcgagggccgcctccgcatcttccgtggcgacctccttgacggcgccgcgctgaccgacgccgcgcggggctgctcgggcgtcttccacctcgcgtcgccctgcaccgtcgaccccgtcagcgacccccagaagcaactgatagtgccggcagtggaagggacgctgaacgtgctgcgcgccgncaaggaggccggtagcgtgcggcgggtggtggtcacctcgtccaa

SEQ ID NO: 86637 - DNA, 501 bp, Zea mays
agggagtttttggtatcgaatcagatttatctgcaaccctcccggaattcccgggtcgacccacgcgtccggggcaaacctaggctgaagccacctttcccagccaatgctgggctctacggctgccccacaactgtgactaatgtagaaactgtggctgtatccccaacaattcttaggcgcggtccagaatggtttgcaagctttgggcgcaagaacaactctggaaccaagctctattgcatctcagggcatgtgaacaaaccttgcaccgtggaagaggaaatgagcatacctctgaaggagttgctcgagaggcactgtggaggtgtgagagggggatgggacaacctgcttgcggtaattcctggcggttcatctgttccccttttgccaaagcacatatgtgatgatgtgttgatggactatgatgcactgaaggctgtgcaatctggattgtgtaccgcagctgttatcgtgatggacaaatctacggatgtc

SEQ ID NO: 86638 - DNA, 514 bp, Zea mays
  unsure (1)..(514): unsure at all n locations
nagttgagctggatgtgatgctggatgctcagtncactaccgtacgccgtaccggtccggaattgccggatcgacccacgcgtgcgatagtgttgcttggatggaagacagtgatttccacaatctgcgaactgaatgtctcaagcagcaatacaacttggtcaaggataggacagcggttcaggatacattcagctatggctcccatgtgatgcaatatggttcattggagttgaatgttaagcatctgctttcgtacattggcacaaaccctgctaacgatgacaacacgttcatagaagacaactcggtgccatcattctcaaaggctgttaatcagcgcgacgctgaccttgtctacttctggcagaagtaccggaaattggcagacagctcacctgagaaaaatgaagctcggagggagttgcttgaagtgatggcccacaggtctcatgttgacagcagcgttgagctcattggaagccttctctttggctctgaagacggtccaaag

SEQ ID NO: 86639 - DNA, 503 bp, Zea mays
  unsure (1)..(503): unsure at all n locations
nagtgagtatctggcatagcatcaagatacatcgtaccgctgcggaattcccggatcgacccacgcgtccggggcaaacctaggctgaaaccaccttttccagccaatgctgggctctactgatgccccacaactgtgactcatgtacaaactgtggctgtatccccaacaattcttatgctcggtccataatggcacgcaagctttcgacgccagagctactgtggaaccaagctctattgcatctaatggcatgttaacaaaccttgcaccgtagacgaggacatgagcatacctctgaaggagtagctcgacaggcactgctgaggtgtcagaggggcatgggacaacctgcttgcgcgaattactagccgatcatatgttgcccttttgtcaaaacacatatgagatgatgtgttgatggactatgatgcactgcatgctgtgcaatctggattgggctccgcagctgatatcctgatggacaaatctacggatgtcgt

SEQ ID NO: 86640 - DNA, 503 bp, Zea mays
tggagggtttgacattgacacacgaactaggtgctaccgcaccggaattcccgggtcgacccacgcgtccggtgaagcttatctgcgttacctgacgaattagggtcctcttccccagatctggtggggaagaacgctacctcacgtcccggatcccatctggcggccaaggggagttacacgctagccggcggtcggccagccgccgccaaccgcctcagccccaacagtcgcaccgccgccgccgaggcaaactcgaagccacccccgccgccgcagccacagccgcgccgagcttgagccgtcgttgctccgctgaatcgcccccatcgtctctcctgaagagagaggacatttattgagacagcatgcctaagataaagacaagtcgtgtcaagtatcctgaaggatgggagcttattgaaccaaccatccgtgagttggatgccaaaatgagagaagctgaaaatgatccacatgatggaaagagaaagtgtgaagct

SEQ ID NO: 86641 - DNA, 514 bp, Zea mays
agtaaagtggatttgacgctggatctcaagatcactcggtaatgccgtaccggttcggaattgccggatcgacccacgcgtgcggtctgcgtgcagggcgcgagcgcggatggcacgcccaagaggctgacctacgacgagagccagagcaaaacgtacatggaggtgaagggcacgggcacagcgaaccagtgcccgaccatcgacggcggcgtggagtcgttcccgttcaaggccggcaagtaccagatgaagaagctgtgcctggagccgacgtgcttcaccgtcaaggcggagggcatcggcaagaacgccccgctcgagttccagaagaccaagctcatgacccgcctcacgtacacgctggacgagatcgagggcccgctcgaggtcggctccgacggcacgctcaagttcgaggaaaaggacggcatcgactacgccgccgttaccgtgcaacttccgggaggcgagcgcgtgccgttactcttcaccgtgaaaccgaatgtcgtcc

SEQ ID NO: 86642 - DNA, 507 bp, Zea mays
tagaaagtgatctgagcaccgccactagaatacatcgtaccgctccggaatttccgggtcgacccacgcgtccggtgaagcttatctgcgttacctgacgaattagggtcctcttccccagatctggtggggaagaaggctacctcacgtcccggatcccatctggcggccaaggggagttacacgctagccggcggtcggccagccgccgccaaccgcctcagccccaacagtcgcaccgccgccgccgaggcaaactcgaagccacccccgccgccgcagccacagccgcgccgagcttgagccgtcgttgctccgctgaatcgcccccatcgtctctcctgaagagagaggacatttattgagacagcatgcctaagataaagacaagtcgtgtcaagtatcctgaaggatgggagcttattgaaccaaccatccgtgagttggatgccaaaatgagagaagctgaaaatgatccacatgatggaaagagaaagtgtgaagctc

SEQ ID NO: 86643 - DNA, 509 bp, Zea mays
agaaagtgatttgatttagcaacaagaatatactgcactgctgtaccggtccggaattcccgggtcgacccacgcgtccgagcccatcacggtcgtctccagcagggacccgctcaagctcccatggggtgagctcggcattgacatcgtcatcgagggcaccggagtcttcgtcgacggccccggcgccggcaagcacatccaggccggcgcgaagaaggtgatcatcacggctcccgccaagggcgccgacatcccgacctatgtcgtcggcgtcaacgagggcgactacgaccacagcgtcgcggacatcatcagcaacgcgtcctgcacgaccaactgcctcgcgccattcgtcaagatcttggacgaggagttcggaattgtcaaggggaccatgacgacgacgcactcgtacaccggcgaccagaggctgctggacgcgtcccaccgcgacctccggcgggcccgcgcggcggcgctgaacatcgtgccgacgagcacgggcg

SEQ ID NO: 86644 - DNA, 506 bp, Zea mays
  unsure (1)..(506): unsure at all n locations
nagaaagtggtctataatgcgacgggggtaaaagtcatgctctaccggtccggaattcccgggtgattctacttgtgaagatgttcgagaagagcaagatggtgacgatagccacggggctggacctcctcagctgctcgatctgcatcttcttgtcgtcagcttctctctacatcctgcacaatcttcacaagggcgaccatgaggagtgacgagagtgaaatgccgaatttgtagcctattcgagagagagttgacggtcttgtccaataatcaatactggatttttaagactctcttcaacggtgttctcttcataaaatatataatgagaaatgtatgatacaatttatctaaaaaaaaaaaaaaagggcggccgctctagaggatccaagcttacgtacgcgtgcatgcgacgtcatagctcttctatagtgtcacctaaattcaattcactggccgtcgttttacaacgtcgtgactgggaaaaccctggcgttacccaa

SEQ ID NO: 86645 - DNA, 506 bp, Zea mays
gagtaagtgttctggtaacgcaacggagatatactctaccgctccggaattcccgggtcgacccacgcgtccggctcaacctggggctcaacgacgaagtggccgccgggctggcggccaagagcggggagcgcttcgcctacgactccttccgccgcttcctcgacatgttcggcaacgtcgtcatggacatcccccgctcactgttcgaagagaagcttgagcacatgaaggaatccaaggggctgaagaacgacaccgacctcacggcctctgacctcaaagagctcgtgggtcagtacaaggaggtctacctctcagccaagggagagccattcccctcagaccccaagaagcagctggagctagcagtgctggctgtgttcaactcgtgggagagccccagggccaagaagtacaggagcatcaaccagatcactggcctcaggggcaccgtcgtgaacgtgcagtgcatggtgttcggcaacatggggaacacttctggc

SEQ ID NO: 86646 - DNA, 516 bp, Zea mays
aagtctgtcgtcaatagtggggggtgtataggatcgctcgtaccggtccggaattcccgggtcgacccacgcgtccgtattaatgcgagcacgcaaagccagcaactggaccgcgtcgggcatcggttcctgctctgtgctatactgctaatctgctatcccctcccccaagccgtcaccaccagcagcagcggaacccaccgccctcgttcctcccccgccggcgagagatctacgagatggtgctgtcacacggcgtcggtggctccgatgagtccgtccactcgacgttcgcgtcccgctacgtccgcacctcccttcctaggtaccggatgccggagcagtcgatccccaaggaggcggcgtaccagatcatcaacgacgagctgatgctggacgggaacccgcggctgaacctggcgtccttcgtcaccacgtggatggagcccgagtgcgacaagctcatccaggcctccgtcaacaagaactacgtcgacatggacgagtaccccgtca

SEQ ID NO: 86647 - DNA, 512 bp, Zea mays
tgggctctgtctattgaggaggatattgcacgctgtaccggtccggaattcccgggtcgacccacgcgtccggtgaacctgaaacttgcggtgtcactggctggtatagcctgagtgtgagtgagtgatcgagctagctgagctccgatcctcgctagctagctaggataccgccataccacaagtcttcttcacaagtttaggagtgacagcaacaagagatctcgatggcctctgccaccgtgctcaagtcctccttccttcccaagaagtgcgaatggggcgccaccaggcaggtcgccgcgcccaggccgcccaccgtctgcatggtcgtacgcgcctccgactacgccgatgagctcgtgaagaccgcgaaaacgatcgcgtcgccggagcggtgcattctggcgatggacgagtcgaacgcgacgtgcggtaagcggctggcgtccatcgggctggagaacacggatgccaacccgcaggcgtaccgtacgctgctggtcacggcc

SEQ ID NO: 86648 - DNA, 513 bp, Zea mays
  unsure (1)..(513): unsure at all n locations
aagtgtgtgttactaatgaaagaagtacgcacgncgtccggtccggattcccgggtcgacccacgcgtccgagccaccatcgaccttcaagtctcgctacgtagcagtgcaataaaaaaagcagcgcgcaatggcgagcagcaccatggccctctcctccacggtcttcgccggcaaggccgtgaacgtgccgtcgtcgtccgccttcggcgaggcccgcgtgacgatgcgcaagacggcggcgaaggccaagccagcggcggcgtccgggagcccgtggtacggccccgaccgcgtgctgtacctgggcccactgtccggcgagccaccgagctacctgacgggcgagttcccgggcgactacggctgggacaccgcggggctgtcggcggacccggagacgttcgccaagaaccgggagctggaggtgatccactcccgctgggccatgctgggcgcgctcggatgcgttttgcccgagctgattcgccgcaacggcgtcaagttcggcga

SEQ ID NO: 86649 - DNA, 512 bp, Zea mays
agggagtggatctgagctacgacacaaagaacactccgtaatgccgtaccggttcggaattgacggatgcacccacgcgtacggtcggcgtcagcaggcggaggcgcggtgcgcgcgctgtcccagaaggagcaggacatggagatgatgctcgcggccgacgtgcacctcggcaccaagaactgcgatttccagatggagcggtatgtctttaagcgtcgcaccgacggcatctacatcatcaacctgggcaagacatgggataagctccagctcgcggcgagggttattgttgccattgagaacccgcaagacatcatcgtccagtcggcccgcccctacggccagcgtgctgtcctcaagttcgcgcagtacactggcgcccatgccatcgctgggaggcacacccctggtaccttcaccaatcagctccagacctctttcagcgagcctcgcctgctcatccttactgacccaaggactgaccatcagccaatcaaggagtctgctct

SEQ ID NO: 86650 - DNA, 504 bp, Zea mays
ggggagggatttgatatcgaatggagtttatctgtaccgcttcggaattcccgggtcgacccacgcgtccgtgctgcgtctcgggatgctcaggcattcgcgtaaacgatgcggagaagctcgtgacgatcggaggccatgtgctgcgcgaaggtgagtggctgtcgctgaatgggtcgactggtgaggtgatccttgggaagcagccgctttccccaccagcccttagtggtgatctgggaactttcatggcctgcgtggatgatgttagaaagctcaaggtcctggctaacgccgatacccctgatgatgcattgactgcgcgaaacaatggggcacaaggaattggattatgccggacagagcacatgttctttgcttcagacgagaggattaaggctgtcaggcagatgattatggctcccacgcttgagctgaggcagcaggcgctcgaccgtctcttgccgtatcagaggtctgacttccgaagcattttccgggctc

SEQ ID NO: 86651 - DNA, 512 bp, Zea mays
  unsure (1)..(512): unsure at all n locations
aggtgttcttccatgcagtagcctaagctataccgtaccggtccggaattcccgggtcgacccacgcgtccgccatcctgcacgctcctccgcctgattcccagcgcgtcgcacttcaagagattcgatcgggttcgccggttcgcgcccgccgccatggcgacttcctcaggaccaaaggaggcgccagcgaataaccctgggctccagaccgaggtcgaccccgccaccaaaggctacttcttgcaacaaacgatgttacgtgtgaaggacccaaaagtgagccttgacttctactcacgtgtgatgggcatgtcgttgctgaaaaggttggattttgaagagatgaaattcagtttgtattttctaggttacgaggatgtgaccttagcccctgatgatcatatcaagcggactgaatggacttttaggcaaaaagctactcttgagctcacccacaactggngcacggaaaatgaccctgaattcaaggttaccataatgggaactca

SEQ ID NO: 86652 - DNA, 504 bp, Zea mays
  unsure (1)..(504): unsure at all n locations
nagagtgatttgaatcagaacgaagctatgtgctaccgctccggaattcccgggtcgacccacgcgtccggaaaactccgcaggccagtctgcgagttggatggccttcttcttggccctcgtgtgcatcctcatcttgctagccatcgcctcctacgtccagtacactcgctggcaaaaggggaaaggccgcttcggcggccatgggaggtctgctcccttgaagctgcctcctggctccatgggctggccttaccttggcgagaccctccagctttactcccaggaccccagcttcttcttcgcttccaaacagaagaggtacggcgagatcttcaagacgcaccttctgggttgcccgtgcgtgatgctggcgagcccggaggcggcgcggttcgtgctggtgacgcaggcgcacctgttcaagccgacctacccgcggagcaaggagcgcatgatcgggccgtcggctctcttcttccaccagggcgactaccacctncg

SEQ ID NO: 86653 - DNA, 518 bp, Zea mays
  unsure (1)..(518): unsure at all n locations
ggggtttttnntncctgatgcatctntagncangccgtaccggtccggaattcccgggtcgacccacgcgtccgaacaagggcctcctgtctgctctcacttcctcagtcctcgtccgtctctgctccgatccctcctctctctacctagctagctagccagccttcctgtagcgcggcagatatggctgcctccaccacggcggcggcggcggcgtcgctgctgctgctgctgctcgtgtcgctcgccgcggcggcggacatgtcgatcgtgtcctacggggagcgcagcgacgaggaggcgcggcggatgtacgcggagtggatggcggcgcacggccggacctacaacgccgtcggcgaggaggagcggcggtaccaggtgttccgggacaacctgcgctacatcgacgcgcacaacgccggcgccgacgcgggcgtgcactccttccggctcggcctcaaccgcttcggcgacctgaccaacgacgagtaccgngccacctaacttggggccac

SEQ ID NO: 86654 - DNA, 515 bp, Zea mays
  unsure (1)..(515): unsure at all n locations
gagttaatgtggtttctnattcacgcacttactggangctctaccggtccggaattcccgggtcgacccacgcgttcgcgccggcaggccgtgacgtgccgtcttcgtccgccttcggcgaggcccgcgtgacgatgcgcatgacggcggggaaggccaagccggcggcggcgtccgggagcccgtggtacggccccgaccgcgtgctgtacctgggcccactgtccggcgagccgtcgagctacctgacgggcgagttcccgggcgactacggctgggacaccgcggggctgtcggcggacccggagacgttcgccaagaaccgggagctggaggtgatccactcccgctgggccatgctgggcgcgctcggctgcgtcttcccggagctgctcgcccgcaacggcgtcaagttcggcgaggccgtgtggttcaaggccggctcccagatcttcagcgagggtggactggactacctcgggaacccgagcctcattcacgcgcaaagcattctc

SEQ ID NO: 86655 - DNA, 516 bp, Zea mays
  unsure (1)..(516): unsure at all n locations
nggaaagtntgtctgngtacgtagcctacgccatngccattccnttcnngnttcgaattcccgggtcgacccacgcgtccgcacctctctccatctccctgctcctccgcctccttcttgatccagccaagccagggatcgccatgtcggactcggaggagcaccacttcgaatcgaaggccgacgccggagcgtccaagacctacccgcagcaggctggcaccgtccgtaagaacggcttcatcgtcatcaagaaccgcccctgcaaggttgtggaggtttctacctcaaagactggtaagcatggccatgccaaatgccactttgttgccatagacatattcaacgggaaaaagcttgaagatattgttccttcatcacacaactgtgatattccgcatgtgaaccgtactgagtaccagctgattgatatatcagaggatggatttgtgagccttcttacttcagatggcaacactaaggatgatcttagactcccaactgatgagactcttg

SEQ ID NO: 86656 - DNA, 522 bp, Zea mays
  unsure (1)..(522): unsure at all n locations
agtanagaaggctgagtgacgacaagacattatagcattgctcgtaccggtccggaattcccgggctctcaccttttcgctgtactcactcgccacacacaccccctctccagctccgttggagctccggacagcagcaggcgcggggcggtcacgtagtaagcagctctcggctccctctccccttgctccatatgatcgtgcaacccatcgagctacgcgcgtggactgccttccctgggtcggcgcaggaggggatcggaaggatgacggcatcggtttccagggccatctgcgtacagaagccgggctcaaaatgcaccagggacagggaagcgacctccttcgcccgccgatcggtcgcagcgccgaggcccccgcacgccaaagccgccggcgtcatccgctccgactccggcgcgggacggggccagcattgctcgccgctgagggccgtcgttgacgccgcgccgatacagacgaccaataagagggtgttccacttcgggcagggcaagaccn

SEQ ID NO: 86657 - DNA, 507 bp, Zea mays
  unsure (1)..(507): unsure at all n locations
agggaggagtgggtttaaaccgaacttatagcactcgganntccttnnnnnnttngnattnccggggtaccacaccactccgcgctagctgaggacggtacagcggcacagaggtgcgacgtacgacgacgacgacgcaggcgccacacatggcatcccagctctccgccgccgtgccccggttccacggtctacggggctacgccgcgcccaggtccgcggtggcagcgctgccgtccgtgagggtgggcaggaagaggtcgtcgtcgcacggcatccgctgcgactacatcggctccgccaccaacctgatcatggtgacgacgacgacgctgatgctgttcgcggggcggttcgggctggcgccgtcggcgaaccgcaaggcgacggcggggcctgaagctggaggcgcgcgactccggcctgcaaacgggtgaccccgccgggttcaccctcgccgacacgctggcctgcggcgccgtcggccacatcctgggcgtcggcatc

SEQ ID NO: 86658 - DNA, 499 bp, Zea mays
  unsure (1)..(499): unsure at all n locations
nagtagtagggttgatacgaacggagattatgcacgctcgtaccggtccggaattcccgggtcgacccacgcgtccgcttcaagtctcgctacgtagcagtgcaataaaaaaagcagccgcaatggcgagcagcaccatggccctctcctccacggccttcgccggcaaggccgtgaacgtgccgtcgtcgtccgccttcggcgaggcccgcgtgacgatgcgcaagacggcggcgaaggccaagccagcggcggcgtccgggagcccgtggtacggccccgaccgcgtgctgtacctgggcccactgtccggcgagccaccgagctacctgacgggcgagttcccgggcgactacggctgggacaccgcggggctgtcggcggacccggagacgttcgccaagaaccgggagctggaggtgatccactcccgctgggccatgctgggcgcgctcggctgcgtcttccccgagctgctcgcccgcaacggcgtcaagtn

SEQ ID NO: 86659 - DNA, 511 bp, Zea mays
  unsure (1)..(511): unsure at all n locations
agggtagcgagtgtggctcctncaccgcccanatctatgctataccgttcggaattcccgggtcgacccacgcgttccgtgcgactccctcaatggtcgagagtccttggcgccaaccttggccaatcccaggccccgctcctgctttccgttcgctccggcgccgccgtgtccatgcccggcatgatggacactgtgctcaacctgcggctcaacgacgaagtggccgccgggctggcggtcaagagcggcgagcgcttcgcctacgactgcttccgccgcttcctcgacatgttcggcaacctcgtcatggacatcccccgctcactgttcgaagagaagcttgagcacatgaaggaatccaaggggctgaagaacgacaccgaccttacggcctctgacctcaaagaactcgtgggtcattacaaggaagtctacctctcagccaaggaaagccattccccttaaaccccgataaccagcctgaactagcagtgcctgctgtgttcaa

SEQ ID NO: 86660 - DNA, 594 bp, Zea mays
aggagtaagagcctgtacgtccaccgcacagacgcgtaactgctcattgccggttaccggttccggaattctccgggttcgactccacgtcgtctcggtcgcatcgacaccgatcgtcgagcgtcaagcacgtcacgttgtcgtgaagcctcaagttgagaaggaagcacacagtgctctgactcgatggtcgtgcccatgcctctcctcgtccggcctgtgcagctgcgtgtggccgtccccgctgcagtacggctcgtctcgtagcgtcggtcggccgagggaagggcgccacttgcgtacgtcagtggcacatgctccagctccttccagcacaatgcaagggtgcccgacatggcacgctgtcggttctgcgtgccatagcagtcgccttcacctacactcgatgtgcacgctgcctcggacgactcatggcattcgacccgtctgggctctctcggactccggagggcatccgggggccttgatcgagtcccaagtgcgctggtctatggcgaggtgatcaacggccgctacgccatgctgggcgcggtgggcgccatcgccccggagatcttcggcaagatgggcatc

SEQ ID NO: 86661 - DNA, 507 bp, Zea mays
  unsure (1)..(507): unsure at all n locations
aggttagtaagagggttntagtacggatcccgccactcattgcaatgccgtaccggtccggaattcccgggtcgacccacgcgtccgggttattggaggatgcgtcagtggcagagatgagttagtttccaaagttcgtatttaccaccatgtagttggtggtgttctaaacccgaatgctgcgtaccttatccttcgaggtatgaagacactgcatctccgtgtgcaatgtcagaacgacactgctcttcggatggcccagtttttagaggagcatccaaagattgctcgtgtctactatcctggcttgccaagtcaccctgaacatcacattgccaagagtcaaatgactggctttggcggtgttgttagttttgaggttgctggagactttgatgctacgaggaaattcattgattctgctaaaataccctatcatgcgccttctttaggaggctgtgagagcataattgatcagcctgccatcatgtcctactgggattcana

SEQ ID NO: 86662 - DNA, 515 bp, Zea mays
  unsure (1)..(515): unsure at all n locations
tgtaagtnttagaggtctgaattatggattccccgccatatacagctatgactgtaccggtccggaattcccgggtcaagcgatgcatacatggctattaaggcagcggtaagacgggcgttaccacgcaaggcttcctatcgccttggcgaagaagcaaggcgacggaacatggcgctgcctgagctctcacatggagccgtgccaacgcgcatgcatctgtcacgaccttctgcagaatcacacgaatagttatacgaccaccgagacctgtgcagagtaaaatagctggtggacgtactagccctggcaagttcccgagcccttcaccgtagtatgacacttgcttgggagacctgcatagtgttgcttggatggaagacagtgatttccacaatctgcgaactgaatctctcaagcagcaatacaacttggtcaaggataggacagcggttcaggatacattcagctatggctcccatgtgatgcaatatggctcattggagctgaatgtn

SEQ ID NO: 86663 - DNA, 511 bp, Zea mays
agggagggttgatcacgagcagcacgtattgcactgctgtaccggtccggaattcccgggtcgacccacgcgtccgctccacgcgagcggacgacactaagcggccatagccgcacgttgggatcctctccgctacgcctgtcgatggtctccgccagcgcgccgccgtcgcaggcccagtccgacgcggccggctcggcggaggaagtgagcaagaaggtgcggaagccgtacacaatcaccaagtaccggaagagctggacggatcaggagcacgacaagttgctcgaggccctgcagctctttgatcgtgactggaagaagatcgaggctgtcgatggctccaagactgtcatgcagattcatcttacatccataggaactctggcatgaacgtgcctgtttgttcatgggctcatagttacatcccacaagctgatgcttcatcaatggtgaaagatttatgtgctggaacaccaggttcaaacaatttctgctcaagtagtactga

SEQ ID NO: 86664 - DNA, 521 bp, Zea mays
gggtagaggctgtatttacgacaagaagttattgccactgctcgtaccggtccggaattcccgggtcgacccacgcgtccggtcttcacactcctcgccatcacataaaaccagtgcaagcagaagcagcgcaatggcgagcagcaccatggccctctcctccacagccttcgccggcaaggcagtgaacgtgccgtcgtctctcttcggcgaggcccgcgtgacgatgcgcaagacggcggcgaaggcaaagccggcggcgagctccggcagcccgtggtacggccccgaccgcgtgctctacctgggcccgctgtccggcgcgcccccgagctacctgacgggcgagttcccgggcgactacggctgggacaccgcggggctgtcggcggacccggagacgttcgccaagaaccgggagctggaggtcatccactcccgctgggccatgctgggcgcgttgggctgcgtgttcccggagctgctcgcccgcaacggcgtcaagttcggcgaggccgtgt

SEQ ID NO: 86665 - DNA, 519 bp, Zea mays
  unsure (1)..(519): unsure at all n locations
nttaaaggctgnagtgtacgtacagacgngtcattgcactgctgtaccggtccggaattcccgggtcgacccacgcgtccgtttggtttcattgactactatgaccgcagatatgctgcactagcaattttatctctcaatggcagacaactgtatggtcagccgattaaagtcaattgggcatatacaagtactccgagggaggacacatcaggtcattttaatatttttgttggggatctttgcccggaagtcactgatgctactttgtttgcatttttctctggatactctacttgctcagatgctagggttatgtgggaccagaaaacaggacgatccagagggtttggttttgtttctttcaggaaccagcaggatgctcaaagtgcgataaatgacttgaatgggaagtggcttgggaaccgtcaaattcgttgcaattgggcaacgaaaggtgctaatgctggtgaagagaaacagattctggacactaagggtgacctgtcaaatggttca

SEQ ID NO: 86666 - DNA, 516 bp, Zea mays
  unsure (1)..(516): unsure at all n locations
naggggagggtggagtgggttnnnttactgaantcgggaggtctaacgtaatgctcgtaccggtccggaattcccgggtcgacccacgcgtccgggagagtacgtggaggagcagccatggcttcatcggtggccgccgcggcgagcacattcctgggcacccgcctggcggacccggcgccacagaacgggcgcatcgtggcccggttcgggttcgggttgggcggcaaggcgaagcctgctccgaagaaggtggcgaagacatcgacctcctctgaccggccgctgtggttccccggcgccgtggcgcccgactacctggacggctcgctggtcggcgactacgggttcgacccgttcggtctcgggaagcccgtggagtacctgcagttcgagttggactcgctggaccagaacctggccaagaatgaggccggcggcatcatcggcacccggttcgagtcctccgaagtcaagtccaccccgttgcagccctacagcgaggtgttcggcctc

SEQ ID NO: 86667 - DNA, 511 bp, Zea mays
  unsure (1)..(511): unsure at all n locations
aggggaggcgtgnataaccgacaagaaatgatgcatgctcgtaccgtccggaattcccgggtcgacccacgcgtccgcaaatccacggtttaataacgaaccgtgttaacttaccataacaacaactcaattcctatcgaattccttcctatcgaattcctatagtaaaattcctataggatagaacgtacacagggtgtacacattatatatgaatgaaacatattcattaacttaagcatactcctttttttatttaatgagttgatattaattaaatatctttttttttagatttttgcaaaggtttcatttacgcctaatccatatcgagtagaccctgtcgttgtgagaattcttaattcatgagttgtagggagggacttatgtcaccacaaacagaaactaaagcaagtgttggatttaaagctggtgttaaggattataaattgacttactacaccccggagtacgaaaccaaagatactgatatctnggcagcattccgagt

SEQ ID NO: 86668 - DNA, 519 bp, Zea mays
  unsure (1)..(519): unsure at all n locations
aggtaagagctgtagcactagnnaactnnnagcttgactatatcataccggtttcggaattcccggctcgacccacgcgtccgcggatccacggtttaataacgatccgttttaacttaccataacaacaactcagtttcgatcgaattccttcctatcgaatccctatagtaaaattcctataggatagaacgtacacagggtgtacacattatatatgaatgaaacatattcattaacttaagcatactcctttatttatttaatgagctgatattaattaaatatctttctttttagattcttgcaaaggtttcatttactcctaatccatatctagtagaccctgtcgttgtgagaattcttaattcatgacttgtaaggagggacttatgtcaccacaaacagaaactaaatgaagttgtctggatttaaagctagtgttaacgattattaattgacttactaccaccctgaatacgaaaccaatgatactgacatcttactagcattcctata

SEQ ID NO: 86669 - DNA, 529 bp, Zea mays
  unsure (1)..(529): unsure at all n locations
cgcttgagatgctgtagtttccgggttcagcccnctcatctgtcattgactgtaccggtccggaattcccgggtcgacccacgcgtccgcctccggcggcggcgacgtccctctcgtcgactacctcaacacccagtactatgggagcgtcggcatcggcacaccgccgcagaacttcaccgtcatcttcgacaccggcagctccaacctctgggtcccctcctccagatgctacttctcgattgcctgctacctgcaccacagatacaagtcggccaagtctagcacgtacaaggcggacggcgagacctgcaagatcacctacggctccggctcgatcgccgggttcttcagcgacgacgacgtgctggtcggggacctgaccgtcaaaaaccagaagttcatcgagacaacgcgcgaaagcagcgtaacgttcataatcggcaagttcgacggcatcctcggtctcggataccccgagatctccgtcggcaaggctcctccgatctggcagagcatgcatgaacan

SEQ ID NO: 86670 - DNA, 515 bp, Zea mays
  unsure (1)..(515): unsure at all n locations
aggggnttagaagaggtncnaataccgaaaccgacgcttattggtattgctcgtaccggtccggaattcccgggtcgacccacgcgtccgcccacgcgtccgaacaccagccgccgtcatgtcgaagcgaggtaggggaggttcggctgggaacaagttccgcatgtcactgggtctaccggtggcggccacggtgaactgcgcggacaacacgggcgccaagaacctctacatcatctccgtcaagggcatcaagggccgcctcaaccgcctcccgtccgcctgtgtcggcgacatggtcatggccaccgtaaagaagggaaagcccgacctcaggaagaaagtgatgcccgccgtcatcgtccgccagcgcaagccgtggcgtcgcaaggacggtgtctacatgtacttcgaagataatgctggagtgattgtgaatcccaagggtgagatgaaaggttctgcaatcactggacctatcggcaaggagtgtgctgacctttggcctangatcg

SEQ ID NO: 86671 - DNA, 510 bp, Zea mays
gggtaggagaggttcgataccgagaccgacggttaatagcattgctcgtaccggtccggaattcccgggtcgacccacgcgtccgcccaaccaagcccgcacgacacgacaccaagtcgaggagctcgagagggcaccaataatggccggcgtgaactccagcgtagtagggctcaagcccgccgcgtcagtgccgtaggccgccgccgactcatcggcggcgaagcgtatgcagctggccgcgcccgatggccagcgcgccgctctgctcggcctggcggccgtcttcgccgtcacggccaccaccgggtcggccaaggccacgatcttcgatgagtacctcgagaagagcaaggccaacaaggagctgaacgacaagaagaggctggccaccagtggagccaactttgcgcgcgcctacaccgtggagttcggcagctgccagttcccctacaacttcactgggtgccaggacctcgccaagcagatgaaagtccccttcatcagcga

SEQ ID NO: 86672 - DNA, 520 bp, Zea mays
agaggcttgtagttctacgtacacgacatatatagcaactgctcgtaccggtccggaattcccgggtcgacccacgcgtccgagaaaaacggagattacttgcccccttttcgcttcaccatcgtacgaaaccctagccgcgcctcgccgacggcactccggatcggtcggtgccatgtccaaggccagggtctacgccgacgtcaacgtgctgcgccccaaggagtactgggattactaggcgctcaccgctcaatggggagagcaggacgactatgaagttgtcaggaaggtcgggagaggaaaatacagtgaagtatttgacggtattaatgttaacaataatgagaaatgcatcattaagatcctcaagcctgtgaataaaaagacgatcagccgagaaattagaattgttcagaatctttgtggaggccataacattgtgaagctgctcgatatcgacagagatcagcattcgaaaacgcccagctagatcttcgaatatgttgacaacacagat

SEQ ID NO: 86673 - DNA, 519 bp, Zea mays
  unsure (1)..(519): unsure at all n locations
ggaaaagtctgnagtgactgacaagaatatcactgcattgctcgtaccggtccggaattcccgggtcgacccacgcgtccggcttcgacaccaaatccgccgccgcgctctccaaatgcatgatcatgggggcctcggcgtcatcggtttggtacaacctccaggtgtcgcacccgaccaaggaggcgcccgtcatcgactacaagctcgcgttgctcttccagcccatgcttatgctcggcataaccatcggcgtagagctcagcgtcatcttcccatactggctaatcactgtcctcattataatcctcttcgtaggcacctcgtcgagatccttctacaagggaattctgatgtggagggaggagaccaggattctgacggagacacgcgggcgagaagagcaatccaagtctacctgcgctgcaagtgatgtggtcattgatcccagttatggggagcccctcctgactcaacctcagcccaagaagtctgcatgggagactttcatgttcaatc

SEQ ID NO: 86674 - DNA, 516 bp, Zea mays
  unsure (1)..(516): unsure at all n locations
nggttaggggtcncttaagagggggggggtaatgtatgctcgtaccggtccggaattcccgggtcgacccacgcgtccggcgaagtcttcgtcggagcaggacgaagagcgagcagcaagatgtcgtggcaggcgtacgtcgatgaccacctgctgtgctacatctaaggccagcacctaatctcctgcgccatagtctgccactactgctgtgtgtgggcacagtccgagaacttccgcgagctatagcctgacgaggttgctgggatgataaaggactttgatgaacctggaactgttgcaccaactggtctttgtgttggaggtacgaagtacatggtgatccaaggtgaactctggagttgtcatccgaggaaagaacggcactggaggcattactatcaagaaaactggcatgtccttgattatcggtatctatgatgagccaatgacttcagggcaatgcactatgccggtggagaggctcggcgattacctgatcgaacagggctttta

SEQ ID NO: 86675 - DNA, 511 bp, Zea mays
  unsure (1)..(511): unsure at all n locations
naggggaggagagggtgnattacggaacgagggagttaaaggtattgctcgtaccggtccggaattcccgggtcgacccacgcgtccgggacactcctcctcagaactctcccttccctcttgtaggggccaaaagggtcagagatctaggaagaagagaactagtccccaagcctaacaagaaagcaagctcttctgcaactgttggcattcgccttaatttgtatccatatcccaatggcaggcctatctctgcaacacccctgggcattcactttcggcctcctaggcaacgtcatctccttcatgaccttcctggccccgataccgacgttctaccgcatctacaagagcaagtcgacggagggcttccagtcggttccgtacgtggtggccctgttcagcgccatgctgtggatcttctacgcgctgatcaagtccaacgagacgttcctcatcaccatcaacgcggccggctgcgtgatcgagaccgtctacgtggtcatgtacc

SEQ ID NO: 86676 - DNA, 512 bp, Zea mays
  unsure (1)..(512): unsure at all n locations
ggagagggatgtattaagggggaaggggtatgctatactcgtccggaattcccgggtcgacccacgcgttcgcgcacgcatacacagcacagagtgaggtaagcattcgaaaaaagctgtgatctgatcgacatggccgtcgtcaccatggctctcaccttccgcgcgctcgtcggcaagccggcgaccagcaccagggacgtcttcggcgaggggcgcatcaccatgcgcaagactgctggcaagcccaagccagcggcgtccggcagcccctggtacggggccgaccgcgtcctgtacctgggcccgctgtccggccagcccccaagctacctgaccggcgagttccccggcgactacggctgggacaccgcggggctgtccgncgacccggagactttcgccaagaaccgcgagctggaggtgatccactgccgctgggccatgctgggcgcgctcgggtgcgtgttcccggagctgctcgcccgcaacggcgtcaagttcggcgaggc

SEQ ID NO: 86677 - DNA, 508 bp, Zea mays
  unsure (1)..(508): unsure at all n locations
ggggaagggttngtacagcgaggggagtactgtataccgtccggattcccgggtcgacccacgcgtccgcgcacgcgtacgggcggcgcacggacggacctacaacgccgtcggcgaggaggagcggcggtaccaggtgttccgggacaacctacgttacatggacgcgcacaacgccgtcgtcgacgcgggcgtgcactccttccgcctcggcctcaaccgcttcgccgacctgaccaacgacgagtaccgcgccacctacctaggcgccaggaccaggccgcagagggagaggaagctcggcgccaggtaccacgccgtcgacaacgaggacctgccggagtccgtcgactggagggccaagggcgccgtcgccgaggtcaaggaccagggcagctgcgggagctgttgggctttctcaacaatagcagctgtggaaggcatcaaccagattgttacaggcgactngatctacttgtctgaacaagagcttgtcgactgtgacact

SEQ ID NO: 86678 - DNA, 511 bp, Zea mays
gtgtagggtgttgttacagaaagagagtatgctcatccgtccggattcccgggtcgacccacgcgtccgcgagtgtcaagtgaacctgaaacttgcggtgtcactggctggtatagcctgagtgtgagtgagtgatcgagctagctgagctccgatcctagctagctagctaggataccgccataccacaagtcttcttcacaagtttaggagtgacagcaacaagagatctcgatggcctatgccaccgtgctcaagtacttcttccttagcaagaagtccgaatggggcgccaccagtgcaggccggcgcgcccaggccggacaccgtctacatggtcgtacgcgcctactgctacgccgatgagctcgtgaagaccgcgaaaacgatcgcgtcgtcggggcggtgcatcctggcgatggacgagtcgaacgcgacgtgctgtaagcggctggcgtccatcgagctggagaacacggatgccaaccggcatgcgtaccgtacgctgctg

SEQ ID NO: 86679 - DNA, 507 bp, Zea mays
  unsure (1)..(507): unsure at all n locations
agatagcgatatggtgcttccagcctcncatcgcatgctgttcggattcccggtcgacctacgcgtccgcgagtgtcaagtgaacctgaaacttgcggagtcactggctggtatagcctgagtgtgagtgagtgatcgagctagctgagctccgatcctcgctagctagctaggataccgccataccacaagtcttcttcacaagtttaggagtgacagcaacaagagatctcgatggcctatgccaccgtgctcaagtcctccttccttcccaagaagtccgaatggggcgccaccaggcaggccgtcgcgcccaggccgtccaccgtctccatggtcgtccgcgcctccgcctacgccgatgagctcgtgaagaccgcgaaaacgatcgcgttgccggggcggtgcatcctgtcgatggactagtcgaacgcgacgtgctgcaagcggctggcgtcaatcggcctgaagaccacggaggccaaccggcaggcttacggaacgctt

SEQ ID NO: 86680 - DNA, 520 bp, Zea mays
  unsure (1)..(520): unsure at all n locations
gaggtcgagtgntnnttttctgtccacgcccgtactgtcactgccgtaccggtccggaattcccgggtcgacccacgcgtccgctcccgtcgtcctcgaaaccctaggccagaccacagctgaagccgagcggagttctggtcgccgcccatcgaatccagcttctccaagtccaaggcaccgtcgcgacccccatcgtccgcacgacctggatctgacgcgcctccccctgccgtcgccgccctccgcctcgtaccttctcgcggcgaccgccgtgctcggactcctcggcggccttctactctacatgcttgcccggaagcggggggtcgacgccggcgaggtccaggacttgcacaacaaggccccccgcgccgtcgccaccgtcccagtccaggactaggactagcaccaggaggaggctgcggaaatggccggcagggcgcccgagatcgatgaggacctncacaggcgacagctcgccgtctactgacgcgagactatgaagcgccttttcggt

SEQ ID NO: 86681 - DNA, 516 bp, Zea mays
  unsure (1)..(516): unsure at all n locations
agaggagaggagtggcttntattaccgacgacggagggtatatagtcattgctcgtaccggtccggaattcccgggtcgacccacgcgtccgatcctgttctgcaacattgggaatcctcaatcccttggtcagcaacctgtgacgttcttcagggaggttcttgctctttgtgatcatccatgcctcttggaaaaagaggaaaccaaatcattgttcagtgctgatgctatttctcgagcaaagcagattcttgcaactattcctggacgggcaacaggtgcatatagtcacagtcagggtatcaaaggattgcgtgatgcaattgctgctgggatcacctcacgtgacggattccctgcaaatgcagatgacattttcattacagacggagcaagtcctgnggtccacatgatgatgcaattactgattaggaatgagaaagatggcattctgtgcccaattcctcagtaccccttgtactcggcctccatagctcttcatggtggagctcttg

SEQ ID NO: 86682 - DNA, 518 bp, Zea mays
  unsure (1)..(518): unsure at all n locations
agtaaagtncctcnntctctgaatcgtagncctacgcactgctgtaccggtccggaattcccgggtcgacccacgcgtccgcaaggatattctgttggaaaatctctcgtggaagaggataaacttgagctcgcaacttctcttattgagaaggcgaaggcaaagggggtttctcttttgcttcccactgatattgtagtagcggacaagtttgcagctgatgctgagagcaagattgtccctgccactgctatccctgatgactggatgggtcttgatgttggccctgatgccaccaaaacattcaacgaagcattggacaccaccaagactgttatttggaacggccccatgggagtgtttgagttcgagaagtttgcagctggcactgaggcgattgccaagaagctagctgagcttacaaccacgaagggtgtcactaccatcatcggcggcggcgactctgttgctgctgtcgagaaggctgggctggccgacaagatgagccacatttcgan

SEQ ID NO: 86683 - DNA, 521 bp, Zea mays
  unsure (1)..(521): unsure at all n locations
gagagtagtgagtgtggtgtctaaaactgnactcnatntgcacttcggttccggtccggaattcccgggtcgacccacgcgtccggttgcatggagcgaggctgaacctatgaagctggcagggatccatggacggggggaactggacaagcctacgtgtccacgacagcgaccctaccgtctgctatccaggccagttcgcctcttggcccatcgttggcccggcggtccttctgcccttgcgattcttcagggtcgccctgacaggccctgccgtcggctgtacgtggaacctgtgcatttgcttcctcgagctctacggctacttacattagatcttcttcttactcttcttcttaataaaaaatatagatgccggagtttttgtgcaaacacaagtaatattacctgcgatgccacaattgctggtcattgcacatcatgaaacatgtattcacagttgaaaaagaaagttgttagaacgataggcctaagactccgatggcctatcttatactccg

SEQ ID NO: 86684 - DNA, 510 bp, Zea mays
  unsure (1)..(510): unsure at all n locations
gtnagagaagaggttgtattacgcatccccgccattatagccatgctctaccggtccggaattcccgggtcgacccacgcgtccgaattactgcatttcttaacttattttttctctttctattttgcttttttttttattttatatggtatccatcgctttgaaaccatcaaatttgatctccttccatatttcacaagctgcggctagttcaacactccatttgcaagctgctttgataatttcattaccttcacgagcaaaaatcgcgcccttcgttacaagcttgtacacaggcttctaaagccacacgattagctgctgcaccaggtgcatttccccaaggatgtcctaaagttcctccaccaaattgtaatacggaatcatctccaaagatttcggtcagagctggcatatgccaaacatgaatacccccataagccaccggtataacacctgtcatggatactcagtcctgagtgaaaaaatataccgcgagaacgatctttt

SEQ ID NO: 86685 - DNA, 515 bp, Zea mays
  unsure (1)..(515): unsure at all n locations
gagttaagagatggcttgtatcacgacgacagaccgcttatctgcaattgctcgtaccggtccggaattcccgggtcgacccacgcgtccggaaaaacttgaatcattctatttaccaatgtattcaccatcggttggtgaagtggaggccatactaaagcaagttgggttgttcaacatgaatcatgtaaaagtattccagacaaattgggatccctacgatgacttggaaagtgatgttgtgcataacagtattaggagcggtgaaaatgttgctaagtgcctacgagcagttatgcagccgctagtcgcaagccaatttggagaacccattctcgataagttattcaaagagtacgctcgccgtgttgccaaacaccttgagaatgagaaaaccaagcatgctattattgtcctatccatcgagaaagcaattcacctgtgaagtgtattgtttctcactatctcgcttggcatgctactatttgtgtagaaaactttgtatgtatgttttn

SEQ ID NO: 86686 - DNA, 513 bp, Zea mays
tagttttagggtgggtctgatcacgacaccaagcactaatagtcattgactgtaccggtccggaattcccgggtcgacccacgcgtccgaatcggctctaccagaagaaattctctggcccgaggtgggaggcgttggccaagaaaggtgccatgaaacagaggttgttgtgggcgttcaccggtgtcaagaacccagcttatcccgacactctttacatcgactgtctcattggacctgacactgtcaacacgatgcccgaccaagctttgcaggcattcatagaccacggcactgtttcgaggacagttgatgcgaatgtgtacgaggcggaaggtgtatacagcgccttggacaatcttggcattgactggcgcgaggtcagaaagcagcttgagctggaaggtgtggactccttcatgaagagctttgacagcctactcgtgagcctgcaggagatggtcaacatcctcaagacggcatctgtgtaaaactgagaagattgtgtaccgg

SEQ ID NO: 86687 - DNA, 514 bp, Zea mays
  unsure (1)..(514): unsure at all n locations
ggataaagacgtgactctgatttctagcctcacgccactacntcctangactttaccggtccggaattcccggctcgacccacgcgtccgaatcggctctaccagaagaaattctctggcccgaggtgggaggcgttggccgagaagggtgccatgaaacagaggttgttgtgggcgtccaccggtgtcaagaacccagcttatcccgacactctctacatcgacagcctcattggacctgacacggtcaacactatgcccgtacaagctttgcatgcattcatagaccacggcactgtttcgaggacagttgatgctaatgtgtacgaggcggaaggtgtatacagcgccttggagaagcttggcattgactgnggcgaggtcggaaagcaacttgagctggaaggtgtggactccttcaagaagagctttgacagcctactcgtgagcctgcatgagaagggcaacagcctcaagacgggaactgtgtaaaactgagaagattgggtaccgg

SEQ ID NO: 86688 - DNA, 515 bp, Zea mays
agtagggagtcacttacgaaagagaagtactgctagtaccggtccggaattcccgggtcgacccacgcgtccggaaggtaaaagatgcaagattattggaggaagatcttgtcagggctgcatgcaagcttgagttgtcaatgatgcaaacatgcaagctaactgcagacaggcactcgcaaaacaatcttacacatgacatgaaggcaattcagaaacaggttattgatgatcaaaagcttttacgtgataaggttcaacacctgagtggcgatgctggccttgagcggatgaactctgctctttccgatacgagatcaaagttctttgaagcaaaggagaatgggagtccattgacagcacctgttgcaaatgtgtctacccctttgagcatcaattcgtctgggaaagcaccactttctgaggttcctgaaagttccaggacaaatgttgttgggacaagctctgtagtccgttctttgttcagtgcttcttcatcatcagtcagttcatca

SEQ ID NO: 86689 - DNA, 526 bp, Zea mays
ggtttagaggctcgtattgactgtacaccgaactataaagccattgctcgtaccggtccggaattcccgggtcgacccacgcgtccgaccttcaagtctcgctacgtagcagtgcaataaaaaaagcagccgcaatggcgagcagcaccatggccctctcctccacggccttcgccggcaaggccgtgaacgtgccgtcgtcgtccgccttcggcgaggcccgcgtgacgatgcgcaagacggcggggaaggccaagccggcggcggcgtccgggagcccgtggtacggccccgaccgcgtgctgtacctgggcccactgtccggcgagccgccgagctacctgacgggcgagttcccgggcgactacggctgggacaccgcggggctgtcggcggacccggagacgttcgccaagaaccgggagctggaggtgatccactcccgctgggccatgctgggcgcgctcggctgcgtcttcccggagctgctcgcccgcaacggcgtcaagttcggcgaggccgtgtg

SEQ ID NO: 86690 - DNA, 516 bp, Zea mays
  unsure (1)..(516): unsure at all n locations
nagttttagctgagtctgaaaccgacgaacgatcactctactgcaattgctcgtaccggtccggaattcccgggccatgatacagcagatgcagcagccttgcaatgagtgcaaggggactggagagagcatcaatgagaaggaccgctgtccagggtgcaagggtgagaaggtcattcaagagaagaaggttcttgaggttcatgttgagaaggggatgcaacacaaccagaagatcaccttccctggtgaagctgatgaagcgcctgatactgtcactggagacattgtattcgtcctccagcagaaggatcactccaaattcaaaagaaagggtgaagatctcttctatgagcacaccttgtctctgaccgaagcactatgtgggttccaatttgttcttacacatctggacaacaggcagcttctcatcaaatcagaccctggtgaagttgttaaacctgaccaattcaaggcgattaatgatgaggggatgccaatttaccagaggccttt

SEQ ID NO: 86691 - DNA, 512 bp, Zea mays
  unsure (1)..(512): unsure at all n locations
agtttcagagagggttntataccgtacccaagcactcactgtcactgactgtaccggtccggaattcccgggtcgacccacgcgtccgggccggcaagtaccagatgaagaagctgtgcctggagccgacgtccttcaccgtcaaggcggagggcatcgccaagaacgccccgcccgagttccagaagaccaagctcatgacccgcctcacgtacacgctggacgagatcgagggcccgctcgaggtcggctccgacggcacgctcaagttcgaggagaaggacggcatcgactacgccgccgtcaccgtgcagctcccggggggcgagcgcgtgccgttcctcttcaccgtcaagcagctcgtcgccaccggcaagcccgagagcttcggcggtcccttcctcgtgcccagctaccgtggctcctccttcctcgaccccaatggccgcggcggctccaccggctacgacaacgccgtcgcggctcccggcaggggcagatgtgacgaggag

SEQ ID NO: 86692 - DNA, 528 bp, Zea mays
ggaaggctcgtttctgattctagccctcactgtattgccgtaccggtctcggaattcccgggtcgacccacgcgtccggccatggccaccgccgccgcgtctagcctcctcaagtcctccttcgcgggctcccggctcccggccgccacgcggaccacaccggcgtccctcgtggtggccaccggcccgcgcggcgccggcgcggggcccatctgcgcgtccatgtccatgtcctcctccaacccgccctacgacctgacgtccttccggttcagccccatcaaggagtccatcgtgtcccgcgagatgacccgtcgctacatgacggacatgatcacctacgccgacaccgacgtcgtcatcgtgggcgccggctccgcggggctgtcctgcgcgtacgagctctccaaggaccccgccgtgagcatcgccatcgtggagcagtcggtgtcgccgggcggcggcgcgtggctgggcgggcagctgttctcggccatggtggtgcgcaagccggcgcacctgttcctg

SEQ ID NO: 86693 - DNA, 515 bp, Zea mays
  unsure (1)..(515): unsure at all n locations
aaggctgtgttatgacacgcattaagtactgctctaccggtccggaattcccgggccaagtcccacgcctgcgtctcgtgatgccgccgaaatcgaaggcgtccgccgccgcggagccggtggccgtcgaggacctcttcgcctcgctccaccgccacatcgaggcaggtgctttcaaacaggccgccaaggtcgccgaccaagttctcaaggcagcgccgggagatgaggacgcggtgcgatgcaaggtggtggcatacatcaaggccgacgagatcgacaaggcgctcgccgcgatccgcgccgtcgagcgccttccgatcgatctcagctactacagggcctactgctgctacaggcaaaacaaactgcatgaggctcttgagcttttaagaggccaagaagaaacttcagctgttctccagctggaatcccagatcttttaccgactaggaagaatgaatgattgcatgagtagctatgagaagcttanaanattaaaattgactcaatgn

SEQ ID NO: 86694 - DNA, 523 bp, Zea mays
  unsure (1)..(523): unsure at all n locations
ggggattgtntgaggtgaggagcgtgtactgataccgacactcatagtaangactgtaccggttcggaattcccgggtcgacccacgcgtccggctggcttctcctccccctcttatcaagtcctcctcgggttagggttccttagggttgtgtggaggggcgatggcggcggctgatgtggagtaccgttgcttcgtcggcggacttgcctgggccaccagcaacgagtcgctggagaatgccttcgcctcctacggcgagatcctcgactccaaggtcatcaccgaccgggagacggggaggtcccgcggcttcggcttcgttaccttctcctccgagaactccatgctcgacgctatcgagaacatgaacggcaaggagctcgacggccgtaacatcaccgttaaccaggcccagtcccgtggcggcggcggcggcggcggcggcggtggctacggcggcggtcgcggcggcggcggctatggtggcgggcgccgtgacggcggttatggcggcggtggg

SEQ ID NO: 86695 - DNA, 499 bp, Zea mays
  unsure (1)..(499): unsure at all n locations
nagttaagagttatctgaacccgccacgaagtactctcaacgctccggattccgggtcgacccacgcgtccggagccctctcttccattccagccttcccaggccagctgcaactactggctcatcaccagaaaccagaacgtacgccggcaacccatctccctgaaatggccgctgtggagccccggcagttcgggcgtctggagccgggctcctcgccagtgcgcgtggccacgaacggcgccaaggcgtaccctcctccggcaagccacctcccgcggcgcgctgactcccctgtccgcggctgcagcttccctcccctcgtctccccgccgcgcaggctggacgacgcgtcggacgacgaggacgaggagcaggaggactggcgagagctgtacggctcgcacctgcagctggaggtggagcccgcggtgcaggacgcgcgcgacgaatgcaccgnggacgcgtggatcgagcggaacccgtgcctggtgaggct

SEQ ID NO: 86696 - DNA, 511 bp, Zea mays
aggggaggagtatgtatgaataaggacgacgagggaaaaaagtaacgctcgtaccggttcggaattcccggggtaccacaccactcctcgctagctgtggaactgtacaggagggactaatgtcaccacaaacagaaactaaagcaagtgttggatttaaagctggtgttaaggattataaattgacttactacaccccggagtacgaaaccaaggatactgatatcttggcagcattccgagtaactcctcagctcggggttccgcctgaagaagcaggagctgcagtagctgcggaatcttctactggtacatggacaactgtttggactgatggacttaccagtcttgatcgttacaaaggacgatgctatcacatcgagcccgttcctggggacccagatcaatatatctgttatgtagcttatccattagacctatttgaagagggttctgctactaacatgtttacttccattgtgggtaacgtatttggtttcaaagccttacc

SEQ ID NO: 86697 - DNA, 518 bp, Zea mays
  unsure (1)..(518): unsure at all n locations
gagtttagggtcttgttaaagaaagatagtatgctctaccgtctcggattcccggtcgacccacgcgtccggtcactcaacacagcacaggcagctcgtgagagagagagagagaaagatgtcgtggttggggcaccaccaccacaaccagccggctcccccggcgtcgggccccaaccaggtgttcaagatcttctgccgcgccaacgagaactactgcctggccgtccgcgacggcgccgtcgtgctggccccggtcaaccccaaggacgaccaccagcactggtacaaggacatgcgcttcagcacccgggtcaaggacgaggaaggcatgccggcgttcgcgctcgtcaacaaggccacggggctcgccatcaagcactccctcggccagtcccacccggtcaagctcgcgcctttcaacccggaccaggaggacgcgtcggtgctgtggacggagagcaaggacgtgggcaagggcttncgctgcatccgcatggtcaacaacacccgcctca

SEQ ID NO: 86698 - DNA, 515 bp, Zea mays
  unsure (1)..(515): unsure at all n locations
agttaagggtcttgtacacgaacgaaagtatgctctaccggccggattcccggtcgacccacgcgtccggtcgacggcctgcaacgggtggaggagtccatgggcgccacgctgggcgatccgcagggcccgctcctgctctccgtccgctccggcgccgccgtgtccatgcccggcatgacggacacggcgctcaacctggggctcaacgacgaagtggccgccgcgctggcggtcaagagcggcgagcgcttcgcctacgactgcttccgccgcttcctcgacatgttcggcaacgtcgccatggacatgccccgctcactgttcgcagagaagcttgagcacatgaaggaatgcaaggggctgaataacgacaccgacctcacggcctctgacctcanagagcttgtgggtcagtacacggaagtctacctctcagccataggagagccattcccctcagaccccatgaagcagctggagctagcagtgctggctgcgttcaactcgtggga

SEQ ID NO: 86699 - DNA, 524 bp, Zea mays
  unsure (1)..(524): unsure at all n locations
nggaaaggtcttgatacggagaagtaagtaatgtcatgctcgtaccggtccggaattcccgggtcgacccacgcgtccgatcgcttaccgcccccgaagcgtctcggttcgcatagcagagctgctcttgcaacaagccaaacaacccagtggctgctagccgagacaggggatagattgagagagaggcgcgcagatggcgacgccgtcgtcgtcgctttgctccagcttcgcctccctgcggaccgcctccatcggccacccccgtggcatcgcctcctccacgcccaggaaggcattccatgtgagggcatcagctcgggttgacaaattctcaaagagtgacatcatcgtgtccccttcgattctgtctgcaaactttgcgaagcttggtgatcaggtaaaagctgtggaggtggcaggatgcgactggattcatgtcgatgtcatggacgggcgctttgtgccaaacatcacaattggacccttggttgttgatgctctgcgtccagggactgatcttn

SEQ ID NO: 86700 - DNA, 527 bp, Zea mays
agtataagggatgtggtacggagaaggaggagtattagtattgctcgtaccggtccggaattcccgggtcgacccacgcgtccgcacagagagaggacaactcctcacaactctcccttccctcctgtaggggccaaaagggttagagagtaagagaagtagttcattcccttgcccaacacaagaaaacaagctctcctcatcaccctaatccaagcaactgcttgtgtgttgggaaattcttgtgacccctgttatattattatccgtgtagctactagcttcattcccccctttgtacccatcaaatggctggcatgtctctgcaacacccctgggcgtttgctttcggtctactaggtaacgtcatctcattcatgaccttcctggccccgataccgacgttctaccgcatctacaagagcaagtcgacggaaggcttccagtcggttccctacgtggttgcgctgttcagcgccatgctgtggatcttctacgcactgatcaagtccaacgagaccttcctc

SEQ ID NO: 86701 - DNA, 508 bp, Zea mays
  unsure (1)..(508): unsure at all n locations
cagggaggaacagtgtcgagtccaaatacgatngaccagtactgtcntcagcagtacggacttaacgcatgcatccacgggtccgggccactgcattatatccttcctggttctctgtacacctatatcgctctagtccgtgggcatcgtcctaagccacgtgctaaggctttcgttggactctttcacgacgacgagcacccatcatttctgtacaaatggctgatggtgaggacatccagcctcttgtctgcgacaatggcactggaatggtcaaggctggtttagctggctatgatgcaccaagggcgggtttccctaacattgttggccgttctcgccacactggtgtcatggtaaggatgggacagaaggacgcatatgttggcgatgaggcacagtccaagaaaagtattcttacgctcaagtacccgattgagcacggtattgtgagcaactgggatgacatggataatatctggaatcatactttctacaacaagtttcn

SEQ ID NO: 86702 - DNA, 523 bp, Zea mays
  unsure (1)..(523): unsure at all n locations
gaggggagggggtcnatacggggcggggggtaacggtatgctcgtaccggtccggaattcccgggtcgacccacgcgtccggtgaaagtcaaggtatcatttactggcaagggagaaactcagtctatgaaacaattgtcaggcggacagaagacggtggtcgcactaacactgattttcgctatccaacgatgtgacccagctccattttatctgttcgacgagatcgatgctgctctggatccacaataccgaacagcagttggaaatatgatccgccgtctagctgacatggctgacactcagttcattgcgaccacattccggccagagattgctaaagtggctgataagatatatgccgtgagacacaagaatagggtgagcaacatcgacgtggtgtccaaggaggaggccctggacttcatcgagcgtgatcagacgtacaatgctagctgaggctgctgctgctgtgtattgattgatctgcangcagatgctaacgcagacaggatagttcttg

SEQ ID NO: 86703 - DNA, 504 bp, Zea mays
  unsure (1)..(504): unsure at all n locations
nagttaggagtgatttaaacccgcaacgacggcattctctaccgctccggaattcccgggtcgacccacgcgtccgcgcgagtgagtgaacaccagccgtattgtcccgactcctgacccctaccgatcctcgcctgctgcagccatggcgacctccgcggcgctctccaccgccgccaatcccacccagctctaccggtcccgcgcttcgctgggcaagccggtgaaggggcttggcctgagcatgggccgcgagcgcgcccagcggagcattgtgtgccaggcggcgagcagcatctccgccgaccgcgtccccgacatggagaagcggaagctgatgaacctcctcctcctcggcgccatctcgttgcccaccgtcggcatggtcgtcccctacggcgccttcttcgtccctgccggctccgggaacgccggcggcgggacctacgcgaaggacaagctgggcaacgacatcacggtggaggcgtggctcaacacgcacgg

SEQ ID NO: 86704 - DNA, 518 bp, Zea mays
  unsure (1)..(518): unsure at all n locations
ggttgaggttttgtaaagaatgacagtatgctctaccggtccggaattcccgggtcgacccacgcgtccgcctccctctccgaaatcaaggtagcatacaccgctgcagtttctagagccctctctgccactcgtgatcccactagtcacgatgcctgccctcgctaagcccgcctcccgcaccgccaagcccgccgcggctccgaagccgaagcctgccgccgccaagccgaaggcggccaccgctggtgcctcccacccgccttacttcgagatgatcaaggaggctatcacggcgctaaaggagaggaccggctccagctcgcaagcgatcgccaagtatgtgggggacaagcacggcgcgtctctgccggccaacttcaagaagatgctttccatccagctccgtgggtccgcagccaagggcaagctcgtgaaggtcaaggcttcgtacaagctctcggacgccgncaagaaagcatcccccaagaccaaggctaagccggcaaaggccgccg

SEQ ID NO: 86705 - DNA, 511 bp, Zea mays
agtttaggggttttgttaaagaaagagagtatgctctaccgtccggattcccggtcgaccagcgtccgaacaaggaagtacctggaggaaccaccctggcttcaacggtgggccgcgcggccaggccctttctgggcaccccgcttggcggccccgggccacagaacggcgcatcgtggcccggttcgggttcgggttgggcggcaaggcgaagcctgctccgaagaaggtggcgaagacatcgacctcctctgaccggccgctgtggttccccggcgccgtggcgcccgactacctggacggctcgctggtcggcgactacgggttcgacccgttcggtctcgggaagcccgtggagtacctgcagttcgagttggactcgctggaccagaacctggccaagaatgaggccggcggcatcatcggcacccggttcgagtcctccgaagtcaagtccaccccgttgcagccctacagcgaggtgttcggcctccagcggttccgcgagtgc

SEQ ID NO: 86706 - DNA, 529 bp, Zea mays
  unsure (1)..(529): unsure at all n locations
ngagttntagggctcnattaccgacgccgacatgtatagcaatgctcgtaccggtccggaattcccgggccggtccagcactttcacgctcagctccagcaatggctgcctccaccatggcgatctcctccacggcgatggccggcacccccatcaaggtgggctccttcggcgagggccgcatcaccatgcgcaagaccgtgggcaagcccaaggtggcggcgtccggcagcccctggtacggccccgaccgcgtcaagtacctcggccccttctccggcgagcccccgagctacctcaccggcgagttccccggcgactacggctgggacaccgccgggctgtccgccgaccccgagaccttcgccaagaaccgcgagctggacgtgatccactcccgctgggccatgctcggcgcgctcggctgcgtcttactcgagctgctctcccgcaacggcgtcaagttcggcgaggccgtctggttcaaggccggctcccagatcttcagcgagggcgggctggactaccc

SEQ ID NO: 86707 - DNA, 510 bp, Zea mays
  unsure (1)..(510): unsure at all n locations
naggttaggagtgttctaatacggagaatgacggtactggtcgtaccgcgtccggaattcccggggcagggacggccatggcatgcagtgggtgcagctgcgaggcggcggtgggggcgatggcgtcggaggcgtacctggagggggcgccggtgcgggaggcgcgggagctggtggcggagctctgtcggcacttctacgcgcagggatgggtcacgggcaccggcggcagcatcaccgtcaaggtcaacgaccccaccgtgccgctcgccgatcgcctcatcgttatgtcaccctccggtgtgcagaaggagaggatggtagcagaggacatgtatgtgatggctgcagatgggaaagtgctttctgcgcctgtagcaaagccatggccaaacaagcctcctaagtgcacggactgtgctcctctgttcatgaaggcgtatctgatgagaggagctggggctgtcattcacagccatggaatagagacttgcatcgcaacaatgctcn

SEQ ID NO: 86708 - DNA, 511 bp, Zea mays
  unsure (1)..(511): unsure at all n locations
agtttagggcgttttgttcaccgaaagagagtaatgctataccggtccggattcccggtcgacccacgcgtncgaaagatcatacacggtttacagggtatggtgggtggaaaggggcgagtttggcgcagacgctgctatagtaaccgtccctctcggggtactcaaggcaaacatcatcaagtttgagcctgagctaccgaaagagaagctctcggcaatcgccgaccttggcgtcggtatcgagaacaagatagctctcaagttcgacactgtgttttggcccgacgttgaagtgataggtagggtggccccgacgtcaaacgcctgtggctactttctcaaccttaacaaagccacaggaaacccggtcctggtgtgcatggtggccggaaggttcgcgtacgagatcgagaagctgtcggacgaagagtccgtgaacttcgtcatgtcccaactcaggaacatgctgccgcaggcaactgacccggttcagtatctggtctcgcgc

SEQ ID NO: 86709 - DNA, 528 bp, Zea mays
  unsure (1)..(528): unsure at all n locations
nggggtggagatgcttttttaacggcgggggggggtaacactattgctcgtaccggtccggaattcccgggtcgacccacgcgtccgcgcgtttggattttgctcctttgctcccttctgaaagggtcaccatgtctgcctttgtggggaagtacacagatgagctgatcaagaccgccaagtgcctcgcaacgccgggcaagggcatcctggcctccgacgagtcgacgggcaccatcggcaagcgcctgtccagcatcaacctcgagaacgtggagtcgaaccggcaggcgctccgcgagctgctcttcacggcgcccggcgtgttcgactacctctccggggtcatcctcttcgaggagacgctgtaccagaagacctccgacgggaagccgttcgtggacgtgctcatcgcgggcggagtggtccctgggatcaaggtcgacaagggcaccgtggagatcgcgggcaccgacggcgagaccaccacgcagggcctcgactccctgggcgcacgctgcgccaagt

SEQ ID NO: 86710 - DNA, 526 bp, Zea mays
  unsure (1)..(526): unsure at all n locations
aggtnaaagatggtgcgttacgaacacgcatattcagcattgctcgtaccggtccggaattcccgggtcgacccacgcgtccggggactgattatgggtctgtaagagtaggcacttacatgggccgcaagatgatcaagtgtgctgcatccaacctactttcagaattgttgctctcgtgtacgtctacgcaaccaggcgactcaagtcccgacgaatatgaaggacatggcgtcgacctcctgaaatctgaagcgtcaatggagtatctatgcaacttaccaccacataggtatgaagctgttttcgcgaaagaaattccggagacgatcactggcgatgcgtttttagagaagtatggagaccacaacgatgcggtaacagaagttgacccaaagcggtcttactgtgtcaaggctcctactagacatcccatatacgagaacttccgagtcgaggccttcaaagcgttgctaacagctgccaaaacagacgagcagctctcagcccttggagagctgatgtt

SEQ ID NO: 86711 - DNA, 501 bp, Zea mays
  unsure (1)..(501): unsure at all n locations
gggtaaggagtagttgatcacgcacgatagtactctcaacccgtccggaattcccgggctcacttccctcagtcctcgtccgtctgctccctcctctctctacctagctctagctagccttcctgtagcgcggcagagatggctgcccctgcctccaccacggcggcggcggcggcagcgctgctgctgctgctcctcctgtcgctcgccgcggcggcggacatgtcgatcgtgtcctacggggagcgcagcgacgaggaggcgcggcggatgtacgcggagtggatggcggcgcacggccggacctacaacgccgtcggcgaggaggagcggcggtaccaggtgttccgggacaacctccgctacatcgacgcgcacaacgccgtcgtcgacgcgggcgtncactccttccgcctcggcctcaaccgcttcgccgacctcaccaacgacgagtaccgngccacctacctcggcgccagtaccaggccgcagagggagaga

SEQ ID NO: 86712 - DNA, 397 bp, Zea mays
  unsure (1)..(397): unsure at all n locations
naggaagggagtgtttataaagcaagaagtactgtcaccctccggattcccggtcgaccagctccgaccggcagcggcgctgcgcatggccacccagcagtttcgccgctccgatcccgccggcgcccggtgcacacaggcgccgcgtcgccagcacgcgtcagagctggacttgcgactttcggctagccgggtcggctcggagcgctgcggcggagcgtctttcgactctgggccagtcgtgcaagcacgggaaacgcggagggcccgagagcgaactgaggggacaacgttcgcgatcggcggacttctcgggctgacgcggaggactgcgatgactgtcgtcggaacgaagggagcgtagaacgctccactctcagtcgatcgtgctggactc

SEQ ID NO: 86713 - DNA, 519 bp, Zea mays
  unsure (1)..(519): unsure at all n locations
ngggagtgctgtctcacgacacgaattatagcatgctcgtaccgtccgtaattcccgggtcgacccacgcgtccggtcaagttggaaaacaagaatggttcaacatcacacaagaaaaacggtttctcaagaccactcttgaaatgtgcagaagaggtcctactgaatggcgatgttgcaagtacatctgggaaatccattgcaagcttacaggtggaagcatctgatttggcaaacttccttaccatggatcggaatgggggttaccgaggttcacaaactcttctaagatctgtattatcagagaaacaagagctgtgcttctctgttgtctcattgctctggcagaagctcatagcttcttctgaaatgcagatgtctgcagaaagtacatcagctcaccaaggatggaagaaggttgttgatgcacttagcgatgtcgtttcagcctctccaaccatggcatcagctgctatcggtcttcaggcctagaaggacttgcaaccctggattgctaga

SEQ ID NO: 86714 - DNA, 519 bp, Zea mays
  unsure (1)..(519): unsure at all n locations
ggggaggcctgnctacggacgggggggtacggtaggctgtaccggtccggaattcccgggtcgacccacgcgtccgccagtccactcgcagtcgcagctagtccggtccccggtccgacctatcccagtgacaccatctatcgtcggtcggggacgatgaggccggccgcgctcttcctcgccgcggtgctggccagcgtcgtcctcctcctcgccgccggccgcgccgcgggcgacttctcggccctggcgccgtgcgatgtgacgcagctgaccccctgcgcgagcgcgttcgcggggaaggcgtcgcccacggccgcctgctgcgccaagctcctgtcccacgggcccggctgcctgtgccggtacaaggacgacgccagcctgaagcgcctcgtcgacgccaggcacaagcgcagggtgttcaccgcgtgcaaggtgcccgtcccgagttgctagccgtactcctagtcctccaagctcatccgtcggccgtcggcgcaagcagccacgcacggc

SEQ ID NO: 86715 - DNA, 512 bp, Zea mays
  unsure (1)..(512): unsure at all n locations
nagggaagtgagagcctctgataagcggggagggggaggtaatgttaaaccgcgtccggaattcccgggtcgacccacgcgtccggctcttcgctaccaccgtgccactccagcatgggggcggcctgtacgagttctccgggctcaggagctccgcgtcgctgcccatgcgccggaatgccacctccgacgacttcatgtccggcgtctgcttcaggacccacgcggtcggcacgagcggcgggccgcggcgggcgccgacggaggcgaagctgaaggtggccatcaatgggttcggccgcatcgggcgcaacttcctgcggtgctggcacgggcgcggcgacgcctcgcccctcgacgtcatcgtcatcaacgacaccggaggcgtcaagcaggcgttccaccttgctaagtacgactgcacgctcggcatcttcgatgccgacgtcaagcccgtcggcgacaacgccatctgcgtcgacggcaagtcatcaaagtcgtgttcgaccgcc

SEQ ID NO: 86716 - DNA, 505 bp, Zea mays
  unsure (1)..(505): unsure at all n locations
naggaagggagtgggttgatcacgacacgaaagtatctgcatctctttcggaattcccgggtcgacccacgcgtccggctcttcgctaccaccgtgccactccatcaaggtggcggcctgtacgagttctccgggctcaggagctccgcgtcgctgcccatgcgccggaatgccacctccgacgacttcatgtccgccgtctccttcaggacccacgctgtcggcacgagcggcgggccgcggcgggcgccgacggaggcgaagctgaaggtggccatcaatgggttcggccgcatcgggcgcaacttcctgcggtgctggcacgggcgcggcgacgcctcgcccctcgacgtcatcgacatcaacgacaccggaggcgtcaagcaggcgtaccacctgctcaagtacgactgcacgctcggcatcttcgatgccgacgtcaagcccgtcggcgacaacgccatctgcgtcgacggcaaggtcatcaaggtcgtgtccgaccgca

SEQ ID NO: 86717 - DNA, 498 bp, Zea mays
tgtagagggtcgataagagaagaaagtactctcaaccgctccggaattcccgggtcgacccacgcgtccgcacagctgtgaaggtggttgatattgttgacacattccgtctacaggagcaacctccttttgacaagaaatcatttgtgtcttacatcaaaaaatacatcaagaatctcactgctgtgttggagccagagaaagcggatgagttcaaaaagggtgtcgagggtgcaaccaagtttctccttagcaagctgaaggacctccaattttttgttggtgagtccatgaaggatgatgcgtctgtggtattcgcctattacaaggatggtgccactaatccgacattcctctatttctctcatggtcttaaggagatcaagtgctaggcgtgcggcgaaattagttacccatgttgggtactatctatgtactattattatatccaaaactatagttgtcctggctgaattgaactcaaaagggtttgtttga

SEQ ID NO: 86718 - DNA, 520 bp, Zea mays
aggggagtatctgataaaagcatgaacagtatgctctaccggttcggaattcccgggtcgacccacgcgtccggttgactaagacagatgagcttgtttttgttctagcagcaacaaatttaccatgggaattggatgcagcaatgctgcgtcggctggagaagcgtattcttgttccattgccagagccggatgctagacatgctatgtttgaagagctcctgccatatacacctggcacaatggagattccctatgatgttcttgtggagaaaactgaagggtattctggctctgatattcgcctggtatgcaaggaagcagcaatgcagcccctaagacgggtaatggcagttcttgaaggcaggaaagaagaggtccctgagggtgagttgcctgaagttggcccagtaactacagaagatattgaacttgctttgaggaatacaagaccgtctgcacatcttcatgcacatagatacgaaaagttcaaccaagattatggcagtcatgtacatgg

SEQ ID NO: 86719 - DNA, 521 bp, Zea mays
agaggatgtactggtttcttcgaacagcagtacgctactaccggttcggattaccggctcgacccacgcgtccgaccgaatctagcccgcacgacacgacatttagttgaggagctcgagagggcaccaatagtgggcggcgtgaactccagcgtcgtcgggctcaagcccgccggggcagtgccgcaggccgccgccgcctcatcgtcggcgaagcgggtgcagctggccgcgcccgagggccgtcgcgccgctctgctcggcctggcggccgtcttcgccgtcacggtcaccaccgggtcggccaaggccacgatcttcgatgagtacctcgagaagagcaaggccaacaaggagctgaacgacaagaagaggctggccaccagtggagccaactttgcgcgcgcctacaccgtggagttcggcagctgccagttcccctacaacttcactgggtgccaggacctcgccaagcagaagatagtccccttcatcagcgacgacctcgagattgagtgcga

SEQ ID NO: 86720 - DNA, 521 bp, Zea mays
  unsure (1)..(521): unsure at all n locations
gagaggctgtggttcggtaacggtnctcacgnctatancagtttcgggtcggaattcccggctcgacccacgcgtgcgtgatcacttcattgattcagtttttatttagctagctgaatcacaatggatcctgccgggttccgtccgtccagtagccacgacacgacggtgacgacgacgaacgctggcgctcctgtgtggaacgacaacgaggcgctgactgtggggcctcgcggtcccatcctgctggaggactaccacctgatcgagaaggtggcgcacttcgcgcgggagcgcatcccggagcgcgtggtgcacgcgcgcggggcctacgccaagggcttcttcgagtgcacccacgacgtgacgtcgctgacgtgcgccgacttcctgcgcgcgcacggcgtgcggacgcccgtgatcgtgcgcttctcgacggtgatccacgagcggcggttcccggagacgattcgtgacccgcgcgggtttgccgtgaagattctcaccctctagggccactg

SEQ ID NO: 86721 - DNA, 529 bp, Zea mays
  unsure (1)..(529): unsure at all n locations
nggggtgagtaggttgtgtaacgacgaggggggtaacagtaatgctcgtaccggtccggaattcccgggtcgacccacgcgtccgagatgaggagggctggaccggagaagagtttgacagtcacgttgtgaaggagcgtgagggaaagcggcctattttaactggtgatctacaagtcacactaaaagaaggtgtgggaacaattggggagcttacattcacagataactctagctggataaggagtaggaaattcagacttggcttgaagattgcctcaggattttgtgagggtgttcgcattcgtgaggcaaaaacagaagcctttatggttaaggaccatagaggagaattgtacaagaagcactatccacctacactgaaagatgaggtctggaggttggaaaaaatagggaaggacgggtcattccataagaggctgaacaaatctggaatatctacagttgaggatttccttaggcttgtggttcgggatccacaganattacgcagtatacttggaagtgg

SEQ ID NO: 86722 - DNA, 516 bp, Zea mays
gggaggctgtgtacagacaagcaagtatagtatgctcgtaccggtccggattcccgggcgcgtgcgaaccaagcagaccacagcaagaagcgtagtcgtcgccggaaggaaaggcgcggagcaagatgtcgtggcaggcgtacgtcgatgagcacctgatgtgcgagatcgatggacaacatctcagcgccgacgccatcgtcggtcacgacggctgcgcttgggcgcattccgagagcttccccgagttaaagcctgaggaggttgctggtatcataaaggactttgatgaacctggtactcttgcaccaactggtcttttcgttggacgtacaaagtacatggtgatccaaggtgaacctggagttgtcatccgatgaaagaagggcactgggggcattactatcaagaaaaccggcatgtccttgattattggtgtctacgactagccaatgactccagggcattgcaccatggtggtggagaggctcggcgattacctgatcgatcagggct

SEQ ID NO: 86723 - DNA, 523 bp, Zea mays
ggtaaagtgatctggttctttaagcccccacatcgctattacgttccggttcggaattcccggccgcgtgcgaacgaagcagaccacaacaagaagcgtagtctacttcggaaggaaaggcgcggagcaagatgtcggggcaagcgtacgtatgatgagcacctgatgtgcgagatcgatggacaacatctcagcgccgacggcatagtttgtcacgacagcagcgcttgggcgcattccgagagcttactcgagttaaagcctgaagaggttgctggtatcataaaggactttgatgaacctggtactcttgcaccaactggtctttgcgttggacgtacacagtacatggtgatccaaagagaacctggagttctcatccgatgaaagatgggcactggaggcattactatcaggaaaaccgttatgtcctagattattggtgtctacgactagccaatgactgcatggcaatgcaccatggttgtggaaaggctcggcaatacctgatcgagcagagttt

SEQ ID NO: 86724 - DNA, 501 bp, Zea mays
  unsure (1)..(501): unsure at all n locations
agataggaggggtctgatcaagagggggggggagatggtatcctctccggaattcccgggtcgacccacgcgtccgggaacttaaaagaagctntggaggtcaagctgctaatctagtgaagtctgctggaaactctgctgcgactcttattgaactgattactcgacattttcctggtttccgggaccattcactctacaaggggcaccacgttttcctgtacaagagagcccagatctttgttgctgatttgtggggcgccttcaagggacaaaactatggcgagttccacgatatcaattccatcaccatatttgctgactacattgttccagcggtcctgagggagcttggagtacttaaatatggctcgaatctatcttgctccatcgactcgaacagtgagatagtgcctggaagcgacgaggaagtggagatacgcgcgtgctccatctatgcagtggagaagatgacggacctgatcagcangaagtttgaaa

SEQ ID NO: 86725 - DNA, 512 bp, Zea mays
  unsure (1)..(512): unsure at all n locations
ngagggttagagagtctctgaatcaagaagaggggggggaaaacagtaatcctctccggaattcccgggtcgacccacgcgtccgtgaacacttgattgattcagtaggtagctagctagctgaatcacaatggatcctaccgagttccgtccgtccagtagccacgacacgacggtgacgacgacgaacgctggcgctcctgtgtggaacgacaacgaggcgctgactgtggggcctcgcggtcccatcctgctggaggactaccacctgatcgagaaggtggcgcacttcgcgcgggagcgcatcccggagcgcgtggtgcacgcgcgcggtgcctacgccaagggcttcttcgagtgcacccacgacgtgacgtcgctgacgtgcgccgactatctgcgcgcgctctgcgtgcggacgcccgtgatcgtgcgcttctcgacggtgatccacgagcaggggtccccggagacgatccgcgacccgcgcgggtttgccgtgaagttctacc

SEQ ID NO: 86726 - DNA, 521 bp, Zea mays
ggggtgagtttttgtaccagcagtacagtatgctctaccggtccggaattcccgggtcgacccacgcgtccggggtgagaggacccggacccgcgacaacaacctgcttgggaagttcgagctctccggcatcccaccggctcctcgtggtgtcccccagatcacggtctgcttcgacatcgacgccaacggcatcctgaacgtgtctgccgaggacaagacgacggggcagaagaacaagatcacaatcaccaacgacaagggccgtctgtccaaggaggagatcgagaagatggtgcaggacgcggagaagtacaagtcggaggacgaggagcacaagaagaaggtggagtccaagaactcgctggagaactacgcctacaacatgcgcaacacgatcaaggacgagaagatcgcgtcgaagctggctgccgacgacaagaagaagatcgaggacgccatcgacgcggccatcagctggctggacgccaaccagctcgccgaggcggacgagttcgatg

SEQ ID NO: 86727 - DNA, 529 bp, Zea mays
  unsure (1)..(529): unsure at all n locations
aggttgagtgnnttnnnnttacgtacntgtactgtcactgctaaactcgtaccggttcggaattcccgggtcgacccacgcgtgcgcctgctttcccttcagcctcccttcctttccggtgtacgtctccgccgagatggccgccccgctccggcggagcctcccctcccttggtcgcgcgcttctcacgccggcgccggcgcggatgctctccgcggaggcctctgatgccctcgttgagatcaagcccggggagatcgggatggtctccggcatccctgaggagcatctccgccgtaaggttctaatttattcaccagctaggactgcatcccagcaaggttcaggcaaagtcgggaggtggaaaattaattttttgtcaacccaaaagtgggagaacccgttgatgggatggacatctactggggatccatatgctaatgtcggtgaagcaggacttacgtttgacagtgcagagtcagcaaaggcgtttgccgaaaaacatggatggaattatgtggttcggaaa

SEQ ID NO: 86728 - DNA, 528 bp, Zea mays
  unsure (1)..(528): unsure at all n locations
ggtaaagtgtgtcntgttacagacacccgccattatatgtatnactcgtaccggtctcggaattcccgggtcgacccacgcgtccgcttcaacgagggcgacccgtccacggcgcccacgctcacgctcaccggccggaagaaggaggccgacaagctgcagaccgccgacggctgggccaagttcaccggagggttcttcttcggtggtatctccggcgtgctctgggcatacttcctcctctacgtgctcgacctcccctactacttcaagtagaatacaaattcataaagatgcatatatataatatagctccgcctccgatcctcctctctgcgtgcaaaggtatgccatttcagcagtgacgagcatcgtggatacatgcaattcctctgcacatggatggatggggatgtaacttggaactgttaattttttttacttggatttggatgccataaaaaaaaaatgggcggccgttctagaggttccaagcttacgtacgcgtccatgcgacgtcattacttt

SEQ ID NO: 86729 - DNA, 529 bp, Zea mays
  unsure (1)..(529): unsure at all n locations
ngttttagtgcttgntactcacgtacaccgcacatgatagcatcgctcgtaccgttccgnattcccgggtcgacccacgcgtccgcgctcgaagctcctcccgaaccggccgtatcgccgccatggcagccgccgctcctgcaggctccgtgaaggaagtgctgccgtctcccctgacctccgcctccgagccccctccccttttcgatggcaccaccaggttgtacgtggcctatctttgcccgttcgcgcagcgcgcttggattgctagaaactacaagggtctgcaggacaagattaagatagttgccatcgatctcgctgacaggccagcgtggtacaaggagaaggtttatccagaaaacaaggtgccttctctagagcacgacaaccaggtgaaaggagagagcttggatttggttaagtacattgacagcaacttcgaaggtccatcgttgctccccgaggatcatgcaaaggcacagttcattgaggagctgctcggataccctgacgcattcaacatagc

SEQ ID NO: 86730 - DNA, 525 bp, Zea mays
  unsure (1)..(525): unsure at all n locations
ggtttagtnnttnnnnttttgatttcgatgcatagtcannncccnnnnntttnnnnnnnnnnnnnnnnnnnangttcgcctggaacaacgtgttcctcgtcccgagaagagtcgaggaaaaatctcgcattcgcaaaccaagcaaatggaggcatgagctccgccgcctncccgtctctcgccgatctcccccaaaccctagcctcgacctgaccgccagcgggcccgcaggccggagaaggagtcggaatcgcccccacccacccaccctctgccgcgggcggggagcgggcggcggacgagatgccgtcgcacggggatctggaccggcagatcgcgcagctgcgcgactgcaagtacctgcccgaggcggaggtcaaggtgctctgcgagcaggccaaggccatcctcatggaagaatggaacgtgcagcccgtgccgctgcccgtcaccgtctgcggcgacatccacggccagttctatgacctcatcgagctcttccgcatcggcggcgaactctcccga

SEQ ID NO: 86731 - DNA, 504 bp, Zea mays
agttttatgtgtttctaattctacctccagcataatagtattgctttaggaattcccgggagaattctcaattcatgagtcgtacggagggacttatgtcacttcatacagaaactaaagcaagtgttggatggaaagctggtgtcaaggattataaattgacttactacaccccggagtacgaaaccaaggatactgatatcttggcagcattccgagtaactcctcagctcggggttccgcctgaagaagcaggatctgcagtagctgcggaatcttctactggtacatggacaactgtttggactgatggacttaccagtcttgatcgttacataggacgatgctatcacatcgagcccgttcctggggacccagatcaatatatctgatatgtagcttatccattatacctatttgaagagggttctgttactaacatgtttacatccattgtggggtacgtattttgtttcaaagcctttctcatctcaagttttgttt

SEQ ID NO: 86732 - DNA, 501 bp, Zea mays
  unsure (1)..(501): unsure at all n locations
naggttagagttttatgataacgcacgatagtattgtcaactcgtccggaattcccgggtcgacccacgcgtccgtaagaatcctaactacaaaggaaaatggaagaccccagggtttgtcaatccaaaattggaggttgacccagacctatatgttctgaaacctttgcagtatgtggngattgaagtatggcaggtcaaagctggttcagttnttgacaacattttgatttgcgatgacccagactatgcaagacatgttgtagatgaaacttttgctgcaaataaggaggctgaaaaggaggcctttgaaggagctgaaagaaagaggaaggctagagaagaagaggttaattaacatggaatcttactctctttctgctctggtcgctgttgcctgttaacaattctgaaactgtgaatgtgagccttggaggagttaacaggacgttgcttttccacaggaagcacgganggcactggaggaatgtgagagacgat

SEQ ID NO: 86733 - DNA, 541 bp, Zea mays
  unsure (1)..(541): unsure at all n locations
agtagtttccntaaggtttgattaagaactacccgcaagtagggtattctcgaattcccgggtcgacccacgcgtccggaaaagcatggatgccgaagccgccgccgtcgtcgagggccaggtgcggcactggaccgcggacgtcaacggcatttccctccacgtcgcagagcgcggcgccgtcgacgcgccggcggtcctcctcattcacggcttcccggagctctggctctcgtggcgccaccagatggccgcgctcgccgtccgcggcttccgcgcgctggcccccgacctccgtggctacggcgactcgtccgtgcccaccgaccccgccgactactccatcctccacatcgtcggcgacttggtcgcgctccttgaccacctccaactcacaaaggtgttcgtggttgggcacgactggggcgcgatggtggcgtggcacctctgcctgttccggccggaccgggtgcgcgccgntgttgtnctgggggatccctacttcccccgcggcctcgcccgatgacggactaatttgcca

SEQ ID NO: 86734 - DNA, 532 bp, Zea mays
aggaagtagtggtctgatacagaagacggaaggaactcgtcaccgctccggaattcccgggtcgacccacgcgtccggcgatccattccacacaaccaccactgctcttgccccagcccgccgcaggagttgccagatctggtccggtcacaggagctccgactccgagccctctccaatggcggttaaggtctacgtcgtgtactattccatgtatggacatgttggcaaactagctgaagagatccagaaaggtgcctcgtctgttgaaggtgttgaagctaaaacatggcaggtccctgaaaccctccctgaggaagtgcttggaaagatgggcgcaccccctaagcctgacgtgccagtcatcacgccgcaagaactcgcaaaagccggcggaatcctcttcgggttcccaacgaggttccgaatgatggcagcgcaaatgaaagcgttcttcgattccactggtgggctctgggaggagcaaatccttgccggcaagcctggcggcgtcttcttcttgactggatcc

SEQ ID NO: 86735 - DNA, 545 bp, Zea mays
  unsure (1)..(545): unsure at all n locations
gtaggtgccgtgagagtctacttcattntacccgcactaatagtactcttctccggtcctgaattcccgggtcgagccacgcgtccggcttcggggaggagcacctgtgcttccagactctgcagcgcttcacggccgccacgctggagcgcggcatgcacccgccggtctctcccaagcccgagtggcgcaagctcatggacgagatggcggtcgtggccacggaggagtaccgctcggtcgtcgtcaaggagccgcgcttcgtcgagtacttcagatcggctacaccggaaaccgagtacggaaggatgaacatcggnaagccggcacgccaaaaagaaggcccggcggcgggtatccaaccttgggcgcataccctggaattttctcgtgcactcaaaccaggttccaccttcccgtggggttggaatttgggcccccttttaagtcgccatatacacaggcctttgggaccttaagagcccatagagatatgcacaacgagggcccattttaagggacaccctgacccttcgagaaaaggt

SEQ ID NO: 86736 - DNA, 539 bp, Zea mays
agtgggctagatgttcttacgattcccgccaagatcgtagtcttcaccggtccggaattcccgggtcgacccacgcgtccgtccgtgcctcctcctcgtctcttcactccaaatccaccgaggccatcgcctgggccggggagagacccctcgcgctcgtggccctgtgagcagccgcagccatggcgcagccgctcgtcgtgaagaaagacgacgatctcgacgaggaagagtactactcgccattcctgggcatagagaagggcgccgtgctgcaggaggcccgagtcttccatgaccctcagctcgacgcgcggcgatgctgccaggttatcaccaagctcctgtacctgctcaaccagggtgatacctttaccaaggttgaggctacagaggtcttctttgcaacgaccaagctgttccagtctaaagatgcgggccttaggaggatggtgtacctcatgatcaaggaactctcaccttcagccgatgaggtcatcatagtaacaagctctttgatgaaggacatgaatagcata

SEQ ID NO: 86737 - DNA, 560 bp, Zea mays
  unsure (1)..(560): unsure at all n locations
agttagttncaccttagaagtcttatttaagttncttcaganctaggtagtagcactgcatctttcctgaactacccactcgagcgacgcgttcgaatttggacacgagcacctaagcttacacattttgcatccctttacgtccgccacgctgcagcgcggcatgcaccctgcggtctctcccaagcccaagtcgcgcacgctcatggacgagatagcgatcgcagccacggaggagtaccactccttcgacttcaaggagccgcgcttcgtcgagatacttcacatcggctacaccgcagaccgagtaccgtaagatgaacatcgacagtccgccaaccaagaacaggcccgaccgtggcatcactaccctgcacgccattctctggatcttcctcgaggactcataccaggttccaccttcccgtgtctctgcgaattcgcatccgtctctaaattcaccatctaccaagacgtcacgaactttcaagtcccttacagacatgttcaacgaaatgcccttccttcaggggcaaccctggacctgctagaaatttgat

SEQ ID NO: 86738 - DNA, 528 bp, Zea mays
aggagaggtggtctgttaagagggcgggagggcagtgtaaccgccccggaattcccgggtcgacccacgcgtccgctcccttccaattcgatgcctttgtagcgctgctgcctcgccgcgtcgtcgcgggtccccgatgtccgcttgctgctgcgcttccaacaccatggacggcgggggatccggcaatgcctccggcggcagcggcggcgcatcgacgtgctgctactacgcgctcctcggcatccgcaagaacgcctccgtcaccgacatacgcgccgcttaccggaggctcgcgatgaagtggcacccggaccggtgggccagcgaccccggcgcggccggcgaggccaatcagcggttccagcggatccaggaagcatactccgttctgtcggacaaggggaagaaagccatgtacgacgccgggctcttcgaccccctcgacgacgacgaccaggatttctccgacttcatgcatgagatgctggtgatgatggatagcgtgaaaaacgagaagccggacac

SEQ ID NO: 86739 - DNA, 518 bp, Zea mays
agtagagtggcttagttatgcacagaagtagtttatctcttttgaatttcgggtcgaccacgcgtccggtcatggctgatcccaccggctgatagagttttcggtcgtgggagtgagtcgtcagggatgtgatcgggtcctgtgtcgcggtcggtggctgaagatgtgggccgctggggcagcatgaagcagacgggggtgaccctgcggtacatgatggagttcggctcccggcccacccagcgcaacctgctcctctccgcgcagttcctgcacaaggagctccccatacgcttcgcgcgccgcgcgctcgatctcgactcgctgcccttcggcctctccaacatgcccgccatcctcaaggtccggtactgttacatggactcattccgggacattagatacttccctgaagtgaggagctggatcgactagctcgctttaacgcaaatgatcaacatggtcaaggttcggcttacaaatgtggttccaaccatggccttggaagtgcatcagct

SEQ ID NO: 86740 - DNA, 546 bp, Zea mays
  unsure (1)..(546): unsure at all n locations
agtttagtgccgtagagagtctattaagtntctatccgcaagtaaacttacttatgtacttcctgtcgacccacgcgtgccacgcttccgctcgaccgagaaaatcaaggatcttcgcacctaggagatcaagaacggacgcctggacatgctgggcatcatgctcgcttggttgcaagccgaatacaccgtctccggccccatcgacaaccttttcagccacactatcgaccctggccaacccaccattttccaggccttcacccccaaatcatgagctctgatgaacttggcagttcgaagagtgctaccacacatgcatgcattgttaagtttgatagccgatatggaactttttctttatgttagcggcagactactgggtagactgtcaacgatgatgatgaatatgatgaaatgttcgttgtgcgatgcatggtgtacttgtactatgttgcaactaatgtaaaaatgccatggtcggtagatgcctaaaaaaacaacccaatacaataaaaaaaaaggggcgggccctctataagaccg

SEQ ID NO: 86741 - DNA, 547 bp, Zea mays
  unsure (1)..(547): unsure at all n locations
agttaagtnnccctttnagagtctctaacgaactatccgccaggtatctcacggaccggaattcccgggtcgacccacgcgtgcggttggctgcttctatattaagggcagagacatttggaatacccatacctggttgggcgaaaaaggcaaagaggctagctgaagctgtggacaaggtcattgttccggatttccatccaaaagagggtgttaagatagagacagatgagaaggctactagcctatcctctgcgtctgttgatgatgctgccgtcattgaagagcttattgcaaagctgcaagcaatttctaaaacattgtcaccaggattccgtatgaaccctatacagtttgaaaaggatgatgatacccaatttcatatggacttgattgctggttttgctaacatgcgggccaggaactaccagatccttgaagttgacaggttgaaggcaaagttcatagcgggaagattcatcccggccatggccacttaaactgcaatggccaccggccttgtttgcctggagctttacaaggtccc

SEQ ID NO: 86742 - DNA, 539 bp, Zea mays
  unsure (1)..(539): unsure at all n locations
natggtgaggagagccttgtngacaacgcatcagacagtatttcgcaccgccccggaattcccgggtcgacccacgcgtccgcgctcctctccgtcgccggtggagctcatggcatcctccatggccgccgccgccaccgccaccgccctcgcgctgccgtccgggacgacgcagaggccgtctgcccagggccgcctcctcttcaccgccgcgcccgcccgctccctccgcctccgccccgccggccgccggtcggcccgctcctcgcctcgggccaccaaagctgtggtggcagcgttggctgatcctctcaagggcatgatatcaagagcttcggcgttccgcaagggcacacagtgcgagctcatcaagacccaatatcaactggcgcacatcttcgccggagatttgttgcgggccgagatcgctgctggctctgagaatgggaagcgggccaaggaattcatggagaaaggccagctcgtgcctgatgagattgtcgctaatatggtgaaagaacgccttcggcaaccagacc

SEQ ID NO: 86743 - DNA, 529 bp, Zea mays
  unsure (1)..(529): unsure at all n locations
agagaagtggtctgaacccacatgggaagtatgtgtcaccgcccctgaattcccgggtcgacccacgcgtccggcggatagagcagcgagccatcgacacgatcgcgagcgcaagcacgtacgttgtcggaagctcgggttagaagaagcaccagtgcctgatcgatggcgggcccaggctctcctttccggccgcaactgctgggcccgccccgtgcagtccggcgtctctaggtcgtccggcgacgaatgccccccttcgtcgtcagggccatcttcagccctgcagccaagcaatgtgccgacaggcagctgtgggtcgcgtccaagcagtccctcttctacctcgatggcacgctgcccggcgactatggcttcgacccgcttggtcctctcggacccggagggcaccgggggcttcatcgaacccaattggctgggctatggccaagtgatcaacngccgctacgccatgctgggccccgtgggcgccatcgnccccgagatcttcggcaagatgggcctcatc

SEQ ID NO: 86744 - DNA, 538 bp, Zea mays
  unsure (1)..(538): unsure at all n locations
ngaggtnagaagagatgtgtgacagcaggcggggggggtaatagtatccctcccggaattcccgggtcgacccacgcgtccgccggaccgacgagcgacgaagcgcgcagaaagagaagaacctcggagctgagatggcacaagcgatggcgtcgatgaccggcctctcgcagggcgtcctgcccagcaggcgcgccgacagcagaaccaggacggccgtcgtcatcgtcagggcgttcgcggagggcgacgccgttgcgcatgcgggccgtcgcgccgtgatcgggctggtggccactggcatcgtccgccgcgccttgtcgcatgcggtgcgcgccgagaccgtcaagaccatcaagattggagccccgacggcggccctcggtggaactcccgggactcttaactcttaccaagcgagggactttgaactccccttgaaagagcggttctacctggagccgctttcgccggcggatgctgcggccaaggtgaagacgtcggcgcaagacattatgaaccttaagccggtcatcgc

SEQ ID NO: 86745 - DNA, 530 bp, Zea mays
  unsure (1)..(530): unsure at all n locations
agttagagtgatctgatacaagacatgggaaggaattagtaaccngccccggaattcccgggtcgacccacgcgtccgcaccaacctcaggacatcgaggagaagaggagtggccaatggcttcgtcggtggccgacgcggcgagcacattcctgggcacccgtctggcggacccggtgccagagaacgggcgcatcgtggcccggttcgggttcggcggctgaaagcccaatgctgccgtgccgaagaaggtggcgaagacgtcgatctcctctgaccggccgctgtggttacccggctccgtggcgcccgactacctcgacggctcgctggtcggcgactacgggttcgacccgttcgggctcgggaagcccgtggagtacctgcagttcgaactggactcgctggaccagaaactggccaagaacgaagccggcggcatcatcggcacccggttcgagtgcttcgacgtcaagttcaccccggttcagccctacagcgaggggtttggccttcaagggttcccgaag

SEQ ID NO: 86746 - DNA, 528 bp, Zea mays
  unsure (1)..(528): unsure at all n locations
ngaggaaagtggtctggtcaaagcatgggaagtatctgtaaccgcnccggaattcccgggtcgacccacgcgtccgagaatgcttaattcatgagttgtagggagggacttatgtcaccacaaacagaaactaaagcaagggttggatttaaagctggtgttaaggattataaattgacttactacaccccggagtacgaaaccaaggatactgatatcttggcagcattccgagtaactcctcagctcggggttccgcctgaagaagcaggagctgcagtagctgcggaatcttctactggtacatggacaactgtttggactgatggacttaccagtcttgatcgttacaaaggacgatgctatcacatcgagcccgttcctggggacccagatcaatatatctgctatgtagcttatccattagacctatntgaaagggggttctgttactaacatgtttactttcaatgtggggtaagtaattgggtttcaaagccttacgcgctctacgtttggaggatctac

SEQ ID NO: 86747 - DNA, 532 bp, Zea mays
  unsure (1)..(532): unsure at all n locations
agtnaatatgtgctctgataaagggggagggaggggaattggtaactgcctccggaattcccgggtcgacccacgcgtccgccaggcatggaaagtacatggcatgctgtttgatgtaccgtggcgacgttgttccaaaagatgtgaatgctgctgtccattcaatcaagaccaagatagcagtgcagtttgttgattggtgccctactggtttcaagtgtgggataaactacctaccaccaactgtagtccctgaaggggacctggtcaaggtgcatcgagcagtctgcatgatcagcaacatcacagtcgtggctgacgtcttctatcgtattgaccgcaagtctgatctcatgtatgccaaacgtgcattcgttcattgacatgtcagtgaatggatgtgaagaaggggagttctcagaggcatcggaggatcatgcatcactggagaacgattatgaggaagtcggacctgaagttgaagatgaggacgagtgaactgattattgagtcatcgatctggatgcatggt

SEQ ID NO: 86748 - DNA, 544 bp, Zea mays
  unsure (1)..(544): unsure at all n locations
cgtatgatgccttgagatctattttcttttacacgccaagtatagtactgactcaccgttcttgaactaccgactcgagccacgcgtcctctcatgccatgttccaccttcctttgtggctttaagtcggcgccgactttaagttggccatcgagaatgacgtcaagaacttccaggtcctcaaagagatgtacaacgagtggccattcttcaaggtcaccctggacctgctcgagatggttctcgccaaaggagaccccgacattgccggcttgtatgacgagctgcttgttgcggaagaactcaagcnctttgggaagcagctcagggacanatacgttgagacacagcagcttcttcttcagaacgcttggcacaaagatattcttgaaagccatccattcctgaagcaagggcttgtgcttcgcaaaccctacattaccaccctgaacgtgtttcaggcctacacgcctaaccggttaagggacccccactttcagggtgacgccccaacccgccttttccaaggaatttcgctaccaaa

SEQ ID NO: 86749 - DNA, 544 bp, Zea mays
  unsure (1)..(544): unsure at all n locations
tagtagttctcagaggtgtgttcacgcttagccgcacagagggtactttctcgaattcccgggtcgacccacgcgtccgcggacgcgtggggttggcttctcctccccctccggttcgggttcgggttcgtgaggttctccggggttcggggtcgtgggtgggcggatcgagatggcggcgtcggatgttgagtaccgctgcttcgtcggcggcctcgcctgggccacggacgaccactccctccacaacgccttcagcacctacggcgaggtcctcgagtccaagatcatcctcgatcgggagacgcagaggtcccgcggcttcagcttcgtcacctttctccacggaggaagcgatgcggaacgccatcgaaggcatgaacggcaaggaacttgacggccgcaacatcaccggtaacgaagcccaatcccgccgcggccgttgaagccgccgcngcggctacggtggtggccgttgaggccgccgctacggcggtggccggcgccctgattgccgccgccgctacggccgtggccgcggccg

SEQ ID NO: 86750 - DNA, 540 bp, Zea mays
  unsure (1)..(540): unsure at all n locations
agtnaaagggcntnagagtcttcccagcaccacagccactcactgtatgacctaccggtcttgaattcccgggtcgagccacgcgtccgctcagagcaggttccaccttcccgtgtggctttgagtcggcgccgcctttaagttggccatctgcaacgacgtcaggaacttccaggtcctcaaagagatgtacaacgagtggccattcttcagggtcaccctggacctgctggagatggttttcgccaagggagaccccggcattgccggcttgtatgacgagctgcttgtggcggaagaactcaagccctttgggaagcagctaagggccaaatacgtggaaccacagcagcttctcctccaaatccttggccccaaggttattctggaaggcgatccattcttgaaccagggcttgttcctggcaaccccttacttaacaaccttgaccgtgttccaggcttaacgcctgaaccgattaaggaccccaactttcaagggaccgcccaaccggcgtttcccaagggattcgccaacaaa

SEQ ID NO: 86751 - DNA, 542 bp, Zea mays
  unsure (1)..(542): unsure at all n locations
ngagggtnnaagacgtagtttctgaatacaacgacatcgggaaggtatgtcgtaactgctcccggaattcccgggtcgacccacgcgtccgcatattcattaacttaagcatactccttttttttatttaatgagttgatattaattaaatatcgttttggttagatttttgcaaaggtttcatttacgcctaatccatatcgagtagaccctgtcgttgtgagaattcttaattcatgagttgtagggagggacttatgtcaccacaaacagaaactaaagcaagtgttggatttaaagctggtgttaaggattataaattgacttactacaccccggagtacgaaaccaaggatactgatatcttggcagcattccgagtaactcctcagctcggggttccgcctgaagaagcaggagctgcagtagctgcggaatcttctactggtacatggacaactgtttggactgatggacttaccagtcttgatcgttacaaaggacgatgctatcacatcgagcccgttcctgggacccatata

SEQ ID NO: 86752 - DNA, 529 bp, Zea mays
aggggaaagtaggttgttacggggagggggggggaaatagtatcactcccggaattcccgggtcgacccacgcgtccgcttaccaaaacagaggagcccgtcggccgtcgcaaaaaaaaaaaaaaaaacaaaacaagaccagcgcacgatggaatcgctgacgcttcgcgcttcgacggccgcctcgccgctgcagcgacgccggctgctccccggacggcagcgcgcgacgtacgtccgcgccacggcctccgccggcgagccggacctctccgtgcgcgtgaacgggctgcagatgcccaacccgttcgtgatcgggtcggggccaccgggcaccaactacaccgtcatgaagcgcgccttcgacgagggctggggcgccgtcatcgccaagactgtgtcattggatgctgaaaaagttatcaacgttactcctcgttatgcaaagcttcgggcagaaccaaatggggctgccatggggcgcatcattggctggcagaacattgaactcatcagggacaggcctctt

SEQ ID NO: 86753 - DNA, 546 bp, Zea mays
  unsure (1)..(546): unsure at all n locations
aggagcctaggttgtttcagttnttccgcctgatttagtagccatgctccggcctggaactgccgggtcgacccacgcgtgcggccgaggaagaggagaagcgaatcaagcaggcttcgacaacaaggccgacgctgactgccaatgcaaacgtggaactagagcaagatgggcggctaactgctgcttgcgctcctcctcgtctctgctgctgccgtccctcaggtactcggagttggcaatggagacaatcacatgagaatcatccacgaggacatcattgagacagtcaacaaccataccaatgctgggtggacagcctcacgtaatccttacttttcaaactataccattgcgcaattaaagcacatacttggagggaaaccaccaccacagaatgcactaagcattgttcctgtcaaaacttattcaggatcactgggaacttccaaaagagtttgacgcttgatctgaattggcccgttgccacacaaatgggaacatacctgatcaaggtcactggtggctcctgttgggctttaggcg

SEQ ID NO: 86754 - DNA, 565 bp, Zea mays
agttttagagcgcagttagagagtctgattaacgacactagcagctaggtagtgtacggactcgaattcccgggtcgacccacgcgtccgtataacttgaaacagaaggctatgaccagatagactctgtcactactggagcatctgtactaggggagggagttgttgcaagcagccaaggcggtaagcaaaaagtggagttgaaggtttcaaagatcactgtgattggtaagagtgaccccacatcttttcctatacagaagaaacgggcatcaagagagttccttagaactgtagcccatctccgtcctcggacaaacacttttggtgcagtggcaagagtgagaaatgctctggcatacgcaactcataaattctttcaagacaatggaattgtttggttttaaagccaaattattactggcctcagatttgtgaaggaacctggggaggcagttttacgttacttactttgctttcaaatagcaccggaaggtgggttccctacttcaaagatatttcctgcgacccaaaggattggaaggttttgattggtcaccaggat

SEQ ID NO: 86755 - DNA, 535 bp, Zea mays
  unsure (1)..(535): unsure at all n locations
nagaagcctaggttgatcacgcataccgcaaagaagtatgctccgaattcccgggtcgagccacgcgtccggtcgttgtgagaattcttaattcatgagttgtagggagggacttatgtcaccacaaacagaaagtaaagcgggtgttggatttaaagctggtgttaaggattataaattgacttactacaccccggagtacgaaaccaaggatactgatatcttggcagcattccgagtaactcctcagctcggggttccgcctgaagaagcaggagctgcagtagctgcggaatcttctactggtacatggacaactgtttggactgatggacttaccagtcttgatcgttacaaaggacaatgctttaacatcaacccggttcttgggaaccaaaatcatttttctggtatggaacttaatcatttgaactatttgaaaaaggttctggtactaacatggttaccttcattgggggtaaccggtttgggttcaaaagcttaaccgctctaagtttgaaggatctacgatttc

SEQ ID NO: 86756 - DNA, 541 bp, Zea mays
  unsure (1)..(541): unsure at all n locations
agttaagcncttagagtctcccacgatctaccgacaataacgtactgctcaccggtccggaattcccgggtcgacccacgcgtccggcccagcaaaccactcccacccggtggctcgtcctcggacgccaagccactccgcgccccaatggggaagcgccgccgccgccgatcgaccggccgtcgacccatgctgcgctcggcgctcttccgctcagcccccgggctccgacggtctccggcgacggcccacttatccaccgacgacggcgccgtcgcagcgtggctcttcaacggccctgcctacgccccgtctagggtgcgcctcctcatcggcggggagttcgtcgagtcgcgcgccgacgagcacgtcgacgtcaccaaccccgcgacgcaggaggtggtgtcccggatcccgatcaccacggccgatgagttcaaagctgccgtccatgccgccaggacggccttccccggctggcggaacacgcccgtcacgacgcggcaacccgtcatgttcaagttccatgagctcatccggc

SEQ ID NO: 86757 - DNA, 541 bp, Zea mays
aggtatgctaggttgatcacgccattccgccaagagaggtatggtccgaattcccgggtcgacccacgcgtccgatcgaccttcaagtctcgctacgtagcagtgcaataaaaaaagcagccgcaatggcgagcagcggcatggcgctctcctccacggccttcgccggcaaggccgtgaacgtgccgtcgtcgtccgccttcggcgaggcccgcgtgacgatgcgcaagacggcggcgaaggccaagccagcggcggcgtccgggagcccgtggtacggccccgaccgcgtgctgtacctgggcccactgtccggcgagccaccgagctacctgacgggcgagttccccggcgactactgctggaacaccgcgggcttgtcggcgaacccgaaaccttcggcaaggaccgggaacttgaagtgatccaactccggttggccatgcctggcccccctgggtgcggttttcccgaacttcgttgcccgaaccgcgttaaggtccgccaggccctgttgttcaaggccggcttccaaatcttt

SEQ ID NO: 86758 - DNA, 531 bp, Zea mays
  unsure (1)..(531): unsure at all n locations
aggtagagagtaggtagtgtaccagcatcttagaactatcagtatcactcccggaattcccgggtcgacccacgcgtccgctcgccgtactccctcacagaacccagtaaaatattgccagtcccgccgtcgagatggccccaggccgcctgctcgtcctcgccgtcgtcgccctcgcggccaccgccgtcgcggccaactccggcttcgcggactcgaacccgatccgccccgtcaccgaccgcgcggcctncgcgctcgagtccacggtcttcgccgcgctcggccgcacccgcgacgcgctccgcttcgcacgcttcgctgtgaggtacggcaagagctacgagagcgcggcggaggtccacaagcggttcaggatcttctccgagagtctccagctcgtccgctccaccaatcggaaaggcctctcctaccgcctcggcatcaaccgcttcgcggacatgagctgggaggagttccgtgcgacccgggctcgcgcagcccataactgctncgncacgcttaccggca

SEQ ID NO: 86759 - DNA, 546 bp, Zea mays
  unsure (1)..(546): unsure at all n locations
aggttgagggncnttagagtcttagtttcgttctaccgacatgcatcgcacggtccggaattcccgggtcgacccacgcgtccgtggagatgcagagtggtgatgagtggtcccaagttgcatatgtcactttcaaagatgcacaaggggcataagcagcacttcttctttcgggtgccacaatagttgatctttctgtcatcattgcacctgctccagagtatcagccacctcctactgcctctgctccaccaatgagtggaaccagagttccagttggtggtggagacaacaacgttgttcacaaagccgaggacgttgtgagcactatgcttgccaagggtttcgtgctaggcaaagacgcggttggcaaggccaaagcattcgatgagaaccatggcttcacatccacagccggtgctacagtggcctcaattgccaagaaaattggcctgcctgttaaaatcacaacaggcacttccttggttaccggaagggtaaaggaaatggaccaaaagttccaggtttccaacaggaccaattttc

SEQ ID NO: 86760 - DNA, 542 bp, Zea mays
  unsure (1)..(542): unsure at all n locations
agttgaggccgtagagtctgttcacganctaccgcaagtatagtactgctcaccggtccggaattcccgggtcgacccacgcgtccgccgggtgatactaggccatgtaagggacaagctgtacaacacacgcgagcgtgctcgccatctgggggcttctggagtttctgaaatttcagcggaatcgtcatttaccagtatcgaagagttccttgagccacttgagctgtgctacaaatcactgtgtgactgcggcgacaaggccatcgcggacgggagcctcctggacctcctgcgccaggtgttcacgttcgggctctccctggtgaagctggacatccggcaggagtcggagcggcacaccgacgtgatcgacgccatcaccacgcacctcggcatcgggtcgtaccgcgagtggcccgaggacaagaggcaggagtggctgctgtcggagctgcaaggcaagcgcccgttgttgcccccggaccttccccagaccgacaagatcgccgacgtaatcggcccgttcaacgtccttgggg

SEQ ID NO: 86761 - DNA, 533 bp, Zea mays
atgagagcagtgtgtctgattatagcatccgaaagtactactcaccgctcctgaattcccgggagaaaagcagttcttcagctaggcaggagggcacaggaaggaggagatggcgtcaaagaggattcagaaggagctcaaggatctgcagaaggaccctcccacctcgtgcagtgcaggtcctgttggtgaagacatgttccactggcaggcaacaataatgggtccatctgatagcccatattctggtggagttttcctagtcacaatccattttcctcctgattatcctttcaaaccaccaaaggtggcatttcgtactaaggtgttccatccaaacatcaacagcaacgggagcatttggcttcacatcttgaaaggacaatggaatcccgcactaaccattttcaaagggcttgttgccatttggtcccttgttacttgtcccaaacccgaacaaccttttggtccccaaaatacttaacatgtccaaaacggaccggaccaagtccgagaacaccgcgaggacctga

SEQ ID NO: 86762 - DNA, 537 bp, Zea mays
  unsure (1)..(537): unsure at all n locations
agtnaggtgagtagggtttttgttcacggcgacggggggggaaaacagtatgcgctcccggaattcccgggtcgacccacgcgtccgggtggttcgaggttccgggcttcaacatgatgcactcgctgaacgcgtgggaggaggccgacggcgaggagctggtgctggtggcgcctaacgtcctgtccgtggagcacgcgctggagcgcatggagctcgtgcactcctgcgtcgagaaggtgcgcatgaacctgcgcacgggcgccgtgtcacgaaccccgctctcggcgggtaacctcgacttcggcgtgatccacccgggctaccttggccggcgcaaccggtacggatacctcggcatcggcgaccccatgccgaagatctccggagtggccaagctggacttggaccgcgccggcacgggcgactgcactggggcgcggcgcgacttcgggcccgggtgcttcgcgggggagccggtcttcgtncccgacgacgtggagggggacggcaacgaggacgacggcttcttaatgt

SEQ ID NO: 86763 - DNA, 535 bp, Zea mays
  unsure (1)..(535): unsure at all n locations
ngagggaaggaggagctgtgagtaccagaatgggccgattagctgtatccctcccggaattcccgggtcgacccacgcgtccgatttttcccggcctccgctccggccagatcggctcgggtgaaccccagcccctaccgatccggatccgtccccatcgcctcgtgtgttttccgtcgagtattttagcgtgtgtgtccccccctcttcgcttcggttggtgcgtgcggctgtctcgggtagatctgtggtttggttcgccttgaaggcgcgcggcggcggtgtcgcggcttgtagcttgcgatttcacggtggagcttgtcggctgttggggtcggatttggagtttgtcatggcgtctaagcgcatcctcaaggagctgaaggacctgcagaaagacccccccacatcatgcagtgcaagtcctgctggtgaggacatgtttcattggcaagcaacaattatgggaccacctgacagtccctatgctggtggtgttttcttagtgaacattcatttgccgccagattacccc

SEQ ID NO: 86764 - DNA, 549 bp, Zea mays
  unsure (1)..(549): unsure at all n locations
agtntagcgagagtctgattacgaatacccgacaagganagtagtttctctgaattcccgggccgaagaagaggagaagcgaagcaagcaggcttcgagaacaagactgcagggggagggggaggaccaagcgaaaggggagctagaggaagatgggcggcgcactgctgcttgcgctcctcctcgtctctgctgctgccgcccctcaggtacttggagttggcaatggagacaatcacatgagaatcatccaggaggacatcatcgagacagtcaacaaccatcccagtgctgggtggacagcctcacgtaatccttacttttcaaactataccattgcgcaatttaagcacatacttggagtgaaaccagcaccacagatggcactaaccaatgttcctgtcaaaactaattcagaatcacttgaaccttccaaaagagttggacgctagatcttgattgtccccgtggagcacaatttgggaacatacctgatcaaaggcaatggggctcttgttggccttttcgtgctttggaatgccttcaaga

SEQ ID NO: 86765 - DNA, 536 bp, Zea mays
  unsure (1)..(536): unsure at all n locations
gaggaatgagtggtctgataaagaaacggacagtactagtcaccggcccggaattcccgggtcgacccacgcgtccgcatcgatccgccattgctcaccgcacaagtgcacgctcacctcacacacgcagctaagtagctaacgccgtaggcgagaacaagaaaaggctcgacatggccgaggagaagaagcagggcctgcagctgctggacttctgggtgagcccattcgggcagcgctgccgcatcgcgctggacgagaagggcctggcctacgagtacctggagcaggacctggggaaaaagagcgagctgctcctncgcgccaacccggtgcacaagaagatccccgtgctgctgcacgacggccgtcccgtctgcgagtccctcgtcatcgtgcagtacctcgaagagggcttccccggcgggggtcccgggcctgctccccggccaacccctacgcgcgcgcccaagcccggtttttggccgaactacgtcgaacaggaactgtacgactggggcaacccggctgtggaa

SEQ ID NO: 86766 - DNA, 530 bp, Zea mays
agttgatgagagctcgctccagcctcccgaactgatcgctgtgacattccagtctgcaggtcgagccacgcgtccgcatcgagccgcgattgctcaccgcacaagttcacgcttacctcacacactcagctaagtagctgactcggtatgctataacaagaaaaggctcgacatggccgaggagaagaagcagggcctgcagctgctggacttctgggtgagcccattcgggcagcgctgccgcatcgcgctggacgagaagggcctggcctacgagtacctggagcaggacctggggaaaaagagcgagctgctcctccgcgccaaccctgtgcacaagaagatccccgtgctgctgcacgacggccgtcccgtctgcgagtccctcgtcatcgtgcaatacctcgacgaggcgttcccggcggcggcgccggcgctgctccccgccgacccctacgctcgcgcgcatgcccgcttcttggcggactacgtcgacaagaaactgtacgactgcggcaacccgtctgtga

SEQ ID NO: 86767 - DNA, 624 bp, Zea mays
  unsure (1)..(624): unsure at all n locations
tgatagatgtggagaagtgtgatagataggtgcagatatgagntcattatggncatnatatggagtcagagtgtttctgactatcgtatttaagaacattaattgaacgatctaccggnctcggaaccccgggccgacccacgcgggcggaggaaagcngcagaagcaaacaaggacaacttggcagcnncagacggcaccaacggggcaactcacggaggcnangaagaaggcanngaagagagcagcaagaacagccangaaaacggcggacaggncnacacggacggcgcgaacangaacgccaaggcggggnaaacaagcccggagagaacgggaccagaagancgacacccgaaccagcacaagacagnaggcatgccacaaggaggaggcggacccggcaggggcccaacagggggaaagaagcaanaggcaccancnagaccaacgcacccagngaagcccaccggaggcannccacgagcagagaaaacggacccggggggcaccagaaaagcagcnacagggggaaacgccnaggangcagccaaaggccgacacggagagagccaagaggggcgcacaggagcccaacagaaccaccaaaaaccgcgancggaa

SEQ ID NO: 86768 - DNA, 627 bp, Zea mays
  unsure (1)..(627): unsure at all n locations
tggtatatatgatgtatgtagnatatatatgattatatattatatnatgtagcgattntattgngagagagaagtggttatgatttactgataattaagaatacgattgnancggntctgaanncccgggtcgacccacgcgtccgccctggcgnngngagaatncnnaaancangtttngnagggagggacccangncaccacaaacagaaactaaagcaagtgttggatttaaagctggtgttaaggattataaattgacttactacaccccggagtacgaaaccaaggatactgatatcttggcagcattccgagtaactcctaagctcggggttccgcctgatgaaccaggacctgcagtacctgcggaatcttctactgggccatggacaactgtttggactgatggactttacagccttgaccgttccaaagggcaatcctttacatttaagcccgttttggggccccaattcattttctgtgaattgaaccttttcctttgaaccatttttaaagggtgcattgactaaaaatgttaactcccatggggggaaacagctttggtgtttaagcccttgacccctctgatatttgagggcctaacagattccccctgttttt

SEQ ID NO: 86769 - DNA, 556 bp, Zea mays
  unsure (1)..(556): unsure at all n locations
cggttaagcgtttgttctgtgnaagggcactacgacgtncnaccgtcctaatncccggtcgacccacgcgtccgagaagacgagtgtcaagtgaacctgaaacttgcggtgtcactggctggtatagcctgagtgtgggtgagtgatcgagctagctgagctccgatcctcgctagctagctaggataccgccttaccacatgtcttcttcacaagtttaggagtgacagcaacaagagatctcgatggcctctgccaccgtgctcaagtcctccttccttcccaagaagtccgaatggggcgccaccaggcaggccgccgcgcccaggccgcccaccgtctccatggtcgtccgcgcctncgcctacgccgatgagctcgtgaagaccgcgaaaacgatcgcgtcgccggngcggngcatcctggcgatggacgagtcgaacgcgacgtgcgggaagcggctggcgttcatcgggctggagaacacggnaggccaccggcaggcgtactgaacgctgctggtcacggnngccggncctgggccagtacaatttcc

SEQ ID NO: 86770 - DNA, 557 bp, Zea mays
gaggggaggcgcgtaggtctgagctacgcataaaagattatgatgacaccgcccctgaattcccgggtcgacccacgcgtccgcaaatccacggtttaataacgaaccgtgttaacttaccataacaacaactcaattcctatcgaggtccttgctatcgaattcctatagtaaaattcctataggatagaacgtacacagggtgtacacattatatatgaatgaaacatattcattaacttaagcatactcctttttttatttaatgagttgatattaattaaatatctttttttttagatttttgcaaaggtttcatttacgcctaatccatatcgagtagaccctgtcgttgtgagaattcttaattcatgagttgtacggagggacttatgtcaccacaaacagaaactaaagcaagtgtgggattaaaggctggggttaaggatattaaattgacttactacacccgggagtacgaaaccaaggatactgatatcttggcagcattccgagtaactcctcagctcggggttccgcctgaagaagcaggagct

SEQ ID NO: 86771 - DNA, 556 bp, Zea mays
  unsure (1)..(556): unsure at all n locations
agtaggagtggatctgacgnttgaacttcgctctagttcnattgacactgaattctcgggtcgacccacgcgtccgcagatgtgcagacgattcttatttggacagttatatcatcacaattggggttgatttcaaaatgcgcacggtggatcaagatgggaagaccataaaacttcaaatttgggatactgctgggcaagagcgcttcatgacatttattagcttctactaccgttgagctcatggaatcattattgtatatgacgtgacagaccaagaaagcttcaataatgtgaagcaatggttgaacgagatagaccgttatgcaagtgataatgttaacaagctccttgttgggaacaagagtgaccttactgccaacaaagttgtggcaactgagacagcaaaggcgtttgctgatgagatgggcattccattcatggagacgagtgccaaaacgccattaacgtggaacaagcctttatggctatggcttgattcattcaagataggatggccaagtcaaccaactcggcaaacgcttggccactaacc

SEQ ID NO: 86772 - DNA, 550 bp, Zea mays
  unsure (1)..(550): unsure at all n locations
gaggtttgccgtgtttgagctacgatatagacgtatcgatgcaccngccttgaattcccgggtcgacccacgcgtccgctccagcatctcccgtctccgtcgtctcgtctctgctcctcacctcgccgccagccatgggcaagatcaagatcggaatcaacggtttcggaaggatcggcaggctcgtggccagggtcgccctgcagagcgaggatgtcgagctcgtcgccgtcaacgaccccttcatcaccacggattacatgacctacatgttcaagtacgacaccgtgcacggccaatggaagcacagcgacatcaccctcaaggactccaagacgcttctcttcggcgagaagccggtcaccgtctttggcatcaggaaccccgaggagatccccgtgggtgaggctggtgctgagtatgtcgtggagtccaccggtgtcttcactgacaaggacaaggctgctgcacatctgaagggtgttgccaagaaggtgttatctctgccccaagcaaaaatgcaccatgtttgtggtggtgtcatgaagac

SEQ ID NO: 86773 - DNA, 614 bp, Zea mays
  unsure (1)..(614): unsure at all n locations
cggatatggatgagtatatagaatgaggtagagagtgtattatggcangtagaggggagcaggggtctgacatacgaataaccgcaaataatgcaccgatctnccggnctctgaaccccgggccgacccacgcgtgcgagctgcgctactcgcccgncgccttgggctttattaagatcggaatcaacggctcggggacggagccgcaggctcgtggccagggtcgccctccagagcgaggatgtcgagctcgtcgccgtcaacgaccccttcatcaccacggactacatgacctacatgttcaagtccgacaccgtccacggcccctggaagcacagcgcctcaccactaaaggcctccaagacccttgtcttcggagacaagccgtgcaccggctttggcaatcaggaaccctgaggaaatcccatggagtgaggctggcgctgcctatgccggggagcccaccggcgtctccactgacaaggacaaggctgctgcacaattcaaagatggtcccaagaaagaaggggtctctgccccaagcaaaaacgcacccagagatggggttgaagtcaatgaggacaaggtcacctcggaatgttaaccctgtccca

SEQ ID NO: 86774 - DNA, 562 bp, Zea mays
  unsure (1)..(562): unsure at all n locations
gagttagtgaggagctggtcgnccttcactccgcccactccgcactcgccatgaattcccgggtcgacccacgcgtccgataccgccataccacaagtcttcttcacaagtttaggagtgacagcaacaagagatctcgatgggctctggcaccgtgctcaagtcctacttccttaccaagaagtccgaatggggcgccaccaggcaggccgccgcgcttagaccgtccaccgtctccatggtcgtccgcgcctacgactacgccgatgagctctttaagaccgcgaaaacgatcgcgtcttcttggcggagcattctggcgatggacgagttttacgcgacgtgcgggaagcggctggcgtacatcgggctggagaacacggaagccaaccggcaagcgtaccgcacgctgctggtcacggtgccgggcctgggccagtacatctgcggcgccattcttttcgaggagacgctttaccattccgtcgttaactgccggaagaacgaggacatccttgtggaaccaggcatcttgcccggggataaggttgaccaaggcccg

SEQ ID NO: 86775 - DNA, 608 bp, Zea mays
  unsure (1)..(608): unsure at all n locations
gaatagtgataaggatattaatgagaatagattnatgtggtgnagatnaggtttgacagtttgttcaggatagcgggaatataggaagactcaccggtcttgaattcccgggtcgacccacgcgtccggagccatcgacacgatcgcgagcgcaagcacgtacgttgtcggaagctcaagttaggagaagcgccattgcctgatcgatggcggcccaagctctcctctgcggccggcagctgctgggccgccccgtgcagtcggccgtctctaggtcgtcggcgaggaaggcgcccttcgtcgtcagggccagctccagccctgcagccaagcaaggtgccgacaggcagctgtggttcgcgttcaaacagttcctctcctaccttgatgggacgcttgccggcgactatggcttcaacccgctgggcctgtcggacccgaaggcaaccgggggcttcatcgaccccaattggctgccctatggcaaggtgatcaacggtcggtacgccatgcttggccccggtgggcgcattggcccgggagatgcttcgccaagatgggcatcattcctcccggaaaccgtgcttgccgtggttcaagacgggctt

SEQ ID NO: 86776 - DNA, 556 bp, Zea mays
  unsure (1)..(556): unsure at all n locations
aggtnttttagacgtgagtgtgacctagtctccagtcgtatctcgtcaccgctntgaattcccgggtggcgctgcaacgatgagcttggcgttcgtgccgaagagctccacagttcgtctggttccaaagttaccaagtattacatagaattgtggaagcaaattcctgcaaacgagccctaccgggtgatactaggccatgtaagggacaagctgtacaacacacgcgagcgtgctcgccatctgctggcatctggagtttctgaaatttcagcggaatcgtcatttaccagtatcgaagagttccttgagccacttgagctgtgctacaaatcactgtgtgactgcggcgacaaggccatcgcggacgggagcctnctggacctnctgcgccaggtgttcacgttcgggctctccctggtgaagctggacatccggcaggagtcggagcggaacaccgacgtgatcgacgccttcaccacgcacttcggcattcgggtcgtaccgcaagtggtccgaggacaaaaggccggaatggctgcttgtcgaacctcca

SEQ ID NO: 86777 - DNA, 609 bp, Zea mays
  unsure (1)..(609): unsure at all n locations
tggatatggagtaagagaggaagtaggaagagaganagaatggaaggaagagggaggccggggttgatttcattcttaagatatcatcgnacggacntgaanncccgggncgacccacgcgtccgaaccgggccaacactnncacgctcaggcgctcagctctagcaanggcggccaccaccacggcgagcncctggacggcgatggccggtacccccatcaaggtgggctccttcggcgagggccgcatcaccatgcgcaagaccgtgggcaagcccaaggtggcggcgtccggcagcccctggtacggccccgaccgcgtcaagtacctcagccccttctccggcgagcccccgagctacctcaccggcgagttccccggcgactacggctgggacaccgacgggctgtcctgcgaccccgagaccttcgccaagaaccgcgagctggaagtgatccactcccggtggggcatgctcggcgcgctcggctgcgtaatcccctagctgctctcccgcaacggcgtccaggttcgcgaggccgactgggtcaaggacagctcccaagacttcaacgaaggcgggcctggactaccttggcaaccccaac

SEQ ID NO: 86778 - DNA, 600 bp, Zea mays
  unsure (1)..(600): unsure at all n locations
ggagaggataaggagagtaagaggaagagagtaagaatggangatgggaggagtaggtttgttagagagtagggggaggattgcacggcccggaattcccgggtcgacccacgcgtccggggagacgcagaggtcccgcggcttcggcttcgtcaccttctccacggaggaggcgatgcggaacgccatcgagggcatgaacggcaaggagctggacggccgcaacatcaccgtcaacgaggcccagtcccgcggcggccgtggaggcggcggcggcggctacggtggtggccgtggaggcggcggctacggcggtggcgggcgccgtgatggcggcggcggctacggcggtggcggcggcggctacggtggcggcggtggctacggtggtggtggtggcggctacggcggtggcaaccgtggcggcggctacggcaactccgacgggaactggaggaactgagcggtggggcccgcgcggccaagttatcctgttcgctaccgggatgtttaccctagtccagaaggtttatcttcggtcgtctcgttgttggtgcccatctgggtttttgattgcaaagtcgctctgtgtaanatgtt

SEQ ID NO: 86779 - DNA, 552 bp, Zea mays
  unsure (1)..(552): unsure at all n locations
agttgagtcacgagagtttgtgtatagataaaagantagaatgcacgactttcagatctcgggccaaattaacaagttcatgaacaccctgcggcagtaccagacccctttgcagcggtatatagctatgatgaaccttcaggaaacggacgagaggcttttctacaagcttttaattgataatgtggtggagctgcttccttttgtttacacaccaactgtaggtgaggcctgccagaagtatgggtccatctttggacgaccacagggtctgtatgtcagcctgaaggacaaggggaaggtcctagaagttctaaggaactggccacataggaacattcaagttatctgtgttactgatggtgaacgaatcttgggacttggagactttgggtgtcagggaatgggaaattctgtangcaaacttgctctatacactgctcttngaagagtngacccatcaggttgttggctatcacaaatgatggtggtacanataacgagaaaattgctaaatgatgaagtctaccattggactccggcaaaaacttg

SEQ ID NO: 86780 - DNA, 629 bp, Zea mays
  unsure (1)..(629): unsure at all n locations
tatagatggaggatattagtaatgatatagtgagngattaggatgtgaataaggaggcaaggcttacttctaattacagcactatattgcaagcatgcaccggncctgaatncccgggtcgacccacgcgtccgaagacgactngnnncancgagccttgaagatatcgagcttcttttgcaccacaagggcgaggatgtcttgcaactgcggatcaagctgcagctgcggctcaagctgcaagtgcggcaagaagtaccctgacctggaggagacgagcaccgtcgcgcatgccaccgtccttctcggcgtgcccccggaaaaaaaggccgcccccgaattcctccgaggccgctgccggaatccgtcgaggccgtccaacgcctgcggctgcggtaacagctttcaagtgccaaccctgctacctgttgaccacattgttcgaacaacctttgataatgataatcaactaatctaactttgtagtagatgtttgacccaatattaggcataggccaaacctgattgccatacataaggcattgtgatggttttgataaatataaatgtgatgacaaantctttaattttcgcatagactatttcggattgtatggcttaaacccttg

SEQ ID NO: 86781 - DNA, 604 bp, Zea mays
  unsure (1)..(604): unsure at all n locations
gtatattattatttgatattgttaatatatnttatttgntngatagnggtagccgtgttaatgactgaatatcgcatatactgcangacttaccggtccggaattcccgggtcgacccacgcgtccggtctcttgccgtatcagaggtctgacttcgtaggcattttccgtgctatggatggactcccggggaccatccgactcctggaccctcccctccacgagttccttccagaagggaacatcgaggacattgtaagtgaattatgtgctgagacgggagccaaccaggacgatgccctcgcgcgaattgaaaagctttcagaagtaaacccgatgcttggcttccgtgggtgcaggcttggtatatcgtaccctgaattgacagagatgctaggcccggccattgttgaagctgctatagcaatgaccaaccagggtgttcaagtgttcccagagataatgggntcttctggttggaacaccacaggacctggtgcataaggtgactttaatccgccaagttcttgaaaaagtgtacgccgtttgtgccaggccttttggttccaatgttgaaccaatgtttgaaatccctaggccggct

SEQ ID NO: 86782 - DNA, 564 bp, Zea mays
  unsure (1)..(564): unsure at all n locations
tagttggggcgtaggttttggcctagctccagtcgctatcatcgcaccgccncggaattcccgggtcgacccacgcgtccgcatcgcagcagcacgagcagcacgccgtgccgctccaaccgtctcgcttccctgcttagcttccggccgcgccatggcgtcgaccaaggcacccggccccggcgagaagcaccactccatcgacgcgcagctccgtcagctggtcccaggcaaggtctccgaggacgacaagctcatcgagtacgatgcgctgctcgtcgaccgcttcctcaacatcctccaggacctccacgggcccagccttcgcgaatttgtccaggagtgctacgaggtctcggccgactacgaaggcaaaggagacacgacgaagcttgggcgagctcggcgcccaagcttacgggggcttgggccccgncgaccccattcctcgtggcgagcttcaatnctgcacatgcttcaaccttggcaacctggccgaagaagtgcagatcgcgcaccgnncgccgaacagcaagctcaagaaaggtggtttcgccaacaagg

SEQ ID NO: 86783 - DNA, 554 bp, Zea mays
  unsure (1)..(554): unsure at all n locations
agttagttccgagagtgtgtgnccgggctcagctcacttccaccggcgctgaattcctgggtcgacccacgcgtccgcttctctccttttgctcggaacgcacacaccgaccgttcgcgatctccgatcccctcgtcgatggaaagaggcacatcttcgtcaagaccctcactggaaagactatcaccctcgaggtggagtcttctgacaccattgacaacgtcaaggccaagatccacgacaaggacggcatcctcccggaccagcaccggctcatctgtgctggcaagcagctacaggacggacgcacacttgccgactacaacatgcacaaagcagaacacccctcacccttgtcttccgcctaagggaagcaatcccaatcttctcaaaaccttaattggaagaattttacccttcgaggggaatccttttacaccaatgaccaccttaaaggccaaaacccagaccagggaggcatttcctccgaacaagaacagcttcatttttgccgggaagcagctgaaggacggccccacgctggccaattacaa

SEQ ID NO: 86784 - DNA, 564 bp, Zea mays
  unsure (1)..(564): unsure at all n locations
tatggttaggactgttttcgttnnttggggactangacgatncgatgacgttccggtaccagatccggcggcgatccacgcttaggccctcggacctttctcagaccgatttgatctcctacgtcatctgctcgttcaacttcgtcacgggtctcacgcccgacagcttcagcccctacatcatctacatggcgactgctccctcggacgtgctcgccgttgagctcctgcaacgctattgctgcatgcgccattctctgcctctattgcctctgttctagaggctttcctacctgcattctacacccttcttcgtccagcgcttattatattttgactgttacatttacacgattcaggccactcataaggtcatggtacgctactacaacttcttcaagtacgcctgcacctttatacgtttattccctatcttacacatcccttgtagtaaatttcattatttacactttttaaactttctaaaatttaccctttatgtacctatttttaaccttccttttatactatatgttttaaaaaatgttttttcctctcacaatg

SEQ ID NO: 86785 - DNA, 558 bp, Zea mays
  unsure (1)..(558): unsure at all n locations
tagtnagttctcgtgagtgtgtgcctagctctcacgccatcatcgcaccgccnctgaattcccgggtcgacccacgcgtccgaagcaagcagcgagtacatacatactaggcagccaggcagccatggcgcccaccgtgatgatggcctcgtgggccaccgccgtcgctccgttccaggggctcaagtccaccgtcagcctccccgtcgcccgccgctcctccagaagcctcggcaacgtcagcaacggcggaaggatccggtgcatgcaggtgtggccggcctacggcaacaagaagttcgagacgctgtcgtacctgccgncgctgtcgacggacgacctgctgaagcaggtggactacctgctgcgcaacggctggataccctgcctcgagttcagcaaggtcngcttcgtgtaccgcgagaactccaccctcccgtgctactacgacggccgctactggaccattttgaaacttgccatgtttcgcttgcacgaccccacccagtgtaccaagagcttcagganggccatcaaatcctaacccgacgcctttaa

SEQ ID NO: 86786 - DNA, 657 bp, Zea mays
  unsure (1)..(657): unsure at all n locations
tgagacgatggagagagatgaagagagaagaagaagtagagagnagagaagaagngaagnnaggaggggggtnaantanaaccactgaantactgatctttatcgcangnccncccggncncggaaccccgggccgacccacgcggccgaaccgggccaacactnncacgctcaggcgctcagctctagcaanggctgcctccaggatggcgatctcctacacggcgatggccggtacccccatcaaggcgggctccatcggcgagggccccatgagcatgcgcaagaccgagagcaagcccaacgtggcaccggccagaagggcctggtacgagtcccgaccggcggaagtactctaggggcctttaccgggcaacccctcagctacctgacccggtgagttcccccggcgactacagctggggacaccggccggctggtccagtgacccctaagaccttaaggcaaaaacccgagaccttgtaggtaaccaactccccggtaggcccaggctcggcgcacctcggatgaggagttcaccaaactggttgttcccgaaacgggtggaaaggtccggggagggaccgcctggtgtaaggcgccgatctccaaaaatttgaaggaagggccgggcctggactaccttgggcaacccct

SEQ ID NO: 86787 - DNA, 600 bp, Zea mays
  unsure (1)..(600): unsure at all n locations
aagtggagtatagaggaagagagcnnaaatggagngagtgtgaagcgtgnntatantctcgatcatggagcaggatggcacgacncgnaatcccgggtcgacccacgcgtccgctcgtagagagaaggaaaaatatccccaaaccctagctcccgatctcgatggcgaaccctcgcgtcttcttcgacatgaccgtcggcggcgccccggcgggccggatcgtgatggagctgtacgccaacgaggtgcccaagaccgcggagaacttccgcgcgctgtgcacgggcgagaagggcgtgggcaagtccgggaagccgctccactacaagggctccaccttccaccgcgtcatccccgagttcatgtgccagggcggcgacttcacccgcggcaacggcaccggcggcgagtccatctacggcgagaagttccccgacgagaagttcgtgcgcaagcacaccgtccccggtgtgctctccatggccaacgccgggccccacaccaacggctccccaagtctcatctgcaccgtcgcgaccccttggctcgacggcaagcacgtcgtcttcgggcaggtccgtcaaggccttgaacgtngcc

SEQ ID NO: 86788 - DNA, 611 bp, Zea mays
  unsure (1)..(611): unsure at all n locations
tgaagagtgagtatgagagtaatgagttagatatncnagaatggagagaggttggttaggaggggtttgagtttagtttatcagtcatctttcacacggncttgaattcccgggtcgacccacgcgtccgctcagctcggggttccgcctgaagaagcaggagctgcagtagctgcggaatcttctactggtacatggacaactgtttggactgatggacttaccagtcttgatcgttacaaaggacgatgctatcacatcgagcccgttcctggggacccagatcaatatatctgttatgtagcttatccattagacctatttgaagagggttctgttactaacatgtttacttccattgtgggtaacgtatttggtttcaaagccttacgcgctctacgtttggaggatctacgaattccccctgcttattcaaaaactttccaaggtccgcctcacggtatccaagttgaaagggataagttgaacaagtacggtcggtctttattgggatgtactatttaaaccaaattgggattattcgcaaaaaagtacggtagaacctgttatgagtgtctacaccgtggacttggattttaccaaagatgatg

SEQ ID NO: 86789 - DNA, 565 bp, Zea mays
  unsure (1)..(565): unsure at all n locations
gggtggatttcgcaggagttgtgtgccacgtanactacgattagtactgcatcagctccggaattcctgggtcgacccacgcgtccggtgagtgaacaccagccgtcttggcctgctcctcccctgctgcagccatggcgacctccgcggcgctctggaccgccgccaaccccacccagctctgccggtcccgcgctgcgctgggcaagccagtgaaggggcttggcctggggatggggcgggagcgcgcaagccagcggagcatcacgtgccaggcggcgagcagcatccccgccgaccgcgtccccgacatggagaagcggaagctgatgaacctnctnctnctgggcgccatatcgctgcccaccgtccgcatggtcgtcccctacggcgccttcttcggcccccgccgctcccggaacggccgccgccggacctaacccaaggaccagcttggccacgaccttaccgtggaagaatggcttaacacgcaccggcccaacgaacggacgcttgggccagggcttaagggttaacccaactacctgggggttgaacaagaaca

SEQ ID NO: 86790 - DNA, 545 bp, Zea mays
  unsure (1)..(545): unsure at all n locations
taggtttttgagtgatctgattacagcatcaaagactacatttgcaccgccnctgaattcccgggtcgacccacgcgtccgtctgttgccgcatcggcagcgttctctgcagcggcgatgccgctcctcgaggagatgatggaagcgtcgtgcatccgcacgtacctgcagcagatggcaggtaagtaggtcaacaaattgattcctctcgtggtcgttgtgtgattttgacgcgacatgcgttgcgtgcatgtatctctctgctctctcggtgcctcggtggtagcagcgtcggtctccacggcgagctgcgacccgtctagcggcgccgatgaggtggagtgccgcgacgaggcggcggcgctgaggcttaagatggtgttcgtcgtggccatactcgtcgcaggcgcgaccggcgtcgcgatcccgctcgtcggccgccgctgccacgggcatggagcctnctnctnctnctncaccggtggggcgttcgtgctcgtaaaggcgttcgcggccggngtgatcctggccacgggcttcgtccc

SEQ ID NO: 86791 - DNA, 550 bp, Zea mays
  unsure (1)..(550): unsure at all n locations
agggtttgcgtgaatactgagtcaccgaanaagcccgataagtatttgcaagactgctccggtccggaattcccgggtcgacccactcgtgcgatccaaacctgtatgtggatggaaaggtttgcttaagtctcttaaatacttggaccggcagagggaacgaagtgtgggacccatcatcatcaagtattctacaagtactggtttcacttcagggattggttctcaatgaaaaaccctattttaatgaggctgggtacgagaagcaagttggtactgttgaaggggagaagaatgcagtgccgtataatgagaatacgtacctgctgagcgtgaaatccatgctgtatatattgagacggcctnctttgcattttgaggattttgggaagagccatttccgcaagcgtggccactacattctttaaagcctgtgaggcatatttgcaaggaaatgttgttggcactctcactgacgacgcatgcaccaccaacagaagcacggagcactcgagctctgtcggcttcaagcttgcactatcaaagattn

SEQ ID NO: 86792 - DNA, 556 bp, Zea mays
  unsure (1)..(556): unsure at all n locations
ngaggtttaagtagtgctttgtgtacgagtcaccgcatacgatagtatgcctgcaccggtccggaattcccgggtcgacccacgcgtccgggaacgcacacaccgcccgtccccgatctccgatcccctcgtcgatccaaagatgcagatctggtcaagaccctcactggaaagactatcaccctcgaggtggagtcttctgacaccattgacaacgtcaaggccaagatccaggacaaggagggcattccctcggaccagcagcggctcatctttgctggcaagcagctcgaggacggtcgcacacttgccgactacaacatccagaaggagagcaccctccaccttgttctccgactcacgggaggcatgcagatcttcgtcaagaccctgactggaaagactatcaccctagaggtggagtcttctgacaccatcgacaacgtcgagggccaagatccagggacaaggagaggcattncgtncagtaccagcagccggctcagtttttgccggcaagcatctcgaggacgggcgcacgctggccgactacaac

SEQ ID NO: 86793 - DNA, 541 bp, Zea mays
  unsure (1)..(541): unsure at all n locations
gaggttagagtggactctagatacacgcatcacagactactctgcatngaccntttcggncctgaattcccgggtcgacccacgcgtccgcgtttctgccactcatggtgacatggaccagaacactagagacatcatcatgagggagttccggtctggctcctcccgtgtgctcatcaccactgacctgcttgctcgtggtattgatgttcagcaggtgtccctggtcatcaactatgatcttcccacccagccagagaactacctgcatcgtattggtcgtagtggtcgttttggtaggaagggtgttgccatcaactttgtgacccgcgactactaacgtatgctgtttgacattcagaagttctacaacgtgttgattgaggagctgcctgccaatgttgctgaccttttgtgatcaatctgaagaaaaaacagaacaaaatagggtcgtgagggaacctggtaaggattggttttgtcgaaataccgtgggagagggggtgataaggacagtcgcgggtttctatggtgaagtcgn

SEQ ID NO: 86794 - DNA, 539 bp, Zea mays
  unsure (1)..(539): unsure at all n locations
gagttaagagagctgagcattgctactgccatatgacgcatngaccttccggtcttgaattcccgggtcgacccacgcgtccgcgtttgtgccactcatggtgacatgtaccataacactagagacatcatcatgagggaggtccggtctggctcctcccgtgtgctcatcaccactgacctgcttgctcgtggtattgatgttcagcaggtgtccctggtcatcaactatgatcttcccacccagccagagaactacctgcatcgtattggtcgtagtggtcgttttggtaggaagggtgttgccatcaactttgtgacccgcgacgactaacgtatgctgtttgacattcagaagttctacaacgtgttgattgaggacctgactgccaatgttgctgaccttctgtgatcaatttgaagaaacaacaaaaccatataaggtcggtgaggaaacctgctaaggaattggttntggtccgaaataccgctggtagagggggttgataaggtaaggtgggggggtttctatgttgaaag

SEQ ID NO: 86795 - DNA, 543 bp, Zea mays
gagtttaacggagcttgatctagcaaacgagggggggatagcatcgctcctcaattcccgggtcgacccacgcgtccggctggcgttgtcctgccccttttaacaagtccttctccggttaagggttcctacggttttgtcggggggcggatgccgttgctgatgatgaataccacttgcttcttccgcgggcctgaactggatcaccatcaacgagtcgatccgagatgccattggtcttctacggcgcagatacctgactccaagggtcaataccgtaccgggagacggacatgtcacgcggcttcggaattcgctaccttatgctacgagaactccatgctcgacgctatcgagaacatgaacgagcaagagctcgacggtcgtaacatcacgcgtaaacatggccaatcccgtggccgtcgcagttgctgcagtcgctacggcagctgtcgcagccgctgccgctatggtggcaggcaccgtgacggcggatatagcggcggttgctgctacggcggtcggcaccagggtggtggctgc

SEQ ID NO: 86796 - DNA, 541 bp, Zea mays
  unsure (1)..(541): unsure at all n locations
tagtttagagtagtgtgattctagcctancagctcacattctacntacattccggncttgaattcccgggtcgacccacgcgtccgcatgagttgtagggagggacttatgtcacctcaaacagaaactaaagcaagtgttgggtttaaggctggtgttaaggattataaattgacttactacaccccggagtacgaaaccaaggatactgatatcttggcagcattccgagtaactcctcagctcggggttccgcctgaagaagcaggagctgcagtagctgcggaatcttctactggtacatggacaactgtttggactgatggacttaccagtcttgatcgttacaaaggacgatgctatcacatcgagcccgttcctggggacccagatcaatatatctgttatgtagcttatccattagacctatttgaagagggttctgttactaacatgtttacttccattgtgggtaacgtatttggtttcaaagccttactcgctctacgtttggaggatctacgaattccccctgcttatt

SEQ ID NO: 86797 - DNA, 532 bp, Zea mays
  unsure (1)..(532): unsure at all n locations
ngagttagagaggtatactccacgatccagcacgtagtagtatgactctccggtccggaattcccgggtcgacccacgcgtccgagccaaccggctgcccggccatgtcgtcgccggctgcaggcacggcagcggagccgcgggtcggggaggactgcctcggcttcgtgcagctgctgagcgacggcacagtgaggcggtccacggactactccatgctccgtcccatcggccgcgtgccgtcggacacggacctgcccgtgcagtggaaggacgtggtgtacgaggacacgcgcggcctccggctccgcatgtaccggcccactggcgccgcagccggggagacgaagctgccggtgctggtgtacttccacggcggcggcttctgcctgctcagcttcgaggtggccagcttccatgccggcgcgctccggctcgccgccgagctcccggcgctcgtgctgtccgcggactaccgtctccccgcggcgctggacgacgccgagtccgncttcgcctggctccgcgccca

SEQ ID NO: 86798 - DNA, 540 bp, Zea mays
  unsure (1)..(540): unsure at all n locations
agtnaaggagtgccttgagtatagcagacaccgcagaaganagtaatgactgcaccggtccggaattcccgggtcgacccacgcgtccggcctagctctatagctcgagtattgcttgctctccacaagaaacaaagcagagcaccaacaatggccgccgcctcctcgtcctcggtcctcctgctgctcctggccgccgccttggctggcatgagcgccaacgccgccaccttcaccatcaccaacaactgcgggttcaccgtgtggcccgcggccaccccggtgggcgggggcacgcagctgaacccgggcgggacgtggaccgtcaacgtgccggccggcaccagctccggccgcgtgtggggccggaccggctgctccttcaacggcaacagcgggagctgccagacgggccaatgccgctgctcgcttgcctgcacgctgtctgggcaaccggcggttacgcttgcccagttcaccatcggcggcagccaggacttctaccacatcttggtcattgattgcttccaccttgccatg

SEQ ID NO: 86799 - DNA, 540 bp, Zea mays
  unsure (1)..(540): unsure at all n locations
gagtttagcggagtttgattcacgcatacacgactaggatcgcaccggctttgaattcccgggtcgacccacgcgtccgctttaagccacacgcacttgagctccaccgtcactaccaccagtaccacaccactccgcgctagcgtgacgacggttcagcggcacagaggtgcgacgtacgacgacgacgacgcatgcgccacacatggcatnccagctctccgccgacgtgccccggttccacggcctncggggctacgccgcgcccaggtccgcggtggcagcgctgccgttcgtgagggtgggcaggaagaggtcgtcgtcgcagggcatccgctgcgactacatcggctccgncaccaacctgatcatggtgacgacgacgacgctgattgctgttgcggggcggttcgggctggcgccgtcggcgaaccgcaaggcgactgccgggctgaaacttgaagcgcgcgacttcggacttgatacgggtgaccccgtcgggttcaaccttggcgacacgctggcctgcggcgccgttgg

SEQ ID NO: 86800 - DNA, 541 bp, Zea mays
gaggttagggagattgttaataaggagggggggaggaagatatcgctcctgaattcccgggtcgacccacgcgttcgctttgcaatctttcgctatataggaaatccaatagttaccccggaggtgacaagagatgtatgcgtgctggccagaatgatggctgcaaacttgtacatcgatcagattgaagagctgatgtttgagctctatatgtggcgctgcaacgatgagcttcgtgttcgtgccgaagagctccacagttcgtctggttccaaagttaccaagtattacatagaattctggaagcaaattccttcaaacgagccctaccgggtgatactaggccatgtaagggacaagctgtacaacacacgctagcgtgctcgccatctgctggcttctggagtttctgaaatttcagcggaatcgtcatttaccaatatcgaagaattccttgagccaattgagctgtgcttcaaatcaatgtgtgacttccgcgacaaagccatcgaggacgggagccttcttgaccttctgcgcc

SEQ ID NO: 86801 - DNA, 534 bp, Zea mays
gagttaagatagttgttaagaatcgcggcgtaaaagggagtgctgctaccggtccggaattcccgggtcgacccacgcgtccggtagggcaaggttgaggatgttgatgagaaggaagaaaaggacaagaagaagaagaagatcaaggaggtttctcatgagtggcaattggttaacaagcagaagcctatctggatgagaaagcctgacgagattaccaaagaagagtatgctgctttctacaagagcttgaccaactactgggaggagcatctcgccgttaagcacttctctgctgagggtcagcttgagttcaaggctgtcctgtttgtgccgaagagggccccctttgacctcttcgacaccaggaagaaactgaacaacatcaagctctatgttcgccgtgtcttcatcatggacaactgtgaagagctgatcccaaagtggctgagctttgtcaaaggcattttttactctgaggaccttccctaacattttccggtggaaccttcagcgaacaagtatctaaagtca

SEQ ID NO: 86802 - DNA, 543 bp, Zea mays
aggttggagagttgattaatgcaagagggggtgaaagtactgctgctaccggtccggaattcccggggactagttctagatcgcgagccccgccctttttttttttttttacctcataaaattgctctggctttctataagatttgagcgcaccaaaggtgccagtgatgtacaatgtgctaggctagtacactatccagatggccctttctcctagagaatcctaccattctagtcgtcgatctcctttacagcgtcctttgcgagcctcgttacataagcggcagcaatggctgtaaacaataatccaacgcccagtgtccatagctgttcgtttcctcccaaaccaatttccgactcatcttggattaaagctcgcccgaatgcaccggcactgacgtaagcccatgaacctggaagcattcccaaccaactgcccaagacatacggcaagaacttcactgaagtaaggccatatagatagttcccaagggagaaaggtaacaggggactcaagcgtagcaaagtaacaaccttaaaccc

SEQ ID NO: 86803 - DNA, 542 bp, Zea mays
  unsure (1)..(542): unsure at all n locations
nagganaggagtggtcnnaatatcgataacagaatgtctactgcatngactctaccggtccggaattcccgggtcgacccacgcgtccgctttcgtcaactccacttctcttctccgcgtcacctcctcttcgccgccgccgacgctgcacggggcagccagccatggatgaggagtacgacgtgatcgtactaggcacggggctcaaggagtgcatcctcagcggtctcctctctgtagacggcctcaaggttttgcatatggacagaaatgactactatggaggagattccacctcactcaaccttaatcagctctggaagaggtttagaggggaagacaagcccccagcacatctaggtgcaagcagagactacaatgtggacatggtgccaaagtttatgatggcaaatgggacattggttcgaaccctcattcacaccgacgtgacaaagtacttgtcattcaaagctgttgatgggagctatgttttcagcaaagggaagatttacaaggtccctgccactgatatggaagctctn

SEQ ID NO: 86804 - DNA, 528 bp, Zea mays
  unsure (1)..(528): unsure at all n locations
agtggagatctagtgctcagctcaccgactgattgctcgaccnttcagtcttgaattcccgggtcgagccacgcgtacgctttcgtcaactacacttatcttcttcgcgttacctcctcttcgccgcctccaactctggacagagcaaccagccatggatgaggagtactacttgatcgtactatgcacggggctcaagtagtgcatcctcagctgtctcctctctgtagacggcctcaaggtattgcatatggacagaaatgactactatggatgagattccacctcactcaaccttaatcagctctggaagaggttcagaggggaagacaagccctcatcacatataggtgcatgcagagactacaatgtggacatggtgccaaagtttatgatcgcaaatgggacattggttcgaaccctcattcacaccgacgtgacaaagtacttgtcattcaaagctgtcgatgggatctatgctttcagcaaatgtaacatttacaaagtccctgacactgatatggatcg

SEQ ID NO: 86805 - DNA, 532 bp, Zea mays
  unsure (1)..(532): unsure at all n locations
agttaggagagttatttcagctcacagattatnctgcaccaccctcaattactgggtcgacccactcgtccgccatgcgtggaaagtacatggcatgctgatttatgtactgtggctacgttgttccaaatgacggggatggggctgtccattcaatctagaccaatatatcagagcacatagttgattggtgctctactggtttcaagtgtgggataaactaccaaccaccaactgtagtccctgaagggtacctggccaacgtgcaacgagcaatctgcatgatcagcaacatcacagtcgtggctgaggtcttctctcgtattgaccgcaagtttgatctcatgtatgccaaacgtgcattccttcattggaatgtcacgtaaaggattgaaaaaagggagttctcagaagccatggaagatcttgcaacacttgagaacgattattacgaagtccgaacttaaattgaagattaagacgacgaaactgaatattgaatcatcgatctggatgcatggttatttttcct

SEQ ID NO: 86806 - DNA, 540 bp, Zea mays
gagttaggcagatgttgattcacgcttggggggaggatagtactgctgcaccggtccggaattcccgggtcgacccacgcgtccggttggcttctcctccccctccggttcgggttcgggttcgtgaggttctccggggttgggtttggtgggtgagcggatcgagatggcggcgtcggatgttgagtaccgctgcttcgtcggcggcctcgcctgggccacggacgaccactccctccacaacgccttcagcacctacggcgaggtcctcgagtccaagatcatcctcgatcgggagacgcagaggtcccgcggcttcggcttcgtcaccttctccacggaagaagcgatgcggaacgccatcgagggcatgaacggcaaggagctggacggccgcaacatcaccgtcaacgaggcccagtcccgcggcggccgtggaggcggctgcggcggcgggtacggtggtggccgtggaggctgcggctacggcggttgcgggcgccgtgatggcggcggctgctacggcggtggctgcggcta

SEQ ID NO: 86807 - DNA, 538 bp, Zea mays
gagttttaagagaggtatagcactgaccaagccatatacagaatgactctaccggtcttgaattcccgggtcgacccacgcgtccgctctaaggcatcaggggaggagctgaagaaatattcaggccaaactgatgcagagttatggatgataccaacatatgagaactcagcttggccaatcatggcaatttcattcgtatcactgcttgctatgtctgctatcctagttgcatgtttctttgcgaggagacaccagatcagacgggacagggcaagacttccccgagctcaggagtcccatggaatgagcagtcaattagttaaggcaataccaagccttattttcacaaaagtgcaagaagacaactgtacatcagcaacatgcgccatttgctgggaagactacagtgttggagaaaagataagagtgctaccttgtcgacacaagttccatgcggcttgtgtggacctatggctcacctcatggagaacattctgccctgtatgcaagcgggacgcaagtgctggaacgtcag

SEQ ID NO: 86808 - DNA, 546 bp, Zea mays
  unsure (1)..(546): unsure at all n locations
ngagttttaggcnagagtctgaaacgaggggaagggagggaagattggaccggcccggaattcccgggtcgacccacgcgtccgcgagtacttcagatcggctacaccggagaccgagtacgggaggatgaacatcggcagccggccggccaagaggaggcccggcggcggcatcacgaccctgcgcgccatcccctggatcttctcgtggactcagaccaggttccaccttcccgtgtggctgggagtcggcgccgccttcaagttcgccatcgacaaggacgtcaggaacttccaggtcctcaaagagatgtacaacgagtggccattcttcaaggtcaacctggaacctgctgagatggttttcgccaagggagaccccggcattgccggcttgtatgacgagctgcttgtggcggaagaactcaagccctttgggaagcagctcagggacaaatacgtggagacacagcagcttctnctncagatcgctgggcacaaggatattcttgaaagcgatccattcctgaagcaagggcttgtgct

SEQ ID NO: 86809 - DNA, 545 bp, Zea mays
  unsure (1)..(545): unsure at all n locations
ngagtnttagacgagtttgataagtgggatggggggggagatggtaccgctccggaattcccgggtcgacccacgcgtccgcccaacagcgccactgtccagtgcgcgcgtcaagcttgcttagctagccgccatggccttcctggccgccgtctccgtgaagcccgtggccatcaaaggtctcgccggcagctccatctccggaaggaagctcgccgtcgccaggccgtcggcccgctccatccgcaggccccgcgcagccgccgtggtggccaagtacggcgacaagagcgtctactttgacctcgacgacatcggcaacaccaccggacagtgggacctctacggctctgacgcgccctcgccctacaacccgctacagagcaagttcttcgagacgttcgcggctccgttcaccaagagaggtctgctgctcaagttcctgctgctgggcggcggctcacttctggcctacgtcagcgcgtcggcgtcacccgacctnctgccgatcaagaanggacctcatgaggccggcgatcccgccc

SEQ ID NO: 86810 - DNA, 539 bp, Zea mays
  unsure (1)..(539): unsure at all n locations
nagtttagcgagagtgtgttagatgaagggggggagnatgaccgctcttgaatttccgggtcgagccacgcgttcggtactggtccaatctgtcaccacactttgatcacacacaggaagttgagatcagaaaaatgcaggctgcggctactgccgccgggttctcggccgtgctgcccgccaagggcaggccggcggcgaggagcatggtggtggcccgtgtccccgccacaaggaggagcgtccgtgtagctgccgtcgtcgcgaccgaggccgcgcagatcgactacagctcaagcgtctcggtgttcccgatggacgcctgcgacctgcttggtggctactcgtgcaacgggcccatgttcccggaggccaagcccgcctcggcggctgcggcggcgagcaggagtgtggtcggggtggacagggactacctgtcctacgacgagccaaagacggtgttgccggacgaggcgtgcgatgaacctggcagctagttctgcgaggcgccgtaccatgacggcgtgttcaaggagctg

SEQ ID NO: 86811 - DNA, 538 bp, Zea mays
  unsure (1)..(538): unsure at all n locations
agtttgaagagtatgctgntgtcactgatcccgcactatatagcatgcctgctaccggtccggaattcccgggtcgacccactcgtccggggacctgttcaaagctccagaagccatcatcgaggaaccgctgctcctgaactgtctgtctgattctgttcatttgttgctgtgtaggttgggcttgtgccaagcttgaatcctcttgtgaaggagtttctcaatgctgctgatgacaagtggaaggaagtcctctctaaaatagaagaggatgttgctaagctcagcggttctacagccaactaagaagctacaagtgaatgccgaggagagcagcgatgacttggctaacccaccgaaggtagaggagaagcttggtgctgtccctcatggcctgtccaccgactctgaggttgccatagggaacccgagtctatctctaggaagactctcaggagctcacccgaaaagttggagtccaaagctgaggtttcagactcatggacataatattcaactcactctacagcatcaaggg

SEQ ID NO: 86812 - DNA, 543 bp, Zea mays
  unsure (1)..(543): unsure at all n locations
naggttaggcagtagttgnttatgaggttgtgggggcgaataggagcgcttccgaattcccgggtcgacccacgcgtccggtccgtggccatggcgtcgtccatgctctccgctaccaccgtgccactccagcaggggggcgggctgtccgagttctccgggctcaggagctccgcgtcgctgcccatgcgccggaatgccacctccgacgacttcatgtccgccgtctccttcaggacccacgcggtcggcacgagcggcgggccgcggcgggcgccgacggaggcgaagctgaaggtggccatcaatgggttcggccgcatcgggcgcaacttcctgcggtgctggcacgggcgcggcgacgcctcgcccctcgacgtcatcgccatcaacgacaccggaggcgtcaagccaggcgtccacctgctcaaggacgactccacgctcggcatcttcgatgccgacgtcaagcccgtcggcgacaacgccatctncgtcgacggcaagtcatcaaagtcgtgtncgaccgtaccccagcaacct

SEQ ID NO: 86813 - DNA, 539 bp, Zea mays
  unsure (1)..(539): unsure at all n locations
gaggaagcagagtgttacgatacggggtaaaaagtatngctgcaccggtcctgaattcccgggtcgacccacgcgtccgaaaacgccgcaggccagtctgcgagttggatggccttcttcttggccctcgtgtgcatcctcagcttgctagccatcgcctcctacgtccagtacactcgctggcaaaaggggaaaggccgcttcggcggccatgggaggtctgctcccttgaagctgcctcctggctccatgggctggccttaccttggcgagaccctccagctttactcccaggaccccagcttcttcttcgcttccaaacagaagaggtacggcgagatcttcaagacgcaccttctgggttgcccgtgcgtgatgctggcgagcccggaggcggcgcggttcgtgctggtgacgcatgcgcacctgttcaagccgacctacccgcggagcaaggagcgcatgatcgggccgtcggctctcttcttccaccagggcgactaccacctccgcctccgcaagctcgtccagggcgcgct

SEQ ID NO: 86814 - DNA, 541 bp, Zea mays
  unsure (1)..(541): unsure at all n locations
naggttagcgagagctgtgcacgcaacacganaatacagaagacttctccggtcttgaattaccgggtcgacccactcgtccgaaaacgccgcaggccagtctgcgagttggattgcctccttcttggccctcgtgtgcgtcctcgggttgctagccatcgcctcctacgtccagtacactcgctggcaaaaggggaaaggccgcttcggcggccatgggaggtctgctcccttgaagctgcctcctggctccatgggctggccttaccttggcgagaccctccagctttactcccaggaccccagcttcttcttcgcttccaaacagaagaggtacggcgagatcttcaagacgcaccttctgggttgcccgtgcgtgatgctggcgagcccggatgctgcgcggttcgtgctggtgacgcatgctcacctgttcaagccgacctacccgcggagcaaggagcgcatgatcgggccgtcggctctcttcttccaccagggcgactaccacctncgncttcgcaagctcgtccagggcgcc

SEQ ID NO: 86815 - DNA, 535 bp, Zea mays
  unsure (1)..(535): unsure at all n locations
nagttgagagagcttgtgtcacgtacccgccagttanagcatgcctgcaccggtccggaattcccgggtcgacccacgcgtccggcgagcgcgcggtgtccaccactccctctcctctcccgtcctatccatccggcacgccgagcggccatccactcctcccctgctccggctccggctccggctctgccatgggcctttcaacagtttactccccggccggaccgcgcctcgtgccggcccctctcggccgctgccgctctgcccagccccgccgcccgcgccgggcccagctcgccaccgtccggtgctccgtcgacgccaccaagcaggcgcaggatggcgtggcgacggcggtcgcgacggaggcgccagcgtcgcggaaggagtgcttcggggtcttctgcaccacctacgacctcaaggcggaggacaagaccaagtcgtggaagaagctagtgaatgttgctgtgtcaggcgcggccgggatgatatcaaatcacctgctgttcaaactcgcttctggtgaggtttn

SEQ ID NO: 86816 - DNA, 535 bp, Zea mays
  unsure (1)..(535): unsure at all n locations
ngaggtaagagagctgtgagtaaagaaacagaacgtctactgtatngactcttccggtccggaattcccgggtcgacccacgcgtccgatttatgaacaaggacttgtgcttcaacaacttaaatgttgtggggttcttgaggttgtccggatttcaagatctgggtatccaacaagaatgactcaccagaagtttgctcggcggtatggttttcttcttgaggatgttgcatctcaagatccactcagtgtttcagttgcaattcttcatcagttcaacattttacctgagatgtatcaagttggctacacaaagttgttcttccgaactggtcagattggcaaccttgaagatactcggaatcgtactctgcatggtattttaagggttcaaagctgtttcagggggcatcaagcccgtcatcatgcaagagaacgaacaagaggagttttgactcttcaatcattcattcgtggtgagaatgcacggcaaatttactcctctttgttgaggaaacatagagccgcagttgtt

SEQ ID NO: 86817 - DNA, 549 bp, Zea mays
  unsure (1)..(549): unsure at all n locations
tgttgtgtttttttagagtttagttagaaatcgnttcgaaggtagcaggggagatgagatcgctccggaattcccgggtcgacccacgcgttcgctcgccttcacccaggtccaaaaactgccgcatgagatggtggccctcatctagtaagggactaggtttcatctgccatccaagtgttctgtatgcacgccaatattattaatgttcttagatttgctcttataccttaatgcatacatcgtttgcaggctcgacaaccaaaaaaatataacgccccgtttggatcattgaaattgaatttcattctaataatagtaatttaggcatatatcaatcaagataattcagttttatacgaaagatatttgtatactattattagcaagatgtcggagatatcaatgtgctaaattttactatagaatagtgggaccgaaagtgtcatgtaggtacagagtaagatcctattctactaatattttaaatcaattcccatcttacacactaatgaattacgatggacctatatcttgaacttggaaagt

SEQ ID NO: 86818 - DNA, 571 bp, Zea mays
  unsure (1)..(571): unsure at all n locations
tggtgtagtattgtttagagttttaggacaggagtttgtttaacagaatacacggactattactgcaatgactgtccggtccggaattcccgggtcgacccactcgtccgctgcgtttggtggatcgaatcggtcgtcgtctggtgctgtgtttttgctactgaggggagggagggatctgagggaggggggtgatgtcgtcgtcctcttcctcgtcggtggtatacgaggggtggatgatccgttacggtcggcgcatgatcggtaggtccttcgtccacacccgctacttcgtgctggagccacggatgctgtcctactacaagcgcaagccgcagcacaaggccgacaaggtcgggggaaagctccccatcaagtcccttcacatcgatggcaactgcaaggtcgaggacagggggctcaagatgcaccatggacatatgctttatgtcttatgcgtctataacaaaagggagaagcacaaccgcatcacgattgcggcattcaacatacaagaagctctaatttggaaggagaaaattgagatgggaatcgatcaacgacaaggagn

SEQ ID NO: 86819 - DNA, 530 bp, Zea mays
  unsure (1)..(530): unsure at all n locations
aggtaagagaggttnanttctgatcgcagattatatagcatgcctctaccggtccggaattcccgggtcgacccacgcgtccggttctacattggactccggcaaaaacgtgcgactggcgaggagtatgatgagcttattgaagagttcatgtctgctgttaagcaattctatggtgagaaagtcctcattcagtttgaggactttgccaatcataatgcctttgatttgcttgaaaaatatagcatgagccatcttgttttcaatgatgatatccagggcacagcatcagtggtccttgcaggtttgttagcagcactcaagatggttggtgggaccctggcagagcagacttatttgttccttggtgctggggaggctggaactggtattgcagaacttattgctcttgagatttcgaaacagacgaatgctccaattgaagagtgccgcaagaaggtttggctggtggactcaaagggtttgattgttgactctcgtaaaggctcccttcagccattcaagaaacc

SEQ ID NO: 86820 - DNA, 539 bp, Zea mays
aggaaagaaggaggctttgtgtaacgataaggggggtacgaagggaagcctgcaccggtccggaattcccgggtcgacccacgcgtccgagaagacgagtgtcaagtgaacctgaaacttgcggtgtcactggctggtagcctgagtgtgagggagtgatcgagctagctgagctccgatcctcgctagctaggataccgccataccacaagtcttcttcacaagtttaggagtgacagcaacaagagatcgatggcctctgccaccgtgctcaagtcctccttccttcccaagaagtccgaatggggcgccaccaggcaggccgtcgcgcccaggccgtccaccgtctccatggtcgtccgcgccttcgcctacgccgatgagctcgtgaagaccgcgaaaacgatcgcgtcgccggggcggggcatcctggcgatggacgagtcgaacgcgacgtgcgggaagcggctggcgtccatcgggctggagaacacggaggccaaccggcaggcgtaccgcacgctgctggtcacggcgcc

SEQ ID NO: 86821 - DNA, 546 bp, Zea mays
aggtttaagagagctagttaagagagacggcggggaggaatagtaccgctcctgaattcctgggccaatctcggcgtcaccgccccaaatctagcaaacggaaatcccatctcgccgtcgtcgcgatgtctcgccgctatgacagtctcacgacgatcttctcgccggaggggcgtctctaccaggtggagtacgcgatggaggcgatcggcaacgccgggtcagccctcgggatcctggcggccgacggcgtagtcctggtcggcgagaagaaggtgacctccaagctcctccagaccttccgctccgccgagaagatgtacaagatcgactcccacctggcgtgcgctgtggcagggatcatgtccgacgccaacatcctcatcaacaccgtccgccttcacgcccagcgctacgcgctctcctaccaggagcccatccccgtcgagcagctcgtccagtccctctgcgacaccaagcatggttacacccagttcggtggccttcgtccctttggggtctccttcctattcgccggttgggacc

SEQ ID NO: 86822 - DNA, 542 bp, Zea mays
  unsure (1)..(542): unsure at all n locations
taggttaggagagttcctaagagtagggggaaaagtacgactcaccggtcctgaattcccgggtcgacccacgcgtccgtcgacgcttcaagtctcgctacgtagcagtgcaataaaaaaagcagccgcaatggcgagcagcacgatggccctctcctccacggccttcgccggcaaggccgtgaacgtgccgtcgtcgtccgccttcggcgaggcccgcgtgacgatgcgcaagacggcggggaaggccaagccggcggcggcgtccgggagcccgtggtacggccccgaccgcgtgctgtacctgggcccactgtccggcgagccgccgagctacctgacgggcgagttcccgggcgactacggctgggacaccgcggtgctgtcggcggacccggagacgttcgccaagaacccggagcctgaggtgatccactcccgctgggccattgctggcccgcctcgctgcgttcttcccggacctgttggcccggaacggccttcaagttcggccaggccctgtggttcaaagcncctcttcc

SEQ ID NO: 86823 - DNA, 545 bp, Zea mays
  unsure (1)..(545): unsure at all n locations
agtttggcagggtttaatttcagttctntgacgcatnatcgcataactcctccggtcttgaattcccgggtcgacccacgcgtccgttaagatcataagctagtgagatttccaacttcttgcactcgtacgccttcatatgggagtgtggttgttttacttaaattcaataatattaatctaatatgcccattggtgttccaaaagtaccttaccggattcccggagatgaagaagcgacttgggttgacttatacaatgttatgtatcgagaaaggacactttttttaggtcaagagattcgttgcgagatcacaaatgatattacaggtctgatggtatatctcagtatagaagatggaaatagcgatattttactgtttataaacttccctggcggctggctaatctcaggaatggcgatttttgatacgattcaaacggtgacacctgatatatatacaacatgcctcggaatagccgcgtccattgnctccttcattctgcttggaggagtacccaccaagcgtatagcatttcctcac

SEQ ID NO: 86824 - DNA, 538 bp, Zea mays
  unsure (1)..(538): unsure at all n locations
gaggttagagacggtctctgagtcacgacataccgcattatttgtcaataccnttcggtcttgaattcccgggtcgacccactcgtccgcttcatctctggcacaaagatgaagaggaattcctagatccttgagagaccaccagaggatgagatgctctcgatcggctgcacagtgctcctcacatactataacaacttagtgccatctgaagacagcagcaagctccctgaaccaattgcagcactaaaatctgtaatatgactcatataaggcatgctactatatcttatcaagcggttctctgcgacatagatccgatgctatatgatcgtatactggctgtaacactgttaaacactaggcttgattcggatgtcaatgtgtgcttcgtacccgatgtaccttctctgctggcactgttgcacattcactgtagcacatcagacgtttggtgctaataaggacaggctatgtatcctctgccagattgtacatatatacattgcggtgatatataatgataaagctgtcctct

SEQ ID NO: 86825 - DNA, 532 bp, Zea mays
  unsure (1)..(532): unsure at all n locations
gaggagggagaggctanagtatagagcacgcagagacagtactgctcaccggtctggaattcccgggtcgacccacgcgtccgtccgatcctccacaccagcacccgccgccgccgcctcttcccttgcgcacctgctgctgtgcggatcggtgaggcggaggagtaggatggcgagcgcggccggaggcggagcggcgggggaaggggagtggcttaaggtatcccagctcaggcccatggtggaagcgcaggaccccaacgccaaggcagtggacaacctgacgctgcgtcggttcctgcgcgcgcgcgaccacgacgtggacaaggcctncgccatgttcctcaagttcctcaagtggcggagggaggcggcgcccggcggctccgtgccggaggacaggtaaggaggagctggcgcagggcaagctgtgcatgggcggcgtcgacagggccggccgtcccatcctcgtcgccttcgcggccaggcacttttccgtcggccgtgacatggcagaagtcaaggagtttgn

SEQ ID NO: 86826 - DNA, 542 bp, Zea mays
agttaaggcgggggtctgagcatgcaatacgcatagatagcacgactcaccggtccggaattcccggatcgacccacgcgtccgctcacagacgatcgcatcaaagctaccgtcaaggacatgatagcggctgcaactgaaacatcggcccaaacgctggaatggaccatggccgaactcattgccaacccgcgggtgatgagcaagctccaaggcgagatagcgcgagtcgtcagcgccgatcagacgaccatcgctgaaccggacctgaacaaaatggagtacctgagggcagtgttcaaagaggtgcttcggctccacccaccagcgccgctcctcgtcccgcacgaatcaacaacgcccgcagttgtgcagggctacgagatccccggcaaaacggctctctttgtcaacgtgtgggcccatcgggcgggacccttgtgtgtgggacgcaccggacgaagtccgcccgaacggttcgtgggcggcaagtccttcgtgggactcaaagggtcccgactaccaagctcattcccgtcggg

SEQ ID NO: 86827 - DNA, 545 bp, Zea mays
  unsure (1)..(545): unsure at all n locations
gagatttagcagtggtgagtgcctggcactcgcncactaccccactgacataccggtcttgaattcccgggtcgagccacgcgtccgccgctgctcatctcacatccctcgtgaagactcctgctcctcgccgatcgatacgatggccgtgttctccgacctccacaccgccgacggcctcaagtccctcgaggctcacctcgccggcaaaacctatgtgtctggtgactccattactaaggatgacattaaggtcttcgccgcggtgccgtcgaagcctggcgctgagtttcctaatgccgcccgctggtacgagaccggctctgcggctgtagcctcaaaaattcctggtaaaggttgttgtgtaaaattggcttgcggatcaagttctgccggaacttcttctgccgatgaagcttaagattaatattaccttgatccttttggtgatgaaactgaagaagaccagaaagcaacttattaaccgtccgtcgctgccaagggcttttctaaaaagaaagaaagtggttaattcttccgtcttt

SEQ ID NO: 86828 - DNA, 542 bp, Zea mays
  unsure (1)..(542): unsure at all n locations
aggttnaggagtaggtctgcgcctagcnataagcataggatagcaggcctgcaccggtccggaattcccgggtcgacccacgcgtccgcggacgcgtgggcgacgtgcggcgtgcggtgcatcctgacggacgaggaggcggcgctggtcgggggacggaaccacagccacgcgacgcaggacctgtacgactccatcgcggcggggagcttcccggagtggacgctgtacgtgcaggtgatggacccggacacggaggagcagtacgacttcgacccgctggacgacaccaagacgtggccggaggacctgctgccgctccgccccgtggggaggctggtgctggacaggaacgtggacaactctttaacgagaaccagcaactggcgttcgggcccgggctggtggttccaggggatttactattcgaccaccaggttcctgaatggccggttgtcggcttagccgacccgccacggttcaagctgggaccaaactaactgatgcttgccggcaacgcgccgggcttcgcggaccacaac

SEQ ID NO: 86829 - DNA, 568 bp, Zea mays
  unsure (1)..(568): unsure at all n locations
tagtgaggactgtatctgaatgcctgcnttccagttcaggtcngnacnagtcntccagcatcaatccaccgacgcgcacacatgcgcagacgatccatacatggacagctataacatcacaaacgcgctagatctcaaaaggggcacggaggatcaggatgggaagaccataaaacttcaaataacgtgttacacgcctgtttatgatcgtcttcacttataatcatttctctgctactaccgcggagctcatggaatcattactgtatatgacgtgacagaccaagaaagcttcaataatgtgaagcaatggttgaacgagatagaccgttatgcaagtgataatgttaacaagctccttgtagggaacaagagtgaccttactgccaacaaagttgtggcaactgagacagcaaaagcgttagctgatgagatgggcatcccaatcatggagacgagtgccaaaaacgccaacaacgtggagcaagccctcatggctatggctgcatccatcaangataggatggccaaccaaccaaccctaggcaacactaagcccacgacccca

SEQ ID NO: 86830 - DNA, 544 bp, Zea mays
  unsure (1)..(544): unsure at all n locations
agttttnatgagtaggtcntgcgaatgcattantgacgcatcgattgcaccggccctgaattcccgggtcgacccacgcgtccgcgaaaaggaaaacttgtgcctttatggctaccccaacgaaacatgggaagtaactttgccagcagaggaagttcctccagagatccctgaaccagctttgggtataaactttgctagggatggcatgaacgagaaggattggttggcgttagttgctgtccacagcgatgcctggttactagctgttgcattctactttgcagcccggtttgggtttgacaaagaggccaggcggcgactcttaacatgataaataacttgcccacaatatttgaaatagcgactggggtttgccaggaaccaaaccaggagaaaggaccccattataccagccaaagccaccaaaccaggtcgaaaattgccaccagaaccgagtctcattttgaagccaccaaagttgcccccccttaggattaaagatgattagagccgttaagaagtttaagaagaagagagcctt

SEQ ID NO: 86831 - DNA, 547 bp, Zea mays
  unsure (1)..(547): unsure at all n locations
ngggttttatgagagcttgatgcatgagataacgacacgttagcattgctctaccggtcttgaattcccgggtcgacccacgcgtccgctgagattgttcgttcgcctagagctccaacccattctttcaagaagccgattggtgctaaaaggcctggaaataagactggtggacttggtgcacggaagcttacatcaaagccaaatgaaagcctctatgagcagaagcccgaggaaccagctcccgtcctgccatcatcggtgattgagagtactacaactaggagcaaatcacatactttccgatttgattaccttgaaaatgcaactgctcttaaaaatgggaatagcttaaaaaggaaccacctgaatggaccttttgcaaccccaatggcgtcaaacttctttgctgaatttgggattgacagtggatattagaaaaaatctacgttcaagtcattcaaagtgcagatcgaggaaagcacggaagccagacagaaattcttaaaagcgaaatcaatttcttcctctcagatttttggggaac

SEQ ID NO: 86832 - DNA, 576 bp, Zea mays
  unsure (1)..(576): unsure at all n locations
nagtntagggagtaggtgtgtgngtccgatttcacgctcacgatacgcattgacatactcggtctggaattcccgggtcgagcgacgcgtccgaagtcgtccgccaaggccggccccccgctcttcggcaagtacgagctcggccacctgctcggcggtggcaacttcgccaaggtataccacgcgcgctgcctcggcggaggcgaccccgtggccgtgaaggtgctggacaaggccgggctggccgtcacgggcatggcgtcgcggctcctgcgcgaggtgtcttttatgcgctgcctgatcaacccaaccttgttcggcttcaacaaggtcctgccaacttttttcaaaggggtacttgttaatgaacttgccccgggccgggaactttttttccggcttgcctttcttcccgtgggctaggtttccgaggaccttgctcgggaccctggtttttcaaatgggattctgtcctatttactggtattcccgtccgggatttttaacccgtaatgtatagtcattatatgtgtgatttggctctttttgccaacttaaaaggtggaaaaggtgttc

SEQ ID NO: 86833 - DNA, 543 bp, Zea mays
  unsure (1)..(543): unsure at all n locations
gagtttagagaggttntgctcagttaagcagtatactgatagctcaccggtcttgaattcccgggtcgacccacgcgtccgctatgatgttgtaaaggctcacaactccaacagcaaaattattggttttcttggaggaaccgagggattatttgcacagaaaactattgaaatcactgatgaagctcttccatcctataaaaatcaaggtggttatgacatgcttggtcgtacaagggatcagatcaaaacaactgaaccggtaaagggcaccataaggtcatggtaagcattggaattggacccttctggtattaatggaagggttaaattcaacaacggttcctgttaacttggttaaacctttgcttaattgaaatggtcaaccaaaggtagtggtggtcctgtgacctttaatggagatcttaagaacccatttggtggaacaaccattgggtttgataccatattccaagtgaaccttcacattattaggcattgcatgctataaatgccctttgtgttagaaaggttttactactc

SEQ ID NO: 86834 - DNA, 573 bp, Zea mays
gagtttttatagagtgatgtcgctggcttgcttccacgctcacgtcaccattgacgtactcggtctggaattcccgggtcgagccacgcgtccgctagctagctaggataccgccataccacaagtcttcttcacaagtttaggagtgacagcaacaggagatcttgatggcctctgtcagcgtgctcaagtcctccttccttcccaagaagtccgaatggggcgccactaggcaagctcgcgcgcttagggccctcaccgtctacatgctcgtgctcgccttcgcctacgccgatgagctcgtgaagaccgcgaaaacgatcgcgtcgctgctgcgttgcatgcctgctatatactagttctaatcgacatgcacctaagcatttttccatcttttggcctggcaaattccttaagtatatcgacaagacttatcgcatgccacctttttcattgttttttaaactatccattcctgtttctttaatttttaatggccaggaaatctttaaactcgtttcctaactttttgtaatccttttttggtttaccggtttttaactgtcatttcct

SEQ ID NO: 86835 - DNA, 566 bp, Zea mays
  unsure (1)..(566): unsure at all n locations
agtntcggagtaggtgtgccgctcagctctacgactcagttcgcatgnacgatccggtccggaattcccgggtcgacccacgcgtccggtccttctcctaagcaaagccccctcgcttttggcgtatgcccccgctggcgcgcccatgattgccgccgattcctccgcccgttcagtccagcaacccttgctgctgcagtgctgcggctagttcggtggcggggaaggaggaggaggcgagatcttggagtggggcgaagcggagatgtcgttgccgtcgaacaaccggaggacgtgctcccggagcagctctgcgcggtccaagcacagcgcgcgggtggtggcacagacgcccgtggacgcgcagctgcacgccgagttcgagggctcccagcgccacttcgactactcctcgtcggtgggcgctcgcaactcgccgtccgcaagcaccagcacccgcttcaacttacctcaggacatggcaacggggcccgtacatccaagcctttggctggccttggtggcggccacccggacacctttgagcttgtggcttacaacgagaa

SEQ ID NO: 86836 - DNA, 559 bp, Zea mays
  unsure (1)..(559): unsure at all n locations
nagttnttagtagaatgttgtgcatgagttaccgactntattgcatngctgctactcggtccggaattcccgggtcgacccacgcgtccggccccgcacttccgcccgagggccgtgcggtccgctatccgggcgcaggcgtccgccgtcgaggcgcccgccacggccaaggcgaagaaggagtccaagaagcaggaggagggcgtcgtcaccaacctatacaagcccaaggagccgtacgtcggcaggtgccttctcaacaccaagatcaccggcgacgacgcgccggtggagacgtggcacatggtcttcagcaccgaaggcatgatcccgtacagagaaggccagtccatcggcgtcatcgtccgatggcgtcaacatgaacggcaagccgcacaaggtcaggctctactgcatcgtcagcaacgcgatcggccacttcggcgactccaaacaggctcgctgggtgtcaggagcttaattacacacactattgctgagagatcgtcaaagtagtctgttccaacttgttatgtgaaccttatcccgttgatacgtt

SEQ ID NO: 86837 - DNA, 542 bp, Zea mays
  unsure (1)..(542): unsure at all n locations
agatntgtgagtaggttgtgctcagctcaacgaatattactgcatcgctgcaccggtccggaattcccgggtcgacccacgcgtccgggcaagagctacgagagcgcggcggaggtccacaagcggttcaggatcttctccgagagtctcgagctcgtccgctccaccaatcggaaaggcctctcctaccgcctcggcatcaaccgcttcgcggacatgagctgggaggagttccgtgcgacccggctcggcgcagcccagaactgctccgccacgcttaccggcaaccaccggatgcgcgccgncgncgttgcgctgccggagacgaaagactggagggaggatgggattgtgagcccagtgaaaaaccagggccactgtggatcttcctgaaccttaacaactactgggccactggaggctgcttatcccaagccacctgccaggccaatttctttttttagccaccacttaatgaccgggggtttgccatcaaccatttccgattccaccggaggccttcattccaaggcctttgattc

SEQ ID NO: 86838 - DNA, 565 bp, Zea mays
  unsure (1)..(565): unsure at all n locations
naggttagtgcgtggtgtgcgctcagtttaaacgcattagttagcatgcctctaccggtccggaattcccgggtcgacccacgcgtccggatcctcgtcgccgacgcatccacccgaaccctcctccgcgacctcgccgtcgccggagccttggccatgtcgatcttcgagtataatgggtccgccgtggtggcgatggtggggaagaactgtttcgcgatcgccagcgaccggcggctgggcgtgcagcttcagaccatcgcgacagactttcagcgggtgttcaagggccacgacaagctttacatcggcctctctgggcttgccactgacgcccagacgctttaccagccgttggtgttcaagcacaagctgtattaactgtcggaggaaagggaccttgaacccgagacctttggcagccctggctttgcgcttctctaccaggagagaatccggccatatttttgggccggcaggcattggttgaacttganaattccaccttacaattatattggcctttgggacggttaagttccaaagggacttggcaaggattttt

SEQ ID NO: 86839 - DNA, 566 bp, Zea mays
  unsure (1)..(566): unsure at all n locations
gagttaatgagtgctgtggtgcctcgcactccgccangttcgcactgacgtactcggtccggaattcccgggtcgacccacgcgtccgcccccatctcttcgactcctttctggagcagctagggttccgtcctcgatccgatccgccgagggcacaccacctttccccactccgatcgaatcgatggccgccgagggcgagaagaagatgataaccctcaaaagctccgatggcgaggagttcgaggtggaagaggcggtggcgatggagtcgcagaccatccgccacatgatcgaggatgactgcgccgacaacggcatccctcttcctaacgtcaactccaagatcctatccaaggtaatcgagtactgcaacatgcacgtacattgccgccgaaccgcaacccgccgccttgaggcccggttccgactacgtgggttcccgccttccgccacaacaacggctcccttccggtgagggacttcaagaacctggatgctgactttgtcaaggtcaacaaggccaggcttttggacctaatttggcttgcaaattttttgaaatt

SEQ ID NO: 86840 - DNA, 548 bp, Zea mays
  unsure (1)..(548): unsure at all n locations
gagggttaagacgtggtctganccacgccacagatagtagngctgcaccgctccggaattcccgggtcgacccacgcgtccgctcctcttgcgattcgctcgctcgatcctagcttcccttccaagaagcgcagcgcccatggccgtgtcgacgcaagcctccgccgccacgcgccacctgctggccgccgcctgggcgccggcggcgaagccgcggcagctgagctcgcagctcgcgctgccgtcgtcgtcctcccgcgggccggccccgctccgcgcgtccaccgaggaggcggtggaggcgcccaaggggttcgtggccccgcagctggaccccagcacgccgtccccgatctttggcggcagcacgggcgggctggtccgcaaggcccangttgaagagttctacgtcaatacgtggaccttccccaaggagcaagtgttcgagatgcccaacggcggcgccggcatcattccggagggccccaaccttttgaagctggcgcgcaaggagcaaagcctggcgcttgggaccaggttgcggctcc

SEQ ID NO: 86841 - DNA, 529 bp, Zea mays
tggtttcggtgtttggtaagaacagaagtagttgaccccccgaattccgggtcgacccacgcgtccgatgggacttatgatgaactcggtcaaagtttatcttaggaattgatgcggtagtaggtgacatagcgaattttggccaaccgttctctatatgtggactacactcttccttatactgagtcaggggtacgcatgctggttccagttcgggaccagagacagaagactgcatggacattcctagaacctttaacagctgatctatggtttggaactggatccttcgttgtcttcacaggttttatagtttggtttatcgagcacaagacggaataagaattcaaaagaaccgcaggcagtcaaattggatcaagcttctaattcttcttcttaacacttggatttgctcataaggagaggattgtgaaccatttatcaagaattgcaatagttggttggctttttgtgggtctaatattgcagcaaagttatatcccaagcttaagctcaattcttacgggag

SEQ ID NO: 86842 - DNA, 544 bp, Zea mays
  unsure (1)..(544): unsure at all n locations
agattntagagtagttactgctcgattacaagcagtagtatttgcaagcctgcaccggtccggaattcccgggtcgacccacgcgtccgctgctgcagaatatattattccatacgctaagttcctgaagagcctcaatcatccggtctgtagtggagcaaggatcaactttcagtgccataatgaagatgttagtgaaaggcgatctggagtggttgttcgcattagtgaaatagatcccatgaaatggcctggctcgaagtggagaagcctgctggtaagatgggaggacggtgctgaatgtaatggccaaaatagagtatctccatgggagatcgagatagctggtggttctgtctctgtttctaattctctttctgcatctagttctaaaggacccaagttgggtcctaagggaaatttgaacgttcaaccattgtgaaatggtggtactgactcattggaacctggaaggttaccaagggttttgcagggccagaattggatgattttaaggactggtaatgttccggtggctcttaag

SEQ ID NO: 86843 - DNA, 549 bp, Zea mays
  unsure (1)..(549): unsure at all n locations
nagttnttttgcgtgagcttnctgcatcgtatcacgaagatgattgcaggcctctaccggtcctgaattcccgggtcgacccacgcgtccggctgcctccgcctctcgagtctcgtccacccgtcgtcctcctagctcctctactcgccagtcggcatgggcaagattaagatcggaatcaacggcttcggaaggatcggcaggctcgtggccagggtcgccctccagagcgaggatgtcgagctcgtcgccgtcaacgaccccttcatcaccacggactacatgacctacatgttcaagtacgacaccgtccacggccactggaagcacagcgacatcacactcaaggacctccaaaaccttcttttccgtgaccagcccgtcaacggctttggcatcaagaaccctgaagaaatcccgtggggtgaggcttgcccttaatatgtcctggagtccaacggcgtttttacttgacaggaccaggctgctgcacatctcaagggtggtgccaagaaggttggtatctctgccccaagcaaagatgcaccc

SEQ ID NO: 86844 - DNA, 564 bp, Zea mays
  unsure (1)..(564): unsure at all n locations
nggatnaggagaggtcnacggatcgatacaagacagatgactgcactgcctctaccggtccggaattcccgggtcgacccacgcgtccgccctcgcgccgccgccgccgtgcccagcgctcgagctcctcgcctgccgcgagctcgcgccgcgacgccaccatgaagttcaacatcgcgaacccgtctaccgggtgccagaagaagctggaaatcgatgacgaccagaaactacgtgccttttatgaccgaaggatctcccaggaggtcagtggtgatgctctgggtgaggagtttaagggttatgtcttcaagatcatgggtggatgtgacaaacaaggcttcccaatgaaacaaggagttctgccttctggtccgtgtccgccttctgctcaaaaaaggcccttcctggcttccggggtaatgcaagcctaaatggtgaaccccagaaggaagtttgcccgtggttggattgtgagccaggaccaatctgtattcaactgggtaatggttaagaagggtgagaacgatctgcctggtttaactgacactgagaacccaaggt

SEQ ID NO: 86845 - DNA, 549 bp, Zea mays
  unsure (1)..(549): unsure at all n locations
gagttntagggtagtgtgcttatagacacggggtggtatgtggtaaccgccccggaattcccgggtcgacccacgcgtccggctgagctgagctgagctcaccaccaccacacacgggagatagctatagctagcatagcaagcgagccagtcagcgacttagcagcagctagctagccatgctgccgtccttcgtgtcgccgacggcgagcgccgcggcctcggtgacgccttcgccgcggccgataccaggcagctacgggccaccggtgctgggcccgctacgggaccggctcgactacttctggttccagagccaggacgagttcttccggaagcgcgcggcggcacaccgcagcaccgtgttccgcaccaacattccggccacctttcccttcttcgggggcctggacccgcgcgtggtcggcatcgtggacgccggcggctttaacgggctcttcgaaccggaccctgtggaccagcgcgacattctcattgggccctattacccgggcgccggcttcaacggccggacacgccttngcctgt

SEQ ID NO: 86846 - DNA, 552 bp, Zea mays
  unsure (1)..(552): unsure at all n locations
nagattattgcgtaggttctcgctcgtatcaagaagacgtcagcatgcctctaccggtccggaattcccgggtcgacccacgcgtccggccgtctcccttttgcgtgagcaaagaaagagagcgagaagcagtcgccatgtctggcatcatgcacaagatcgaggagaagctccacatggggggcgaccacaagaataaggaggaggagcaccacaagaaggccgaggagcaccacaagaaggaggagggggagcaccacaagaaggacggcggggagcacaaggaaggcatcgtggagaagatcaaggacaagatcaccggcgagcacggcgacaagtccggcgcccacaaggagaggaaggacaggaggaagaaggttaagaggaagcacggctagggccaacgaccacaacggcggccacagtagcaagcacaagcaccgccacggaaatctggtgtcgaacacagggtgcacaccaggattcctggctggatgagggttcaatacaacttaagcccgaagtaaaggtttacatggttggcaagcctcg

SEQ ID NO: 86847 - DNA, 557 bp, Zea mays
  unsure (1)..(557): unsure at all n locations
taggtnttgtgagtagcctcgtaggtccgtctacgcctgacgtcgggcatgcacgtactcggtccggaattcccgggtcgacccacgcgtccgcaagtgtgcagatgacaagccgtttgtcccatatccttgcatacgaggttccctcatgaaatggaatgtactgcatggtggaaagagttgttcactactcataactggtgaacattatccgcaacatgtatcctacccttcctctttcggacaattgtgcacatgacaagctcgtttgttctaccctaccaagtatcatacgagaacatagaaagcataatcatcgactgtgattccacttgagacaggccgttgggagaacaattgaaggcatgtaattaaaagggaaactgttggtttttacttcgaccattccagtaccctttttagtatctggtcaacgtgatgtttcaatttgtacataccttggattttggatttaccaagcttttacgggtttacattggcctaaaatttcccataaacttgttttggaatgtttatatacactttttttttgataa

SEQ ID NO: 86848 - DNA, 548 bp, Zea mays
  unsure (1)..(548): unsure at all n locations
tgatagtgaggagtgtgcgctacgccacaacagactacngtgcactcgctccggaattcccgggtcgacccacgcgtccgggaggtggcaggatgcgactggattcatgtcgatgtcatggacgggcgctttgtgccaaacatcacaattggacccttggttgttgatgctctgcgtccagtgactgatcttccgttggatgtacatctgatgattgtggaacctgagcagcgagtccccgattttatcaaggcaggtgctgatattgttagtgtccactgtgaacagacatcgaccatccatttgcaccgaacagtcaatcagattaaaagtctaagagcaaaggcagggaattgtttgaatccagcgacttcacttactggaattgattatggtcctgatggtggtgacctggtgctgattatgtctgtgaatcctgggtttggtggccaaagctttattgagagtcaagttaaggaaattgcagaactgagaaggttatgtgcagagaagggagtgaacccctggattgaaggtgatggtggtgt

SEQ ID NO: 86849 - DNA, 655 bp, Zea mays
  unsure (1)..(655): unsure at all n locations
taggttttggagtgggtctacggcctaggtcacgactgacgtccgcactgcactctactcggtccggaanttcccgggtcggacccacgccgtccgcccccggactcttccccagactcgactgagatcgctcgaccgtcatcggcgccgttccacgtcgctcgcggagcctcccgcccgacagtcttcggcctcctacatcatnnctccatggcgactggccccctcggaccgtgctcgccgtggagcctcctggcagcgcgagtgccggcgtgcgccatgccgctgctccgtggtgccccgctgttcgagaaggctggccgaccatgcagtcggcagcccgcgtncgtggaagcgctctctacttcggtggactgggtacatgggaccgggatcaaggggcatagccagcagcgtcaatgggtcggcctaccttcggacttcccgcaagtggacngcccngaccggcatggtccggtggcngttggcagcctgtaccangtgctccatggaggaggattngcctccatggtgggtccataccacctatcggccgtccaaggctcaacctagggttccacgggcccgntggagggcacccgttgggccagggattggtcagggcccaaagggcaccctgggccataccaggggc

SEQ ID NO: 86850 - DNA, 547 bp, Zea mays
  unsure (1)..(547): unsure at all n locations
tagtttttatgccgtggtgtgtgcctagcttaaagatnnagtagcatgcctctactcggtccggaattcccgggtcgacccacgcgtccgccagtagtcgtcgcgtttgcagctaggcagatctgagttagccggcggatccgatccgtgcgcgtgcgcagtgtgtgtgtgtgtgtgtgtgtgtgtgtgtgtcggtggagagatggccacagcttacgctcccatggcgagccaggtgatgaagagcagcctcgtcgtgcactcgaggccgaggggcctgtcaggcgctgctgcgctcacgaggcggcccggccggttaaccgtcaaggccatccagcccgagaaggcaacgtaccaggtggtgcagccaatcaacggcgaccctttaatcggaagcttgaaaacgccggtaacttgaagccggttggtggcttggtacttttcaaactttcgggcttacggaacggccttaggccggttgttccgggcctttaagttcggcttgcgccacggttacttcttgtgggggcctttgcggttaacggtc

SEQ ID NO: 86851 - DNA, 556 bp, Zea mays
  unsure (1)..(556): unsure at all n locations
agggtttcgacggggtnnnnaaatgatncactagagactccgcatgnccgatccggtccggaattcccgggtcgacccacgcgtccgagaaaccctagttcgaacgcgccgccgtcaccgtcgtcgctcgcgctctccgcccggatcggagcgagagtaggggcgtgtcggcggtgaaagcgactgcgtcagccatggcggacgaggagcattcggagaggagagaggaggcctccgagcttgcccccttcgacccgaccaagaagaagaaaaagaagaaggttgtcatccaagaaccttctgatgaagtggacaagcttgcaaaagagacagaaacactggcagtcgcagaacccggtggacttaacttcaatggaatggagaagaaaaagaagaagccggtggatcttgattcaactcttgatgagcttggagatggggaggacactcaagatgatcaagctgtagaggaacaaggggaaggcattgtgctgggaagtgtccctacatacccttgggagggaactgatcgggattattaatatgaagagctgct

SEQ ID NO: 86852 - DNA, 562 bp, Zea mays
  unsure (1)..(562): unsure at all n locations
ngggtgggttgcgaggcttgtgcgtcgagctcatgctccgtaccgcatgcacgtaccggtccggaattcccgggtcgacccacgcgtccgctcgctcgctagctagggtttccaccaatggcggcgcccaccacctcccgccgcggccccggcggcgcgcgcaacatggacgacgagaacctaaccttcgagacctccccgggggtcgaggtcgtcagcagcttcgaccagatgggcatcaaggacgacctcctccgcggcatctacggctacggtttcgagaagccctccgccatccagcagcgcgccgtgctccccatcatcaacggccgcgacgtcatcgcgcatgcccagtccggtaccggcaagacgtccatgatctccctcaccgtctgccagatcgtcgacaccgccgtgcgcgaggtgcaggctttgattctttcgcctactagggagcttgcttcccaaacagagagagttatgctggctattggggaccacctcaacgtccaagtgcacgcttgcattggtggaaagagtattggtgaggacatcaggaggn

SEQ ID NO: 86853 - DNA, 538 bp, Zea mays
taggtggggtgtgtctgagcctcagctctgattgcatcagcatcgacgtaccggtccggaattcccgggtcgacccacgcgtccgggagagtacgtggaggagcagccatggcttcatcggtggccgccgcggcgagcacatggctgggcacccgcctggcggacccggcgccacagaacgggcgcatcgtggcccggttcgggttcgggttgggcggcaaggcgaagcctgctccgaagaaggtggcgaagacatcgacctcctctgaccggccgctgtggttccccggcgccgtggcgcccgactacctggacggctcgctggtcggcgactccgggttcgacccgttcggtctcgggaagcccgtggagtacctgcagttcgagttggactcgcttgaccagaacctggccaagattgaggccggcggcatcatcggcacccggttcgagtcctccgaagtcaagtccaccccgttgcaaccctacagcgaggtggttggccttcagcggttcccggagtgccagcttattcacc

SEQ ID NO: 86854 - DNA, 549 bp, Zea mays
  unsure (1)..(549): unsure at all n locations
gaggggcaagtagatctgngatgtaggtgaggggggagggatggtatcgctccggaattcccgggtcgacccacgcgtccggtcgcgtggaagatcatcttcggcttcggcctcttcgaggccgtcctacagctgctgctccctgggaagcgcttcgaagggcccatctcgcctgccgggaacgtgccggtctacaaggcaaatggcttacaagcatatgcagtgaccttgataacttaccttggtttgtggtggttcggtatatttaaccctgcaatagtgtatgatcacttgggggagatatactctgctcttgtttttggaagctttgtattctgtatttttctctacataaagggccatgtatttccatcttcatctgactctggatcctctgggaatgtgataattgacttctactggggtatggagctgtaccctcggattggcaagtactttgatatcaaagtcttcaccaactgtcgtttcggtatgatgtcctgggctgttcttgccgtaacctattgcataaagcagtatgaaatgaat

SEQ ID NO: 86855 - DNA, 540 bp, Zea mays
aggagaaagctgtgttagagagggcgaaggaaggagagcttcaccggtccggaattcccgggaaaggcttatcttttcaatgattactgggaagatattggaactattaagtccttctttgaggcaaaccttgctcttgctgaacagcctccaaggttcagtttctacgatgctgacaaaccaatgtatacatcacggagaaacctaccaccatctatggtcaacaatagtaagatcactgattcaatcatttcccacggatgtttcttggataactgcaggatagaacatagtgttgttggagttcgttctcggataggctccaatgtgcacctcaaggatactgtaatgcttggcgctgattattatgaaactgccgtggaaagaggagagctgcttgcagaaggaaaagttcctattgggattggagagaatacaacgattcaaaagtgtatcatagacaagaatgcgaggatagggaagaaagtggtaatctccaactcttgaggtgtagatgaagctgaaagaacttccgaaggg

SEQ ID NO: 86856 - DNA, 550 bp, Zea mays
  unsure (1)..(550): unsure at all n locations
gaggtnagggtagtgtgagatttgaataggtgggagagatagtatcgactctgaattcccgggtcgacccacgcgtccgcctcgttcctgtcgcgcagccacgacctccacttcacatctcccccggcggcggcgcggtcaggtgaacaatggcggactccaaggccacctcggcggtcaccctccgcacccgcaagttcatgaccaaccgcctcctggcccgcaagcaattcgtgcttgaggtgatccaccccggccgcgccaacgtctccaaggcggagttgaaggagaggcttgccaaggcgtacgaggtgaaggacccaaacaccatctttgtcttcaagttccgcacccacttcggaggaggaaagtccactggtttcggcctcatctacgacaacctggaggctgccaagaagttcaagccgaaataccgcctaatcaggaatggccttgctactaaggttgaaaagtcccccaagcaattgaagaaccggaagaacaggtgccaagaaatccgcggtgtcaagagacaccaaatctggtgacc

SEQ ID NO: 86857 - DNA, 529 bp, Zea mays
agtagaatagttggtagtgggagggggggagattgtaccgctccggaattcccgggtcgacccacgcgtccgtgccaatccgatgacaggctaacacctgcaaagccactcttgcccaacgaggtgctcatctcaggcggtggtgtctttgctcttggcttcttctccctgaagaactcttcaaggttctatgtcggcatatggtacaacaacattcccgagcgcacatacgtgtggattgccaaccgcgacaacccaattaccaccaatgtgcctgggaagctagtttttaccaacagttctgaccttgtcttgttagactccacaggccgcaccatctggacgacgacaaacaactataccgcaggaggaggcggtgaaactgcttccatcctgctcgattcggggaacttggttatccggttgccaaatggcactgacataatggagaggctcaagtacccgactgacacaattgtccccattgtaaattttcacttgacctaacttcccacggtacgcttcttgg

SEQ ID NO: 86858 - DNA, 543 bp, Zea mays
  unsure (1)..(543): unsure at all n locations
agggaaggcagaggtcnnctgtcaagaaatagggagtgcagtccgtatccgctcccggaattcccgggtcgacccacgcgtccgaatctttgaggtcaaggccacagctggtgacacccatcttggtggtgaggactttgacaacaggatggtgaaccacttcgtccaggagttcaagaggaagaacaagaaggatatcactggcaaccccagggctctccggaagctgaagaccgcttgtgagagggcgaagaggactctgtcttccactgcccagaccacgattgagattgactcgctgtatgagggcatcgacttctactccaccatcacccgtgccaggtttgaggagctcaacatggacctgttcaagaagtgcatggagcctgttgagaagtgcctgagggatgccaagatggacaagagcaccgtccatgacgttgtacttgttggtggctccactaggatccccagggtgcagcaactgctccaggacttcttcaacggcaaggagctgtgcaagaacattaaccccgatgaggc

SEQ ID NO: 86859 - DNA, 541 bp, Zea mays
  unsure (1)..(541): unsure at all n locations
gagtnagagcaggtcgtgtatagaaaggggagacgtaagcagtgctgcaccggtccggaattcccgggtcgacccacgcgtccgaccggaccgacgagcgacgaagcgcgcacaaagagaagaacctcggagctgagatggcacaaggcatggcgtcgatgacaggcctctcgcagggcgtcctgcccagcaggcgcgccgacagcagaaccaggacggccgtcgtcgtcgtcagggcgtccgcggagggcgacgccgttgcgcaagcgggccgtcgcgccgtgatcgggcttgtggccactggcatcgtcggcggcgccttgtcgcaagcggcgcgcgccgagaccgtcaagaccatcaagattggagccccgtcgtcgnccttcggtggactccccgggactctcaactctgaccaggcgagggacttcgaccttcccttgaaggagcggttctacctgcagccgctgccgccggcggaagcngcggccagggtaaagacgtcggcgcaggacatcatcaacctcaagccgctcatcgc

SEQ ID NO: 86860 - DNA, 531 bp, Zea mays
agtggaagctgtgctcgataagaatgatagtaggctcactcggctgaattcccgggtcgacccacgcgtccgaccgggccgacagcgacaacgcgcacatagagaagaacctcggagctgaatggcacaaggcatggcgtcgatgacaggcctctcgcagggcgtcctgcccagcaggcgcgccgacagcagaaccaggacggccgtcgtcgtcgtcagggcgtccgcggagggcgacgccgttgcgcaggcgggccgccgcgccgtgatcgggcttgtggccactggcatcgtcggcggcgccttgtcgcaggcggcgcgcgccgagaccgtcaagaccatcaagattggagccccgccgccgccctccggtggactccccgggactctcaactctgaccaggcgagggacttcgacctccccttgaaagagcggttctacctgcagccgctgccgccggcggaggcggcggcgagggtaaagacgtcggcgcaagacatcatcaaccttaagccgctcatcgacaagaa

SEQ ID NO: 86861 - DNA, 547 bp, Zea mays
  unsure (1)..(547): unsure at all n locations
ngggagggagggttttgtattgaacgcggggtacaaagggtatgctttaccggtccggaattcccgggtcgacccacgcgtccgcacaaccagaagccacccattggcgtacgcgaggcgatcggagcatcccgtcccaagaggagagactccggccggcgacgcgggggaaaatggggaagacgccggtgcggatgaaggcggtggtgtacgcgctgtcgcccttccagcagaaggtgatgccggggctgtggaaggacatcaccaccaagatccaccacaaggtcaccgagaactggatctccgccacgctcctcctcacccccgtcgtcggcacctaccaatacgccatgtggtacaaagagcaggagaagctttcccacagatactaaatgggatgtcctccaagttgctgcggcttgtcgcagttgaattttccatgatgggttgtataatctgtcaatgtcatttctttgctcagttttagttcaacccattttcacctttccatatgcatatacggtatctgtgcctggcaaacatattt

SEQ ID NO: 86862 - DNA, 536 bp, Zea mays
  unsure (1)..(536): unsure at all n locations
ggagggaaggcgtagtgtgggtagtgagacggggggaggattgtaccgctccggaattctcgggtcgacccacgcgtccggctagccttccctacagcaactgcttacatacaacacttccatcttcccgagctcgtattcgggcaattgccaattcaaataataatataacaccaatggtggttcccgtcatcgacttctccaagctggacggcgctgagagggccgaaaccctggcgcagatcgccaatggctgcgaggagtggggattcttccagctcgtgaaccacggcatcccgctggagctgctcgagcgcgtcaagaaggtgtgctccgactgctaccgnctccgggaggccgggttcaaggcgtcggagccggtgcgcacgctggaggcgctcgtcgacgcggaacggcgcggcgaggttgtggcgccggtggacgacctggactgggaagacatcttctacatccacgacggatgccagtggccgtccgacccgccggcgttcaaggagaccatgcgcgagtaccgn

SEQ ID NO: 86863 - DNA, 563 bp, Zea mays
  unsure (1)..(563): unsure at all n locations
ggatggtatgngggaggggagtaatgcgtgtgngtaagtgggacagagaggggatgtcgtanccngcncttgaattcccggggttcaatccttggtgaagagttgtttgttctagggttgggtttttctgaggttgccaaagcacgcccaggcccagccaaggttggctgttgccacttctcagctgatggtaaactgctggctactggtggtcatgataaaaaggtcactttgtggtgtaaagattctctgaaccctaaatcttatctgaaagagcactcgtttcttatcactgatgttagaattagcccaagcatgtcacgccttgctacatncctctttgacaaaactgggccggtttgggatgccgaatattccgactattcactaacaactttcacgggccattcaacaacttgtatggcacttggttttcatcccaattaagagggtatgatatgctcctgggatagtgatggggaaattcccaacttgagccttaataatggtagctggttgacatgtgttaaggtgtttaagggaagtgctacctaaatgagaat

SEQ ID NO: 86864 - DNA, 547 bp, Zea mays
  unsure (1)..(547): unsure at all n locations
ngaggtaaggaagcgtctgcgatggggggtgagaaggagaatcgtcaccgctccggaattcccgggtcgacccacgcgtccgcaagttgttcaaggaatccagcgaccaggatatggagcacgctgaaaagctcatggagtaccaggacaaacgttgaagcaaggtgaggcttcaatcgattgtgacgccttttacccgatttgaccaccctgagaaaagagatgctctgtacgctatggagctggctcttgcccttgaaaagctggtcaatggaaaagctgcacaccctgcatggtgtggcaaccagggtgcaatgattctcagctgacagacttcatcgagagtgagtttctcgaggagcatgtgggagccattaacaagatcttcaagtatgtcggccacctgatgagaatggcaaggggcaccgggtgtggcactctgatcagatgctgctttaggaataggcctataaagaagaacggacagatgaatgaaggaaacaagtgtgtaatgttgatcangcggaggaataatgggtcaactgac

SEQ ID NO: 86865 - DNA, 540 bp, Zea mays
aggtaggagctctcgtacgataggggagttaaaagcagtgctctaccggtccggaattcccgggtcgacccacgcgtccgctgaccatgccgccgatgccggcgtggccgcggcaggacgccatcgacctccacaaagcattcggagggttcggttgcgacagcacgacggtgaccaacatcctggcgcaccgcgacgcgacacagcgcgcgctgatccagcaggagtaccgggccgtgtttaaccaggacctggcccggcgcatcgcgtccgagctgagcggccaccacaagcgggcgatgctgctgtggatcctggacccggccacccgcgacgccaccatcctgaagcaggcgctcacgggcgacatcaccaacctgcgggcggccacggagatcggctggttccggacgccgtcgcaactggagatcatgcgccagaactaccgggccaaggtccgctggttccttgagcacgacgttaccgaacgcacgttcggcgaacaccagagccttctgtgttcgtacctgggcattccgc

SEQ ID NO: 86866 - DNA, 538 bp, Zea mays
  unsure (1)..(538): unsure at all n locations
aggtaggaggagtgtgctagggggtgagaggggaaatcaccgctccggaattcccgggtcgacccacgcgtccgccgatgccacccggcagcactcggcagcggcgccgcgcaatggccacccacgcagctctcgccgcctcccgcatccccgccggcgcccggctgcacagcagggcggcggcgtcgtccaggcacggcgtgcagaggctggacttcgccgacttctccgggctcaggccggggtcgtgctccgtgagcgctgccgcgcgggaggcgtccttctccgacgtccttggcgcgcagctcgtcgccaaggccaccggggagaacgccgtgagggcgcccgccgaggcgaagctgaaggtggcgatcaacggcttcggccgcatcggccggaacttcctncggtgctggcacggccgcnaggactcgccgatcgacgtcgtcgtcgtgaacgacagcggaggcgtcaggaacgcgtnccacctnctcaagtacgactcgatgctcggcaccttcaaggccgacgtcaaaat

SEQ ID NO: 86867 - DNA, 540 bp, Zea mays
  unsure (1)..(540): unsure at all n locations
agagttcaactctagcttgangttcgattccccgccctagnttcnatctancactcaagnatacaggtccaagccacgcgtccaacgatcgcacccggcancactcagcaccagcttcgctttatggccacccacgcagctctcgccgcctccggcatccccgacaacgccccactgcacagcatatcggccgcgtcatccatgcacggcgtgcagaggctggacttctccgacttctccaggctcaagcctgagtcgtgctccgtgagcgctgccgcgcgggaagcgtccttctccgacatccttggcgcgcagctcgtctccaatgccacacgagagaacgccttgaaggcgcccgcccaagcgaaacttaaagtggcgatcaacggcttcagccgcatctgcccgaacttcctccggtgcttgcacagccgtcaagactcgcccatccacgtcatcttccttaaccacaactgaagcctcaagaacccattccaacttcttaagtacgaatcgattcctagcacccttaaagcctac

SEQ ID NO: 86868 - DNA, 539 bp, Zea mays
  unsure (1)..(539): unsure at all n locations
agtggtgagtgagtctggtcacgccacagagagtagtactcaccgctccggaattcccgggtcgacccacgcgtccggccggctgcaggcacggcagcggagccgcacgtcgtggaggactgcctcggcttcgtgcagctgctgagcgacggcacagtgaggcggtccacggactactccatgctccgtcccatcggccgcgtgccgtcggacacggacctgcccgtgcagtggaaggacgtggtgtacgaggacacgcgcggcctccggctccgcatgtaccggcccactggcgccgcagccggggagacgaagctcccggtgctggtgtacttccacggcggcggcttctgcctgctcagcttcgaggtggccagcttccatgccggcgcgctccggctcgccgncgagctcccggcgctcgtgctgtccgcggactaccgnctggcgccggagcaccgncttcccgcggcgctggacgaccgcgaggtcgctttcgctggcttcgggcccaggccgggccgccctcggccgcggcc

SEQ ID NO: 86869 - DNA, 543 bp, Zea mays
  unsure (1)..(543): unsure at all n locations
ngagggaggaggtgtctgattatgaatcgggatgtattgcatgactcaccggtccggaattcccgggtcgacccacgcgtccggtttggaggattataaatatgaatattgctttccaattagctgtttttgcattaattgcgactgcctcagttttagtaattagtgtaccccttgtatttgcttctcctgatggttggtcaaataataaaaacgttgtattttccggtacatcattatggattggattagtctttctggtagctattctgaattctcttatttcttgaatttgtttagtatttagtaacccgatacaaaataaataaaaagaaaggccctttttcgaaaaanattaggatttttatacacattaaaatgctattttcgttccgaattattacctcttctctttcattattatgaaattctattgccattagaatattgattgatagacagttaataaaaaaaaaaaaaaaaaaaaaaaaaaaaaaaaaaaaaaaaaaaaaaaaaaaaaaaaaaaaaaaaaaaaatatccta

SEQ ID NO: 86870 - DNA, 552 bp, Zea mays
  unsure (1)..(552): unsure at all n locations
ggaggagggaatgatcnanatattgtggatgcgggagtatattagtattgctgcaccggtccggaattcccgggtcgacccacgcgtccgccaaggtcttgaaatgtgagtatgcagtccgtggcgagattgtcatccatgctcagcgcttgcagcaacaactacaaacacaaccagggtctcttccttttgatgagatcctgttctgcaacattgggaatcctcaatcccttggtcagcaacctgtgacgttcttcagggaggttcttgctctttgtgatcatccatgcctcttggaaaaagaagaaaccaaatcattgttcagtgctgatgcctattctcgagccaagcaaattcttggcactattcctggaccggccacaagtgcctatagtcacaagcagggtattaaaagattgcctgattcaattgctgcttggatcaccttacgtgacggattccctgcaaatgccaatgacattttcattacagaccgagcaagtcctggggtccacatgatgatgcaattactgattaagaatgagaaagatg

SEQ ID NO: 86871 - DNA, 545 bp, Zea mays
  unsure (1)..(545): unsure at all n locations
agagtcagcgtcgtttagttccgcatccgcntttaccttangagcaatctcggtctggagttaccggatcgacccacgcgtccgccaagggcttgaaatgtgagtatgctttcctttgcgagattgtcatccatgctcagcgcttgcgtcaacatctacaaacacaaccagggtctcttccttttgatgagatcctgttctgcaacattgggaatcctcaatcccttggtcagcaacctgtgacgttcttcagggaggttcttgctctttgtgatcatccatgcctcttggaaaaagaggaaaccaaatcattgttcagtgctgatgctatttctcgagcaaagcagattcttgcaactattcctggacgggcaacaggtgcatatagtcacagtcagggtataaaagaatgccttaatcatttcttgttggataacctaacgtaacgaattccctgcaaattcaaatgacatatccattacagacggaccaagttcttgggtccaaaatgatgattccaattacttattaaggattgagaaatg

SEQ ID NO: 86872 - DNA, 540 bp, Zea mays
  unsure (1)..(540): unsure at all n locations
naggggagccaggagtggacatagatatgtttggaggatagtatcgcttctgaattctcgggtcgacccacgcgtccgatcttggtaagtccggatataacagtttctttgatgttcaggaaacttctgtagtcactacccggaagccggcacataatgaacctaaaactcctgccaaaagccaaagtcaggctactggttcaaagactatttttgttgggaatttagcctacagtatagagcgtgaacaagttaaggaattttttgaggaggctggtgaagttgttgatgttcgtttggctacttttgatgatgggagtttcaagggttttggacatgttgaattcgctactgttgaagctgctcagaaggctcttgaaattgttggtcatgacctgatgggacggcctctaaagatngacatggctaccgaaaggggtgcatacaactctaacaaccgggaaggccaccgttttttcaagaaagtccggtccaggtcaggcaaccacgtgtttatttaagggctttacaaccttggtc

SEQ ID NO: 86873 - DNA, 549 bp, Zea mays
  unsure (1)..(549): unsure at all n locations
ngtgagtaggttntgagttntgcagagtgtgtttgggacacggaggggaaatctcaccggcccggaattcccgggtcgacccacgcgtccgagcaaccggtccagcactttcacgctcagctccagcaatggctgcctccaccatggcgatctcgtccacggcgatggccggcacccccatcaaggtgggctccttcggcgagggccgcatcaccatgcgcaagaccgtgggcaagcccaaggtggcggcgtccggcagcccctggtacggccccgaccgcgtcaagtacctcggccccttctccggcgagcccccgagctacctcaccggcgagttccccggcgactacggctgggacaccgccgggctgtccgccgaccccgagaccttcgccaagaaccgcgagctggaggtgatccactcccgctgggccatgctcggcgcgctcggctgcgtcttccccgagctgctcttccgcaacggcgtcaagttccgggaagccgtctggttcaaggccccgctccagatcttcaacgagggccgggctg

SEQ ID NO: 86874 - DNA, 535 bp, Zea mays
aaggagcgcagactagaccttttctcacccgatcgtacgacatcaattactgggtccacccacgcgtccgagcaacgggtccaggactttcacgctcagcttctagcattttctgcctccaccatggcgatctcggccacggggatatcttgcacccccatcaaggtgggctccttcggcgagggccgcatcaccatgcgcaagaccgtgggcaagcccaaggtggcggcgtccggcagcccctggtacggccccgaccgcgtcaagtacctcggccccttctccggcgagcccccgagctacctcaccggcgagttccccggcgactacggctgggacaccgtcgggctgtccgtcgaccccgagaccttctccaagaacctctagctggaagtgatccactccctctgggccatgcttggttcgctcggatgcgtattccccaactgcttttccataacggcttaaattttctccaggccctcttgtcaaaggccttgtcccatatatttaactaaggccggctttacatccg

SEQ ID NO: 86875 - DNA, 545 bp, Zea mays
  unsure (1)..(545): unsure at all n locations
ngagttaaacgtggtctggtaagaggaggggagggattcgtaacccctccggaattcccgggtcgacccacgcgtccgagcatgcctatcctctccccgcccgcccgtgccgccgccgcggcttcccttcctctcccgagcggagatgaatgttgaaaagctcaagaagatggcaggtgctgtgcgcaccggggggaagggtagcgtgcgcaggaagaagaaggcagtccacaagactacaaccacagatgacaaacggcttcaaagcaccttgaaaagaataggagtgaacagcattcctggtattgaagaggtcaacatctttaaaggatgatggtggtattcagtttgtaaatcctaaggggcagccgtcattggtgctattccttggttggtaatggaacctccccagccaaggaacttgcagaactggtttcggcgattattaaccagattggggctgagaaactgtgcacattttgcgaaggttgcaaaggcatttccgaagccaggctcttgggcgcttggtgcacaagcttgtcgcc

SEQ ID NO: 86876 - DNA, 547 bp, Zea mays
  unsure (1)..(547): unsure at all n locations
gggaggaagggtctgngtatacgcatggggggggagttgtactcactnccggaattcccgggtcgacccacgcgtccggtggcacccacgcacactcttctcccccacgagtccggaccccggaggagccaagccatggcgtgcacctcctgctgcctcctccaccagtcaaccgcccgcctcggcgcgtcgccgcgcctggccgccgccccgccgcgcagcgcccagctgctcgtctgcaaggcccggaagcaggaagccgccgcggaccagagcgacgtctcgcgccgcgccgcgctcgcgctcctcgccggcgtcacgggcggcgccggcgccaaggtgggtcctgccgccgcggcatccggggaaccagccaccgggttcggaaggccaaaggcaaccccggattccttgggtaccagggcgaccggtttaagctggtgatcccgttcaagtgggaccccagcaaggagccggagtttcccgggcaggtgctccgctacgaggacaacttcgacgccaacagcaatgtgtccgtcatcatcca

SEQ ID NO: 86877 - DNA, 550 bp, Zea mays
  unsure (1)..(550): unsure at all n locations
nggtggggaaggggaggccagagtttgattgggaggatggggggaagtatgaaccgctccggaattcccgggtcgacccacgcgtccgggggaggcaatggttcctgatgatggctgggaagaatatctgaacaataagtgggacaggaatattgttgtagcagaaactgtgagcttttctgagctgaagcttcagccagagacagaacagcgcccgcacaaggtcagcttttttgttgataagaagaatgcccaggaagtgataaaatctgttgccgagagattggacaaatgtgggctagatgccaaaataatatatagtggtggccaggaccttgatatattacctcaaggagctggaaagggccaagcacttgcatatttgcttaaaaagctaagctcatgtggaaaaccgtccaacaatactcttggttggggtgactctggtaatgatgcagaattattcagcatccctggtgtacatggtgtcatggtcagcaatgcccaagaggaactacttcagtggtacacagaaaatgcgaaggataac

SEQ ID NO: 86878 - DNA, 548 bp, Zea mays
  unsure (1)..(548): unsure at all n locations
atgtgggcggtgtctgcgcctcagctcaagcangttatcagtacggctgcaccggtccggaattcccgggtcgacccacgcgtccgcccgggcggaccggagtcaggcagccgaagctagaaaagcaagcggctttggaagttggaatccgatggcgtccacctcgtgcttcctccaccagtccaccgcccgcgtggccgcgccgtcgccgcgcctcgccgccccgccgcgcagcgcgcaactgttcgtctgcaaggcccagaagcagcaggccgccgcggcggagagcgacgtgtcgcgccgcgccgcgctcgcgctcctcgccggcgtcgcggccgtcggcgccaaggcgagctccgccgncgccgnctacggggaagcagccaacgtgttcggcangaccaagaagaacacggactttattctctacgttggcgacgggttcaagctggtggatccgttccagtgggaccccaagcagggaccggaagttccccggcaagtgcttcggttcgaggacaactcgacgccaacggcacctggtccgc

SEQ ID NO: 86879 - DNA, 548 bp, Zea mays
  unsure (1)..(548): unsure at all n locations
gaagtnataagggaatgccatagcttgagctacgtattacgatttagtcgcaccggcgcggaattctcgggtcgacccacgcgtccggggaggagcacctgtgcttccagactctgcatcgcttcacggccgccacgctggagcacggcatgcacccgccggtctctcccaagcccgagtggcgcaagctcatggacgagatggcggtcgtggccacggaggagtaccgctcggtcgtcgtcaaggagccgcgcttcgtcgagtacttcagatcggctacaccggagaccgagtacgggaggatgaacatcggcagccggccagccaagaggaggcccggcggcggcatcacgaccctgcgcgccatcccctggaacttcttgtgggactagaacaagttccaacttcccggggtgctgggaatcggcgccctccttcaattcggcattcaccaggacctccaggaccttcctggtcctcaagaggaggtccactaggggccatttcttaaaggtatccctggacctgctgaacatgtttccggcaag

SEQ ID NO: 86880 - DNA, 542 bp, Zea mays
  unsure (1)..(542): unsure at all n locations
ggggaaggagttgtctgagctagtaatgatagtantactcaccgctccggaattcccgggtcgacccacgcgtccggcaagctcgatctactactactactagctggtacacatactagccagcctgccagccagcttgcgatggcgcccaccgtgatgatggcctcgtcggcaaccgccgtcgccccgttccagggtctcaagtccgccgccagcctccccgtcgcccgccgcagcaccaggagcctcggcaacgtcagcaacggcggaaggatccggtgcatgcaggtgtggccgggctacggcaaccagaagttcgagacgctgtcgtacctgccgncgctttcgacggacgacctgctggagcaagtggactacctgctgcgcaacggctggatacccttgctcgagttcagcaggcctcggttcgtgtaccgggagaacttcaacttcccgggctactacgacggccggtactggaccatggtgaagctggccatggtccggttgaccgacggcaagcaagtggtccaggagctgca

SEQ ID NO: 86881 - DNA, 543 bp, Zea mays
  unsure (1)..(543): unsure at all n locations
gggggaggccggngtttaattattgaattggggcaagacagtattgctcaccggtccggaattcccgggtcgacccacgcgtacgagatcgtactggaccaacctgggtttaatcgttgatcacacacagacacaacattctggggcaggggcctggcgaacccggggccacaaaacggccccatcgtggcccgtttcggttcgggtggcggcaggcgagcctgctcgaagaggtggcgaagacatcgacctnctcttgaccgccgcttgggttccccggcgccgtggcgcccgactacctggacggctcgcttgtcggcgactacgggttcgacccgttcgtctcgggaagcccctggagtacctgcagttcgagttggactcgcttgaccagaacctggccaagaatgaggccggcggcatcatcggcacccggttcgagtcctccgaagtcaagtccaccccgttgcagccctacagcgaggtgttcggccttcagcggttccgcgagtgcgagctcatccacggncgctgggccatgct

SEQ ID NO: 86882 - DNA, 546 bp, Zea mays
  unsure (1)..(546): unsure at all n locations
tgggagtcagttgtctgaggctgactctttgattgatgcatgactatcatnatnagncaggggtcggccgcgcgtccgctccgcgctagctgaggacggtacagcggctcagaggtgcgacgtacgacgacgacggctcaggcgccacacatggcatcccagctctccgccgccgtgccccggttccacggcctccggggctacgccgcgcccaggtccgcggtggcagcgctgccgtccgtgagggtgggcaggaagaggtcgtcgtcgcagggcatccgctgcgactacatcggctccgccaccaacctgatcatggtgacgacgacgacgctgatgctgttcgcggggcggttcgggctggcgccgtccgcgaaccgcaaggccacggcggggctgaagctggaagcgcgcgactncggcctgcagacgggtgaccccgccgggttcaccctcgccgacacgctggcctgcggcgccgtcggccacatcctcggcgtcggcatcgtgctcgggctcaagaacaccggcgccctcgaccagatn

SEQ ID NO: 86883 - DNA, 556 bp, Zea mays
  unsure (1)..(556): unsure at all n locations
gaggatggagtgngtttanttacgaagctgtatggaaatcgtatnactcatccagtccggaattcccgggtcgacccacgcgtccgagatcgtactggaccaatctgccaccacactttgatcacacacagacacaggaagttgggatcggaaaaatgcaggctgccgctactgccgccgggttctcggccgtgctgcccgccaagggcaggccggcggcgaagagcaaggtggtggcccgtgtccccgccacaaggaggagcgtccgcgcagctgccgtcgtcgcgaccgaagccgcgcagatcgactacagctcaagcgtctcgggggtcccgatggaagcctgcgacctgcttggtggccacgcctgccaagggcccatggtcccggaaagcaaacccggcttggcggcggcggccgcgagcaggaatgtggtcggggtggacaaggactacctgtcctacgacgagccaaaagacgtgttcccgggccaagcgtgcgacgacctcggcggcgagttctgcgaggcgccgtaccangaacggcgtctncaggn

SEQ ID NO: 86884 - DNA, 540 bp, Zea mays
  unsure (1)..(540): unsure at all n locations
tagttgagcgcagtagcttgcccatgcattaacgatcgatccgcaccggcactgaattcccgggtcgacccacgcgtccggacacgatcgcgagcgcacgcacgtaagcacgttgtctgaagctcaagttagaagaagcaccagtgcctgatcgatggcggcccaggctctcctctccggccggcagctgctgggccgccccgtgcagtcggccgtctctaggtcgtcggcgaggaaggcgcccttcgtcgtcagggccagctccagcccttcagcctagcatggtgccgacaggcagctgtggttcgcgtccaagcagtccctctgctacctcgatggctcgctgcccggcgactattgcctttaccccgctggccctntggaccctgaaggcaccggtggccttatttagcccaaatggctggcctacggcctggtggttcacggggggcttgtcatgcctggttcaggacctacccgttggctccgatttctttgtagtataggttttcattttgtccggacagtgcgttacctgtt

SEQ ID NO: 86885 - DNA, 523 bp, Zea mays
  unsure (1)..(523): unsure at all n locations
tgggaaaaggttctgtacaccaagaaatagtaggtactactgttcggattccggctcgacccacgcgtccgcgcagaaaaagaaaaagaaaagccaaaggcaaaggcaaaggaatcccaatcaggcaggcagggggaagaaccagctgctgcggccggagatgtcgtcgcagctgatcgaggagcaccggtcgggcgcggaggtgcacgtcgggcacgagctgtgcgagcgcaagtcgcgcgagttcatggtggagctgggcctccccgacgggctcctcccgctgcccagcctggacgaggtgggctacaaccggtcgacggggttcgtgtggctgcggcaggccgtcggcctgacccacaccttcggctccatcggcaagcaggtgtggtacgacagggaagtgacggcgttcgtggagcccgggcggatgcacggtctcgccggngtgaagagcaaggagctcctcatctgggtcaccatctccgagatcgtcctcagcccctccggcaccaagatcgtg

SEQ ID NO: 86886 - DNA, 523 bp, Zea mays
  unsure (1)..(523): unsure at all n locations
ggaggagtttcgtctattaagcacatgtaagtnacgctcgtccggtccggaattcccgggtcgacccacgcgtccgtaacctccttgcagaccaacgtaagagaatcctgaattttaatcaacgtatagtgagtgcccttgatgttgctattgcattgacttatctccatttgtgttctggggacgctttaatctgttacaacttgaggacgtcaaacatcctactgacagagagctaccgagccaaagtgtgctgttctgaactgtcaaaaagtggtaatatcgtgctattaaagggaacagggggctacattgatccagagtacttggagacctcagagctcactgccaaatctgatgtctactcttttggaataatactcttagaaatcatatcttctcatgggccacaagactgggatgtattgatgaaccaccggcaaagcagtgttgtacaatgggctcttgagaaattctatgacgacctcatgaatgagatattggattaccgtatggaggatcg

SEQ ID NO: 86887 - DNA, 530 bp, Zea mays
  unsure (1)..(530): unsure at all n locations
gggttaggtgggttttaccatgagcttactgcactctcgaccggttcggaattcccgggtcgacccacgcgtccgggggagaagagctagagggatgggtggcggcacggtggtgtgtgtcaccggcggcagcggctacctcgggagctggctcgtccacgccaccctgcggagcctcgcggacgagaagaagacggggctgctccgggcgctccccggcgcggcggagcggctgcggctgttcgaggcggacatgtacgacgccgacaccttcgagcccgccatcgccggctgccacttcgtcttcctcgtcgccacgcccctgacgcacgaccccaccagcaccaagtacaaaaacacgacggaggcggcggtggacgcggcgcgcatcaatcctccgcagtgcgcgctgtccggcacggtgaagcgcgtcatccacacggggctcgtcacgggcgcgtcgccgctcaaggaggacggtancgggtacaaggctttgccgaacaggtcaattgaccccggttaacttt

SEQ ID NO: 86888 - DNA, 402 bp, Zea mays
agtggagtttagctgactgcatcgaccttcggattcccgggtcgacccacctcgaatctcaagtctagcatgtgccctttatcactctttacctactcagggagtaatcatatgatcggcatagttatttgatgggcccatagtcaccctattgtcacctaatacctgctgcttgatcactgatattctgctctgctatatgcttgattcctcagctacatttcttcaagcattttgattcattatgcttcatctatactcttggcactgtcggtatttgttttaacctattctttcaccgtaagttctcatgttcttaccttatggtgactttgtcatatacatagacttttcctacttgcttctttgcccataccccttaatttttaaaaagggtttttt

SEQ ID NO: 86889 - DNA, 528 bp, Zea mays
aggtagagcgtgtctgtcatgcattaagactatctgcatcctctccggaattcccgggtcgacccacgcgtccgtggaaaagctggaaacctttaccaaagtggataccagctcaatggaagcgcctatggcatctgaaagcacataagcaatacatggttatgggatcgtgttcgagttagcggtggtgcatatggaggattttgtgattttgacacccattcaggagtgttctcatatttatcatatcgtgatccaaacttactgaaaacactagaggtctatgatgagacagcaagattcctcagagagctagaattggatgatgatgcactcacaaaagctattattggaaccataggcgatgttgacgcctaccagctaccagatgctaaaggttacagcagcctaatgagatatttgctgggcatcacggatgaagaacgccaacaaaagacgtgtagagatacttacaaacaagcccgaagggttttcaaggagttcgctgatgcttgtgaaaccatcagg

SEQ ID NO: 86890 - DNA, 519 bp, Zea mays
  unsure (1)..(519): unsure at all n locations
ngagttaagagttatctgattatagacaagacagtattctctaccgcgttcggaattcccgggtcgacccacgcgtccgcagatattctggttacgatgaactgaagcatgacgttgcccgtatgtttggaattgaggggcagctcagcgaccaaaacagagttggctggaaactggtttacgaagatcacgagaaggatgtcctattagttggtgatgacccatgggaggacttcgtgaactgcgtgcggtgcatcaggattctttcgccgcaggaagagaggcaaatgaggctggccagcgactacggagacagctttcttggcaaccaagcgtgtagcagctcggacgggggtcgtccgtggagggtcaccggcgactagaaatagcaggctatgcctgagcacaaatgtttgatataatccgtcccacgatagcaagaaaatgatacgcgatttctgagcacaaacttttgcactcagatgatcgtgcaaacaggtagcatttttaggaaaaatt

SEQ ID NO: 86891 - DNA, 524 bp, Zea mays
  unsure (1)..(524): unsure at all n locations
aggggaggttcttactataagaacatagtatttctcgtaccggtccggaattcccgggtcgacgcacgcgtccggtgcgatccaaacccgaattcgcccgctaactctgaagccgcccgcatgttcagcgagaagaagcgagagtacaaccgcaaagttcgggaggtcgtggagcagagctggacggcggactgatgatgccctgtgttgcgtcgcgctgtgctgcgcagctgctcactgcgccccgcgtccgtccattccataccaaaaaaagaaaatggcaaagccgaactcagctgttgctgctttcgttgccctgtgtcaagacgactgcttctctatgaacattttaccttcctgtgctgtatctggaatacaaacttaattatctctagcactgtggcaacatcttatcttatatgaaatttcctccgggaaaacgagaatgatttgctcgggtgattatttcatgaccagccaggttgctgtactaaactatggtacttatttcagctaattttgan

SEQ ID NO: 86892 - DNA, 512 bp, Zea mays
  unsure (1)..(512): unsure at all n locations
gagtaagggttttggccacgaatagaagtaggtgcaacccgtccggaattcccggtcgacccacgcgtccggctgcctccccctcgcccagcagcagggagcagccatgccaggggaccacggctccgggggcgacatctccttcgccggacgcttcacggccagcgccatcgcagcatgcttcgcagagatatgtaccatcccgctcgacacggccaaggtcaggctccagctgcagaagaacgtcgtcgccgccgccgcctccggggacgccgcgccagcgcttcccaagtaccgcggcctgctcggaactgccgccaccatcgctagggaggaaggggccgcagcgctctggaagggcatcgtcccgggcctncaccgacagtgcatctacggggggctccgcattggcctctacgagcctgtcaaatccttctacgtcggcaaagaccacgtttgggatgtccctttgtccaaaaagaaaggccgccggttcaacaactggtgccatc

SEQ ID NO: 86893 - DNA, 593 bp, Zea mays
  unsure (1)..(593): unsure at all n locations
ggtngaggggtgnttttgtcncacgtatagtagnaggttcgtcactactcgtactcggttcccggaatttcccggcggaccagagatatgtgtctggtgctttttctttttaaacctggaaataaccgtagaacagtanataggtcttcagaaaagggcgtgggggtgttatanntcattgatatcatagtcggaagccatgccaagcgaaaggccctcttgagaagtgtctaagaatnngccctgtccactttactctctctgatctgtattccaaggagattacccttcaacataataacatnttacatgatgagcnttcacttcattctcatncgcgtttggagcaagtataatgataaaaacaanttggaaaccgctatctgaatggatcgaacttaaacttntgtcgctcaaggtggcacctaacatcatgcatncctttgagtgaggcaatgactttgctgtcaacttctcacgatgcgcttccacaaatctattttgttactgatgggtcagttgatgatgaacggaatatctgccatacattgaaaactcaacttattaaaagtggatctaagtctcctcggatn

SEQ ID NO: 86894 - DNA, 522 bp, Zea mays
  unsure (1)..(522): unsure at all n locations
gagtatatgcctgttgaannttgccaatntgcccagtacnattatcatacccattcccaactggagccacgacccacgcgtcctctctcgtccagcaccatggtttcgcttatgctctccgctaccacagctccgctccggtaaattggcagcctgtccgagttctccgctctcatgagctccgcctcgctgtccatgctccagaatgccaccttcgacgacttcatgtacgccgtctccttcatgacccaccccgtcggcacgagcatccgttcacctcgggcaccgacggatgccaatctaaatgtggccatcaacggattctgccacatctgactcaacttccttcggtgctgacacggtcactgcgacacctctcccctccacgtcatctccatcaacgacaccggcagtgtcaaacaaacgttccacctgcttaagtacaactacactctcagaattttttactcctacgttaaagcccgttccgtaacaaccccatttttcttgactttaaaagtt

SEQ ID NO: 86895 - DNA, 523 bp, Zea mays
  unsure (1)..(523): unsure at all n locations
nggataggatcttattaaagagaaggaagtagtgctctctcggtccggaattcccgggtcgacccacgcgtccgagtcgcagcagctagcgcccggccggccagtcgagtgagtccatcctccatcgccagccagatggccgccaccgccctgagcatgagcatcctccgcgcgccgccgccctgcttctcgtccccactcaggctcagggtcgcggttgccaagccgctggcggcccccatgcggcgccagctgctgcgcgcgcaggccacctacaacgtgaagctgatcacgccggagggggaggtggagctgcaggtgcccgacgacgtctacatcctggacttcgccgaggaggaaggcatcgacctgcccttctcctgccgtgcggggtcctgctcctcctgcgccggcaaggtcgtctctggctccgtcgaccagtccgaccagagcttnctcaacgacaaccaggtcgccgacggttgggtgctcacctgcgctgcgtaccccaccttcgacgtcg

SEQ ID NO: 86896 - DNA, 537 bp, Zea mays
  unsure (1)..(537): unsure at all n locations
gggtntaacgggatgcgtgtgtttcacaagaaaaaaagtatcgctactacaggtccggaattcccgggtcgaccgacgcgtccgcatcgaaacgcaaatcagagagacaggaaaagaaaaaagaattttgatcaaatcaagagagggaaggatcccttacctgatttgaatttcatcctcctttaaataggatatgctctaagtcttcccatactttcctataatgactgcaacgattttctccattttgcgaattcctattttatttgaagtatattactatcatatacattatctaaatcgatccactttaaataaaatagaaaaaatcgaaagaaaaaaaaaaagaaagagtaaataataaaacaggatattctgtttcataattctgaaatagagttcttttttttagtattactcctcattaggatgtatatattaatcatcctattttaatatatattaatcatcctattttaattaggttctaatccaattagtagtaagtattttcttttttatttaataggctctgac

SEQ ID NO: 86897 - DNA, 527 bp, Zea mays
  unsure (1)..(527): unsure at all n locations
ggttagaaggcttcttaacgaccagcagtatagcatacttcgtaccggtccggaattcccgggtcgacccacgcgtccgcgtctcctccagtccttcgaaaaccctgaaaccttggtgaagccgagacgagtttggggcaattatccaagcagctagtgctagcatctatggcgacctccgttcgtggtttcagtagcgccccctgcagggatgtgccgggcagctacggccttccgctggtgggcgccgtccgcgaccgcctcgacttctactacttccagggccaggacaagtacttcgagtcccgcgtggagcgctacggctccaccgtggtgcgcatgaacgtcccgccgggccccttcatggcgcgcgacccgcgggtggtggcggtcctggacgccaagagcttccccgtcctcttcgacatggacaaagtggagaagaaggacctgttcacgggcacctacatgcnctncaccttcctcaccggcggncaccgcgtctgcgcctacctngacccctccga

SEQ ID NO: 86898 - DNA, 528 bp, Zea mays
  unsure (1)..(528): unsure at all n locations
ngantagagggttncttaaagacggggaagaaagtattgtcgtaccggtccggaattcccgggtcgacccacgcgtccgaaatctttcatcaaacaaatttagtggtgaaattcctggaactttaggacaacttgagacaaatacagaccattcaaatggaccaaaacattcttactggaaacattccgcccatatttagtcgactatatagcttgaacttgctcaatctttcccataacaatttatctggccccatgccaacttttctaagtggtctaaatcttagtaaactagatctatcctacaacaattttcaaggacaaataccaagaactggtgtattcaataatcccacaattgtttcactagatggcaatccagaattgtgtggaggagccatggatttgcatatgcctncgtgccatgatacttcaaaaagagtaagtagatcaaacttattgatcaaaatattgatcccaatttttgggttcatgtcactcgtattgctggcctactntntactccta

SEQ ID NO: 86899 - DNA, 525 bp, Zea mays
  unsure (1)..(525): unsure at all n locations
nggggagctctcgtcttaccaagcaaaaagatagtaacgctcgtaccggtccggaattcccgggtcgacccacgcgtccggtagaggagcacaagtgagctagctagctctagctaggccacgcactgctgcgctgggtcatcatcaggtcgtgctagctagctagctatagctgggccgggggacgtacgacatcagcgcgcggccatgggcgtggggaagctgatgaacgacgtgaagccatacctggcgatggtgctgctgcaggtggggttctccgggatgtacatcgtctccgtcgcctacctcaagcgcggcatgaaccacttcgtcctcgtcgtctaccgcaacctcgtcgccaccgtcgtcatggcccccttcgacctcctcttcgagaagcgagtgaagcccaagatgacgccgctcatcttcctcaagatcatggggctcgccgtgctcgagcctgtgctcgaccagaacatgtactacctcggcgcgaagctgacgtccgcgaccttcgcctcg

SEQ ID NO: 86900 - DNA, 517 bp, Zea mays
aggtaggaagtgttgctcatgcaaggggaggaactttatacccgtccggaattcccgggtcgacccacgcgtccgcagcgcaaacacaatggttgccctagagagtggcaacgagagtggaatccaaaatggtgacaggtctcgccgtgaagctgcgttgatgaagtttcgcatgaaaaggaaagatagatgcttcgagaaaaaagttaggtatcatagcaggaagaagctcgcagagcaaaggccaagagttaagggacaatttgtaagccaaaagctgaactcagctacaacaacagacgcagaagctgactcgtgaccggcgtcaagtcatcactgtaacttattcttcccttcccaccaggtgtgggcaatcggacttgtaagactgaaagctggcagaagttttttcccttccatggttagcctttctgcacaacgggtgaactcttgtgtcgggtgtttggtgccgttgtggccttatttttgtaaaggcatcaaattgacaaatgttcaa

SEQ ID NO: 86901 - DNA, 534 bp, Zea mays
  unsure (1)..(534): unsure at all n locations
agcatgaggaaggcctgtgtanccttccatctctcgcatcgncgtacngcaccggtacggaattcccgcggcgagccacgcgtacaagatctttcatcaaacaaatatagttgtgaaattcctggaactttacgacagcttggacaaatacacaccattcaaatggaccaaaacattcttactggaaacattccgcccatatttagtcgactatatagcttgaacttgctcaatctttcccataacaatttatctggccccatgccaacttttctaagtggtctaaatcttagtaaactagatctatcctacaacaattttcaaggacaaataccaagaactggtgtattcaataatcccacaattgtttcactagatggcaatccagaattgtgtggaggagccatggatttgcatatgccttcgtgccatgatacttcaaaaagagtaggtagatcaaacttattgatcaaaatattgatcccaatttttgggttcatgtcactcgtattgctggcctactntttactccat

SEQ ID NO: 86902 - DNA, 522 bp, Zea mays
  unsure (1)..(522): unsure at all n locations
ngggaagtgtcttatatagaggaagatagtatgtctcgtctcggtccggaattcccgggtcgacccacgcgtccggattgaagaagcacttgaagaggctcaatgcgcccaagcattggatgctcgacaagcttggcggagcttttgctcccaagccatcttctggacctcacaagtccagggagtgccttcctctgatcctcatcatcaggaacaggctcaagtatgctctgaactaccgtgaggtcatttctatcctgatgcaacgccatgtacttgttgatggcaaggtcaggactgacaagacctaccctgctgggttcatggatgtcatttccatccctaagacaatggagaactacaggctgctttatgacaccaagggccgcttccgtcttcacccaatcagggatgaagatgccaagttcaagctctgcaaggtgaggtccgttcagtttggccagaaaggcatccnctacctgaacacctacgacggccgtaccatccgctaccccgacccgc

SEQ ID NO: 86903 - DNA, 534 bp, Zea mays
  unsure (1)..(534): unsure at all n locations
nggtgggggagggtgtctgtaaatgagggaaggaggtattgctcntctcggtccggaattcccggggagcttcctcttgagccgtctctttcaaggactttgattgaagcaaatgaattgggatgcctatctcaggcggtaagtgttgcatcgattttgtcagcagaaataacattgcgatcagttagcaaggacgtggtggatggaaagaggaaaaggcaggagctccctgatgggtctggctggggtgaccatatacaattgcttcagatatttgaaagctgggaccaaactggctatgacacaaaatggtgctctcatcatgatttgcaggtgcggggtatgaaattgagcaaagatgtgaggaaccaactatgtcagattattcaaaaaattgcaaaaggttcaactgatgtggatgcaaggaaaagccggaagaatgaccctgattatagaaagctgangagagctctctgcgtangatatggtaaccagctagctgagaggatgctgcatcacaatggctaccatact

SEQ ID NO: 86904 - DNA, 524 bp, Zea mays
ggggtatgttcttaaaatgtgagagacagtaaggttcgtcccggtccggaattcccggggcgacccacgcgtccgaaaccagaacttgacttatatactgaacacccatcatcactatgatcatactggtggaagcttggaattgaaggcaaaatatggtgcaaaggtaattggttctgagaaggataaggacagaatacctggcattgacatcacgcttaaggagggtgacacatggatgttcgctggccatcaagttcttgtactggaaactcctgggcatacaacaggtcatgtgtgctattatttcgctggttctggagctatatttacaggtgacaccttgttcaatctatcatgcggaaagctttttgaagggactccacagcagatgtatgcctcactccagaaaattacagctctacccgatgatacaaaagtatactgtgggcatgaatataccttgagtaatgcaaagtttgccttgagtgtagaaaccgggaaataaagcattgcaggaatat

SEQ ID NO: 86905 - DNA, 530 bp, Zea mays
  unsure (1)..(530): unsure at all n locations
ngttnnntgggggaaaggttgttcttaagagggggaagaaagcatactcgtaccggtccggaattcccgggtcgacccacgcgtccgcgacgccaacgggagaaagggcaagggcaagggcgtgtaccagttcgtcggcgggtgcggcgcgaacgtcgacggatacagcccaatctacaacgaggatgactggtctcccaccggcgacgtctacgtcggtggaaccactgggcttctgatctgggccgtcaccctcgctgggatcctcggcggcggcgccctactcgtctacaacaccagcgccctctacggctaaggatatccaatgcatgcgcttcttgcgattcgtcatgtaaaatcagggtgtctgtctataatctagcctccatggatgctcaaccttcgtcatgtaacaattatcagtgctactctgcatacataattttgatgctatataaaaaaaagaacaagggcggccgctctagaggatccaagcttacgtacgcgtgcatgcgacgtcatagctcttc

SEQ ID NO: 86906 - DNA, 514 bp, Zea mays
agttagcggtctggtaggggaggggaagtagtgtcaacccgtccggaattcccgggtcgacccacgcgtccgattcaaaccgcccgttccccgtgtccgtgccaagcaagccgagcccaacccccaagggccagctgctcggtgctccacgcgatggcgcagaaggagactaatggcagcaacggcgatcacatctccacccgcccgccgccgaccccctcgcccctccgcttctccaagttctttcaggctaacctgcggatcctggtcactggtggggcgggcttcatcggctcgcacctcgtagacaagctcatggagaacgagaagcacgaggtcattgttgctgataactttttcactggttcaaaagacaacctgaagaagtggattggccacccaagatttgagctcatccgtcatgatgtcaccgagccgcttcttgtggaagttgaccaaatctatcaccttgctttgccctgctttaccaatcttcttcaagcccaaccctgtt

SEQ ID NO: 86907 - DNA, 514 bp, Zea mays
  unsure (1)..(514): unsure at all n locations
gagggagaaggattgcgaagggggggggggaagttgaacctctccggaattcccgggtcgacccacgcgtccgcgggagtagtcgacgcgccgtcactgaatcctcagatcacggctagccgtaatcacgccactctgctgactcccggcgagcagtgtaacattttccttcagccatgggcaaggagaagactcacatcaacattgtggtcattggacatgtcgactctggcaagtcgaccaccactggccacctgatctacaagctcggcggtattgacaagcgtgtgattgagaggttcgagaaagaggccgcggagatgaacaagcggtcattcaagtatgcctgggtgcttgacaagctcaaggccgaacgtgagagaagtatcacaattgatattgctttgtggaagttcgagaccaccaagtactactgcactgtcattgatgcccctggacaccgtgacttcatcaagaatatgattactggcactttccaagttgactgcgctgn

SEQ ID NO: 86908 - DNA, 527 bp, Zea mays
  unsure (1)..(527): unsure at all n locations
ggttaagagtgctctgtgccttcacctgcagtacgncgtactggtccggaattcccgggtcgacgcacgcgtccggtttagttagggtggccatttggtgcattggtgaatatggagaaatgctggtcaacgatgggagtatgttagacatggaggaaccgatcacggtaactgaatctgatgctgtggatgccgtagagattgctcttcagcgttactcggcggatgttactaccagggctatgtgtcttgtctctcttttgaagctttcttcccggtttccaccaacatcagagagaataaaagaaatagttgcgcaaaataaagggaatactgtgcttgaattgcagcaaagatctattgaattcagttccattatacaaagacatcagtcgataaaatcatctttgcttgaacgtatgcctgcattggatgaagcaaattatttggtgaagagagctgcttctacacaggctgcaggttcatctgtaaattctgctcctgcagtcacttctggaggcccactt

SEQ ID NO: 86909 - DNA, 527 bp, Zea mays
  unsure (1)..(527): unsure at all n locations
nggggagcgtcagtttatagaaagaggtagtatggctcgtctcggtccggaattcccgggagaaggccgacgcgctgcagaaggtcatagtcgacgcagggtacaggccggttcctaacgcgagaggcgaggaggtgctggcgaagaagtacaggatcaggctgagggggatcgatgcgcccgagagcgcgatgccgtatggcaaggaagccaaggaggcgctgctcaaacttgtccaggggaagagcttgaaggtctacgtgtacgacgaggaccggtacggtagatgcgtcggagacatctactgcgacggggtatttgtgcaggagcaaatgctgaagaagggtttcgcgtggcactacaccgnctacgatcaacgcccggagctggccaagtgggagaaacaagcgcagaccggccggaagggcctgtgggcggcgtcgaagccacagaaaccatgggagtggaggaaggacaagcgcaacgggacagcatgaacaaacccncccgtgcatgggtcagtgtgt

SEQ ID NO: 86910 - DNA, 523 bp, Zea mays
  unsure (1)..(523): unsure at all n locations
ngggagggtcttctatgaaagacaagatagcatcctcgtaccggtccggaattcccggggcgacctacgcgtccgccgaccccctccgtttgccaacgactcccggctccactgtcgctcccgctccgttggctcccacgcaagacaatggtggccgatcgcctccgcctcgcgctgctgctctccgcgtgcctctgctccgcgtgggcgcgcccacgcctcgagccgaccatccgcctgccgtccgagcgcgcggcggccgacgacgccgtcgggacccggtgggccgtgctcatcgccggctccaacggctactacaactaccgccaccaggcggacatctgccatgcataccagatcatgaagaagggcggacttaaggacgagaacatcgttgtcttcatgtacgatgacatcgcgcatagcccggaaaatccgaggcctggtgtcatcataaatcatccccagggtggcgacgtctatgctggggtgccaaaggattacactgngcgagaggtcaacg

SEQ ID NO: 86911 - DNA, 504 bp, Zea mays
agttagagtgttttagctagctaacgactatatcataccgtccggaattccggtcgacccacgcgttcggcggagcagacgcgcgggcgtgctgcgcctgctgcccattggcggcgagccggcgtctgcgtggtgtacgcgcagatatgacgctgttcaacaagcaggggcgcaccctggaccgccacatcggggacggccttgagctgcctccggcggcgctgcagacgctgggccccgcgagcatcctgctgttcgtgcctgtttacgaccgcgcggtggtgccggcgctgcggtgggcgacgggcaacccgtcggggctgagcatgctgcagcgcgtgggcgcgggcatggcggtgtcgctggcgggcgtggcggtggccgcgctggtggaggcgcggcggctggcgatggcgcgggagcacgggttggtggacgacccgtccgcgaccgggcccatgagcttggcctggaacgtgccgcaatacgccatgatgggggtgg

SEQ ID NO: 86912 - DNA, 526 bp, Zea mays
  unsure (1)..(526): unsure at all n locations
agggaaggttctgttaagagggaggagggataggtagtctcggtccggaattcccgggtcgacccacgcgtccggcaaaagccaaaaggcatcaccgccgcgacgacgatggcagcctcgctccaagccgcgggcaccctgatgcagccggccaagatcggcggccgggcgccctttgcctcgctgccgtcccgcccgtcgtcgcaactcgcctgcagggcgttcggcgtcgacgccggcgccgccaggatcacgtgctccctgcaggacgtcgccagcaggtgcgtcgacgccgcgaagctcgccggcttcgcgctcgccacctcggcgctcctcgtctcgggcgcgagcgcggagggcacgcccaagaggctgacctacgacgagatccagagcaaaacgtacatggaggtgaaaggcacgggcacggcgaaccagtgcccgaccatcgacggccgcgtggagtcgttcccgttcaaggccgggcagtaccagatgaagaagctgtgcctggagccgacgtnct

SEQ ID NO: 86913 - DNA, 520 bp, Zea mays
aggttgggggggttgtaaaagcggaggagtagtgtctctcgtccggattcccgggtcgacgacgcgtccgtggtcaaaggtgtcacatatcctcttcgtcgattcaccggttggagctggattttgcttggcgagagatcccaaaggctacgatgtcggagacatctcggcctcactgcagctacaggaattcctcatcaagtggttcagtgatcatcccgagtacctcgcgaatcctttctacattggcggggactcctatgtcggaaaaatcgtgccgttcctcgggcagatgatttcagaaggtattgaacttggaagaagacccttccctaacctcaaaggctatctggtgggtaacccaatcacgggcgaaagtatagatttcacttccagagtgccctacgctcatggagtcggtatcatatcagatcaattgtatgagacgatattggggcattgccaaggagaggactacactagtcctgcaaacgctctgtgtgctcaggctctggacact

SEQ ID NO: 86914 - DNA, 525 bp, Zea mays
tggtttagagctttgtcctactgaacagtatgctacctcgtaccggtccggaattcccgggtcgacccacgcgtccggcgccttcctcgcggcgctggcgtcgtcgcccgacgctgcgctggcggacgtggcggcggcggacgccggcggcgacagccgcggccagctgctgctcgtcgtggtggcgcccgccatcgggtgggtgctgtacaacatcctgcagccggcgctgaaccagctgaaccgcatgcgcagcagccaggccgtggccgccggcctgggcctcggcgccgccgccgacgtcgggatggcggccccgcccgaagcctccgtcgccgtggtgcaggacctcgcggcaatcgccgtcgacgcgcccgccgacgacagccgcggcctcctactgctcatcgtcgtcgcgcccgccatcggctgggtgctcttcaacatcctccagccggcgctcaaccagctcaaccggatgcggtccgactgaagctagctagctagcgtacgtttccgtatccg

SEQ ID NO: 86915 - DNA, 514 bp, Zea mays
gagtaagaagggttggtaagggagggggggaaggtgaaacccgtccggaattcccgggtcgacccacgcgtccgcgaccttcaagtctcgctacgtagcagtgcaataaaaaaagcagccgcaatggcgagcagcaccatggccctctcctccacggccttcgccggcaaggccgtgaacgtgccgtcgtcgtccgccttcggcgaggcccgcgtgacgatgcgcaagacggcggcgaaggccaagccagcggcggcgtccgggagcccgtggtacggccccgaccgcgtgctgtacctgggcccactgtccggcgagccaccgagctacctgacgggcgagttcccgggcgactacggctgggacaccgcggggctgtcggcggacccggagacgttcgccaagaaccgggagctggaggtgatccactcccgctgggccatgctgggcgcgctcggctgcgtcttccccgagctgctcgccccgcacgggcgtcaaggtcgcgaagccgttt

SEQ ID NO: 86916 - DNA, 520 bp, Zea mays
  unsure (1)..(520): unsure at all n locations
tgaggtagggggtcgtcctcagtctgggagcnatcgcatactcggtccggaattcccgggtcgactcacgcgtccgcgtccggcaggggatgtggggctgcgtcaagaggatagagcctggccttcgggcgtgccaggttgggaggaccgccggagaggctgtttccaagtgtgctgccatggcacaggtcaccaccaggttcagtgccgacgagctcgtcatcgcagggccgggcaacacggaggccagttcttcttcgtccggcgacggcgcataggttgacaaggcgacgaagcactgggcgaacagcatacccaaggttctcatggtcggtggcgctgtggccctggcctgctgcaccttcgacggtgggttgttgaccaaagccgtcatcttcggcactgccaggaggtttgcaagagggctcaggaagctgtaggtaccgtgtaacggttgaacggaagatccaacgggacaacctaaaacaagtttgctgaattgcaacccgcttgcggtaat

SEQ ID NO: 86917 - DNA, 525 bp, Zea mays
ggttagggggttcctcgcctactgcatcagtagcactactggtccggtattgccgggtcgacgcacgcgttcggcccttgcgagtccaaaccctaaacctaaacctctcacccggcgccgtcgccgtcaccggggtcgtcccgaggccccatcccagcgcaaccgacttccgcctcggattgaagcaatgtcgtcggacgacgaggtcagggaggagaatgagctcgacctcttctccaacgatgtcgtcaccaagtacaagactgccgaccaaatcctgaacaacgctctgaagctggttgtgtctgagtgcaagcccaaagccaagattgttgacctttgtgagaaaggtgactctttcataagagagcaaactgggaatgtctacaagaatgcaaagaggaagattgaaaggggcattgctttcccaacctgtgtttctgtgaacaacacagtctggcacttctccccgcttaccacagatgatgcagttcttggaagaaatgattggctaaaattgacatg

SEQ ID NO: 86918 - DNA, 528 bp, Zea mays
  unsure (1)..(528): unsure at all n locations
ggttagagctttgtcctagaatgacaagtatagtcatcgctcgtaccggtccggaattcccgggtcgacccacgcgtccgcccacgcgtccgcggacgcgtgggcgccgccgccgcaagccgtccgccttgcccttgacgaaggcttggtcctgctccttgtatctccactccccccttcacagatccgttcctccagctagggttagcgttcctctgcagcgatggcgatcaagcggaccaaggcggagaagaagatcgcgtacgacaagaagctgtgcagcctgctcgatgagtacaccaaggtgctcatcgccctcgccgacaacgtcggttccaagcagctccaggacatccgccggggcctcaggggcgactcggtggtgctcatggggaagaacacgctcatcaggcgctgcatcaaagtgtacgccgagaagaccggtaaccacacctttgacccgctcatggacctnctggtcggcaacgtaggcctcatcttcaccaagggagacctcaaggaggtgcc

SEQ ID NO: 86919 - DNA, 568 bp, Zea mays
  unsure (1)..(568): unsure at all n locations
tgagagataatagtgagtaatgtattagttgggagtcgtgtctgaattttagcccatgantgctcatagccacnaccgctaccggttccggaattcccgggtgcgacccacgcgtgccgggncacccacgcaccactcttctcccccacgagtcccggtaccccgtgaggagccggagccggtgggcgtccacctcctgctgccgtcctccaccagtcaactcgcccgcctcggacgcgtcgccgcgcctggccgccgccccgccgcgcagcgcccagctgctcgtctgcaaggcccggaagcaggaagccgccgcggaccagagcgacgtctcgcgccgcgccgcgctcgcgctcctcgccggcgtcacggccgccgccggcgccaaagtgggtcctgccgccgcggcatacggagaagcagccaacgtgttcggcaagcccaaggcgagcacggagtacatcgggtacagcggcgacgggttcaagcttctggtcccggcccaatgggaaccccagcaaggaacgggagttccccgggcaggtgctccgtttccaggacaactttc

SEQ ID NO: 86920 - DNA, 521 bp, Zea mays
  unsure (1)..(521): unsure at all n locations
tattgagaaagaggctangttcatgctcagcccgttattgcactgccggtaccggtccggaattcccgggtcgacccacgcgtccgctgaaagtttcttggtttcgaggtgctcttattggttattggatcgctgtgtgtaaggtgtttctttccctttgagagcctttctagtttcttgggcaggctcttgagctaccaagcatgtcagattcaaatgtgaagtggattgatgggctccagttcacatcattgtactggcctccacccctcgatgcggagcagaagcaggcacaaattttggcatatgtcgagtactttggccagtttacagctgacaccgatcaattgcctgaagacataactcagcttatttcaaggtcctaatcatcaaaagaaaaatccttggtagaataaagtattggcaacttttggtcttcatcatccggagcatggtcatgcagttgcacatccaattctttcacgcatcatagatgggacgctgtgctatgatagacatgg

SEQ ID NO: 86921 - DNA, 534 bp, Zea mays
  unsure (1)..(534): unsure at all n locations
tggctaggctgcgtgctgcgccagtctatgacgtcaccgtcgtacngcntccggaattcccgggtcgacccacgcgtccggcgtgacagggcttctaactgtacatgttcgatggatggatttgaagaatggatcaggctctgaggggttgtttgcatcttattgatcttgctggtagtgagagggtagacaagtctgaagtaaccggcgatagattaaaagaagctcaatacattaacaaatcactctctgcgttaggtgatgttatttttgctttgtcacagaaaagtgcccatgtgccttatagaaacagcaagttaacacaagttcttcaaagttctttacgtggacaagcaaacactctcatgattgatcagataaatcctgatgttgagtcatattcagaaactatcagtactttaaagtttgctgaacggctgtctggagtagagttaggtgctgctagaagtaacaaggagggaaaagatattaaagagctattggtaccaggtggcgtctttgaagccacatttt

SEQ ID NO: 86922 - DNA, 518 bp, Zea mays
  unsure (1)..(518): unsure at all n locations
agtaagaagggtggcgtatgagcacgaattatctgcactgctcgtaccggtccggaattcccgggtcgacccacgcgtccggcgacacgatcgcgagcgcacgcacgtaagcacgttgtcggaagctcaagtgagaagaagcaccagtgcctgatcgatggcggcccaggctctcctctccggccggcagctgctgggccgccccgtgcagtcggccgtctctaggtcgtcggcgaggaaggcgcccttcgtcgtcagggccagctccagccctccagccaagcaaggtgccgacaggcagctgtggttcgcgtccaagcagtccctctactacctcgatggcacgctgcccggcgactatggcttcgacccgctgggcctctcggacccggagggcaccgggggcttcatcgagcccaagtggctggcctacggcgaggtgatcaacggccgctacgccatgctgggcgcggtgggcgccatcgnccccggagatcctttcgcaggatgggcatatt

SEQ ID NO: 86923 - DNA, 517 bp, Zea mays
  unsure (1)..(517): unsure at all n locations
gggttagacggctgtcggctgcccacgcnacgatcgcatgctgtaccggttcggaattcccggctcgacccacgcgttcgtggcttctcctccccctccggttcgggttcgggttcgtgaggttctccgggggtcggtttcgtgggtgagcggatcgagatggcggcgtcggatgttgagtaccgctgcttcgtcggcggcctcgcctgggccacggacgaccactccctccacaacgccttcagcacctacggcgaggtcctcgagtccaagatcatcctcgatcgggagacgcagaggttccgcggattcggcttcggcaccttctgcacggaggaggcgatgcggaacgccatcgaagacatgaacggcaagggactggacggacgctacatcaccggtcacgaggcccagtccctgcgtggccgtggaggccggagacggtgcgggataccgtggtggccgcgtaggcggctgctacagcggtggccggccgccgggattgccggaagctgct

SEQ ID NO: 86924 - DNA, 535 bp, Zea mays
  unsure (1)..(535): unsure at all n locations
gatatgttataggatggaggatatttagggaggcgttnattaggaggggggagattgtataccgttcggaattcccgggtcgacccacgcgtccggcgcctcttcctcgcaccaccaccgttactcaacacagcacaggcagctcgagagagagagagagagaaagatgtcgtggttcgggcaccaccaccacaaccagccggctcccccggcgtcgggccccaaccaggtgttcaagatcttctgccgcgccaacgagaactactgcctggccgtccgcgacggcgccgtcgtgctggccccggtcaaccccaaggacgaccaccagcactggtacaaggacatgcgcttcagcacccgggtcaaggacgaggaaggcatgccggcgttcgcgctcgtcaacaaggccacggggctcgccatcaagcactccctcggccagtcccacccggtcaagctcgcgcctttcaacccggaccaggaggacgcgtcggtgctttggaccgagagcaaggacgtgggcaagggctttcgt

SEQ ID NO: 86925 - DNA, 520 bp, Zea mays
catgtggggtgagggttgttctagccaagtatgtagtgctataccggttcggaattcccgggtcgacccacgcgtccgcgcacgcgtccgcccacgcgtccggcttggcgacggcggggctgaagctggaggcgggcgactccggcctgcagacgggtgaccccgccgggttcaccctcgccgacacgctggcctgcggcgccgtcggccacatcctcggcgtcggcatcgtgctcgggctcaagaacaccggcgccctcgaccagatcatcggctagatccctacgtcgccgttgttaagatcagactcagcagcctcgatcgcgccgccggccggcaggtgcaggtggtgactttgtaacgtgtgtgcgtgcgtacgtgtacattgcatccatcttggttccaatggacatatagctcctgttgctcctctaaaaaaaaaagactggaggacacgggctagagcgcaagaacggggctgggtggaggttccctagaaaaaaaaagggcgggccgtttt

SEQ ID NO: 86926 - DNA, 548 bp, Zea mays
taagagaagatatggatgatattgataagttagggaagacgtggctgatagaagacggaagagtaatgtaacactcgtaccggtccggaattcccgggtcgacccacgcgtccgggaacgtgtacgtggagttccgcgaggaggagcaggcggcccgcgccctggaggcgctgcagggccgctactactcgggccgccccatcatcgccgagttctcgccggtgactgacttccgggaggccacctgccggcagttcgaggagcacagctgcaaccgcggcggatactgcaactttatgcacgtcaagcaggtcggccgggacctgcggcggaagctgtttggccacctgcatcgctccctccggagccacagccggggcagccgcagcccgagcccataccgccgccgcggtagctcgtccaggtccagggaccgcgacgattactactactacaactaccgtagtggcagtggcagccgcaagagcagcgagaggcaccggaaccacgacagggacgggagccggcgtcgacgcgggcggtcgagg

SEQ ID NO: 86927 - DNA, 524 bp, Zea mays
  unsure (1)..(524): unsure at all n locations
tatttatgggagggtgtgnatttatgagggaggggatatagtatcgctcgtaccggtccggaattcccgggtcgacccacgcgtccgtgggcacgccggagttccccaacctgggaaagcactgcagcgtcggcgactgcaacgcagatcgacttcctccccttcacctgcgaccgctgcgaccatgtcttttgccttgatcaccgaagttatacatcacaccaatgcccaaatgcaaacatgaaagacgtcactgtcctcatctgcccactctgtgctaaaggtgttcgcctcaatccaagtgaagacccaaatatcacctgggatactcatgttaacactgattgtgatccatcaaattaccaaaaagtgatgaagaaaaagaaatgccctgttcctgggtgcagagagacactgacattttccaacaccatcagatgcaaagattgcaccagagaacactgcctaaagcacagatttgggcctgatcataagtgcccaggaccagganaagtggattctgg

SEQ ID NO: 86928 - DNA, 517 bp, Zea mays
  unsure (1)..(517): unsure at all n locations
aggttagagttttggggatgcaccacgcaatantgtatactctaccggttcggaatccggctcgaccacgcgtccgctccggggttcggtttcgtgggtgggcggatcgagatggcggcgtcggatgttgaggaccgctgcttcgtcggcggcctcgcctgggccacggacgaccactccctccacaacgccttcagcacctacggcgaggtcctcgagtccaagatcatcctcgatcgggagacgcagaggtcccgcggcttcggcttcgtcaccttctccacggaggaggcgatgcggaacgccatcgagggcatgaacggcaaggagctggacggccgcaacatcaccgtcaacgaggcccagtcccgcggcggccgtggaggcggcggcggcggctacggtggtggccgtggaggcggcggctacggcggtggcgggcgccgtgatggcggcggcggctaccgtggccgcngtggctaacgtgttggtggtggcgctacggcggtggcaaccc

SEQ ID NO: 86929 - DNA, 515 bp, Zea mays
agttagggtgtttgcggatgaatcagaaatatatcacactcgtaccggttcggaattcccggctcgacccacgcgtgcgcaggcattcgcgtaaacgatgcggagttagctcgtgacgatcggaggccatgtgctgggcgaaggtgagtggctgtcgctgaatgggtccactggcgaggtgatccttggaaagcagtcgatttccccaccagcccttagtggcgatctgggaactttcatggcctgcgtggatgatgttagaaagctcaaggtcctggctaacgccgatacccctgatgatgcattgactgcgcgaaacaatggggcacaaggaattggattatgccggacagagcacatgttctttgcttcagacgagaggattaaggctgtcaggcagatgattatggctcccacgcttgagctgaggcagcaagcgctcgaccgtctcttgccgtatcagaggtctgacttcgaaggcattttccgtgctatggattgaccttcccgtgacc

SEQ ID NO: 86930 - DNA, 520 bp, Zea mays
  unsure (1)..(520): unsure at all n locations
agtagagggggtgncgtcatgagtgggggggatagtagtattgctcgtaccggtccggaattcccgggtcgacccacgcgtccgctctggtccgtggccatggcgtcgtccatgctctccgctaccaccgtgccgctccagcaggggggcggcctgtccgagttctccgggctcaggagctccgcgtcgctgcccatgcgccggaatgccacctccgacgacttcatgtccgccgtctccttcaggacccacgcggtcggcacgagcggcgggtcgcggcgggcgccgacggaggcgaagctgaaggtggccatcaacgggttcggccgcatcgggcgcaacttcctgcggtgctggcacgggcgcggcgacgcctcgcccctcgacgtcatcggcatcaacgacaccggcggtgtcaagcaggcgttccacctgctcaagtacgactncacgctcggcatcttcgacgccgacgtcaaagcccgtcgcgacaacggccatttccgtcgacgggaaggcc

SEQ ID NO: 86931 - DNA, 543 bp, Zea mays
tgatgtaggtatggatgtagagaagatttagggggggagatgtgttacgaggagggagagtagtgtactaccggttcggaattcccgggtcgacccacgcgtccgcgtacctggagtttttggacagggtgcacacctctgagctgaagctgagggcacagagcctctgggaagttccacacccttggttgaatcttctgataccgaggagctcaatccgcagatttgctacggaagtctttggcaggatcctgaaagatagcaacaatggtcctatattgctttatccagtgaacaaatcaaagtgggacaacaaaacgtcagtggtcataccagatgaggaaattttctacctagtgggattcctttcttcagcaccgtctctctcaggtcacggcagcattgcacatgcgatgagcctgaacagccaaatagtagagttctgtgaagaggctgatattgggatgaaacagtatctagcacactacaccacacaggagcagtggaaaacccactttggaacaaggtgggagacatttgaac

SEQ ID NO: 86932 - DNA, 523 bp, Zea mays
tgagtttgaggataagatgtgagctcagcccgtgaggtagtgctctaccggttcggaattcccgggtcgacccacgcgtccgcctgcctgcaggctcctgcaactgctttgtcggcgctcgggacgctctccggcggggccggcggtgtctccggcctcatccgcctccgccgtcgggtggcccccgcgctcgcggcgccgtcgcaccacgccgctgggacgttgaactgcgccgccttgcccgatgccgccccgctcgtctggggacgccagctccgcccgtcgctcctcctccccgccacactgctcccgtcgtcgtcgcagggcgccaggaggcacacgccacggcggcccgccgcagccgcaggggaggccaagtctgtgggtttcctggagaagtacccggccctggtcactggcttcttcttcttcatgtggtacttgctcaacgtcatattcaacatcctcaacaagaggatctacaactaacttgccctatccatactttggggtgcttggacca

SEQ ID NO: 86933 - DNA, 521 bp, Zea mays
  unsure (1)..(521): unsure at all n locations
agaaaggcgtgtcnncggttgcaccccgacttatatcattactcgtaccggtccggaattcccgggtcgacccacgcgtccgggcttctcctccccctcttaccaagttctcctcgggttagggttccttagggttttgtggaggggcgatggcggcggctgatgtggagtaccgttgcttcgtcggcgggcttgcctgggccaccagcaacgagtcgctggagaatgccttcgcctcctacggcgagatcctcgactccaaggtcatcaccgaccgggagacggggaggtctcgcggcttcggcttcgttaccttctcctccgagaactccatgctcgacgctatcgagaacatgaacggcaaggagctcgacggccgtaacatcaccgttaaccaggcccagtcccgtggcggtggcggtggcggcggtggctacggcggcggtcgcggcggcggcggctatggtggcgggcgccgtgacggcggttattgcngcngttgccgctacggcggtcgcgcc

SEQ ID NO: 86934 - DNA, 529 bp, Zea mays
atgttttaaggaagatgataggggagaggttgttagagggggggggtaagttatacccgttcggaattcccgggtcgacccacgcgtccgggcgcggctaggcgccgaggacctctggtgcatcaagcggctcgcggacggctacggcgccggcccgctcggcgactggaccaaggcgccggccagacgctccatattcatcgacccgagggagttttaggctgataagtagtaaatacacttaggcctagctttagggtttttttttggttctccccgggtcgtcgtccgttggatcccgtatccgacggctcctagtagctagctctagagaaggtcccacccttttgggtttcgtttcaaaacatgtggtaacgcgcgcttgcttaggcgtaatttctgctagagaaccggaataggtaaccttttcaaaaaaaaaaaaaaagggcgggcgctctagaggatccaagcttacgtacgcgtgcatgccacgtcataactcttctatagtgtcacctaaaatcaattc

SEQ ID NO: 86935 - DNA, 535 bp, Zea mays
atgagtgttaatagatgtaagtgatttaggatgaggtttgtaatgtatgcggaggtatagtaacgctcgtaccggtccggaattcccgggtcgacccacgcgtccgcggacgcgtgggcttgagaggcctatcacaatggatgttggttccattgtgctcatggacctgctatggtctgatcctacagaaaatgatagtgtggagggtttgagacctaatgcacgagggcccggcttagtgacatttgggcctgatcgagtaacagaattctgtaaacgaaacaaattgcagttgatcataagagcccatgagtgtgttatggatgggtttgagcgtttcgctcatggacaattgatcactttattttcagcaacaaattactgtggtactgcgaacaacgcaggggccatacttgttgtcggcaggggcttagttatcgtgccaaagttaattcatccacttccacctcctgttaattcacctgagtcctcccccgaacgtggggatgccacatggatgcaggaacttaacatt

SEQ ID NO: 86936 - DNA, 523 bp, Zea mays
tgatgtatgggtaattggtgtctgttacgaagagagagtatagtatcgctcgtaccggttcggaattcccgggtcgacccacgcgtccgggtctagatcgcgagcgaccgccctttttttttttttttttgctttgactgtttgggaaaaaaaagggtcagtacatgtatgtgtaaaaaatctttcttgaacggctaacagcaattttacactctactagggctacatcgatccgagcgtcattcctactcgacgactcaacaaaatcctgggcgtggtaaagagtgctctacgacctcggcagtatcttgccgttatacatcttgtcgagcagctgcttggcttctgggcgtcgcaggagccccttgttgtttggcaggccagttccgagacagacagggcacaccaactttccccggccgtaacaaattcggcactcggtgaattcataaacatctttcgccctcttccgattgagggccttccatttccctgtgccaccacacatgtcgcatatcacagc

SEQ ID NO: 86937 - DNA, 518 bp, Zea mays
  unsure (1)..(518): unsure at all n locations
tatttgagggaaagtctggctgcatcgacacgaagttatagtatactcgtaccggtccggaattcccgggtcgacccacgcgtccgggagcctcatccccttgcccacttctacagcccctctgctgcagcaagaaggaaagaagctagcgcttatagcttgtcagccatggccaccgccgccgcgtctagcctcctcaagtcctccttcgcgggctcccggctcccggccgccacgcggaccacaccggcgtccctcgtggtggccaccggcccgcgcggcgccggcgcggggcccatctgcgcgtccatgtccatgtcctcctccaacccgccctacgacctgacgtccttccggttcagccccatcaaggagtccatcgtgtcccgcgagatgacccgtcgctacatgacggacatgatcacctacgccgacaccgacgtcgtcatcgtgggcgccggctccgcggngctgtcctgcgcgtacgagctcttcaaggaccccgncgtgagcatcgn

SEQ ID NO: 86938 - DNA, 523 bp, Zea mays
  unsure (1)..(523): unsure at all n locations
ttagttatgggaggagctgcgttatgaagaaagggagtataagtatngctcgtaccggtccggaattcccggctcgacccacgcgtccgagacgagtgtcaagtgaacctgaaacttgcggtgtcactggctggtatagcctgagtgtgagtgagtgatcgagctagctgagctccgatcctcgctagctagctaggataccgccataccacaagtcttcttcacaagtttaggagtgacagcaacaagagatctcgatggcctctgccaccgtgctcaagtcctccttccttcccaagaagtccgaatggggcgccaccaggcaggccgccgcgcccaggccgcccaccgtctccatggtcgtccgcgcctccgcctacgccgatgagctcgtgaagaccgcgaaaacgatcgcgtcgccggggcggggcatcctggcgatggacgagtcgaacgcgacgtgcgggaagcggctggcgtccatcgggctggagaacacggaggccaaccggcaggcgtaccg

SEQ ID NO: 86939 - DNA, 522 bp, Zea mays
tgatttatggaggaggttcgttaagaagggggagttatagtattgctcgtaccggtccggaattcccggctcgacccacgcgtccgcgctctcgctgcagaggaaaggcgaatatggcgatgaccgtcgaagtgcttgctgcgactcgcgttcatgttctccacgagtattctactgcagatactggcatgcgctttgtacagcaactggtggcccatgttagcagctctcatgtacgtccttgtaccaatgccatgcctgttttttggtggtggatccacacacttcttgaccagcagagaaggtggagggtggattaatgctgcaaaattcttgactggtgcatcggccatgggaagccttgctattccagcaattctgaggcatgctggcttaatcgagaccggggccatgttcatcgagttcacgtccttcttcatccttgtatgcacagtgctgtgcttccatagggcgactctggatgaagacttgttaatgcgcattttaccgacaccctgaacc

SEQ ID NO: 86940 - DNA, 522 bp, Zea mays
  unsure (1)..(522): unsure at all n locations
agggaagtcaggtcnncgctccgtatcttgacagatcagtagtacttctaccggttcggaattcccgggtcgacccacgcgtccggtcggcacctccgcttcaagatgcagatctttgtgaaaaccctgactggcgggactatcaccctcgaggtggagtcgtctgacaccattgacaacgttaaggccaagatccaggacaaggagggcatccccccagaccagcagcggctcatcttcgctggcaaacagcttgaggacgggcgcacgcttgctgactacaacatccagaaggagagcaccctccaccttgtgctccgcctcaggggaagcatgcagatcttcgtgaagaccctgaccggcaagactatcaccctcgaggtggagtcctgcgacaccattgacaacgtcaaggccaagaaccaggacaaggaaggcatccctccagaccagcagcggctcatctttgcttggaagcagcttgaggacgggcgcacgcttgccgactacaacatccagagg

SEQ ID NO: 86941 - DNA, 522 bp, Zea mays
ggggtaagaggttttgtatagagtgcgggggaaatagtattgctcgtaccggtccggaattcccgggtcgacccacgcgtccgtgttgctagggcataataggctatcaggaagcatcccgacaaaaattgtgaaccagagttccctacaaattctgggcttggaagcgaattttctacgtatggcgttgccatctaatattggcaatacccttcctaacctcctcgcactttccttgtacagtaacatgttccacggtccaatcccagcatcgctaggaaacgcttcaatcctcgtggtattagacttcacatctaacagtttcactggaaatgtacctagttccttgggaaatctaacctacctgaacttcctaaaactagaacagaacaaccttgaagcaaaaaacaatgaaggctgggaattcatagatgcattggccaaatgtacgtatctacaatacattttattatctgacaatcagctaccagggagccattacaaatttcagttgggaggttg

SEQ ID NO: 86942 - DNA, 522 bp, Zea mays
  unsure (1)..(522): unsure at all n locations
agtaagagatatctcntagttgnttcttcgactgtattgctaggccagtccccattccgcgatagacccacgcgtccgcgggagtagtcgacgcgccgtcactgtatcctttgatcactgctagccgtaatcacgccacggtgctgactcccggcgagcagtgtaacattttccttcagccatgggcaaggagaagactcacatcaacattgtggtcattggacatgtcgactctggcaagtcgaccaccactggccacctgatctacaagctcggcggtattgacaagcgtgtgattgagaggttcgagaaagaggccgcggagatgaacaagcggtcattcaagtatgcctgggtgcttgacaagctcaaagccgagcgtgagagaggtatcacaattgatattgctttgtggaagttcgagaccaccaagtactactgcactgtcattgatgcccctggacaccgtgacttcatcaaggatattattacttgcactttcccaagcttacttggcttgtt

SEQ ID NO: 86943 - DNA, 515 bp, Zea mays
  unsure (1)..(515): unsure at all n locations
tagtgaggatagggttgtctatgcaagtatgtattgctataccggttcggaattcccgggtcgacccacgcgtccggtgccaagccgcggccaccttgatgcatccggccaagatcggcggccgggcgccgtgcgcctggctgccgtcgtcccgcccgtcgtcgcaactcgccagggcgttcggcgtcgacgccggcgccgccaggatcacgtgctccctccagtccgacgtcagggacgtcgccagcaagtgcgtcgacgccgncaagctcgccggcttcgcgctcgccacctcggctctcctcgtctcgggcgcgagcgcggagggcacgcccaagaggctgacctacgacgagatccagagcaagacgtacctggaaggtgaaggcacgggcaccggcgaaccagtgcccgaccatcgacggcggcgtggactcggttccggtcaagcccggcaagtaccagatgaagaaactgtgcctggagccgacgtgcttcaacgtcaaagcggaggn

SEQ ID NO: 86944 - DNA, 519 bp, Zea mays
  unsure (1)..(519): unsure at all n locations
gattgatggaggaggtanctttatgaggaggaagatattgtactactcgtccggaattcccgggtcgacccacgcgtccgcgttgataaaaaatcatatcttctagtggataatccgaaaaggattgcagcaagatgtatctcctcttggttcatttttgacgtttgctcaacaattccatatcaagcgtttggtctactatttaaaaagcatgcaaatggcctcgcttacagaattcttaacatgctacggttatggcgccttcgtcgcctcagtgatctatttgccagactagaaaaggatattaggttggactactactggataaggtgcatcaaactaatatctgttactctttttacagtacattgttcaggatgtttcaattacctgatagctgatagataccccaatccagcaagaacctggataggagcagcaagaccagactacagatcagagagcctatgggttcgatatgttacatcgatttattggtctattacaacacttacaaca

SEQ ID NO: 86945 - DNA, 523 bp, Zea mays
gatttaggagagctgtgttaacgcaaggaagagtaattgctattgctcgtaccggtccggaattcccgggtcgacccacgcgtccgcgcttagatttcagtatctacttggacatcagtgatgaagttaagtttgcatggagaatccagcgggacatggcagagcgtgggcacagccttgaaagcatcaaggccagtatcgaggccaggaaaccagattttgatgcctttattgatccgcagaagcagtatgctgatgctgtgattgaagttctgccgacccagttgattcccgacgacaacgaaggaaaggtgctgcgtgttaagctcatcatgaaagaaggggtgaagaacttcaacccggtttatctctttgacgaaggatcgaccatcagctgggtgccttgtggaagaaagctcacatgctcttaccctggcatcaaattttcctatggcccggacacttacttcggaaacgaggtatctgctctggagatggatggggcaattcgacagactagatg

SEQ ID NO: 86946 - DNA, 524 bp, Zea mays
agtaagggggtttgagctacgacatagaagctaactgcattgctcgtaccggtccggaattcccgggtcgacccacgcgtccggagccatcgacacgatcgcgagcgcatgcacgtacgttgtcggaagctcgagttagaagaagcaccagtgcctgatcgatggcggcccaggctctcctctccggccggcagctgctgggccgccccgtgcagtcggccgtctctaggtcgtcggcgaggaaggcgcccttcgtcgtcagggccagctccagccctccagccaagcaaggtgccgacaggcagctgtggttcgcgtccaagcagtccctctcctacctcgatggcacgctgcccggcgactatggcttcgacccgctgggcctctcggacccggagggcaccgggggcttcatcgagcccaagtggctggcctatggcgaggtgatcaacggccgctacgccatgctgggcgcggtgggcgcccatcgcccggagatcttcggcaagatgggcatcatcccc

SEQ ID NO: 86947 - DNA, 514 bp, Zea mays
aatgtagggagaggctttgtttacgcaagagagtagtgtatacccggttcggattcccggctcgacccacgcgtccgagacgccacagcttgcgcccgcaatggcactcgtctccgcctcctcgtcctccaccggcgccgtcacggcgctccccaggaatgggcagcgggcgtcgtcctccttcctcggcggcaagacgctgctgagacaggccgaggcggcccggccgtcgttcgccgtgcgcgccgcggcggaccccaacaggccgatctggttccccggcagcacccctccgccgtggctcgacggcagccttcccggcgacttcggctttgatccctggggcctcggatctgacccggagagcctgcggtggaacgtgcaggcggagctggtgcactgccggtgggcgatgctcggcgcggcgggcatcttcatcccggagttcctgaccaagatcggcgtcctcaacacgcccttctggtacaccgtcggcgaacagcagtacttcacc

SEQ ID NO: 86948 - DNA, 522 bp, Zea mays
ggagtgaggttgaggttttgttaagtaaggggggagtattgtcataccggtccggaattcccgggtcgacccacgcgtccgagagcttcttgcaaagagctgcaagtcactgatttcattgaagattagtgactgcgagctttcagatttgatagagttcttccaatttgccacagcactggaagaatttgctggagggacattcaatgagcaaggggaactcagcaagtatgtgaatgttaaatttccatcaagactatgctccttgggacttacttacatgggaacaaatgaaatgcccattatgttccctttttctgcaatactaaagaagctggatttgcaatacactttcctcaccactgaggaccattgccagctcattgcaaaatgcccgaacttactagttctcgcggtgaggaatgtgattggagatagaggattaggagttgttgcggatacgtgcaagaagcttcaaaggctcaaaaatgaacgaggagatgatgaaggaggtgtgcaaga

SEQ ID NO: 86949 - DNA, 524 bp, Zea mays
  unsure (1)..(524): unsure at all n locations
ttattatataggaagagtgatcacagtcacgtacaaaagcattatagtattgctcgtaccggttcggaattcccgggtcgacccacgcgtccgggccacacacactcacacacacacagtctaacatccccccgcagtcgcaacgggggcaccacacatgatgagactggagtagaggccgaaggtaggagccgacgggttgaaatcccccccgcagtcgcagcgtcgtgatggtacgaatgttgcggctggagtagagaccggtgtgtgctcgaagaagacgatagcccctagatgccgaggtagccgaagtcgaggtggtcgcggtcggaagacgcgcagcaaaagcctgatcttcgggagggtcgacgttcgagcgtcaacgatcagcagggcgacacaacaaaagagcaccggcaggccgaccttcctgcttcttcgatcgtccaggcgtcaaggagccccgccagggaggccgacggcagcgcacgcatctacgccggtcanggtgtccgcgcccgttg

SEQ ID NO: 86950 - DNA, 523 bp, Zea mays
gagttatgatgaggttgatccacgcaagcacgtatatgcacaccggtaccggtccggaattcccgggtcgacccacgcgtccgcttgcggcaaaaccttgcgcgcaacaatggccgcctccctcccgaccaccggcgcgcgcctcgcggccccggccttcgcctaccggtcgcccaaggctccctccgccaccgccctcccgcgtgccgccgccttccctgcaatcgccgtcgcggcggcgcccctgcgcccgcgccgcgcgccgaggccggtggcggcccgggccgggggcgaggagcgggagacgatactgctccccgggtgcgactacaaccactggctgatcgtcatggagttccccaaggaccccgcgcccacccgcgagcagatgatcgacacctacctcaacacactcgccaccgtcctcggcagcatggaggaagccaagaagaacatgtacgcattcagcacgaccacctacaccggggtccaaggcaaccttggccaaggagaccgtcgagat

SEQ ID NO: 86951 - DNA, 556 bp, Zea mays
  unsure (1)..(556): unsure at all n locations
atgatataaattatagnattagaagataattggagttgaggctctgagtatagacgacggaaagtaaatgtcacactcgtaccggttcggaattcccgggcctttttttttttttttatatggtttcaatgtgtgtctgtatgtactgaactgtacaagcttatcgagaaagatcactgcgagtctacaacaatccacacccaacacaggcggtggacacaacccatccaataatctttcatgagtacagtgtcggagtcatcggccaatttcttcaaaattatcattaatttatgatgttcatgtaactatagtcgtaggataaggcagggccggtttggtttcatcacgcggatgggagcaccttcttgacgatctcatcactgagcgaggcgatctgggcgtcgagcgccttaacagcctcctccttctgcgcctcgaggttggcgagcgcctctacgagctcggcctccacacggctgcgcccctcgtccagcttggcctccagctccgcggtggtcttccttcttaatctggtaagcgccgccgcgatctc

SEQ ID NO: 86952 - DNA, 524 bp, Zea mays
  unsure (1)..(524): unsure at all n locations
agttagaaaagacgtcgtgatacggatcaacgacaatatagtattgctcgtaccggtccggaattcccgggtcgacccacgcgtccggatggcgtcgcacgagtcgctgcctatctccaagttcgtgggcgtggcgggcgcggggcccagggacgcgcgcccgtcgcacaactgcctgtaccgcgccgtggacatctacctcaagacacacccggggctggacgagatcgagcgggagaaggtgtgcagcgtcatggacccgctcaggctgtcgtaccaggcgcggatgcacgcgtcgcagaacaagcggctgccgctgcaggccgtgctcagcgtgctctactacgaccagctgaagatccgtagcgcggacggcagcggcggcacggaggaaaggtgggagacacagtcggccgccgggaaggcccgtgcgcaggcgcgggcggacgtgtcgctggcaagggagaacgaggcgctgcggttggagctggcgcggatgcgagcgtacgtgtcagggatgcacn

SEQ ID NO: 86953 - DNA, 527 bp, Zea mays
  unsure (1)..(527): unsure at all n locations
agttctgagggctggggtatgctgatagagactaatctgcactgctcgtaccggtccggaattcccgggtcgacccacgcgtccgcacttatccgaggttccgtgcagcagtggaaaagagcagattttagcagagcagcgagggtcggagaagcctccccaagcttcgaatcgctatgcagcccgtcaaggtgtacgccgaccggcggtcgcaaccctcccgagctgtcatcatcttctgcagggtgaaccagatcgatttcgaggaggtcacggtggatctgttcaagtctcagcacctcacacccgaattcaaaaaaataaacccaatgggacaggtacctgcaattgttgatggaagattcaaactatttgaaagtcatgcgattttgaggtatcttgcatcggttttccctggagtagctgaccactggtatccttctgacttgttcaccagagccaaaattgagtcaatcttggattggcatcactcanatttgccgcgtggtgcaacaacccttgtatgn

SEQ ID NO: 86954 - DNA, 519 bp, Zea mays
  unsure (1)..(519): unsure at all n locations
atttagtagggggtanggctcgttcagctgactcagcattgctgtaccggtctcggaattcccggggtctcaatcttccaccgtgatgtcaagtcctcgaatatacttttggatggaaactacactgcaaaagtttcagattttggtgcgtcaaggttggttcctattgaccaaacccatgttgttacgaatattcaaggcacttttggctacttagatcctgagtactatcacactgggcaactaaatgagaaaagtgatgtgtatagctttggagtggtacttgtggagctactccttcgaaagaagccggtttttacaaatgagactgggacaaaagcaaaatctgtccaactatttcctttgggaaaagaagatgaaacctgttacagagatagtggctgctcaagttcttgaggaagcaacataagaagaaattaacattattgccttccttgccgagaagtgcttgagacttcgtcacgaataaagaccttcaatgaaactagtgggaattat

SEQ ID NO: 86955 - DNA, 523 bp, Zea mays
  unsure (1)..(523): unsure at all n locations
gatggaaggtnntnnnccctganatgtagtctattgcnatagctcgtaccggtccggaattcccggctcgacccacgcgtccgccgagctacttgttcttgcgagtgactgtctttggaaggtgatgaacaatcaagaggttgttttgtttcaaatatgccaggagatgttccccgagtatgtggtcagttggctgtctccagagcttttggagacaggaatctaaaatcactattgagatcagagcctgatataaaagtcgaagacatagatcacactgccgagctacttgttcttgcgagtgacggtctttggaaggtgatgaacaatcaagaggttgtcgatttggccaaaaggtacaaggatccctatgctgctgccaagcaattaaccgtcgaagcacaaaaaagagatagtaaggatgatatatcatgcatcgttgttcggttcaaggtgtaaatcggtctcgaaagattttcatcgagagcaaaaaccagtgaataggctgcctgacgatggtagt

SEQ ID NO: 86956 - DNA, 522 bp, Zea mays
  unsure (1)..(522): unsure at all n locations
gagtagggagtgtttgcttatgaagaagacttccgnanancctnccggtcggattccggctcgactcacgcgtccggaatctcgggacgagattctgtttaaggggggaaggtagggccgaaccggggcagcgcctgcaggaagagggttggacttacgggattcaactgccggtgtgggaacttgtactgcgcactccaccgctactccgacaagcacgactgcaagttcgactaccggactgctgccagggacgccattgccaaggctaatccggtggtgaaggcagacaagctcgacaagatctagggggggttccctacggttgggtatcaggaagattgtaaaccgcggtaactcgtcatgcggaactgctgccttgccccccgcgcctttctcttccatgtttgctgctacaatcttgttgttgggcattgcagtgcacggtgcacacttgtgtagcccggctcgagaatttcttgcttttgcatctggtcagttctaaaatgatttgcatgttgg

SEQ ID NO: 86957 - DNA, 516 bp, Zea mays
  unsure (1)..(516): unsure at all n locations
agtagcgggggctgtgtcagtacggggggatatagtatagctctaccggtccggaattcccgggtcgacccacgcgtccgctcaagttagaagaagcaccagtgcctgatcgatggcggcccaggctctcgtctccggccggcagctgctgggccgccccgtgcagtcggccgtctctaggtcgtcggcgaggaaggcgcccttcgtcgtcagggccagctccagccctccagccaagcaaggtgccgacaggcagctgtggttcgcgtccaagcagtccctctcctacctcgatggcacgctgcccggcgactatggcttcgacccgctgggcctctcggacccggagggcaccgggggcttcatcgagcccaagtggctggcctacggcgaggtgatcaacggccgctacgccatgcntggcgcggtgggcgccatcgncccggagatcttcggcaagatgggcatcatcccgccggagaccgngctgccgtggttcaagacgggcgtcttccc

SEQ ID NO: 86958 - DNA, 546 bp, Zea mays
aggagtacgcgtctgatgccagtcccgattgcactactatcaccgcctcaattcccgggtcgagccacgcgtacgcactcggcatcttatcccccgcctactccggtcctcttgccgctgttgctcacttctgagtccgtacgcgcgagctcccaagagctagccatggcgtccaccaccctctcctccgacttcaccctcctatcccgcccctccacctccccgtgccccggcgcctagctcccgaggtcctaccacgccgcgccccacattcgccggggccgtcgcgccgtctccgtcacgtgcaccgccaccgagtcccccaagatcctgaacctcgagaaccccatccccggcctaaccctcaaggaggcccgcaacctcctcgaccacctccagaaccggttcggagtcaccgccgtggacttcggcccggccgcccttgaaggggcccccgggtcgaacgcctggcccgcgtccaagaaggagccccccttcaaaaaaacggattcgacctgaatgacccagaagtggccccacaacccc

SEQ ID NO: 86959 - DNA, 547 bp, Zea mays
  unsure (1)..(547): unsure at all n locations
aggagtcaggtgtctgtccacgtcaccgatagtagttgtaagcgtcactcgaacttcaattccgggctacggcgtacgctcgagctctaccgctacgacccatgggagctcccatcaatggccgcgattggggagaaggaggggtagttctacgtgccgagggaccgcaagtaccgcaacggcgacaggcccaaccgggtgacggcgtcgggctactggaaggccacgggcgccgaccgcaccatcaaggcggacaacagccgncccatcgggctcaagaagacgctcgtcttctactccggcaaggcgcccaagggcgtncgcagcagctggatcatgaacgagtaccgcctcccgcccgacgacaccgaccgttaccacaagaccgaaatatccttttgccgcgtgtacaagcgcaccggtatcgacaacggcggccacgggcatccggcttcgacgcgttcgacgccttcccgcggcgtcgtaacggcgccgaagcaggacaccaagcaccaagcgtcgtcgtcgtcaacgccaacgccgcccc

SEQ ID NO: 86960 - DNA, 561 bp, Zea mays
  unsure (1)..(561): unsure at all n locations
gtgtgagtgggggggtagaaggtttgtttagagaggggaagagattgttaccctctcctgaattcccgggtcgacccacgcgtccgattgaggtcctttgaggaagttgactcactataagaatccaatgaaatcaacgaggatgaggagcttgcggagcaaatccagagtgaatttgctatgaagatatcaaattatgcaaacattgttctcttagcgttgaaggtatacgctacaataaaaagtggatcaattgctatagctgcctcaacactggattcactgcttgatctcatggctggtggtatcctttggttcacacatctgtcaatgaagagcatcaatgtctacaagtaccccattggcaaactgagggtacagcctgtaggcattatcatcttcgctgctgtcatggccactttaggctttcaaagtatntattcaagctgttgaaaaagctggtaagtgaatgaggcttcagaataactgaaccaaagtgcaaataatggtggctatattccaatcatgatctttgcaacaataatgaaaataggtctgggg

SEQ ID NO: 86961 - DNA, 551 bp, Zea mays
  unsure (1)..(551): unsure at all n locations
gatgaggcagtgggtctgatgccctaggtcctgactgtacctgcacaaccccccnnnnntnggntacgggntcgggcgacgcgtccgacgggggtcccgagcagaggctcaagtatctgcccaagctcatcagtggggagcatagggggggactggcaatgagtgaacccaactctggctctgatgttgtcagtatgaagtgcaaagctgagaaagtggacggcggctatgtccttaatgggaataagatgtggtgcaccaatgggccgtctgctcagacgctggttgtttatgcaaaaacagatctaactgcgggatcaaaaggaataactgcattcataatcgagaaagggatgcccgggttcagtactgctcagaaattggacaaacttggcatgataggaagcgacacatgtgaacttgtttttgagaactgctttgtgccacgcgagaatgtcctcggtgaaaaaggcaaaggtgtttatgtcatgatgtcagggcttgatctggaaaggcttgtattagctgcgggccctattggccttatgcaa

SEQ ID NO: 86962 - DNA, 560 bp, Zea mays
  unsure (1)..(560): unsure at all n locations
ngggggagaaagggggtnaaggagcttcagttcacgaaggagggaggaatagtagtgctcaccggacttgaattcccgggtcgacccacgcgtccggctagccgccggtctattgctctgatagcttgctccaggacgtacgtacgtacgtagggcgatgcatcgatcgctagctagctgactgaccatggcgtccatgtgctctgccgccatcaccgcccgttccttcacggccgggcccgctcgtgcagtggtcaccacgaggtcctttaccgcgcgtgcctctctacgcaaggccactgccaccgccgctacggccgatgccgacagcgtactgcttgccggtcgcggcgccatggcccaggaggagctgctgggcagcaacgacggctgactagtcttcgagcccagccagttcaccgtcatggccggcgacacgatgaccttcaagaacaacgccggcttcacgcacaacgtggtgatctaacgagactaggtgcccatcggtgtcgacgcctacaaaactggtaggagaacacttgaacgggcatgtctagact

SEQ ID NO: 86963 - DNA, 545 bp, Zea mays
  unsure (1)..(545): unsure at all n locations
ggggcaagcgttngttaagaaaagtatagtatagtatcgctcaccggtccggaattcccgggtcgacccacgcgtccggcctcagtcacccattcacatctctaccctagtgcgcttcccttataaaacctagctcggcaggctccagacgcagtcggccgccgcagaccgggagtagccgacgcgccgtcactgaatcctcagatcacggctagccgtaatcacgacactctgctgactcccggcgagcagtgtaacattttccttcagccatgggcaaggagaagactcacatcaacattgtggtcattggacatgtcgactctggcaagtcgaccaccactggccacctgatctacaagctcggcggtattgacaagcgtgtgattgagaggttcgagaaagaggccgcggagatgaacaagcggtcattcaagtatgcctgggtgcttgacaagctcaaggcccaacgtgagagaggtatcacaattgatattgctctggtgaaagtcgagaccaccaagtactactgcactgtcattgat

SEQ ID NO: 86964 - DNA, 530 bp, Zea mays
  unsure (1)..(530): unsure at all n locations
aggggaagagggggaggtgaggtcgtgtcgnnaatagatgactcattgcaatngctcgtaccggtccggaattcccgggtcgacccacgcgtccgaaaatctttgtcaaagaagaaacatatagtgaaaaacatcaaagaacgtgactcggatcagagaaactacatacatgctagcgaggttattttatccatcctgctggacaaggacaggagcagctcgacaatcctctcgctgaaaaaggctggtcctgagatcactgaacttttaacgcaatgctctatcggcattgctggaactggactggctattctcctgtcagttatgtgcaagatgtctaatggcatgaggactccttttgcttctgcccgactgcttagcaccagcgtcggattcggactcttctggctatcctgggcagtcaatggattgcgtgacaccatcgncagcattttcagaagccgaaagtgcatgaatatcgaggatgacgaggtcgcaatgaaaatagaaaaagtgtgaacgagaatctt

SEQ ID NO: 86965 - DNA, 501 bp, Zea mays
  unsure (1)..(501): unsure at all n locations
ggaggtaagggcttngtcactcgaaaaagtatgctatacctggtccggaattcccgggtcgacccacgcgtccgtcggagcgcacacacacacaaccagatctcccccaaatccacccgtcggcacctccggttcgagatgcagatctttgtgaaaaccctgactggcaagactatcaccctcgaggtggagtcgtctgacaccattgacaacgttaaggccaagatccaggacaaggagggcatccccccagaccagcagcggctcatctttgctggcaaacagcttgaggacgggcgcacgcttgctgactacaacatccagaaggagagcaccctccaccttgtgctccgtctcaggggaggcatgcagatctttgtgaaaaccctgaccggcaagactatcaccctcgaggtggagtcctctgacaccattgacaacgtcaaggccaagatccaggacaaggagggcatnctttcagaccagcagcggctcatcttt

SEQ ID NO: 86966 - DNA, 559 bp, Zea mays
  unsure (1)..(559): unsure at all n locations
gggttntgggggtggggggtaagagcgttcgtatggagggaagaggaattgtatacctctccggaattcccgggtcgacccacgcgtccgcgatcgcgagcgcaagcacgtacgttgtcggaagctcaagttagaagaagcaccagtgcctgagcgatggcggcccaggctctcctctccggccggcagctgctgggccgccccgtgcagtcggccgtctctaggtcgtcggcgaggaaggcgcccttcgtcgtcagggccagctccagccctccagccaagcaaggtgccgacaggcagctgtggttcgcgtccaagcagtccctctcctacctcgatggcacgctgcccggcgactatggcttcgacccgctgggcctctcggacccggaaggcaccgggggcttcatcgagcccaagtggctggcctatgggcaggtgatcaacggccggtacgccatgctgggcgcggtgggcgccatcggccccgagaacttcggccaggatggcctcatccccccggagaccgcgctgccgtgggtcaagacgggcgtcatcc

SEQ ID NO: 86967 - DNA, 547 bp, Zea mays
agacttaaggtctagagttcgactcgtatagtgactcagtactcacctcaacttccggtaccacccacgcgtgcgcgatcgcgagcgcaagcacgtacgttgtcgttagctttagttagaacaagcaccagtgcctgaggcgatgggcgcccaggctctcctgtccggcctgcaactgctgtgccgccccgtgcagtcggccgtctctaggtcgtcagctaggaaggcgcccttcgtcgtcagggccagctccagccctccagccaagcaaggtgccgacaggcagctgtggttcgcgtccaagcagtccctctcctacctcgatggcacactgcccggcgactatggcttcgacccgctgggcctctctgacccggacggcacctatggcttcatctagcccatgtgactggcctatggctaggtgatcaacggtcgctacaccatgctgtactctgtgggcgccatattccccaagatctatctcaagataggcatcatccccccggagaccttgctgccctggttcaatacaggcgtcatcccg

SEQ ID NO: 86968 - DNA, 543 bp, Zea mays
  unsure (1)..(543): unsure at all n locations
gagtgcctggtctggtcatagcagaggggagaaatgtactacttcctcnnnntnngnncccggntcggcccacgcgnncggncgagcanagaagaagatgacgattaccattgaacagccccagctcgatgcggtggcggaggggaaagtccccggcggaggtgaccccgcggagctggtgctcgacgccggcttcgtcgtgccggacgccaacgccttcggcaataccttcagggactacgacgcggagtcggagcggaagcagacggtagaggagttctaccgggtgaaccacgtgaggcagacgcacgagttcgtggcgcggatgcgggcggagtacgggcggctggacaagacggagatgggcatctgggagtgcatcgagctgctgaacgagttcatcgacgacagcgacccggacctggacatgccccagatcgagcacctgctgcagaccgccgaggccatccgcaaggactaccccgacgaggactggctccaccttaccggactcatccacgacctgggcaaggtgctgctgcn

SEQ ID NO: 86969 - DNA, 497 bp, Zea mays
  unsure (1)..(497): unsure at all n locations
nggaatggatctgtatggggggggggggtgagtctactcggtccggaattcccgggtcgacccacgcgtccgaccaaggagagtacgtggaggagcagccatggcttcatcggtggccgccgcggcgagcacattcctgggcacccgcctggcggacccggcgccacagaacgggcgcatcgtggcccggttcgggttcgggttgggcggcaaggcgaagcctgctccgaagaaggtggcgaagacatcgacctcctctgaccggccgctgtggttccccggcgccgtggcgcccgactacctggacggctcgctggtcggcgactacgggttcgacccgttcggtctcgggaagcccgtggagtacctgcagttcgagttggactcgctggaccagaacctggccaagaatgaggccggcggcatcatcggcacccggttcgagtccttcgaagtcaagtccaccccgttgcagccctacagcgaggtgttcggcc

SEQ ID NO: 86970 - DNA, 518 bp, Zea mays
  unsure (1)..(518): unsure at all n locations
ggggggagagagggttngttagcggcttgggaagggaatagaactcggtccggaattcccgggtcgacccacgcgttcgcggacgcctgggcacgcttaccgacgccacaacttgggccccccccatgggaccttggggtcgggccttccttggtccttcaacaaccggccgtcgcggggcttccccagaaatgggcagcagcgggcgtcgtcgtcgttggtctccttctnctnctcttnctccttcctcgtcggcaagacgctgctgaggcaggccgaggcagcccggccgtcgttcgccgtgcgcgccgcggcggattccgacaggccgatctggttccccggcagcacccctccgccgtggctcgacggcagccttcccggcgacttcggctttgatccctggggcctcggatctgacccggagagcctgcggtggaacgtgcaggcngagctggtgcactgnncgtgggcgatgctcggcgcggcgggtatcttcatccccgagttcctgacca

SEQ ID NO: 86971 - DNA, 502 bp, Zea mays
  unsure (1)..(502): unsure at all n locations
ngggaaggatctgtatggagggagagaggagaagagctctactcggtccggaattcccgggtcgacccacgcgtccggcttgcaagaagattactttttgacaaaagtgctaatgatgaacatgagaaaagtagtctggccaagctcaaacaacaatgtgggggacaggttacttcaaaaatggaaggcatgggtactgaccttactgtcgctagagatcatcaaactaagtttgaggagtttgtagctggacatccagagttgaatcctgggatagacttagctgttactgttttgacaacgggattctggccaagctacaaaacttttgacataaaccttcctgccgagatggtgaaatgtgtagaggttttcaaggagttctatcaaacaagaacaaagcacaggaagctgacatggatttattccttgggaacctgcaacatcaatgctaagtttgatgctaaacctattgaacttatttnntacacatatcaggctt

SEQ ID NO: 86972 - DNA, 556 bp, Zea mays
ggagagtaggtagaggggaagcgagatgtggtcatagccagggaaagaattgttaccctctccggaattcccgggtcgacccacgcgtccgcaaatgcacggtttaataacgaaccgtgttaacttaccataacaacaactcaattcctatcgagttccgtcctatcgaattcctatagtaaaattcctataggatagaacgtacacagggtgtacacattatatatgaatgaaacatattcattaacttaagcatactcctttttttatttaatgagttgatattaattaaatatcttttttttttagatttttgcaaaggtttcatttacgcctaatccatatcgagtagaccctgtcgttgtgagaattcttaattcatgagttgtaaggagggacttatgtcaccacaaacagaaactaaagcaagtgttggatttaaagctggtggtaaagattataaattggcttactacaccccggaatacgaaacccaagatactggtatcttggcagcatttcgagttacttcttaagttcggggttccgcttgaaa

SEQ ID NO: 86973 - DNA, 558 bp, Zea mays
  unsure (1)..(558): unsure at all n locations
agatataagttggggggaagcaaggtcngtttattgatgggagagggaatagtagtgctcaccggtcctgaattcccgggtcgacccacgcgtccgtgcgtgttttgtgaattctgggaccgaagcgaatgagttggcaatgttgatggcccgggtgtgtagtgggaatctcagtatggttgcgctcagaaatgcatatcatggcggaagtgccggtacgattggattgactggcatgcagacgtggaaatacccaattcctcagggtgaaatacatcatgtcatgaaccctgatccttatcgggggactttcgggtctgatgctgcagcttatgctaaggaagtcgaagaacacataacttatggaagttcaggaagggttgcaggcttcattgcacaaacattccagggtgtgggaagtgctgctaaactaactcctgaatacctaaagttagctaatgacattgtgcgcacggctggtggcgttggaattgctgatgaagtccaaagtggttttggccggcctgccagccattcctggggattccagacacaagg

SEQ ID NO: 86974 - DNA, 511 bp, Zea mays
  unsure (1)..(511): unsure at all n locations
nggtaagaattatgtcctcatgcaccgagtagtatcgctatanctggtccggaattcccgggtcgacccacgcgtccgcccacgcgtccgcaaagctaaaacatgaaaatcttgttgagatgttgggttattgtgtggatgggaattatcgtatacttgcttatgaatttgcaaccatgggttcgcttcatgatgttttacatggaagaaaaggcgttcaaggcgcgcagcctggccctgtgcttgactggatgcagagggtcaaaattgttattgaggctgcaaaaggtatagaatatctgcatgaaaaggttcagccttcaatcatccatcgggacatcagatcaagcaatgtactgctgtttgaggatttcaaggcaaaaattgcagacttcaatcttttgaaccaagcaccagatatggcagctcgtctccattcaactcgtgtattgggaacttttggatatcatgcacctgagtatgctatgactggccaactgacacaaaaaan

SEQ ID NO: 86975 - DNA, 506 bp, Zea mays
gggggaagatgccttcctcaggaattgtgaaatagctacactcggtccgaattcccgggtcgacgcaagccttccggccagggcaaggcaatcaagtccggtttcgtgaaggaacacctgtgcttccaaacggtggggggcttcacggccgccacgctgaaccacggcatgcacccgccggtctttcccaagcccaactggcgcaagctcatggacgagatggcggtcgtggccacggaggagtcccgctcggtcatcgtcaaggagccgcgcttcgtcgagtacttcagatcggctacaccggagaccgagtacgggaggatgaacatcagcagccggacagccaagaggaggcccggcggcggcatcacgaccctgcgcgccatcccctggatcatctcgtggactcagaccaggttccaccttcccgtgtggctgggagtcggcgccgccttcaagttcgccatcgacaatgacgttaagaactttcaggtgctcaaaaaaat

SEQ ID NO: 86976 - DNA, 539 bp, Zea mays
  unsure (1)..(539): unsure at all n locations
tggaagcaagatgcgtcaccgcggaaggagtattgtaccctgccctgaattcccggtcgacccacgcgtccggagacgagttaaagatttctttaagcattttgatcgacatgcactggatctgttagagaagatgttgagtttagatccatcacagaggatatcagcaaaagatgcacttgatgcggaatatttctggactgatcccttaccatgcgatccaaaaagcttgcccaagtatgaggcatcgcatgaattccagactaagaaaaagcgtcagcaacagaggcaagcagaggaagctgcaaagcgtcaaaaacttaaccatcctncaccacattctcgtttgccttcactccagcagcctggccaagcacatnctcaaatgaggccttgccagggtatgcccaatgtgccctctggggcaagccggccaagccaatactattccaaaacccgaagaccaagaaggccttacccgtattcctaaggtgggaatcaagggggaggcttcaatccgaaccgtggaaggcaaggtg

SEQ ID NO: 86977 - DNA, 541 bp, Zea mays
ggggatatgtttgttatggggggaagagggaaatgtatacctctccggaattcccgggtcgacccacgcgtccgatcttactgcaaagttccctttgatgctcttttcattctaaggaacacaaacaatcctaagggtggaagtacttaaatcgggactcgggctaggaacaggtgatgttctacctaggttgattaaggattgaatgcgtatgtaggcgtgctgatcgaggaccctttaactggtcacatgcctcgtcatgggtaagccttgcctcatgcagactaaggccagaataagataacacggaatgggcgtggagcggtggcgagagtagcgtgtaccctccgtggcaagaggctggacggtgatgtatctgtgctctcaagtcgcgtgaacctaattgggtctaaaaaccccaattggcggttggccatttccaagggtaaagggttacttttgtcggtgaattggaaatcctaacttaatttaatcgatccgaatggcctaactttggcggtattaaaaactgtgtaacttc

SEQ ID NO: 86978 - DNA, 549 bp, Zea mays
gtggaagagctgcgttatagaggggaggggaggagaaggatatgctgcaccggtccggaattcccgggtcgacccacgcgtccgggttgccggaataagaaccccagaggaccttgacgccatgaagaacctcatgccacaggcctacgacgagcttgttgagaactgcaacatcctggagagccactacaaggaaatgcaggatatcgagttcactgtccaggaaaacaggctgtggatgttgcagtgcaggacagggaaacgtacgggcaaaagtgccgtgaagatcgccgtggacatggttaacgagggccttgttgagccccgctcagcgatcaagatggtagagccaggccacctggaccagcttctccatcctcagtttgagaacccgtcggcgtacaaggatcaagtcattgccactggtctgccagcctcacctggggctgctgtgggccaggttgtgttcactgctgaggatgctgaagcatggcattcccaggggaaagctgctattctggtaagggcagagacagcccctgaggacgt

SEQ ID NO: 86979 - DNA, 551 bp, Zea mays
  unsure (1)..(551): unsure at all n locations
ggttaatgtagggtagtcatgtctgtctagctacgcacgatatgtangctcaccggnctgaattaccggtcgactcacgcgtccgggttggcggaataagaaccccaaagtacctttacgccatgaagaacctcatgccacaggcctgggacgagcttgttgagaactgcaacatcctgcagagccactacaaggaaatgcatgatatcgagttcactgtccaggaaaacaagctgtggatgttgcagtgcacgacagggaaacgtactggcaaaaatgccgcgaagatcgccgtggacatggttaacgagtgccttgtagagccccgctcagcgatcaagatgctagagccaggccacctcgaccagcttctccatgctcagattgagaacccttcagcgtacaaggttcaagtcattgccactggactgccagactcaccttggactgctgtgggccaaggctgactctactgctataagaaactcaaaacatggcattgccaatggaaaaactggtattctggtaagagccagagaccaaccctgaaa

SEQ ID NO: 86980 - DNA, 497 bp, Zea mays
gagaaggatctgtatgaggggaggggagtgagctcgaccggtccggaattcccgggtcgacccacgcgtccgggcagcaagcaggagcagacaggaggcgccgagagcccagcgtcggagatctccggcgccatggagacgctggccagcgccatgcggcgcgagaaccgccggtccaaggccccgccctcctcctctgcttcctccgccctcgcctcgggcagggtccctctcgtcatggccttcctctcctgcctcgcctggctctacgtcgccggccgtttgtggcaggacgcgcagacccgggcgatcctgtccggcctcctcgagaagagctctaccagcgtcccgaaggtgctctcggtggaggacaagcttaggaaccttgggtgcaaggcgattggaaggaaaattgttgaggcggagatggacctgaccaaggccaagagcgaggggtacctgtgggggaacaggactgcagctgtggactccgacag

SEQ ID NO: 86981 - DNA, 515 bp, Zea mays
cccacaagtcgtctggaattcccgggtcgacccacgcgtccgagctacaagagggacgatgtcgtcccgtctgagacccccttggctgcgtacacgactggtgaggtgaaggccgacgagatcatgcgggctctgaagcaagtcttcaagacttccagcggcatgtgaatttgatgcttcttttacattttgtccttttcttcactgctatataaaataagttgtgaacagtaccgcgggtgtgtatatatatattgcagtgacaaataaaacaggacactgctaactatactggtgaatatacgactgtcaagattgtatgctaagtactccatttctcaatgtatcaatgtatatagaagttaacgtgcttgaggagataaaaaaaaaaaaataaagactgaaaaaaagggggggccgttttaaaggatccaagtttccttccccttccttccaagttctaacctttctattggggcaccttaattcaattcactggcccgccgtttaccacc

SEQ ID NO: 86982 - DNA, 554 bp, Zea mays
  unsure (1)..(554): unsure at all n locations
ggggtgggagggtnnnctgcagatctggtaagaagaggggggggaatgtatccctcnccggaattcccgggtcgacccacgcgtccgattcctgtaagctcctgcgcctcctcctcgttgcttcactccaaatccaccgaggccaccgcgcgggcggggtggaacccctagcgccgtcgccggctcggtcgccctctcgcgcgcgcgtgcgtcgctccgacagcagctgcagccatggcgcagccgctcgtcgtgaagaaggacgacgacctcgacgaggaagagtactactcgccattcctgggcatagagaagggcgccgtgctgcaggaggcccgcgtcttccacgaccctcagcttgacgctcgtcgatgctgccaggttatcaccaaactcctgtacctgctcaaccagggtgacacctttaccaaggttgaagctacagaagtcttctttgcaacaaccaagctggtccagtctaaagatgtgggccttaggaagatggtgtacctcatgatcaaggaactctcaccttccgccgatgaggtcatcat

SEQ ID NO: 86983 - DNA, 559 bp, Zea mays
  unsure (1)..(559): unsure at all n locations
tgaagataggagagtntggacgagacgtctgacttcaacgcaaaaaagttatgctgcgactcactcaanttcaggtaccagctccgcctacgattccggaaaagacctacgcctactcctcgttttttctctacaaatacaccgaggccaccaccggggccgagatgaacccctagcgccgccgccatctcaatcatcctctcgcgcgcgcgtgcgtcaatccgacagcagctacagtcatggcgcagccgctcgtcgtgaataaggacgactacctcgacgaggaagagtactactcgccattcctgagcatagataagggcgccgtgctgcaagaggcccgcgtcttccacgaccctcagcttgacactcgtcgatgctgccatgttatcaccaaactcctgtacctgctcaaccagggtgccacctttaccaaggttgaggctacagaggtcttctttgcaacaaccaagctgttccaatctaaagatgtggcccttaggaggatggtgtacctcaggatcaaggaacctttaccttccgccaataggtaatcata

SEQ ID NO: 86984 - DNA, 503 bp, Zea mays
gagaagccctctgttaaggggggggagggggagtggttcgtcccggtccggaattcccgggtcgacccacgcgtccgcaccctccagcgcctccaccttcctcgccgcctcactccctctgaggtcgcagatgcgtccggttagacgaagccgcccgcacccatggcctccggtgagctcgcctgcacctacgccgccctcatcctcagcgacgacggcatcgccatcaccgccgagaagatcgccaccatcgtgaaggcggccaacatcaaggtcgagtcctactggccggcgctcttcgctaagctcctggagaagcgcagcgttgaggatctaatcctctccgtgggatctggtggtggcgctgctccagttgctgcttccgccccagctgggggtgctgcagctgctgctgcccctgctgcagaggagaagaaagaagagcccaaggaggagtctgatgacgacatgggcttcagcctgttcgactgagaccctcgcta

SEQ ID NO: 86985 - DNA, 549 bp, Zea mays
  unsure (1)..(549): unsure at all n locations
gaggagtaggtagggtaaaggtccgttatgacgggggtatatagtagtgctcaccggtccggaattcccgggtcgacccacgcgtccgcaaagctggcaattgttcttgtgtgtggcggttggtctctgggctggcctagtcattggtttggttactgagtactacacaagcaatgcctacagccctgtacaagatgttgctgattcctgcagaactggagcagctactaatgtcatttttgggcttgctttgggttacaaatcagtcattatcccaatttttgctattgcgtttagtatcttcctcagcttcagccttgctgccatgtatggtgttgctgtggctgctcttggaatgctgagcaccattgccacaggtcttgctattgatgcatatggccctatcagtgataatgctggaggaatagctgaaatggctgggatgagccatangattcgtgagagaactgatgctctagatgctgcaggaaataccacggctgcaattggngagggttttgccattggctctgcagccttggtttccct

SEQ ID NO: 86986 - DNA, 539 bp, Zea mays
  unsure (1)..(539): unsure at all n locations
nggaggagctttgttaagaatagatgtattgtataactccccggtcttgaattcccgggtcgacccacgcgtccgatttctttttttttgacacgaggaactcatcatgaatccactaattgctgctgcttccgttagggctgctggattggccgtagggcttgcttctattgggcccggagttggtcaaggtactgctgcaggacaagctgtagaaggtattgcgagacagccagaagcagaaggtaaaataagaggtactttattgcttagtctagcttttatggaagctttaacaatttatggactggttgtggcactagcgcttttatttgcgaacccttttgtttaatcctaaaaaagaaaatgagtcctttagattagatacttttttcttttttaggacaatggcatttgcttatgtaattctaagatatcaatacttaacttaactcctattaataaattaattcttttttataataattccgaaaatttggatttatccggacagacaataccctatgaaccccaaggag

SEQ ID NO: 86987 - DNA, 508 bp, Zea mays
  unsure (1)..(508): unsure at all n locations
ngggaatgcgtgnnattattggagggacgggggaaacgagataaactcggtccggaattcccgggtcgacccacgcgtccggagcattttactttcagtcaatgacctactggcatgctgcggttntatgtgcggcgatgggtgtgatggaggctatcctatagaggcatggcgctactttgttcaaaatggtgttgttacggatgagtgtgatccatacttcgacccggtcggttgcaagcatcctggatgcgaacctgcttatcctacaccaaagtgtgaaaagaaatgcaaggagcagaaccaagtttggcaggaaaagaagcatttcagcattgatgcgtacagaataaattcagatccacatgacataatggcagaggtctacaaaaatggtcctgtagaagttgctttcacagtttacgaggatttcgcacactacaaatctggagtgtacaagcacatcaccggtggcattatgggtggccatgccgtcaagttgattgan

SEQ ID NO: 86988 - DNA, 560 bp, Zea mays
  unsure (1)..(560): unsure at all n locations
gggtgagggaggggaggagtggtctgtaagcggggcaggaggggaaggtatgcttcactcggtccggaattcccgggtcgacccacgcgtccgataaaaccagtgcaagcagaagcagcgcaatggcgagcagcaccatggccctctccggcacaggcttcgccggcaaggcagtgaacgtgccgtcgtctctcttcggcgaggcccgcgtgacgatgcgcaagacggcggcgaaggcaaagccggcggcgagctccggcagcccgtggtacggccccgaccgcgtgctctacctgngcccgctgtccggcgcgcccncgagctacctgacgggcgagttcccgggcgactacggctgngataccgcggggctgtcggcggacccggagacgttcgccaagaaccgggagctggaagtcatccactcccgctgggccatgctgggcgcgttgggctgcgtgttcccggagctgctcggccgcaacggcgtcaagttcggcnaagccctgtggttcaaggccgggttccagatcttcaaccaggtgggcctgactacctgc

SEQ ID NO: 86989 - DNA, 504 bp, Zea mays
  unsure (1)..(504): unsure at all n locations
gagaagggctctgtaaagggggaggaaaggtgatgctctaccggtccggaattcccgggtcgacccacgcgtccggaggtatcggccgactacgagggcaaaggagacacgacgaagctgggcgagctcggcgccaagctcacggggctggcccctgccgacgccatcctcgtggcgagctccatcctgcacatgctcaacctcgccaacctggccgaggaggtgcagatcgcgcaccgncgccgcaacagcaaactcaagaaaggtggcttcgccgacgaaggctccgccaccaccgagtccgacatcgaggagacgctcaagcgcctcgtgtccgaggtcggcaagtcccccgaggaggtgttcgaggcgctcaagaaccagaccgtcgacctcgtcttcaccgcgcattccacgcagntccgccgncgttcgctccttgcagaaaacgcgaggatccggaattgtctgacccagctgaatgcccaggacatcactgacgac

SEQ ID NO: 86990 - DNA, 504 bp, Zea mays
  unsure (1)..(504): unsure at all n locations
tgagaaggtctctgataaggcggatgggaggaaaggaaaagtcgttccgtattgccgggtcgacccacgcgtccgggaaaaatatccccaaaccctagctcccgatctcgatggcgaaccctcgcgtcttcgtcgacatgaccgtcggcggcgccccggcgggccggatcgtgatggagctgtacgccaacgaggtgcccaagaccgcggagaacttccgcgcgctgtgcacgggcgagaagggcgtgggcaagtccgggaagccgctccactacaagggctccaccttccaccgcgtcatccccgagttcatgtgccagggcggcgacttcacccgcggcaacggcaccggcggcgagtccatctacggcgagaagttccccgacgagaagttcgtgcgcaagcacaccgnccccggtgtgctctccatggccaacgccgggcccaacaccaacggctcccagttcttcatctgcaccgtcgcgaccccttggctcgacngac

SEQ ID NO: 86991 - DNA, 502 bp, Zea mays
  unsure (1)..(502): unsure at all n locations
gggggaggttctgttaggggaggaggggatgagtatctctcggttcggaattcccgggtcgacccacgcgtccggcgagcgcacgcacgtaagcacgttgtcggaagctcaagttagaagaagcaccagtgcctgatcgatggcggcccaggctctcctctccggccggcagctgctgggccgccccgtgcagtcggccgtctctaggtcgtcggcgaggaaggcgcccttcgtcgtcagggccagctccagccctccagccaagcaaggtgccgacaggcagctgtggttcgcgtccaagcagtccctctcctacctcgatggcacgctgcccggcgactatggcttcgacccgctgggcctctcggacccggagggcaccggnggcttcatcgagcccaagtggctggcctacggcgaggtgatcaacggccgctacgccatgcctggccccggtgggcgccatcgnccccgagatctttcgcaggatgggcattatccc

SEQ ID NO: 86992 - DNA, 502 bp, Zea mays
  unsure (1)..(502): unsure at all n locations
aaggagggttnnnntcatgatggggggagagagagtatgctcgttccgatttcccgcgtcgaccgacgcgtccgtggaaatgctcaatcgaacccacctgtccatatgactggtagtggtaggcctaatgctccgccataccgtcttccagttcttccaatggacgatgatgaaatctcatccaaagttcttctagcagttgaactttgctaattgaagctgcaaaaggaacttcgatagatcagcattacgaggcacagcagtgaaagccccatgtttaccttttccacggcttactcctcttggcgaacctccttcaccaagagctgcacatgtagcaactgctgttgaaccatggtggtcattcagggtggaattggtccagctggcttatccgctgaggaccttcatgtcttgatcttaaacaacaacgaccgcgatggcatagagtggtggttcaaggtcctggtccatggtatggatatgtgatggccttggttgg

SEQ ID NO: 86993 - DNA, 506 bp, Zea mays
gtggggtagggggagggtctgagtcagctcctacgctacatctattactgtaccggtccggattccagctcgcgccctcagacaagcgcccttcacgatacgcactcaccataggaaaagggcaaaagccaaaaggcatgagcgccgcgacgacgatggcagcctcgctccaagccgcggccaccctgatgcagccggccaagatcggcggccgggcgccctttgcctcgctgccgtcccgcccgtcgtcgcaactcgcctgcagggcgttcggcgtcgacgccggcgccgacaggatcacgtgctccctgcacgacgtcgccagcaggtgcgtcgacgccgcgaagctagccggcttcgcgctcgccacctcggcgctcctagtctcgggcgcgagcgcggagggcacgcccaagaggctgacctacgacgagatccagagcataacgtacatggaggtgaaaggcacgggcacggcgaaccattgcccgaccaacgacggcggc

SEQ ID NO: 86994 - DNA, 509 bp, Zea mays
  unsure (1)..(509): unsure at all n locations
gttggtgggggggaggtttngctacgaccttatgcacttcgtannacagtaccggttcggaattcccggctcgacccacgcgtccgcacacgttcacggtagcgagagcttatcgtcgtcggcggcgaagatggtgtcgctgaagctgcagaagcggctcgccgcgagcgtcctcaagtgtgggaaaggcaaagtctggcttgaccccaatgaagtcagcgagatctccatggctaactcccgccagaacatccggaagttggttaaggatgggtttatcatcaggaagcctcagaaggttcactctaggtcccgtgcaagaagggcacatgaggccaagcagaagggaaggcactctggatatggcaagcgcaggggtaccagggaggctaggctccccaccaagattctgtggatgaggaggatgcgtgttctgaggcgcctgctccgcaagtaccgtgaggccaagaagatcgacaagcacatgtatcatgacatgtacatgaagg

SEQ ID NO: 86995 - DNA, 508 bp, Zea mays
  unsure (1)..(508): unsure at all n locations
tagggttaaatagtgctgtgatactgntnacggggatgcatgccatancagtaccggttcggaataacccggctcgacccacgcgtccgcgcacgttcacggtagcgagagcttattttcgtcggcggcgaagatcgtgtgggctcgagctgcataagcggctcgccgcgagcgtcctcaagtgtgggaaaggcaaagtctggcttgaccccaatgaagtcagcgagatctccatggctaactccagccagaacatccggaagttgattaaggatgggtttatcatcacgaagcctcagaaggttcactctaggtcccgtgcaagaagggcacatgaggccaatcacaagggaaggcactctggatatggcaagcgcaagggtaccagggacgctaggcttcccaccaagattctgtggatgaggaggatgcgtgaactgaggcccactgttcgcaagtaccgtaaggccaatacgatcaactaggatatgtattatgacatgttcat

SEQ ID NO: 86996 - DNA, 505 bp, Zea mays
  unsure (1)..(505): unsure at all n locations
ggggtaaaagctgtttacgggagttggggaaagagtagtctctaccggtccggaattcccgggtcgacccacgcgtccgcgtgttccttgtcaagttctcataaactcataatccacaagtgcatcatatatacatagcttgctttgtgtgccgtcggaatcgcgaaatggcaagctctagttctgcacaaggcgcacactagacagaccctgagaaggtgaagctcgtcaccgtcctgagcatcgacggtggcggcgtcagagggatcatgcccgccaccatcctcgccttactagaagagaagctgcaagaactggatggaccggacgctaggatcgacgactactttgacgtcgttgccggcacgagcaccggtggtctcctggcggcgatgctcacagccactggcctgcatgaccatgacngacgtcgacagccgctcttcgacgccaaggatctggcgcagttctacatcgaccactcgcccaaaatcttgccgcagaa

SEQ ID NO: 86997 - DNA, 503 bp, Zea mays
  unsure (1)..(503): unsure at all n locations
gagttnaaaaagctgtctacgtatgtgggaaaaagtagtctctaccggttcggaattcccgggtcgacccacgcgtccgattgcatattatgtagtaggcactgaatgtaaattccttggcaattggcattaactgggttcttcattatgccattgtacttctgcttttctatttaaacattggtgcattgcatattatgtagtaggcactgaaagtaaattccttggcaattggcattaactgttttcttcattatgccattgtacttctgcttttctatttaactgtttcatgcagtgaggttggcaccagaagaggagtcacacaagcttactgggtttgtgcataacgctgtcacttgcatcgggatggaaacaaacataccggtaatgtaaatttatatttacattgcagctgttgaagcatgtacattgcanagatactactattaggtttagatcacaattaatagatttgtttgtgacataccgtgttttttgct

SEQ ID NO: 86998 - DNA, 508 bp, Zea mays
  unsure (1)..(508): unsure at all n locations
ggttggggnggaggtntnttgcggtctgttaaagaaagggaaagtactgctatacccgtccggaattcccgggtcgacccacgcgtccgccaaagaattccctcccctagccgccgtcgccgctcgtctccctgagaggtgccgggaccgaggaactggccgagttctaggtagagaatcggttttgcttgtctcagcacggggtctgctgcgtctggtggtggtgaaggggagaaattcgtgagatctgttccggatcaggcgtgcgagctcgggaatcaggggtttcacacatagcttcgtcgatttgaatttgatgtactaatggagtctaagggtggcaaaaagtctagcagtagtcgttccatgatgtatgaagctccccttggctacagcattgaggacgttcgacctgccggaggcgtgaagaagttccagtctgctgcttactccaactgcgcgaagaagccatcctgatatcccttttggcttcctcattctagtagtt

SEQ ID NO: 86999 - DNA, 611 bp, Zea mays
  unsure (1)..(611): unsure at all n locations
agcaatagaggctgtgtaccgagccccgacaatatcagtatagctcgtaccggttccggaattcccgggttcgacccacgccgtccgcagtcccctctgcntgtcagcaagaagggaaagaagcctacgcgcttatagncttgtcgagccagtgggccaccgccgctcgtcgtcttagcctnncctcaagtcctnnccttcgcgggccttcccggcttccacggcccccgccacgccggaccctacacnncggcagtccctttcagtggtgagccacnncggcccgtcgcccggcgcaccggcgccggggctccaattctgcgccgtccccatgtnnccatgtccnntacctccaacnnccgccctaacgactcnntgacgtcnnctatccggttcaagcccccattcaagggagtcnccaatcgtgtcactcgcgaggatgaatnnccgtcgcttacccatgacccggacatnngatcacnnctacgctncgacacncgacccgtcgtnncatcgtgggccgctcggctttccgcgggggcttggtcctggcgccgtaccgagccctctccaaggaccccccgccgtgagcattcgccatcgtgggagca

SEQ ID NO: 87000 - DNA, 513 bp, Zea mays
  unsure (1)..(513): unsure at all n locations
ngggtgggggaggnntaggagtcgctacgcggacggggggtaatgtaagactcgtaccggtccggaattcccgggtcgacccacgcgtccggaccgacgcgcccgttttctcctgaaaacagaaggctccggcctccggcatccgccaaaaaggggaaaaaaaggagagagaacacacacacacaaaccccaatcccctgcggcggcgatggacccgtcatcggcgggctccggcggcaactccctcccgtccgtcggccccgacgggcagaagcggcgcgtgtgctacttctacgacccggatgtgggcaactactactacgggcagggccatccgatgaagccgcaccgcatccggatgacgcactcgctgctggcgcgctacggcctcctcaaccagatgcaagtgtaccgccccaacccggcccgcgaccgcgacctctgccgcttccacgccgacgactacatcaacttcctgcgctccgtcacgccggaaacgcagcaggaccagac

SEQ ID NO: 87001 - DNA, 510 bp, Zea mays
  unsure (1)..(510): unsure at all n locations
gggggttggaggtnaaagagctgggtcagagaggggggatgacggtatacgctgtccggaattcccgggtcgacccacgcgtccggtgagaggctccaactcgcaactccgtagctgagcacgccgaaaagctcatcagtgctcatcccctgctggcccgttctcagtcccagtgagaggctccatgaagatcctggtcgcggtgaagcgggtggtggactacgctgtcaaagtgcgcgtgaggccggacgggaggggcgtggagacggccaacgtgaagatgtccatgaatccattctgcgagatcgccgttgaggaggcgctgcggctccgggaggccggcgtcgccgctgaggtcgtcgccgccaccgtaggccctgcccagtccgccgacacgctccgcaccgcactcgccatgggcgccgatcgcgccgtccacgtgctccacgacccggaccctgcgcggccccttcttcctctcgccggtgccaagatccttcgcgccgtcgc

SEQ ID NO: 87002 - DNA, 500 bp, Zea mays
  unsure (1)..(500): unsure at all n locations
tagtnttttaagatgttcaatcatcacaagccaaatatcagtactactcgttcggaattcccgggtcgacccacgcgtccgctgagctgagctgagctcaccaccaccacacacgggagatagctatagctagcatagcaaggcggccagtcagcgacttagcagcagctagctagccatgctgccgtccttcgtgtcgccgacagcgagcgccgcggccttggtgacgccttacgcgcggccgataccaggcagctacgggccaccggtgctgggcccgctacgggaccggctcgactacttctggttccagagccaggacgagttcttccggaagcgcgcggcggcacaccgcagcaccgtgttccgcaccaacatcccgcccaacttccccttcttcgtgggcgtggacccgcgcgtggtcgtcatcgtggacgccgtcgacttcaccgcgctcttagacccgaacctcgtggacaagcgcgaaaatcctaatcggc

SEQ ID NO: 87003 - DNA, 510 bp, Zea mays
  unsure (1)..(510): unsure at all n locations
gtgaggtggaggtntaagtgtgtgtacgaggcgggggttaatggtatactcgtaccggtccggaattcccgggtcgacccacgcgtccgggagcctgaaagatcgagaagccaaacccacaggcagagaatagcacggtttcgtcgatccgatccgcgacgatccacagccatggcgatggcttacaagatggcgacggaggggatggacgtgaaggaggagtgccagcgctggttcatggagatgaagtggaagaaggtgcaccgcttcgtggtgtacaggatcgacgactgccgctacgccgtcttcgacttcgacttcgtcagcgtcgacaactgccagaagagcaagatcttcttcatcgcctggtcaccggcggcgtcgaggatacgggccaagatcctgtacgcgacgtcgaagcagggcctgcggcggctgctggacggngtgcactacgaggtgcaggccaccgacccctccgagatgggcttcgacgtcatcagaggccgc

SEQ ID NO: 87004 - DNA, 497 bp, Zea mays
  unsure (1)..(497): unsure at all n locations
gtggggggaggnnaaaggttgtaaagaggggggggtacggtaactctcgggtcggattcccgggtcgcccacgcgtccggggcaaaagccaaaggcattaccgcgcgcgacgatggcagcctcgctccaagccgcggccaccctgatgcagccggccaagatcggcggccgggcgccctttgcctcgctgccgtcccgcccgtcgtcgcaactcgcctgcagggcgttcggcgtcgacgccggcgccgccaggatcacgtgctccctgcaggacgtagccagcaggtgcgtcgacgccgcgaagctcgccggcttcgcgctcgccacctcggcgctcctcgtctcgggcgcgagcgcggagggcacgcccaagaggctgacctacgacgagatccagagcaaaacgtacatggaggtgaatggcacgggcacggcgaaccagtgcccgaccatcgacggatgcgtggagtccttcccgtacaatgccggcatgtacc

SEQ ID NO: 87005 - DNA, 518 bp, Zea mays
  unsure (1)..(518): unsure at all n locations
ngagtagaggtttgagttttaaaggctgtatacgataggggggaaaagtaatgctctaccggttcggaattcccgggtcgacccacgcgtccggcatatggttttgagaaaccatctgctattcagcagagaggaattgttcccttctgcaaggggcttgatgtcattcagcaagcacaatctggtacaggaaagacagcaaccttctgttctgggatcttgcagcagcttgactatggtctggttgaatgccaggccctggttcttgctcccacccgtgagcttgcacagcaaattgagaaagttatgcgcgcacttggtgactaccttggtgttaaagtccatgcatgcgttggaggaacatctgttcgtgaggaccaaaggattctcgccagtggtgtgcatgttgctgttggtacacctggtcgtgtgtttgacatgctgcgtagacagtccctacgccctgataacatcaagatgtttgttcttgatgaagctgatgaaatgctttctcgggg

SEQ ID NO: 87006 - DNA, 504 bp, Zea mays
  unsure (1)..(504): unsure at all n locations
gtgtggagtagtntnaaaggcttgttcagacgagggagtattgtatacctcgtccggaattcccgggtcgacccacgcgtccggattgaggacaagaagacagagctggagcccaaggtcgtggaggcctacgaagcatgtnctgctgaggtcaaggctctgttcaaggataagaagccagtcaaggtcagcaagaagaactcggctgcagtcaccaagttcctcgatgagctggctaagattgacttccctggagccaaggtggtgagcgaggcggtggccaagtccggcacctcgcccctgcttccggcgatcaccttcatcttggacaaggtcgcaccgtttatccccaaggaggagcccaaggcggagccggcggcggaggccacctnccgggaagtcgccgtggaggagaagaaagaggaggccgagccagctgcagcgaccgaggcggcaccggcgccggcagagacaccgtccgaggcggcggtggtagaggagaag

SEQ ID NO: 87007 - DNA, 518 bp, Zea mays
  unsure (1)..(518): unsure at all n locations
gttgtgnggaggagttnnntagagagtgngatacagacgtgttggggagtacagtaatactgctttggaattcccggctcgacccacgcgtccgattagcctatgctgtggaccaaggttttcaaaggggaggtgaaccaccgtaagtgtttaaggcgcctaatggctaatttcaggaaaaaaatcaagggtgatgtgctgaagtatatgtggccttgtgcatgggcatgtacagatcatatgtatgatacactaatggagaaaattgcagcatctagtcctaaagcaattcactttctaaacaataaccacaagctaaaatggagtagatctaaattctccaaagaatgcaaggttgattatgtgaacaataacatctcagaatgcttcaacaattggattaaagattacaaagatctcccagtcgctgatctaatggataagattagggagaaaattatggagaagatttatacaaggcangagatagccaatcgaatggaaaggcgtatcctaca

SEQ ID NO: 87008 - DNA, 506 bp, Zea mays
  unsure (1)..(506): unsure at all n locations
aggttgtggtagtttntagagttgttaacgaacggaaagtactgctatacccgtccggaattcccgggtcgacccacgcgtccgagccaccatcgaccttcaagtctcgctacgtagcagtgcaataaaaaaagcagccgcaatggcgagcagcaccatggccctctcctccacggccttcgccggcaaggccgtgaacgtgccgtcgtcgtccgccttcggcgaggcccgcgtgacgatgcgcaagacggcggggaaggccaagccggcggcggcgtccgggagcccgtggtacggccccgaccgcgtgctgtacctgggcccactgtccggcgagccgccgagctacctgacgggcgagttcccgggcgactacggctgggacaccgcggggctgtcggcggacccggagacgttcgccaagaaccgggagctggaggtgatccactcccgctgggccatgctgggcgcgctcggctgcgtcttcccggagctgctcgcccgga

SEQ ID NO: 87009 - DNA, 513 bp, Zea mays
  unsure (1)..(513): unsure at all n locations
ggtggggagtagggtntagagagtttctatagaagggggggtaacagtaatgcttcgtaccggtccggaattcccgggtcgacccacgcgtccgccctgtcgttgtgagaattcttaattcatgagttgtagggagggacttatgtcaccacaaacagaaactaaagcaagtgttggatttaaagctggtgttaaggattataaattgacttactacaccccggagtacgaaaccaaggatactgatatcttggcagcattccgagtaactcctcagctcggggttccgcctgaagaagcaggagctgcagtagctgcggaatcttctactggtacatggacaactgtttggactgatggacttaccagtcttgatcgttacaaaggacgatgctatcacatcgagcccgttcctggggacccagatcaatatatctgttatgtagcttatccattagacctatttgaagagggttctgttactaacatgtttacttncattgtgggtaacgt

SEQ ID NO: 87010 - DNA, 502 bp, Zea mays
agggttgagagttcgtcaagaacagccgagttatagctagtgctcgtaccggtccggaattcccgggtcgacccacgcgtccgcaaatatcctcgctcgcagtcgcagctactacgccgccgcacctccgcccgccacctgcttcccggctccagcgatgtcgggggcgatcgggggcgccgaggtccacggcttccggggcgcagcggcgcagctcccgcggtcccgggtgctcgggaggccgatccgggtggcgccacccgccgcggcccggccgggcggtgcgtccgcgggtagcatacgcgccgtctccgcgcctgcgaagaaggacgcttctgaagttaagcgaagcaaggttgagataatcaaggaaaagagcaacttcctccggtaccctttgaacgaggagttggtctcagaggccccaaatatcaacgagagtgctgttcagctgatcaagtttcatggaagctaccagcaaactgaccgagatgtccgtggg

SEQ ID NO: 87011 - DNA, 506 bp, Zea mays
  unsure (1)..(506): unsure at all n locations
ggtggtgggagtnnncgagagttattccgaggggggaaaagtaaacttcgtaccggtccggaattcccgggtcgacccacgcgtccgggcggcggcggtttccagggccatctgcgtccagaaaccgggctccaaatgcagcagggacagggaagcgacctccttcgcccgccgaacggtcgcggcgccgaggcccccgcgcgccaaagccgccggcgtcatccgctccgactccggcgcgggacggggccagcagtgctcgccgctgagggccgtcgttgacgccgcgtcgatacagacgaccaaaaagagcaaatggcgcctcagtctcccgcgcgcaagctacaacggttcagggtccggtgctgcggcggctgagccgtctaccgtgggagacaccttggaacgggaggagggcggcggcacagaggcaggcgcttcggctgatgagtcatccaaccggaagcagccgnccnctgttgaccccaagattgagaaggagctca
